United States Patent Application Publication US 2017/0114356 A1 - sequence listing, part 45

SEQ ID NO: 60569 - DNA, 3139 bp, Zea Mays
cttgatggtcaaaatactcaagctgcaggtggaagaaaacgccgaaggccgagttgcggtctatgatcttctgaggaaatggatggacaactgctaccgtggcgtaccggtcggtgggataggttcaggaagcatagggaggagctacagagggtacttccagcagttccagatattccccgtgaccaacgaagagaaacctgtcctagcaaaccagttctcggcatttgtttcgcgcccgaacgggaacaagtactccacggtgctgtcggcgccaaccgctgaccttctcaagggagtcggcaaagccggcattggatcttgggactggaggttgaaggaggacaggtgcacttaccacgccctgttcccaaggtcatggacggtatatgatggtgaacctgaccctgagatcaagatcacctgccgtcagatatcgcccttcataccgcacaactacagagagagcagcttcccggctgcagttttcacattcacggtgaacaactctgggagctcacctgcagatgtgacgctgctcttcacctgggcaggagcacgacggcgtccgtggcgttctcctccatcacaggtgggtctggtctgatcttccgtggggcacggtgctaccgtccctgccgctggctcgtgtatacgccggtgcttgagactgacgctgacagacgccaatgcaggacggcgggagggcagcctccggtgacgttcgcgatcgcgtcccgagagaccgacggtgtccgcgtcagcgtctgcccgtccttcacgatcgcgtcgggcggcccgtccagctccggcgagcccacggcggcggccatgtgggacgagatcaagaagcacggcgcgttcgggcacgccggcgccggcaacggcaacgcggcgagggcggcggcttccaaggccgggtcgtccgtgggcgcggcagtggcggcgtcgacggccgtgccggcgggggcgacgcgggtggtgtccttctcgctggcctgggcgtgccccgaagttaagttccccgccgggagcacgtactacaggaggtacaccaggttctacggcactgatgccgacgcagctgcagagcacctagctcatgatgcccttcttgagcatatgaactgggagtcccagatcgaggagtggcagaagccaatcttgcatgaccaaaggctgcctgaatggtatccagttgctctgttcaacgagctctactacctcaacgctggaggcaccatctggacagacgggcaggctccgaagagggccggcttcgcttcgtcgttgacggccaccgagccgttctccatcgacacgctcctcccagtcgcagcgggcggcagcgcggtggacggcgtcgtgcgcgcggtggcgtcggcgacggagcggtcccactccgcggcggcgttcggcgcggcgctactgcgcggcggcgaggacaacgtggggcagttcctgtacctggaaggcatggagtacaacatgtacaacacctacgacgtgcacttctacgcctccttcgcgctgctgtccctcttcccccggctggagctgagcctgcagcgggacttcgcgcgcgccgtgctcctccacgaccctcgcccccggcgcaccctggacggcaggaccgtggcgcgcaaggtgctgggcgccgtgccgcacgacgtcgggctcaacgacccatgggtggagctgaacgcgtacatgctgcacgacgcggcgcggtggaaggacctcaaccccaagttcgtcctgcaggtgtaccgcgacgccgtggccacgggcgacgccgcgttcgcggaggcggtgtggcccgccgtgtacgtggccatggcgtacatggaccagttcgaccgcgacggcgacgggatggtggagaacgagggggtgcccgaccagacgtacgacatgtggtcggtctccggtgtcagcgcctacacgggcggggtctgggtggcggcgctgcaggcggcggcgggcatggcgcgcgtcgtcggggaccgccccgccgaggcctacttccgcgcgaggcgggacagggcggcgcgcgtgtacgatgccgagctctggaccggcgcctacttccgctacgacaacagcggcggcggcggcgccagcgagtccatcatggcggaccaactggcggggcagtggtacgcgcgggcgtgcgggctggagccggtggtggaggacgccaaggcacggagcgcgctggcgaccgtgctggactacaacgtcatgcgggtcaagggcggcgccatcggggccgtgaacgggatgcgccccgacggcgccgtcgacgcatcgtccacgcagtccaaggaggtgtggcccggggtcacgtacgccgttgcggcggccatggtccacgagggcatgacggaggccgcgttccggacggccaagggcgcccacgacgccgcctggggcaacgacggcttcgggtacgcgttccagacgcccgaggcttggacggaggacggcggctatcggtcgctgcactacatgcggccgctcggcatctgggcgatgcagtgggcgctgtcgccacccgagctccacagggatctcaggacacccgaggcgcgatcctcggaggagccgtcgccggcggacgctgccctcgggcaggcgcagttcgacaaggtggcgagcatgttgaggctgccggaggagcagcagcccaagggatacctttgggccatctacaacctcgttaggcaaattgtgctccccgcatgaggattctcttgctccaagcagccgcactcatgaatgcaaattgagcccgttattatatatcttttttttattaaaacctaaagcgttacggagccttcaccgcatttccgggctagggcgcctgtcgcgtggtggcgcgtgtccgaatccgagacgcgaaaacttcatctacaaagccgtccccgcgtctaggcggtaattcagttccgtctatttaggttgtaaaatttcagatgaaaaatgagaatcggtttttttagaaacccaacctaaataaacccataattttggttcgagacccaaatagtaaaaagactaatattttttgttaaaatatatactgtcggagagggaattcttcgcccgagtgccggagtacacccgccattaa

SEQ ID NO: 60570 - DNA, 3341 bp, Zea Mays
gtccactgcttttgcttctgggtctttcgttcgtagatataaaacggagggaacgcagagccgggcgcctgtctggattcattctgcgagagatctgctggggcattgattcgtcatcaggctcagctctgatcagcttcaaccatcatggggagtcaagagtcggagcaggccaaggtgctcccgggaaccgactgcccgcagcagccaccggcgagcaggacctggcagaggaggttcgacgatgaaggcaagaacgtcgccatgttcagcatgaccatgagcgacctggtggaacttgttgcggtctatgatcttctgaggaaatggatggacaactgctaccgtggcgtaccggtcggtgggataggttcaggaagcatagggaggagctacagagggtacttccagcagttccagatattccccgtgaccaacgaagagaaacctgtcctagcaaaccagttctcggcatttgtttcgcgcccgaacgggaacaagtactccacggtgctgtcggcgccaaccgctgaccttctcaagggagtcggcaaagccggcattggatcttgggactggaggttgaaggaggacaggtgcacttaccacgccctgttcccaaggtcatggacggtatatgatggtgaacctgaccctgagatcaagatcacctgccgtcagatatcgcccttcataccgcacaactacagagagagcagcttcccggctgcagttttcacattcacggtgaacaactctgggagctcacctgcagatgtgacgctgctcttcacctgggcaaattcagttggcgggaagtcggaactgacaggaaaccacgtgaattccaaaatgacgggagcacgacggcgtccgtggcgttctcctccatcacaggacggcgggagggcagcctccggtgacgttcgcgatcgcgtcccgagagaccgacggtgtccgcgtcagcgtctgcccgtccttcacgatcgcgtcgggcggcccgtccagctccggcgagcccacggcggcggccatgtgggacgagatcaagaagcacggcgcgttcgggcacgccggcgccggcaacggcaacgcggcgagggcggcggcttccaaggccgggtcgtccgtgggcgcggcagtggcggcgtcgacggccgtgccggcgggggcgacgcgggtggtgtccttctcgctggcctgggcgtgccccgaagttaagttccccgccgggagcacgtactacaggaggtacaccaggttctacggcactgatgccgacgcagctgcagagcacctagctcatgatgcccttcttgagcatatgaactgggagtcccagatcgaggagtggcagaagccaatcttgcatgaccaaaggctgcctgaatggtatccagttgctctgttcaacgagctctactacctcaacgctggaggcaccatctggacagacgggcaggctccgaagagggccggcttcgcttcgtcgttgacggccaccgagccgttctccatcgacacgctcctcccagtcgcagcgggcggcagcgcggtggacggcgtcgtgcgcgcggtggcgtcggcgacggagcggtcccactccgcggcggcgttcggcgcggcgctactgcgcggcggcgaggacaacgtggggcagttcctgtacctggaaggcatggagtacaacatgtacaacacctacgacgtgcacttctacgcctccttcgcgctgctgtccctcttcccccggctggagctgagcctgcagcgggacttcgcgcgcgccgtgctcctccacgaccctcgcccccggcgcaccctggacggcaggaccgtggcgcgcaaggtgctgggcgccgtgccgcacgacgtcgggctcaacgacccatgggtggagctgaacgcgtacatgctgcacgacgcggcgcggtggaaggacctcaaccccaagttcgtcctgcaggtgtaccgcgacgccgtggccacgggcgacgccgcgttcgcggaggcggtgtggcccgccgtgtacgtggccatggcgtacatggaccagttcgaccgcgacggcgacgggatggtggagaacgagggggtgcccgaccagacgtacgacatgtggtcggtctccggtgtcagcgcctacacgggcggggtctgggtggcggcgctgcaggcggcggcgggcatggcgcgcgtcgtcggggaccgccccgccgaggcctacttccgcgcgaggcgggacagggcggcgcgcgtgtacgatgccgagctctggaccggcgcctacttccgctacgacaacagcggcggcggcggcgccagcgagtccatcatggcggaccaactggcggggcagtggtacgcgcgggcgtgcgggctggagccggtggtggaggacgccaaggcacggagcgcgctggcgaccgtgctggactacaacgtcatgcgggtcaagggcggcgccatcggggccgtgaacgggatgcgccccgacggcgccgtcgacgcatcgtccacgcagtccaaggaggtgtggcccggggtcacgtacgccgttgcggcggccatggtccacgagggcatgacggaggccgcgttccggacggccaagggcgcccacgacgccgcctggggcaacgacggcttcgggtacgcgttccagacgcccgaggcttggacggaggacggcggctatcggtcgctgcactacatgcggccgctcggcatctgggcgatgcagtgggcgctgtcgccacccgagctccacagggatctcaggacacccgaggcgcgatcctcggaggagccgtcgccggcggacgctgccctcgggcaggcgcagttcgacaaggtggcgagcatgttgaggctgccggaggagcagcagcccaagggatacctttgggccatctacaacctcgttaggcaaattgtgctccccgcatgaggattctcttgctccaagcagccgcactcatgaatgcaaattgagcccgttattatatatcttttttttattaaaacctaaagcgttacggagccttcaccgcatttccgggctagggcgcctgtcgcgtggtggcgcgtgtccgaatccgagacgcgaaaacttcatctacaaagccgtccccgcgtctaggcggtaattcagttccgtctatttaggttgtaaaatttcagatgaaaaatgagaatcggtttttttagaaacccaacctaaataaacccataattttggttcgagacccaaatagtaaaaagactaatattttttgttaaaatatatactgtcggagagggaattcttcgcccgagtgccggagtacacccgccattaa

SEQ ID NO: 60571 - DNA, 3358 bp, Zea Mays
gtccactgcttttgcttctgggtctttcgttcgtagatataaaacggagggaacgcagagccgggcgcctgtctggattcattctgcgagagatctgctggggcattgattcgtcatcaggctcagctctgatcagcttcaaccatcatggggagtcaagagtcggagcaggccaaggtgctcccgggaaccgactgcccgcagcagccaccggcgagcaggacctggcagaggaggttcgacgatgaaggcaagaacgtcgccatgttcagcatgaccatgagcgacctggtggaacttgttgcggtctatgatcttctgaggaaatggatggacaactgctaccgtggcgtaccggtcggtgggataggttcaggaagcatagggaggagctacagagggtacttccagcagttccagatattccccgtgaccaacgaagagaaacctgtcctagcaaaccagttctcggcatttgtttcgcgcccgaacgggaacaagtactccacggtgctgtcggcgccaaccgctgaccttctcaagggagtcggcaaagccggcattggatcttgggactggaggttgaaggaggacaggtgcacttaccacgccctgttcccaaggtcatggacggtatatgatggtgaacctgaccctgagatcaagatcacctgccgtcagatatcgcccttcataccgcacaactacagagagagcagcttcccggctgcagttttcacattcacggtgaacaactctgggagctcacctgcagatgtgacgctgctcttcacctgggcaaattcagttggcgggaagtcggaactgacaggaaaccacgtgaattccaaaatgacggagcacgacggcgtccgtggcgttctcctccatcacaggacggcgggagggcagcctccggtgacgttcgcgatcgcgtcccgagagaccgacggtgtccgcgtcagcgtctgcccgtccttcacgatcgcgtcgggcggcccgtccagctccggcgagcccacggcggcggccatgtgggacgagatcaagaagcacggcgcgttcgggcacgccggcgccggcaacggcaacgcggcgagggcggcggcttccaaggccgggtcgtccgtgggcgcggcagtggcggcgtcgacggccgtgccggcgggggcgacgcgggtggtgtccttctcgctggcctgggcgtgccccgaagttaagttccccgccgggagcacgtactacaggaggtacaccaggttctacggcactgatgccgacgcagctgcagagcacctagctcatgatgcccttcttgagcatatgaactgggagtcccagatcgaggagtggcagaagccaatcttgcatgaccaaaggctgcctgaatggtatccagttgctctgttcaacgagctctactacctcaacgctggaggcaccatctggacagtagaagagatgctcacagacgggcaggctccgaagagggccggcttcgcttcgtcgttgacggccaccgagccgttctccatcgacacgctcctcccagtcgcagcgggcggcagcgcggtggacggcgtcgtgcgcgcggtggcgtcggcgacggagcggtcccactccgcggcggcgttcggcgcggcgctactgcgcggcggcgaggacaacgtggggcagttcctgtacctggaaggcatggagtacaacatgtacaacacctacgacgtgcacttctacgcctccttcgcgctgctgtccctcttcccccggctggagctgagcctgcagcgggacttcgcgcgcgccgtgctcctccacgaccctcgcccccggcgcaccctggacggcaggaccgtggcgcgcaaggtgctgggcgccgtgccgcacgacgtcgggctcaacgacccatgggtggagctgaacgcgtacatgctgcacgacgcggcgcggtggaaggacctcaaccccaagttcgtcctgcaggtgtaccgcgacgccgtggccacgggcgacgccgcgttcgcggaggcggtgtggcccgccgtgtacgtggccatggcgtacatggaccagttcgaccgcgacggcgacgggatggtggagaacgagggggtgcccgaccagacgtacgacatgtggtcggtctccggtgtcagcgcctacacgggcggggtctgggtggcggcgctgcaggcggcggcgggcatggcgcgcgtcgtcggggaccgccccgccgaggcctacttccgcgcgaggcgggacagggcggcgcgcgtgtacgatgccgagctctggaccggcgcctacttccgctacgacaacagcggcggcggcggcgccagcgagtccatcatggcggaccaactggcggggcagtggtacgcgcgggcgtgcgggctggagccggtggtggaggacgccaaggcacggagcgcgctggcgaccgtgctggactacaacgtcatgcgggtcaagggcggcgccatcggggccgtgaacgggatgcgccccgacggcgccgtcgacgcatcgtccacgcagtccaaggaggtgtggcccggggtcacgtacgccgttgcggcggccatggtccacgagggcatgacggaggccgcgttccggacggccaagggcgcccacgacgccgcctggggcaacgacggcttcgggtacgcgttccagacgcccgaggcttggacggaggacggcggctatcggtcgctgcactacatgcggccgctcggcatctgggcgatgcagtgggcgctgtcgccacccgagctccacagggatctcaggacacccgaggcgcgatcctcggaggagccgtcgccggcggacgctgccctcgggcaggcgcagttcgacaaggtggcgagcatgttgaggctgccggaggagcagcagcccaagggatacctttgggccatctacaacctcgttaggcaaattgtgctccccgcatgaggattctcttgctccaagcagccgcactcatgaatgcaaattgagcccgttattatatatcttttttttattaaaacctaaagcgttacggagccttcaccgcatttccgggctagggcgcctgtcgcgtggtggcgcgtgtccgaatccgagacgcgaaaacttcatctacaaagccgtccccgcgtctaggcggtaattcagttccgtctatttaggttgtaaaatttcagatgaaaaatgagaatcggtttttttagaaacccaacctaaataaacccataattttggttcgagacccaaatagtaaaaagactaatattttttgttaaaatatatactgtcggagagggaattcttcgcccgagtgccggagtacacccgccattaa

SEQ ID NO: 60572 - DNA, 3397 bp, Zea Mays
gtccactgcttttgcttctgggtctttcgttcgtagatataaaacggagggaacgcagagccgggcgcctgtctggattcattctgcgagagatctgctggggcattgattcgtcatcaggctcagctctgatcagcttcaaccatcatggggagtcaagagtcggagcaggccaaggtgctcccgggaaccgactgcccgcagcagccaccggcgagcaggacctggcagaggaggttcgacgatgaaggcaagaacgtcgccatgttcagcatgaccatgagcgacctggtggaacttatgcccttgatggtcaaaatactcaagctgcaggtggaagaaaacgccgaaggccgagttgcggtctatgatcttctgaggaaatggatggacaactgctaccgtggcgtaccggtcggtgggataggttcaggaagcatagggaggagctacagagggtacttccagcagttccagatattccccgtgaccaacgaagagaaacctgtcctagcaaaccagttctcggcatttgtttcgcgcccgaacgggaacaagtactccacggtgctgtcggcgccaaccgctgaccttctcaagggagtcggcaaagccggcattggatcttgggactggaggttgaaggaggacaggtgcacttaccacgccctgttcccaaggtcatggacggtatatgatggtgaacctgaccctgagatcaagatcacctgccgtcagatatcgcccttcataccgcacaactacagagagagcagcttcccggctgcagttttcacattcacggtgaacaactctgggagctcacctgcagatgtgacgctgctcttcacctgggcaaattcagttggcgggaagtcggaactgacaggaaaccacgtgaattccaaaatgacggagcacgacggcgtccgtggcgttctcctccatcacaggacggcgggagggcagcctccggtgacgttcgcgatcgcgtcccgagagaccgacggtgtccgcgtcagcgtctgcccgtccttcacgatcgcgtcgggcggcccgtccagctccggcgagcccacggcggcggccatgtgggacgagatcaagaagcacggcgcgttcgggcacgccggcgccggcaacggcaacgcggcgagggcggcggcttccaaggccgggtcgtccgtgggcgcggcagtggcggcgtcgacggccgtgccggcgggggcgacgcgggtggtgtccttctcgctggcctgggcgtgccccgaagttaagttccccgccgggagcacgtactacaggaggtacaccaggttctacggcactgatgccgacgcagctgcagagcacctagctcatgatgcccttcttgagcatatgaactgggagtcccagatcgaggagtggcagaagccaatcttgcatgaccaaaggctgcctgaatggtatccagttgctctgttcaacgagctctactacctcaacgctggaggcaccatctggacagacgggcaggctccgaagagggccggcttcgcttcgtcgttgacggccaccgagccgttctccatcgacacgctcctcccagtcgcagcgggcggcagcgcggtggacggcgtcgtgcgcgcggtggcgtcggcgacggagcggtcccactccgcggcggcgttcggcgcggcgctactgcgcggcggcgaggacaacgtggggcagttcctgtacctggaaggcatggagtacaacatgtacaacacctacgacgtgcacttctacgcctccttcgcgctgctgtccctcttcccccggctggagctgagcctgcagcgggacttcgcgcgcgccgtgctcctccacgaccctcgcccccggcgcaccctggacggcaggaccgtggcgcgcaaggtgctgggcgccgtgccgcacgacgtcgggctcaacgacccatgggtggagctgaacgcgtacatgctgcacgacgcggcgcggtggaaggacctcaaccccaagttcgtcctgcaggtgtaccgcgacgccgtggccacgggcgacgccgcgttcgcggaggcggtgtggcccgccgtgtacgtggccatggcgtacatggaccagttcgaccgcgacggcgacgggatggtggagaacgagggggtgcccgaccagacgtacgacatgtggtcggtctccggtgtcagcgcctacacgggcggggtctgggtggcggcgctgcaggcggcggcgggcatggcgcgcgtcgtcggggaccgccccgccgaggcctacttccgcgcgaggcgggacagggcggcgcgcgtgtacgatgccgagctctggaccggcgcctacttccgctacgacaacagcggcggcggcggcgccagcgagtccatcatggcggaccaactggcggggcagtggtacgcgcgggcgtgcgggctggagccggtggtggaggacgccaaggcacggagcgcgctggcgaccgtgctggactacaacgtcatgcgggtcaagggcggcgccatcggggccgtgaacgggatgcgccccgacggcgccgtcgacgcatcgtccacgcagtccaaggaggtgtggcccggggtcacgtacgccgttgcggcggccatggtccacgagggcatgacggaggccgcgttccggacggccaagggcgcccacgacgccgcctggggcaacgacggcttcgggtacgcgttccagacgcccgaggcttggacggaggacggcggctatcggtcgctgcactacatgcggccgctcggcatctgggcgatgcagtgggcgctgtcgccacccgagctccacagggatctcaggacacccgaggcgcgatcctcggaggagccgtcgccggcggacgctgccctcgggcaggcgcagttcgacaaggtggcgagcatgttgaggctgccggaggagcagcagcccaagggatacctttgggccatctacaacctcgttaggcaaattgtgctccccgcatgaggattctcttgctccaagcagccgcactcatgaatgcaaattgagcccgttattatatatcttttttttattaaaacctaaagcgttacggagccttcaccgcatttccgggctagggcgcctgtcgcgtggtggcgcgtgtccgaatccgagacgcgaaaacttcatctacaaagccgtccccgcgtctaggcggtaattcagttccgtctatttaggttgtaaaatttcagatgaaaaatgagaatcggtttttttagaaacccaacctaaataaacccataattttggttcgagacccaaatagtaaaaagactaatattttttgttaaaatatatactgtcggagagggaattcttcgcccgagtgccggagtacacccgccattaa

SEQ ID NO: 60573 - DNA, 3568 bp, Zea Mays
gtccactgcttttgcttctgggtctttcgttcgtagatataaaacggagggaacgcagagccgggcgcctgtctggattcattctgcgagagatctgctggggcattgattcgtcatcaggctcaggtatcacttcctcgctctgtcttttgttgttcaaggttcaagcatgatgatcccctcctctccatgactccgtcgccatgggcacgtatagctctgatcagcttcaaccatcatggggagtcaagagtcggagcaggccaaggtgctcccgggaaccgactgcccgcagcagccaccggcgagcaggacctggcagaggaggttcgacgatgaaggcaagaacgtcgccatgttcagcatgaccatgagcgacctggtggaacttgttgcggtctatgatcttctgaggaaatggatggacaactgctaccgtggcgtaccggtcggtgggataggttcaggaagcatagggaggagctacagagggtacttccagcagttccagatattccccgtgaccaacgaagagaaacctgtcctagcaaaccagttctcggcatttgtttcgcgcccgaacgggaacaagtactccacggtgctgtcggcgccaaccgctgaccttctcaagggagtcggcaaagccggcattggatcttgggactggaggttgaaggaggacaggtgcacttaccacgccctgttcccaaggtcatggacggtatatgatggtgaacctgaccctgagatcaagatcacctgccgtcagatatcgcccttcataccgcacaactacagagagagcagcttcccggctgcagttttcacattcacggtacagtccgttttgtctgttcttttcaaggcaggtgaacaactctgggagctcacctgcagatgtgacgctgctcttcacctgggcaaattcagttggcgggaagtcggaactgacaggaaaccacgtgaattccaaaatgacggagcacgacggcgtccgtggcgttctcctccatcacaggtgggtctggtctgatcttccgtggggcacggtgctaccgtccctgccgctggctcgtgtatacgccggtgcttgagactgacgctgacagacgccaatgcaggacggcgggagggcagcctccggtgacgttcgcgatcgcgtcccgagagaccgacggtgtccgcgtcagcgtctgcccgtccttcacgatcgcgtcgggcggcccgtccagctccggcgagcccacggcggcggccatgtgggacgagatcaagaagcacggcgcgttcgggcacgccggcgccggcaacggcaacgcggcgagggcggcggcttccaaggccgggtcgtccgtgggcgcggcagtggcggcgtcgacggccgtgccggcgggggcgacgcgggtggtgtccttctcgctggcctgggcgtgccccgaagttaagttccccgccgggagcacgtactacaggaggtacaccaggttctacggcactgatgccgacgcagctgcagagcacctagctcatgatgcccttcttgagcatatgaactgggagtcccagatcgaggagtggcagaagccaatcttgcatgaccaaaggctgcctgaatggtatccagttgctctgttcaacgagctctactacctcaacgctggaggcaccatctggacagacgggcaggctccgaagagggccggcttcgcttcgtcgttgacggccaccgagccgttctccatcgacacgctcctcccagtcgcagcgggcggcagcgcggtggacggcgtcgtgcgcgcggtggcgtcggcgacggagcggtcccactccgcggcggcgttcggcgcggcgctactgcgcggcggcgaggacaacgtggggcagttcctgtacctggaaggcatggagtacaacatgtacaacacctacgacgtgcacttctacgcctccttcgcgctgctgtccctcttcccccggctggagctgagcctgcagcgggacttcgcgcgcgccgtgctcctccacgaccctcgcccccggcgcaccctggacggcaggaccgtggcgcgcaaggtgctgggcgccgtgccgcacgacgtcgggctcaacgacccatgggtggagctgaacgcgtacatgctgcacgacgcggcgcggtggaaggacctcaaccccaagttcgtcctgcaggtgtaccgcgacgccgtggccacgggcgacgccgcgttcgcggaggcggtgtggcccgccgtgtacgtggccatggcgtacatggaccagttcgaccgcgacggcgacgggatggtggagaacgagggggtgcccgaccagacgtacgacatgtggtcggtctccggtgtcagcgcctacacgggcggggtctgggtggcggcgctgcaggcggcggcgggcatggcgcgcgtcgtcggggaccgccccgccgaggcctacttccgcgcgaggcgggacagggcggcgcgcgtgtacgatgccgagctctggaccggcgcctacttccgctacgacaacagcggcggcggcggcgccagcgagtccatcatggcggaccaactggcggggcagtggtacgcgcgggcgtgcgggctggagccggtggtggaggacgccaaggcacggagcgcgctggcgaccgtgctggactacaacgtcatgcgggtcaagggcggcgccatcggggccgtgaacgggatgcgccccgacggcgccgtcgacgcatcgtccacgcagtccaaggaggtgtggcccggggtcacgtacgccgttgcggcggccatggtccacgagggcatgacggaggccgcgttccggacggccaagggcgcccacgacgccgcctggggcaacgacggcttcgggtacgcgttccagacgcccgaggcttggacggaggacggcggctatcggtcgctgcactacatgcggccgctcggcatctgggcgatgcagtgggcgctgtcgccacccgagctccacagggatctcaggacacccgaggcgcgatcctcggaggagccgtcgccggcggacgctgccctcgggcaggcgcagttcgacaaggtggcgagcatgttgaggctgccggaggagcagcagcccaagggatacctttgggccatctacaacctcgttaggcaaattgtgctccccgcatgaggattctcttgctccaagcagccgcactcatgaatgcaaattgagcccgttattatatatcttttttttattaaaacctaaagcgttacggagccttcaccgcatttccgggctagggcgcctgtcgcgtggtggcgcgtgtccgaatccgagacgcgaaaacttcatctacaaagccgtccccgcgtctaggcggtaattcagttccgtctatttaggttgtaaaatttcagatgaaaaatgagaatcggtttttttagaaacccaacctaaataaacccataattttggttcgagacccaaatagtaaaaagactaatattttttgttaaaatatatactgtcggagagggaattcttcgcccgagtgccggagtacacccgccattaa

SEQ ID NO: 60574 - DNA, 3604 bp, Zea Mays
ctggagttggtggcgacaaggccatttcgctggaaaccagtcacggaaaatggcgacgtctcctgaatgcctttcaccttctagaggaggaagaggaattgaagcaagcacaggtggacatgagaggcaggtccttgtcagctctccggccgctggcatttcttctagactagaaaaaacatgtgctacgacttccacgcccgcctgctcgctaacaagtactatatggtattgccgtgccagcaccaacaaacaactgttgtcgtccactgcttttgcttctgggtctttcgttcgtagatataaaacggagggaacgcagagccgggcgcctgtctggattcattctgcgagagatctgctggggcattgattcgtcatcaggctcagctctgatcagcttcaaccatcatggggagtcaagagtcggagcaggccaaggtgctcccgggaaccgactgcccgcagcagccaccggcgagcaggacctggcagaggaggttcgacgatgaaggcaagaacgtcgccatgttcagcatgaccatgagcgacctggtggaacttgttgcggtctatgatcttctgaggaaatggatggacaactgctaccgtggcgtaccggtcggtgggataggttcaggaagcatagggaggagctacagagggtacttccagcagttccagatattccccgtgaccaacgaagagaaacctgtcctagcaaaccagttctcggcatttgtttcgcgcccgaacgggaacaagtactccacggtgctgtcggcgccaaccgctgaccttctcaagggagtcggcaaagccggcattggatcttgggactggaggttgaaggaggacaggtgcacttaccacgccctgttcccaaggtcatggacggtatatgatggtgaacctgaccctgagatcaagatcacctgccgtcagatatcgcccttcataccgcacaactacagagagagcagcttcccggctgcagttttcacattcacggtgaacaactctgggagctcacctgcagatgtgacgctgctcttcacctgggcaaattcagttggcgggaagtcggaactgacaggaaaccacgtgaattccaaaatgacggagcacgacggcgtccgtggcgttctcctccatcacaggacggcgggagggcagcctccggtgacgttcgcgatcgcgtcccgagagaccgacggtgtccgcgtcagcgtctgcccgtccttcacgatcgcgtcgggcggcccgtccagctccggcgagcccacggcggcggccatgtgggacgagatcaagaagcacggcgcgttcgggcacgccggcgccggcaacggcaacgcggcgagggcggcggcttccaaggccgggtcgtccgtgggcgcggcagtggcggcgtcgacggccgtgccggcgggggcgacgcgggtggtgtccttctcgctggcctgggcgtgccccgaagttaagttccccgccgggagcacgtactacaggaggtacaccaggttctacggcactgatgccgacgcagctgcagagcacctagctcatgatgcccttcttgagcatatgaactgggagtcccagatcgaggagtggcagaagccaatcttgcatgaccaaaggctgcctgaatggtatccagttgctctgttcaacgagctctactacctcaacgctggaggcaccatctggacagacgggcaggctccgaagagggccggcttcgcttcgtcgttgacggccaccgagccgttctccatcgacacgctcctcccagtcgcagcgggcggcagcgcggtggacggcgtcgtgcgcgcggtggcgtcggcgacggagcggtcccactccgcggcggcgttcggcgcggcgctactgcgcggcggcgaggacaacgtggggcagttcctgtacctggaaggcatggagtacaacatgtacaacacctacgacgtgcacttctacgcctccttcgcgctgctgtccctcttcccccggctggagctgagcctgcagcgggacttcgcgcgcgccgtgctcctccacgaccctcgcccccggcgcaccctggacggcaggaccgtggcgcgcaaggtgctgggcgccgtgccgcacgacgtcgggctcaacgacccatgggtggagctgaacgcgtacatgctgcacgacgcggcgcggtggaaggacctcaaccccaagttcgtcctgcaggtgtaccgcgacgccgtggccacgggcgacgccgcgttcgcggaggcggtgtggcccgccgtgtacgtggccatggcgtacatggaccagttcgaccgcgacggcgacgggatggtggagaacgagggggtgcccgaccagacgtacgacatgtggtcggtctccggtgtcagcgcctacacgggcggggtctgggtggcggcgctgcaggcggcggcgggcatggcgcgcgtcgtcggggaccgccccgccgaggcctacttccgcgcgaggcgggacagggcggcgcgcgtgtacgatgccgagctctggaccggcgcctacttccgctacgacaacagcggcggcggcggcgccagcgagtccatcatggcggaccaactggcggggcagtggtacgcgcgggcgtgcgggctggagccggtggtggaggacgccaaggcacggagcgcgctggcgaccgtgctggactacaacgtcatgcgggtcaagggcggcgccatcggggccgtgaacgggatgcgccccgacggcgccgtcgacgcatcgtccacgcagtccaaggaggtgtggcccggggtcacgtacgccgttgcggcggccatggtccacgagggcatgacggaggccgcgttccggacggccaagggcgcccacgacgccgcctggggcaacgacggcttcgggtacgcgttccagacgcccgaggcttggacggaggacggcggctatcggtcgctgcactacatgcggccgctcggcatctgggcgatgcagtgggcgctgtcgccacccgagctccacagggatctcaggacacccgaggcgcgatcctcggaggagccgtcgccggcggacgctgccctcgggcaggcgcagttcgacaaggtggcgagcatgttgaggctgccggaggagcagcagcccaagggatacctttgggccatctacaacctcgttaggcaaattgtgctccccgcatgaggattctcttgctccaagcagccgcactcatgaatgcaaattgagcccgttattatatatcttttttttattaaaacctaaagcgttacggagccttcaccgcatttccgggctagggcgcctgtcgcgtggtggcgcgtgtccgaatccgagacgcgaaaacttcatctacaaagccgtccccgcgtctaggcggtaattcagttccgtctatttaggttgtaaaatttcagatgaaaaatgagaatcggtttttttagaaacccaacctaaataaacccataattttggttcgagacccaaatagtaaaaagactaatattttttgttaaaatatatactgtcggagagggaattcttcgcccgagtgccggagtacacccgccattaa

SEQ ID NO: 60575 - DNA, 7013 bp, Zea Mays
ggggggtgactgggtgagggagtcccagcagcggtgactgttgcggtgttgccgcatccacgccctagtcgaccacgccgcccccagcagcccgctgctgccgcggctcgcgcccccaggagcccccgccgtcgcggctcgcgcctcgtatccgtaacagctacaccgcgccgcctacccccgcttcctgctggctgcatcgtcctcaggtcttccgaagatgactacaaaacttgagcaatcttctgcggagcatcgcccagcaaaattcgcagcaccatcgtctttgacccccaagatctcaatgtttggggcaaaagctggattcatcatacctaagaacaagctggccggctcactcgtaatccggagcaccagtgacaagaatgaaacaccaactgcatccaacgaagatagcagcaggcatgttcacagaaagacaaagtgggggcctgaccttgctttggaccctgtcgtgtgcaaaggaagggctttggcctaccagactcgagtggagcaaatttccaagcagctgaagtctggagctttggacacgtccgaaattgatggttcagtgtctgctggaaatgaattgaattctattggtcctgacatcttgaaagagaacgagctgggaaatgttgaactattggaacttgaaagacgagagcttatcggtgaaatactccgtttgaatccgggatataagacacctgagaactacaaaccagtacttagggagacaaaaatccctgttccggcagaagcacacccaggaaataatattattggagttcttctaggatctgagagcaatacccagaagagactacatgaagaaactggtgctgtcattcgagtgtatgggactaagaaaatcaatggagagaagagtgagattcgtcatcaagacataaatgaaacacaagatgcttatgaagacctatacatcaatgtatcggctgactcttatgataaagtagatgctgcagttgtgttgattgagctgcttcttgctcctgtttccgtaaagtcgacagctacttcaacagctgctactgtttcttcagcagatacatccaaggatgcagtttcagctaatgtgcaactggagcagaataccacgtcacagccagatctacttcattaccaatcacacaacgcaccttggctgcccacaccccagaccaatgctccatcaattccttccacggggcctgttttgagtacattacctaacaatccatcgcagccacaaccgcctgctggttctttcagtatgcctccatatactggtcaacctcctcacatgaatagcatgccagcaaatccatttcctgttcctgggcctcagcaaccagtaccaagcaatcaacaacatccacctcaatttcgagctaactcctcgattgggccttttttcggtcaaccacctggtattgtaagccaacaaatgccaccatcttcctcaatgccaccgccagttagaccccttcaaataccccatgcctctggtggctggccccctttctctcctgttacatcacaatctcataggcctctgcaagctccaccgacttttatggcagtgagacctcctatttccgtctctcctcttggtgcaactccaccgcaaggtcccattgcattgacaccaccaaatatgcccaccatgtaccgcggccagcatccaccagtaccaaatttcactggttcagcgccattggtttccaggcctcctggtggtggggctcagtcttttcctacagctgcgcctcaaggcccttcctcagtagcatttcccggtggaccatcgctgcggccaccttaccctccggcgcctgatcaagcgagggggccacctccagctttctctccagttggatcaactcctggcatggtgcctccacctattgcatcttccggcctgcctgccccgcgtcctgcgaacacgagctgcatccagacacaagtagtagcccctttgagacctccgctcccagccgcgggcgattttactttccggcctgccataccaccggcgcatgctccagagttcgcagcaccaggcagtcaaatgggagcaatacatggcagaactcaccaccctggaccattctcctcccatcctggtgaccagaagaaccccagccaaggtttccaagggccgtttgatggcagcaggcccatgtacacgacgaatcaggctcggatgcacgctccacctcctccacacttccacggagccttccccaggaacgcatctcctcttgagttcccagcggggttccggggagcctggccgtccgtgcaggcacctccgatgccggcaccgtcacatccatcgtctttcccgccgtttcagttgaggccaccgccaccgccgcagcaggatatgtctggcgcaggcggcaccaggtggcccggtggcaatcaaatctacaacccttttgcaccaacggctgcggcggcggctcagagagcggaggctgaccctgagtacgaggatctcatggcatcagttggcatgaagtagcgaagactgctggctggcccctgatctgtctgtggcacaaacacagaggcttcttcctattgcttgccaagatgtgcgggttactaatctcctccaatgtatctctagatggtactgaattccgttccatcatagacaggtgccatgcttgaacgaaaaacaaaaataaaaaataaactagtggaccttgtttgagacatgctgttgggtgccgaggttgtgtttgtgcctatctcgaaatctcatgcatgtgttgctcccggcgtcagctgatgttgtttattttatggagaggaatttgtgagcctgttctgagaaagaagaacatctgttggcattatcacgtgtgtgtatatatacatgaaggatggggtggaatatggtaggtatgcggtatgatgtcaggatgtctccagcagatcgtgtatatacggttgtgtaaaacactttcacgaagtttgaaataggggagacagtctcagtgcttgtgacttttatgcaaaacttattgtgtcgtacgctgacgctagaacgggaactgccaacgaaacgtcaagagatcttcctggagttggtggcgacaaggccatttcgctggaaaccagtcacggaaaatggcgacgtctcctgaatgcctttcaccttctagaggaggaagaggaattgaagcaagcacaggtggacatgagaggcaggtccttgtcagctctccggccgctggcatttcttctagactagaaaaaacatgtgctacgacttccacgcccgcctgctcgctaacaagtactatatggtattgccgtgccagcaccaacaaacaactgttgtcgtccactgcttttgcttctgggtctttcgttcgtagatataaaacggagggaacgcagagccgggcgcctgtctggattcattctgcgagagatctgctggggcattgattcgtcatcaggctcagctctgatcagcttcaaccatcatggggagtcaagagtcggagcaggccaaggtgctcccgggaaccgactgcccgcagcagccaccggcgagcaggacctggcagaggaggttcgacgatgaaggcaagaacgtcgccatgttcagcatgaccatgagcgacctggtggaacttatgcccttgatggtcaaaatactcaagctgcaggtggaagaaaacgccgaaggccgagtgggttaccaaactctatctaggattattgtgtttctttctctctctctctctctcttttgccaacaccagttccatgatcatgtttcagtgagtgctgaaacatgactaaggcatgactaaattccaaaaaaaaaaacttttatttttttgacaaaaaggttgcggtctatgatcttctgaggaaatggatggacaactgctaccgtggcgtaccggtcggtgggatagggaagcatagggaggagctacagagggtacttccagcagttccagatattccccgtgaccaacgaagagaaacctgtcctagcaaaccagttctcggcatttgtttcgcgcccgaacgggaacaagtactccacggtgctgtcggcgccaaccgctgaccttctcaagggagtcggcaaagccggcattggatcttgggactggaggttgaaggaggacaggtgcacttaccacgccctgttcccaaggtcatggacggtatatgatggtgaacctgaccctgagatcaagatcacctgccgtcagatatcgcccttcataccgcacaactacagagagagcagcttcccggctgcagttttcacattcacggtacagtccgttttgtctgttcttttcaaggcaggttcagtggctgaaatcgggatgcagcatgtgtatcgagtaacgctgacgccccgtttcaggtgaacaactctgggagctcacctgcagatgtgacgctgctcttcacctgggcaaattcagttggcgggaagtcggaactgacaggaaaccacgtgaattccaaaatgacggagcacgacggcgtccgtggcgttctcctccatcacaggacggcgggagggcagcctccggtgacgttcgcgatcgcgtcccgagagaccgacggtgtccgcgtcagcgtctgcccgtccttcacgatcgcgtcgggcggcccgtccagctccggcgagcccacggcggcggccatgtgggacgagatcaagaagcacggcgcgttcgggcacgccggcgccggcaacggcaacgcggcgagggcggcggcttccaaggccgggtcgtccgtgggcgcggcagtggcggcgtcgacggccgtgccggcgggggcgacgcgggtggtgtccttctcgctggcctgggcgtgccccgaagttaagttccccgccgggagcacgtactacaggaggtacaccaggttctacggcactgatgccgacgcagctgcagagcacctagctcatgatgcccttcttgagcatatgaactgggagtcccagatcgaggagtggcagaagccaatcttgcatgaccaaaggctgcctgaatggtatccagttgctctgttcaacgagctctactacctcaacgctggaggcaccatctggacagacgggcaggctccgaagagggccggcttcgcttcgtcgttgacggccaccgagccgttctccatcgacacgctcctcccagtcgcagcgggcggcagcgcggtggacggcgtcgtgcgcgcggtggcgtcggcgacggagcggtcccactccgcggcggcgttcggcgcggcgctactgcgcggcggcgaggacaacgtggggcagttcctgtacctggaaggcatggagtacaacatgtacaacacctacgacgtgcacttctacgcctccttcgcgctgctgtccctcttcccccggctggagctgagcctgcagcgggacttcgcgcgcgccgtgctcctccacgaccctcgcccccggcgcaccctggacggcaggaccgtggcgcgcaaggtgctgggcgccgtgccgcacgacgtcgggctcaacgacccatgggtggagctgaacgcgtacatgctgcacgacgcggcgcggtggaaggacctcaaccccaagttcgtcctgcaggtgtaccgcgacgccgtggccacgggcgacgccgcgttcgcggaggcggtgtggcccgccgtgtacgtggccatggcgtacatggaccagttcgaccgcgacggcgacgggatggtggagaacgagggggtgcccgaccagacgtacgacatgtggtcggtctccggtgtcagcgcctacacgggcggggtctgggtggcggcgctgcaggcggcggcgggcatggcgcgcgtcgtcggggaccgccccgccgaggcctacttccgcgcgaggcgggacagggcggcgcgcgtgtacgatgccgagctctggaccggcgcctacttccgctacgacaacagcggcggcggcggcgccagcgagtccatcatggcggaccaactggcggggcagtggtacgcgcgggcgtgcgggctggagccggtggtggaggacgccaaggcacggagcgcgctggcgaccgtgctggactacaacgtcatgcgggtcaagggcggcgccatcggggccgtgaacgggatgcgccccgacggcgccgtcgacgcatcgtccacgcagtccaaggaggtgtggcccggggtcacgtacgccgttgcggcggccatggtccacgagggcatgacggaggccgcgttccggacggccaagggcgcccacgacgccgcctggggcaacgacggcttcgggtacgcgttccagacgcccgaggcttggacggaggacggcggctatcggtcgctgcactacatgcggccgctcggcatctgggcgatgcagtgggcgctgtcgccacccgagctccacagggatctcaggacacccgaggcgcgatcctcggaggagccgtcgccggcggacgctgccctcgggcaggcgcagttcgacaaggtggcgagcatgttgaggctgccggaggagcagcagcccaagggatacctttgggccatctacaacctcgttaggcaaattgtgctccccgcatgaggattctcttgctccaagcagccgcactcatgaatgcaaattgagcccgttattatatatcttttttttattaaaacctaaagcgttacggagccttcaccgcatttccgggctagggcgcctgtcgcgtggtggcgcgtgtccgaatccgagacgcgaaaacttcatctacaaagccgtccccgcgtctaggcggtaattcagttccgtctatttaggttgtaaaatttcagatgaaaaatgagaatcggtttttttagaaacccaacctaaataaacccataattttggttcgagacccaaatagtaaaaagactaatattttttgttaaaatatatactgtcggagagggaattcttcgcccgagtgccggagtacacccgccattaa

SEQ ID NO: 60576 - DNA, 2962 bp, Zea Mays
ggggggtgactgggtgagggagtcccagcagcggtgactgttgcggtgttgccgcatccacgccctagtcgaccacgccgcccccagcagcccgctgctgccgcggctcgcgcccccaggagcccccgccgtcgcggctcgcgcctcgtatccgtaacagctacaccgcgccgcctacccccgcttcctgctggctgcatcgtcctcaggtcttccgaagatgactacaaaacttgagcaatcttctgcggagcatcgcccagcaaaattcgcagcaccatcgtctttgacccccaagatctcaatgtttggggcaaaagctggattcatcatacctaagaacaagctggccggctcactcgtaatccggagcaccagtgacaagaatgaaacaccaactgcatccaacgaagatagcagcaggcatgttcacagaaagacaaagtgggggcctgaccttgctttggaccctgtcgtgtgcaaaggaagggctttggcctaccaggtgtcattaattcatattacttcatgagcagactcgagtggagcaaatttccaagcagctgaagtctggagctttggacacgtccgaaattgatggttcagtgtctgctggaaatgaattgaattctattggtcctgacatcttgaaagagaacgagctgggaaatgttgaactattggaacttgaaagacgagagcttatcggtgaaatactccgtttgaatccgggatataagacacctgagaactacaaaccagtacttagggagacaaaaatccctgttccggcagaagcacacccaggaaataatattattggagttcttctaggatctgagagcaatacccagaagagactacatgaagaaactggtgctgtcattcgagtgtatgggactaagaaaatcaatggagagaagagtgagattcgtcatcaagacataaatgaaacacaagatgcttatgaagacctatacatcaatgtatcggctgactcttatgataaagtagatgctgcagttgtgttgattgagctgcttcttgctcctgtttccgtaaagtcgacagctacttcaacagctgctactgtttcttcagcagatacatccaaggatgcagtttcagctaatgtgcaactggagcagaataccacgtcacagccagatctacttcattaccaatcacacaacgcaccttggctgcccacaccccagaccaatgctccatcaattccttccacggggcctgttttgagtacattacctaacaatccatcgcagccacaaccgcctgctggttctttcagtatgcctccatatactggtcaacctcctcacatgaatagcatgccagcaaatccatttcctgttcctgggcctcagcaaccagtaccaagcaatcaacaacatccacctcaatttcgagctaactcctcgattgggccttttttcggtcaaccacctggtattgtaagccaacaaatgccaccatcttcctcaatgccaccgccagttagaccccttcaaataccccatgcctctggtggctggccccctttctctcctgttacatcacaatctcataggcctctgcaagctccaccgacttttatggcagtgagacctcctatttccgtctctcctcttggtgcaactccaccgcaaggtcccattgcattgacaccaccaaatatgcccaccatgtaccgcggccagcatccaccagtaccaaatttcactggttcagcgccattggtttccaggcctcctggtggtggggctcagtcttttcctacagctgcgcctcaaggcccttcctcagtagcatttcccggtggaccatcgctgcggccaccttaccctccggcgcctgatcaagcgagggggccacctccagctttctctccagttggatcaactcctggcatggtgcctccacctattgcatcttccggcctgcctgccccgcgtcctgcgaacacgagctgcatccagacacaagtagtagcccctttgagacctccgctcccagccgcgggcgattttactttccggcctgccataccaccggcgcatgctccagagttcgcagcaccaggcagtcaaatgggagcaatacatggcagaactcaccaccctggaccattctcctcccatcctggtgaccagaagaaccccagccaaggtttccaagggccgtttgatggcagcaggcccatgtacacgacgaatcaggctcggatgcacgctccacctcctccacacttccacggagccttccccaggaacgcatctcctcttgagttcccagcggggttccggggagcctggccgtccgtgcaggcacctccgatgccggcaccgtcacatccatcgtctttcccgccgtttcagttgaggccaccgccaccgccgcagcaggatatgtctggcgcaggcggcaccaggtggcccggtggcaatcaaatctacaacccttttgcaccaacggctgcggcggcggctcagagagcggaggctgaccctgagtacgaggatctcatggcatcagttggcatgaagtagcgaagactgctggctggcccctgatctgtctgtggcacaaacacagaggcttcttcctattgcttgccaagatgtgcgggttactaatctcctccaatgtatctctagatggtactgaattccgttccatcatagacaggtgccatgcttgaacgaaaaacaaaaataaaaaataaactagtggaccttgtttgagacatgctgttgggtgccgaggttgtgtttgtgcctatctcgaaatctcatgcatgtgttgctcccggcgtcagctgatgttgtttattttatggagaggaatttgtgagcctgttctgagaaagaagaacatctgttggcattatcacgtgtgtgtatatatacatgaaggatggggtggaatatggtaggtatgcggt

SEQ ID NO: 60577 - DNA, 2963 bp, Zea Mays
ggggggtgactgggtgagggagtcccagcagcggtgactgttgcggtgttgccgcatccacgccctagtcgaccacgccgcccccagcagcccgctgctgccgcggctcgcgcccccaggagcccccgccgtcgcggctcgcgcctcgtatccgtaacagctacaccgcgccgcctacccccgcttcctgctggctgcatcgtcctcaggtcttccgaaggcgagctccaatccccaaccactattcacaagatgactacaaaacttgagcaatcttctgcggagcatcgcccagcaaaattcgcagcaccatcgtctttgacccccaagatctcaatgtttggggcaaaagctggattcatcatacctaagaacaagctggccggctcactcgtaatccggagcaccagtgacaagaatgaaacaccaactgcatccaacgaagatagcagcaggcatgttcacagaaagacaaagtgggggcctgaccttgctttggaccctgtcgtgtgcaaaggaagggctttggcctaccagactcgagtggagcaaatttccaagcagctgaagtctggagctttggacacgtccgaaattgatggttcagtgtctgctggaaatgaattgaattctattggtcctgacatcttgaaagagaacgagctgggaaatgttgaactattggaacttgaaagacgagagcttatcggtgaaatactccgtttgaatccgggatataagacacctgagaactacaaaccagtacttagggagacaaaaatccctgttccggcagaagcacacccaggaaataatattattggagttcttctaggatctgagagcaatacccagaagagactacatgaagaaactggtgctgtcattcgagtgtatgggactaagaaaatcaatggagagaagagtgagattcgtcatcaagacataaatgaaacacaagatgcttatgaagacctatacatcaatgtatcggctgactcttatgataaagtagatgctgcagttgtgttgattgagctgcttcttgctcctgtttccgtaaagtcgacagctacttcaacagctgctactgtttcttcagcagatacatccaaggatgcagtttcagctaatgtgcaactggagcagaataccacgtcacagccagatctacttcattaccaatcacacaacgcaccttggctgcccacaccccagaccaatgctccatcaattccttccacggggcctgttttgagtacattacctaacaatccatcgcagccacaaccgcctgctggttctttcagtatgcctccatatactggtcaacctcctcacatgaatagcatgccagcaaatccatttcctgttcctgggcctcagcaaccagtaccaagcaatcaacaacatccacctcaatttcgagctaactcctcgattgggccttttttcggtcaaccacctggtattgtaagccaacaaatgccaccatcttcctcaatgccaccgccagttagaccccttcaaataccccatgcctctggtggctggccccctttctctcctgttacatcacaatctcataggcctctgcaagctccaccgacttttatggcagtgagacctcctatttccgtctctcctcttggtgcaactccaccgcaaggtcccattgcattgacaccaccaaatatgcccaccatgtaccgcggccagcatccaccagtaccaaatttcactggttcagcgccattggtttccaggcctcctggtggtggggctcagtcttttcctacagctgcgcctcaaggcccttcctcagtagcatttcccggtggaccatcgctgcggccaccttaccctccggcgcctgatcaagcgagggggccacctccagctttctctccagttggatcaactcctggcatggtgcctccacctattgcatcttccggcctgcctgccccgcgtcctgcgaacacgagctgcatccagacacaagtagtagcccctttgagacctccgctcccagccgcgggcgattttactttccggcctgccataccaccggcgcatgctccagagttcgcagcaccaggcagtcaaatgggagcaatacatggcagaactcaccaccctggaccattctcctcccatcctggtgaccagaagaaccccagccaaggtttccaagggccgtttgatggcagcaggcccatgtacacgacgaatcaggctcggatgcacgctccacctcctccacacttccacggagccttccccaggaacgcatctcctcttgagttcccagcggggttccggggagcctggccgtccgtgcaggcacctccgatgccggcaccgtcacatccatcgtctttcccgccgtttcagttgaggccaccgccaccgccgcagcaggatatgtctggcgcaggcggcaccaggtggcccggtggcaatcaaatctacaacccttttgcaccaacggctgcggcggcggctcagagagcggaggctgaccctgagtacgaggatctcatggcatcagttggcatgaagtagcgaagactgctggctggcccctgatctgtctgtggcacaaacacagaggcttcttcctattgcttgccaagatgtgcgggttactaatctcctccaatgtatctctagatggtactgaattccgttccatcatagacaggtgccatgcttgaacgaaaaacaaaaataaaaaataaactagtggaccttgtttgagacatgctgttgggtgccgaggttgtgtttgtgcctatctcgaaatctcatgcatgtgttgctcccggcgtcagctgatgttgtttattttatggagaggaatttgtgagcctgttctgagaaagaagaacatctgttggcattatcacgtgtgtgtatatatacatgaaggatggggtggaatatggtaggtatgcggt

SEQ ID NO: 60578 - DNA, 1213 bp, Zea Mays
cccttctcttcccttccttgcatgctgtgcgaaggcacgggcctcaggatgcagtccttggtccggaatgtctgccgagccggaagccgtggagcggcggcgaggctcctggaggccgccgcggttcatccgggggcggcgcagccgtcctcggccgtcagacacctcaggcatccttgcgggttcgctcgtccgatcggggtagatcaacccaagcctgtgcagcgccggaccattttgcgtgatggcggccgcgttccggctgccgcctccggattcggtctctgcgcgaaagttctcgttgcgacgaggggtctgtcgacggcgggaaatgctgctgaggttgcctctgattcggacgattccacctctcctgcggttgagcaccccccgcgcatcaagttcaagaggcctgacaagaccgctagacacattatgaatatcctgaacaaagaggcggtcgaaaaggtccgctcggagagggcgattcctgatgtgcagcctggatgtatcattcagatgagattggtaataccacttctttgtgttcctgctttagcgctgttcctataggtttctggtactgatccttcctgtgagtcgatgaacagcaagttcctgagaacaaacggcgcgagtcgacactgaaagggattgtcataggaaggcgcaacgctgggatcaatacaaccttcagattgcgtagattagtggctggcgtgggagtcgagtctgtctttccactttactcaccaaacatcaaagaaatcaaggtcttggacaggaagaaagtcaggagagctaagctgtattacctgagggacaggatgaacgcacttaaaagatgaggatttcaacttgtttctaggatttctttttgccgcgcggatcagcatggtttctcaagatgcaatcacattgtttggtgttccatctttgaaaaaaatcatagtttggggttgtcagttgccatgctccgatcttctttcttttgatttgatgcgctgtaacattagtgcgaaaattcatgtgctcaggtctattacgttactttcccaatctttttttagtatgtgcgtctgacatgaacaagctggaacactttactcatcaaagcgaaactattgtatgatgattcatgctatccggttttagatgtcaaatcatttagtctttattcacagaaacctcctgttctgaaaaatgttctggg

SEQ ID NO: 60579 - DNA, 1358 bp, Zea Mays
gattactcatgctcgtttcgcagttacagtgtcccaccaaatcaagaaggataaaaaatttaacgtgtgggaaaacagaaccggcccaggagaaggcccgtgcgggtgcactctcgctgcgcccaacaacactgactgggccggccgtcgatgcactgcattcccccccttccgtccgctgcatccctccgccgccaccgccgcccaagccaggtgctgaggctttcgttggtctcttcgccggcgacgagcacccaccagggcacgggcctcaggatgcagtccttggtccggaatgtctgccgagccggaagccgtggagcggcggcgaggctcctggaggccgccgcggttcatccgggggcggcgcagccgtcctcggccgtcagacacctcaggcatccttgcgggttcgctcgtccgatcggggtagatcaacccaagcctgtgcagcgccggaccattttgcgtgatggcggccgcgttccggctgccgcctccggattcggtctctgcgcgaaagttctcgttgcgacgaggggtctgtcgacggcgggaaatgctgctgaggttgcctctgattcggacgattccacctctcctgcggttgagcaccccccgcgcatcaagttcaagaggcctgacaagaccgctagacacattatgaatatcctgaacaaagaggcggtcgaaaaggtccgctcggagagggcgattcctgatgtgcagcctggatgtatcattcagatgagattgcaagttcctgagaacaaacggcgcgagtcgacactgaaagggattgtcataggaaggcgcaacgctgggatcaatacaaccttcagattgcgtagattagtggctggcgtgggagtcgagtctgtctttccactttactcaccaaacatcaaagaaatcaaggtcttggacaggaagaaagtcaggagagctaagctgtattacctgagggacaggatgaacgcacttaaaagatgaggatttcaacttgtttctaggatttctttttgccgcgcggatcagcatggtttctcaagatgcaatcacattgtttggtgttccatctttgaaaaaaatcatagtttggggttgtcagttgccatgctccgatcttctttcttttgatttgatgcgctgtaacattagtgcgaaaattcatgtgctcaggtctattacgttactttcccaatctttttttagtatgtgcgtctgacatgaacaagctggaacactttactcatcaaagcgaaactattgtatgatgattcatgctatccggttttagatgtcaaatcatttagtctttattcacagaaacctcctgttctgaaaaatgttctggg

SEQ ID NO: 60580 - DNA, 2936 bp, Zea Mays
tctgaattgcatgaatgaagacagctctgaaaactatcaggccatactttgcataccactaccagaggatcagatacggtaacaaggaagcgttgtgttgggcacacttatgtgggcgtctcagattataagctggttactcagcagtgtggagtggcaactggcaaccataatccataatgacaaaaatggaaggctccacttggcagtgtccaaatcatgtctacgcgtttggtccagccagagtcaggaagctcactggacatggtgccgtcagagccagagatcgttcacctgactccatggctcctgaggtcactatcagtcgtgttgtccttcctgctgaacaggctgctgaatgtggaagcactcatgggctccatccctgtgctggccatgtaggttagcgagctcgcagatgtcatcttcactgccatgctgttgctgctaaactatggcctcgcatatggagccgcattctggctcttcttaaacacctggtcagatataaaccatcgcagcagcagcgatggaggtggagggtacacgctctccacaccgccgccgcctgccagtgctggacagatggttcctcgacacctgccctgtggcaatccatctaccctttggcaagctgaaggacatcgtcgtccagtgacccgaacacgcgcggtccagaaatgtttcttccatttctctgcggagagcacaaagaggctcaagacgaaggcaaacaccgggaactgcaacggtcatcatctcctcattgaagtccctgctctctcaccttgagcgagcagtgtgccaccgtctgcatactttgttgaaggaactctatttttcttttgtgctgttatataccaagtcaggtactgctatccttactatttttgctaaaaaatgctgttatagctatgaattcatgcttaatacttatcctcctgctctcttttatgtccattttgtaacacatatatgaatatagatgctatgtgaatatgcgatacacatgtctcttcttgcaactcgagtctgacggtgtcataaatttagattcttaagttttaaattatgattctgttagttgttacagatgttaatttcaaactcttgttcttaactagctgctgttttcagcttgcccccccaaaagaattcctcggaagagagacgtcattcacaaactgcggcacaagttcatctgtgttgcgtctgacctacctgatcaaagacgttttggtgacaattgtgcaaaacatttgggatgattactcatgctcgtttcgcaggtgggaatgcttaattggcgacaagttttatctatctagagagattgcttttgttttcagaccgtgatagattagccaacgccatcaaaggaaataattgaagcatggctgtgaacctggaaatcacactctgaagtctgaacacaatgtaaacattcagaattagcacattggtcgtgtagctcattgtacataagctttatttatgctccaggagttgttactgtagttacagtgtcccaccaaatcaagaaggataaaaaatttaacgtgtgggaaaacagaaccggcccaggagaaggcccgtgcgggtgcactctcgctgcgcccaacaacactgactgggccggccgtcgatgcactgcattcccccccttccgtccgctgcatccctccgccgccaccgccgcccaagccaggtgctgaggctttcgttggtctcttcgccggcgacgagcacccaccagggcacgggcctcaggatgcagtccttggtccggaatgtctgccgagccggaagccgtggagcggcggcgaggctcctggaggccgccgcggttcatccgggggcggcgcagccgtcctcggccgtcagacacctcaggcatccttgcgggttcgctcgtccgatcggggtagatcaacccaagcctgtgcagcgccggaccattttgcgtgatggcggccgcgttccggctgccgcctccggattcggtctctgcgcgaaagttctcgttgcgacgaggggtctgtcgacggcgggaaatgctgctgaggttgcctctgattcggacgattccacctctcctgcggttgagcaccccccgcgcatcaagttcaagaggcctgacaagaccgctagacacattatgaatatcctgaacaaagaggcggtcgaaaaggtccgctcggagagggcgattcctgatgtgcagcctggatgtatcattcagatgagattggtaataccacttctttgtgttcctgctttagcgctgttcctataggtttctggtactgatccttcctgtgagtcgatgaacagcaagttcctgagaacaaacggcgcgagtcgacactgaaagggattgtcataggaaggcgcaacgctgggatcaatacaaccttcagattgcgtagattagtggctggcgtgggagtcgagtctgtctttccactttactcaccaaacatcaaagaaatcaaggtcttggacaggaagaaagtcaggagagctaagctgtattacctgagggacaggatgaacgcacttaaaagatgaggatttcaacttgtttctaggatttctttttgccgcgcggatcagcatggtttctcaagatgcaatcacattgtttggtgttccatctttgaaaaaaatcatagtttggggttgtcagttgccatgctccgatcttctttcttttgatttgatgcgctgtaacattagtgcgaaaattcatgtgctcaggtctattacgttactttcccaatctttttttagtatgtgcgtctgacatgaacaagctggaacactttactcatcaaagcgaaactattgtatgatgattcatgctatccggttttagatgtcaaatcatttagtctttattcacagaaacctcctgttctgaaaaatgttctggg

SEQ ID NO: 60581 - DNA, 5268 bp, Zea Mays
agcccaccaaggcgtctggcgcgccgagagctccagacgccaaagcaccactctcccgccgtccccctcactctccgccgccggcgaggtgtgatgccacgaaggtcggcggaggcgccggccatttgatgcgcccacggccgcctcctcacggtgcgctgtccaagcaccacctcctccgcatccgccgctgccttccacccgtttggtttaatgctgccctcgcccaggacccgtccctgccacccgctgcctcctcctcccccgcgtttctctcatccctcatacgctactgcacgaccaagcgcgcccgccgccccggtgagcaggcgcacgcgcgcgccgtcgcgctcgggctcggcgcgcacccctcggtgctccccgggctcgcctccttctacatcgcgctcggcgacctccccgccgcgcaagcctccgtcgagcgggcggcgggaaaggcgcgggcgttcccgtggaacctgctcatttgggggtatgccgaccgtgggctatgggacgacgtcatcctcgcgtatcagaagatgctggcgctgggcgtggccgccgacaggttcacgtacccgtcggttctgcgcacatgcggcgagctccgagattccgccattggtcgggggattgagaagcgcattctgacgtggaggtatggtctggacatgtatgtctggaacgctctggtgggaatgtacgccaagtgcggggagatgaaggacgcgcgcagggtgtttgatggaatgcctgcgcgggatgttgtcagctggaactccatggtgtctgggtacgtgtcggcgggtatgtggggcgaggcgtttgacctgctgcagttggttcctggggcgaacattgtcgcctggaacgcggttgtggcaggaaattttaaggcggggaactacggtgaggtgatgaggttggtgtcgcagatgaggacatgcggtggtccggggctggattttgtgactgttgtgattggcttgagggcttgcgctaggggtgggtatctgaggattggcaaggaattgcatgctgcctctgttcgtctatgctttgataggcttgagcgcgtggagagttcattgatcaccatgtactccagatgccagatgatgagatctgcatacctcctgttcagaacatgctcaactcagagcatagtaacatggaattcattgctagcaggatttggattcatggaccaggttgaggaggctattttcgttttcagagagatgatttattcctctgtctttccaaatgatgtcactgtgttaactatgctttcacttagtgcacgttttggacacctctgtcatggaagggagatgcactgctacattttcaagcatggacttggggcctctaacatattgcagaactcacttgtcgatatgtactcaaagtctggacagatggcaactgccaatagagtgtttgaccagatgcaatgtcaggacaggcatgcctatacttcattgattttgggctatggaatgcaaagagaagggcatctatcactgaagctctttgatgaaatgattgtaaacaatatcaaggtggaccatgtaactatggttgctgttctttcagcttgcagccactctgggctggtagctcaagggcaactacgatttgctcagatgtatgatgtgttttgcattgcaccgagggtggagcatttttcttgcatggttgatttgtactgccgtgagggtttgctgagtatggctgaggagatagttaacaagatgccattccagccaactgccgcgatgttggcaactctaatcgaggcttgccggatccatggcaaaacagaaattggggatcgggctgcaaagaggctgttggcaatgaggacaaataacccgggtcactacaaattgattgcgaacatgtatatatcagcaaaacgctggccagaactagctaaagttaggtcattaatgagcgtcatggaactaaatatgattccaactcattccttactggagtcagaatatgagatatgtccaattgaaaaagattattgcttaaaccgatgtctgcatggaggcttgtctgacgacatgacagatactgatttctctagtagtgaggaagtgaaatggaatgaagctttcggtgggtaacagtaaagctggaatccaataggctgttttgggatcatggctttcatttaaggaaaatatgttaacaacttgtattctttgcatcatggaagagaggagtttttaaaaaaggattaactgaggaccttgcatcgcacttccagtcagtgtttttaaggcgtcgcttaggcggccagacgcttgaagaattatgctcgcctaggcgtccaggtggcagtccaacgcctcgcctcgccttaccgccttaagaacactgcttccagtattgccttcaagcacgatcacaaacaatttggcatgaaaactatcaggccatactttgcataccactaccagaggatcagatacggtaacaaggaagcgttgtgttgggcacacttatgtgggcgtctcagattataagctggttactcagcagtgtggagtggcaactggcaaccataatccataatgacaaaaatggaaggctccacttggcagtgtccaaatcatgtctacgcgtttggtccagccagagtcaggaagctcactggacatggtgccgtcagagccagagatcgttcacctgactccatggctcctgaggtcactatcagtcgtgttgtccttcctgctgaacaggctgctgaatgtggaagcactcatgggctccatccctgtgctggccatgtaggttagcgagctcgcagatgtcatcttcactgccatgctgttgctgctaaactatggcctcgcatatggagccgcattctggctcttcttaaacacctggtcagatataaaccatcgcagcagcagcgatggaggtggagggtacacgctctccacaccgccgccgcctgccagtgctggacagatggttcctcgacacctgccctgtggcaatccatctaccctttggcaagctgaaggacatcgtcgtccagtgacccgaacacgcgcggtccagaaatgtttcttccatttctctgcggagagcacaaagaggctcaagacgaaggcaaacaccgggaactgcaacggtcatcatctcctcattgaagtccctgctctctcaccttgagcgagcagtgtgccaccgtctgcatactttgttgaaggaactctatttttcttttgtgctgttatataccaagtcaggtactgctatccttactatttttgctaaaaaatgctgttatagctatgaattcatgcttaatacttatcctcctgctctcttttatgtccattttgtaacacatatatgaatatagatgctatgtgaatatgcgatacacatgtctcttcttgcaactcgagtctgacggtgtcataaatttagattcttaagttttaaattatgattctgttagttgttacagatgttaatttcaaactcttgttcttaactagctgctgttttcagcttgcccccccaaaagaattcctcggaagagagacgtcattcacaaactgcggcacaagttcatctgtgttgcgtctgacctacctgatcaaagacgttttggtgacaattgtgcaaaacatttgggatgattactcatgctcgtttcgcaggtgggaatgcttaattggcgacaagttttatctatctagagagattgcttttgttttcagaccgtgatagattagccaacgccatcaaaggaaataattgaagcatggctgtgaacctggaaatcacactctgaagtctgaacacaatgtaaacattcagaattagcacattggtcgtgtagctcattgtacataagctttatttatgctccaggagttgttactgtagttacagtgtcccaccaaatcaagaaggataaaaaatttaacgtgtgggaaaacagaaccggcccaggagaaggcccgtgcgggtgcactctcgctgcgcccaacaacactgactgggccggccgtcgatgcactgcattcccccccttccgtccgctgcatccctccgccgccaccgccgcccaagccaggtgctgaggctttcgttggtctcttcgccggcgacgagcacccaccagggcacgggcctcaggatgcagtccttggtccggaatgtctgccgagccggaagccgtggagcggcggcgaggctcctggaggccgccgcggttcatccgggggcggcgcagccgtcctcggccgtcagacacctcaggcatccttgcgggttcgctcgtccgatcggggtagatcaacccaagcctgtgcagcgccggaccattttgcgtgatggcggccgcgttccggctgccgcctccggattcggtctctgcgcgaaagttctcgttgcgacgaggggtctgtcgacggcgggaaatgctgctgaggttgcctctgattcggacgattccacctctcctgcggttgagcaccccccgcgcatcaagttcaagaggcctgacaagaccgctagacacattatgaatatcctgaacaaagaggcggtcgaaaaggtccgctcggagagggcgattcctgatgtgcagcctggatgtatcattcagatgagattgcaagttcctgagaacaaacggcgcgagtcgacactgaaagggattgtcataggaaggcgcaacgctgggatcaatacaaccttcagattgcgtagattagtggctggcgtgggagtcgagtctgtctttccactttactcaccaaacatcaaagaaatcaaggtcttggacaggaagaaagtcaggagagctaagctgtattacctgagggacaggatgaacgcacttaaaagatgaggatttcaacttgtttctaggatttctttttgccgcgcggatcagcatggtttctcaagatgcaatcacattgtttggtgttccatctttgaaaaaaatcatagtttggggttgtcagttgccatgctccgatcttctttcttttgatttgatgcgctgtaacattagtgcgaaaattcatgtgctcaggtctattacgttactttcccaatctttttttagtatgtgcgtctgacatgaacaagctggaacactttactcatcaaagcgaaactattgtatgatgattcatgctatccggttttagatgtcaaatcatttagtctttattcacagaaacctcctgttctgaaaaatgttctggg

SEQ ID NO: 60582 - DNA, 5356 bp, Zea Mays
agcccaccaaggcgtctggcgcgccgagagctccagacgccaaagcaccactctcccgccgtccccctcactctccgccgccggcgaggtgtgatgccacgaaggtcggcggaggcgccggccatttgatgcgcccacggccgcctcctcacggtgcgctgtccaagcaccacctcctccgcatccgccgctgccttccacccgtttggtttaatgctgccctcgcccaggacccgtccctgccacccgctgcctcctcctcccccgcgtttctctcatccctcatacgctactgcacgaccaagcgcgcccgccgccccggtgagcaggcgcacgcgcgcgccgtcgcgctcgggctcggcgcgcacccctcggtgctccccgggctcgcctccttctacatcgcgctcggcgacctccccgccgcgcaagcctccgtcgagcgggcggcgggaaaggcgcgggcgttcccgtggaacctgctcatttgggggtatgccgaccgtgggctatgggacgacgtcatcctcgcgtatcagaagatgctggcgctgggcgtggccgccgacaggttcacgtacccgtcggttctgcgcacatgcggcgagctccgagattccgccattggtcgggggattgagaagcgcattctgacgtggaggtatggtctggacatgtatgtctggaacgctctggtgggaatgtacgccaagtgcggggagatgaaggacgcgcgcagggtgtttgatggaatgcctgcgcgggatgttgtcagctggaactccatggtgtctgggtacgtgtcggcgggtatgtggggcgaggcgtttgacctgctgcagttggttcctggggcgaacattgtcgcctggaacgcggttgtggcaggaaattttaaggcggggaactacggtgaggtgatgaggttggtgtcgcagatgaggacatgcggtggtccggggctggattttgtgactgttgtgattggcttgagggcttgcgctaggggtgggtatctgaggattggcaaggaattgcatgctgcctctgttcgtctatgctttgataggcttgagcgcgtggagagttcattgatcaccatgtactccagatgccagatgatgagatctgcatacctcctgttcagaacatgctcaactcagagcatagtaacatggaattcattgctagcaggatttggattcatggaccaggttgaggaggctattttcgttttcagagagatgatttattcctctgtctttccaaatgatgtcactgtgttaactatgctttcacttagtgcacgttttggacacctctgtcatggaagggagatgcactgctacattttcaagcatggacttggggcctctaacatattgcagaactcacttgtcgatatgtactcaaagtctggacagatggcaactgccaatagagtgtttgaccagatgcaatgtcaggacaggcatgcctatacttcattgattttgggctatggaatgcaaagagaagggcatctatcactgaagctctttgatgaaatgattgtaaacaatatcaaggtggaccatgtaactatggttgctgttctttcagcttgcagccactctgggctggtagctcaagggcaactacgatttgctcagatgtatgatgtgttttgcattgcaccgagggtggagcatttttcttgcatggttgatttgtactgccgtgagggtttgctgagtatggctgaggagatagttaacaagatgccattccagccaactgccgcgatgttggcaactctaatcgaggcttgccggatccatggcaaaacagaaattggggatcgggctgcaaagaggctgttggcaatgaggacaaataacccgggtcactacaaattgattgcgaacatgtatatatcagcaaaacgctggccagaactagctaaagttaggtcattaatgagcgtcatggaactaaatatgattccaactcattccttactggagtcagaatatgagatatgtccaattgaaaaagattattgcttaaaccgatgtctgcatggaggcttgtctgacgacatgacagatactgatttctctagtagtgaggaagtgaaatggaatgaagctttcggtgggtaacagtaaagctggaatccaataggctgttttgggatcatggctttcatttaaggaaaatatgttaacaacttgtattctttgcatcatggaagagaggagtttttaaaaaaggattaactgaggaccttgcatcgcacttccagtcagtgtttttaaggcgtcgcttaggcggccagacgcttgaagaattatgctcgcctaggcgtccaggtggcagtccaacgcctcgcctcgccttaccgccttaagaacactgcttccagtattgccttcaagcacgatcacaaacaatttggcatgaaccagtctagcacccactgtttaaaaggcgtcgcctaggcgtcgcctaggcgtccaggctacgagtggagctaggcgtcggcgccgcccagaaaactatcaggccatactttgcataccactaccagaggatcagatacggtaacaaggaagcgttgtgttgggcacacttatgtgggcgtctcagattataagctggttactcagcagtgtggagtggcaactggcaaccataatccataatgacaaaaatggaaggctccacttggcagtgtccaaatcatgtctacgcgtttggtccagccagagtcaggaagctcactggacatggtgccgtcagagccagagatcgttcacctgactccatggctcctgaggtcactatcagtcgtgttgtccttcctgctgaacaggctgctgaatgtggaagcactcatgggctccatccctgtgctggccatgtaggttagcgagctcgcagatgtcatcttcactgccatgctgttgctgctaaactatggcctcgcatatggagccgcattctggctcttcttaaacacctggtcagatataaaccatcgcagcagcagcgatggaggtggagggtacacgctctccacaccgccgccgcctgccagtgctggacagatggttcctcgacacctgccctgtggcaatccatctaccctttggcaagctgaaggacatcgtcgtccagtgacccgaacacgcgcggtccagaaatgtttcttccatttctctgcggagagcacaaagaggctcaagacgaaggcaaacaccgggaactgcaacggtcatcatctcctcattgaagtccctgctctctcaccttgagcgagcagtgtgccaccgtctgcatactttgttgaaggaactctatttttcttttgtgctgttatataccaagtcaggtactgctatccttactatttttgctaaaaaatgctgttatagctatgaattcatgcttaatacttatcctcctgctctcttttatgtccattttgtaacacatatatgaatatagatgctatgtgaatatgcgatacacatgtctcttcttgcaactcgagtctgacggtgtcataaatttagattcttaagttttaaattatgattctgttagttgttacagatgttaatttcaaactcttgttcttaactagctgctgttttcagcttgcccccccaaaagaattcctcggaagagagacgtcattcacaaactgcggcacaagttcatctgtgttgcgtctgacctacctgatcaaagacgttttggtgacaattgtgcaaaacatttgggatgattactcatgctcgtttcgcaggtgggaatgcttaattggcgacaagttttatctatctagagagattgcttttgttttcagaccgtgatagattagccaacgccatcaaaggaaataattgaagcatggctgtgaacctggaaatcacactctgaagtctgaacacaatgtaaacattcagaattagcacattggtcgtgtagctcattgtacataagctttatttatgctccaggagttgttactgtagttacagtgtcccaccaaatcaagaaggataaaaaatttaacgtgtgggaaaacagaaccggcccaggagaaggcccgtgcgggtgcactctcgctgcgcccaacaacactgactgggccggccgtcgatgcactgcattcccccccttccgtccgctgcatccctccgccgccaccgccgcccaagccaggtgctgaggctttcgttggtctcttcgccggcgacgagcacccaccagggcacgggcctcaggatgcagtccttggtccggaatgtctgccgagccggaagccgtggagcggcggcgaggctcctggaggccgccgcggttcatccgggggcggcgcagccgtcctcggccgtcagacacctcaggcatccttgcgggttcgctcgtccgatcggggtagatcaacccaagcctgtgcagcgccggaccattttgcgtgatggcggccgcgttccggctgccgcctccggattcggtctctgcgcgaaagttctcgttgcgacgaggggtctgtcgacggcgggaaatgctgctgaggttgcctctgattcggacgattccacctctcctgcggttgagcaccccccgcgcatcaagttcaagaggcctgacaagaccgctagacacattatgaatatcctgaacaaagaggcggtcgaaaaggtccgctcggagagggcgattcctgatgtgcagcctggatgtatcattcagatgagattgttcctgagaacaaacggcgcgagtcgacactgaaagggattgtcataggaaggcgcaacgctgggatcaatacaaccttcagattgcgtagattagtggctggcgtgggagtcgagtctgtctttccactttactcaccaaacatcaaagaaatcaaggtcttggacaggaagaaagtcaggagagctaagctgtattacctgagggacaggatgaacgcacttaaaagatgaggatttcaacttgtttctaggatttctttttgccgcgcggatcagcatggtttctcaagatgcaatcacattgtttggtgttccatctttgaaaaaaatcatagtttggggttgtcagttgccatgctccgatcttctttcttttgatttgatgcgctgtaacattagtgcgaaaattcatgtgctcaggtctattacgttactttcccaatctttttttagtatgtgcgtctgacatgaacaagctggaacactttactcatcaaagcgaaactattgtatgatgattcatgctatccggttttagatgtcaaatcatttagtctttattcacagaaacctcctgttctgaaaaatgttctggg

SEQ ID NO: 60583 - DNA, 5137 bp, Zea Mays
agcccaccaaggcgtctggcgcgccgagagctccagacgccaaagcaccactctcccgccgtccccctcactctccgccgccggcgaggtgtgatgccacgaaggtcggcggaggcgccggccatttgatgcgcccacggccgcctcctcacggtgcgctgtccaagcaccacctcctccgcatccgccgctgccttccacccgtttggtttaatgctgccctcgcccaggacccgtccctgccacccgctgcctcctcctcccccgcgtttctctcatccctcatacgctactgcacgaccaagcgcgcccgccgccccggtgagcaggcgcacgcgcgcgccgtcgcgctcgggctcggcgcgcacccctcggtgctccccgggctcgcctccttctacatcgcgctcggcgacctccccgccgcgcaagcctccgtcgagcgggcggcgggaaaggcgcgggcgttcccgtggaacctgctcatttgggggtatgccgaccgtgggctatgggacgacgtcatcctcgcgtatcagaagatgctggcgctgggcgtggccgccgacaggttcacgtacccgtcggttctgcgcacatgcggcgagctccgagattccgccattggtcgggggattgagaagcgcattctgacgtggaggtatggtctggacatgtatgtctggaacgctctggtgggaatgtacgccaagtgcggggagatgaaggacgcgcgcagggtgtttgatggaatgcctgcgcgggatgttgtcagctggaactccatggtgtctgggtacgtgtcggcgggtatgtggggcgaggcgtttgacctgctgcagttggttcctggggcgaacattgtcgcctggaacgcggttgtggcaggaaattttaaggcggggaactacggtgaggtgatgaggttggtgtcgcagatgaggacatgcggtggtccggggctggattttgtgactgttgtgattggcttgagggcttgcgctaggggtgggtatctgaggattggcaaggaattgcatgctgcctctgttcgtctatgctttgataggcttgagcgcgtggagagttcattgatcaccatgtactccagatgccagatgatgagatctgcatacctcctgttcagaacatgctcaactcagagcatagtaacatggaattcattgctagcaggatttggattcatggaccaggttgaggaggctattttcgttttcagagagatgatttattcctctgtctttccaaatgatgtcactgtgttaactatgctttcacttagtgcacgttttggacacctctgtcatggaagggagatgcactgctacattttcaagcatggacttggggcctctaacatattgcagaactcacttgtcgatatgtactcaaagtctggacagatggcaactgccaatagagtgtttgaccagatgcaatgtcaggacaggcatgcctatacttcattgattttgggctatggaatgcaaagagaagggcatctatcactgaagctctttgatgaaatgattgtaaacaatatcaaggtggaccatgtaactatggttgctgttctttcagcttgcagccactctgggctggtagctcaagggcaactacgatttgctcagatgtatgatgtgttttgcattgcaccgagggtggagcatttttcttgcatggttgatttgtactgccgtgagggtttgctgagtatggctgaggagatagttaacaagatgccattccagccaactgccgcgatgttggcaactctaatcgaggcttgccggatccatggcaaaacagaaattggggatcgggctgcaaagaggctgttggcaatgaggacaaataacccgggtcactacaaattgattgcgaacatgtatatatcagcaaaacgctggccagaactagctaaagttaggtcattaatgagcgtcatggaactaaatatgattccaactcattccttactggagtcagaatatgagatatgtccaattgaaaaagattattgcttaaaccgatgtctgcatggaggcttgtctgacgacatgacagatactgatttctctagtagtgaggaagtgaaatggaatgaagctttcggtgggtaacagtaaagctggaatccaataggctgttttgggatcatggctttcatttaaggaaaatatgttaacaacttgtattctttgcatcatggaagagaggagtttttaaaaaaggattaactgaggaccttgcatcgcacttccagtcagtgtttttaaggcgtcgcttaggcggccagacgcttgaagaattatgctcgcctaggcgtccaggtggcagtccaacgcctcgcctcgccttaccgccttaagaacactgcttccagtattgccttcaagcacgatcacaaacaatttggcatgaaaactatcaggccatactttgcataccactaccagaggatcagatacggtaacaaggaagcgttgtgttgggcacacttatgtgggcgtctcagattataagctggttactcagcagtgtggagtggcaactggcaaccataatccataatgacaaaaatggaaggctccacttggcagtgtccaaatcatgtctacgcgtttggtccagccagagtcaggaagctcactggacatggtgccgtcagagccagagatcgttcacctgactccatggctcctgaggtcactatcagtcgtgttgtccttcctgctgaacaggctgctgaatgtggaagcactcatgggctccatccctgtgctggccatgtaggttagcgagctcgcagatgtcatcttcactgccatgctgttgctgctaaactatggcctcgcatatggagccgcattctggctcttcttaaacacctggtcagatataaaccatcgcagcagcagcgatggaggtggagggtacacgctctccacaccgccgccgcctgccagtgctggacagatggttcctcgacacctgccctgtggcaatccatctaccctttggcaagctgaaggacatcgtcgtccagtgacccgaacacgcgcggtccagaaatgtttcttccatttctctgcggagagcacaaagaggctcaagacgaaggcaaacaccgggaactgcaacggtcatcatctcctcattgaagtccctgctctctcaccttgagcgagcagtgtgccaccgtctgcatactttgttgaaggaactctatttttcttttgtgctgttatataccaagtcaggtactgctatccttactatttttgctaaaaaatgctgttatagctatgaattcatgcttaatacttatcctcctgctctcttttatgtccattttgtaacacatatatgaatatagatgctatgtgaatatgcgatacacatgtctcttcttgcaactcgagtctgacggtgtcataaatttagattcttaagttttaaattatgattctgttagttgttacagatgttaatttcaaactcttgttcttaactagctgctgttttcagcttgcccccccaaaagaattcctcggaagagagacgtcattcacaaactgcggcacaagttcatctgtgttgcgtctgacctacctgatcaaagacgttttggtgacaattgtgcaaaacatttgggatgattactcatgctcgtttcgcaggagttgttactgtagttacagtgtcccaccaaatcaagaaggataaaaaatttaacgtgtgggaaaacagaaccggcccaggagaaggcccgtgcgggtgcactctcgctgcgcccaacaacactgactgggccggccgtcgatgcactgcattcccccccttccgtccgctgcatccctccgccgccaccgccgcccaagccaggtgctgaggctttcgttggtctcttcgccggcgacgagcacccaccagggcacgggcctcaggatgcagtccttggtccggaatgtctgccgagccggaagccgtggagcggcggcgaggctcctggaggccgccgcggttcatccgggggcggcgcagccgtcctcggccgtcagacacctcaggcatccttgcgggttcgctcgtccgatcggggtagatcaacccaagcctgtgcagcgccggaccattttgcgtgatggcggccgcgttccggctgccgcctccggattcggtctctgcgcgaaagttctcgttgcgacgaggggtctgtcgacggcgggaaatgctgctgaggttgcctctgattcggacgattccacctctcctgcggttgagcaccccccgcgcatcaagttcaagaggcctgacaagaccgctagacacattatgaatatcctgaacaaagaggcggtcgaaaaggtccgctcggagagggcgattcctgatgtgcagcctggatgtatcattcagatgagattggtaataccacttctttgtgttcctgctttagcgctgttcctataggtttctggtactgatccttcctgtgagtcgatgaacagcaagttcctgagaacaaacggcgcgagtcgacactgaaagggattgtcataggaaggcgcaacgctgggatcaatacaaccttcagattgcgtagattagtggctggcgtgggagtcgagtctgtctttccactttactcaccaaacatcaaagaaatcaaggtcttggacaggaagaaagtcaggagagctaagctgtattacctgagggacaggatgaacgcacttaaaagatgaggatttcaacttgtttctaggatttctttttgccgcgcggatcagcatggtttctcaagatgcaatcacattgtttggtgttccatctttgaaaaaaatcatagtttggggttgtcagttgccatgctccgatcttctttcttttgatttgatgcgctgtaacattagtgcgaaaattcatgtgctcaggtctattacgttactttcccaatctttttttagtatgtgcgtctgacatgaacaagctggaacactttactcatcaaagcgaaactattgtatgatgattcatgctatccggttttagatgtcaaatcatttagtctttattcacagaaacctcctgttctgaaaaatgttctggg

SEQ ID NO: 60584 - DNA, 3155 bp, Zea Mays
ggaaagggaaatcgaccaactgaccaagtgttcgccaaaaaccaagcatagcaaagaccaaagcaaaaggccatcactgacggcaagaaagaggaaggagaccccccgagggtcgacgtctcgcgatttccggtggcaaggttcggttttgatccagacgcggccccaggttgctcatcccagtaacagtcgccgcttccggcggagcaaccgtaggaaaagatcccgatttcctttttatccggtagcagttcgtggtggcgccgccgccccccgctaccttcgttttgcgaggttccgattcgccagctgctggagtgaggtggggagcgcgtgtcgtgggattcccgttcggatctgcggagggggctgctctcctgctccaatttggttggccggcaatgagggtccttgaatcttgttgatgcgctgccagatgcgggaggagtactgggggaaggtttcttgaaatcttcgtctgggctccgtggagtgaggtccctcgccgggatcgccctgtcgtcctatgggctgtgtcagttccagacaattccacggcggggacgaccgtggggacggcaagccgcgccggcggccctcgagcaactcgctgaagcgcctggttagttccagttccagcaagaggcatgaggagttagaagaggagtatgaggaaggggtggctgtggcagccacgtcctcaagcgccggacgccgcgctgggaatgacgccagcacggcgaggttgatccggaagcctccagcattggtggtcgaggctgtgccggcattgttagaggaggcagccactttggcggttggtgtagttgatgcagaaagggaggtttctgcaacgactgggaaccggaagaggcctccagcggatgtacaagtcaatggtgtggcggaacaagagccgaggagcggtggcgttagagcagagggggaggccaaactgaggaccaaggacatgcccaatggcgtccagggggagcacgtggcagcaggatggccgagatggctcacagaggtggcggcagaggcggttcgtgggtggcaacctcggagggccgagtcttttgagaagttggacaagataggacaaggtacatatagcagcgtttataaagcacgtgatcttgagaacggaaaaattgtggctctgaagaaagttcggtttgccaatatggaccctgagagtgtccgatttatggcaagggaaatccacatcttaagaagacttgatcatccaaatgtcatcaaacttgaaggtttggtgacgtcacgcatgtcaagcagcttgtatcttgtatttgaatacatggagcatgaccttgcaggccttgcagctaccccaggcttaaaattctcagaacctcaggtcaagtgttacatgcaacagctactctctggacttgaccattgtcataaccgtggtgttttgcatcgggatataaagggtgcaaatctcctacttgacaataatggcattcttaaaatagcagattttggtctagctacattctttaatcccaaccaaaaacaacatttgacaagtcgcgtagtaacattgtggtaccggcctcctgagcttttgttgggttctactaactatggtgctgctgttgatctatggagtgccggttgcattcttgctgagttgctgtcagggaagcctatcatgccaggacgaactgaggtggaacagttacacaagatttttaagctttgtggttcaccatcagaggagttttgggctaatctgaagttatcccgagctaccatattcaagcctcagcatccgtaccgccgatgtgtgaatgatgtatataaggacttccctactactgctttaacacttctggactatctacttgctgtagaacctgggaataggggtaccgctgcatctgcccttgacagtgaattctttacaacaaagccttatgcctgtgatccatcaaatctacccaaatatcccccaagcaaggaatacgatgctaagcttcgagatgaagaagctaggaggcaaagagcagctgctaaaggacaggaagctgaagctggacggaggaagcaacttcctgcacccgatgcaccgccgagttcaggtgaattccaaaaacagcacttacaagttcactccaaaggaggatgtttctggatttccaattgatccgtcagcaagagctgcagataatggttacccacagcgtgttcctttgatgcaagctggccgttcttcgtccactctgggcagatcaagtggaatggatccaaaagcccaacgatttcacacctcccaaattgttactattactacagaaatgtccaaccaatctactgcatctgggcagagaggcaatgctccgaagatgtctaaccttggggaaagtgcccggaggcaatatttgagagagcaccggtccagttcaagatacagtcagctcaccgctgctgacccttctgacagacctgagtggaatcatcagttccaagaaagaccatcatcttcccatcggaaggatgatgctgcggtaaacaaagagactacagtggtgaatggcacaaagaagaacagaatccactattcgggaccactgatgcctcacggagcgaatatggatgagattcttagagagcacgagcgacagatccaacaggcggtacgaagagcccgccttgacaaggggaagggaaagcacaacggcgagagagaccagtcagaggcactgctgtacaccaccgggaatgtcagggctgatcgctgaaaagttcagtttggtgtggacccccgatttgagcaaccatcagaagcgtagaaaatagcattgagtcccttctatttttccacaccaagtggagaggtttttgctttgccagaaactccaactcctgatgcggtttggtgcccaggagatacagctgccaaaaagaaaacctgttcctgtagagatttaccacccagagtttagcattaggctgtctaaaatatttttttctcaagatttgttgctggttatccatagccatcaattgtatatctcaagtcaagagtactctccctgaaagttgatccacatacctgttttgacatatgacaagatgaatacagatcgaaatacaggccactgtctgctaccctctgaactctg

SEQ ID NO: 60585 - DNA, 3151 bp, Zea Mays
ggaaagggaaatcgaccaactgaccaagtgttcgccaaaaaccaagcatagcaaagaccaaagcaaaaggccatcactgacggcaagaaagaggaaggagaccccccgagggtcgacgtctcgcgatttccggtggcaaggttcggttttgatccagacgcggccccaggttgctcatcccagtaacagtcgccgcttccggcggagcaaccgtaggaaaagatcccgatttcctttttatccggtagcagttcgtggtggcgccgccgccccccgctaccttcgttttgcgaggttccgattcgccagctgctggagtgaggtggggagcgcgtgtcgtgggattcccgttcggatctgcggagggggctgctctcctgctccaatttggttggccggcaatgagggtccttgaatcttgttgatgcgctgccagatgcgggaggagtactgggggaaggtttcttgaaatcttcgtctgggctccgtggagtgaggtccctcgccgggatcgccctgtcgtcctatgggctgtgtcagttccagacaattccacggcggggacgaccgtggggacggcaagccgcgccggcggccctcgagcaactcgctgaagcgcctggttagttccagttccagcaagaggcatgaggagttagaagaggagtatgaggaaggggtggctgtggcagccacgtcctcaagcgccggacgccgcgctgggaatgacgccagcacggcgaggttgatccggaagcctccagcattggtggtcgaggctgtgccggcattgttagaggaggcagccactttggcggttggtgtagttgatgcagaaagggaggtttctgcaacgactgggaaccggaagaggcctccagcggatgtacaagtcaatggtgtggcggaacaagagccgaggagcggtggcgttagagcagagggggaggccaaactgaggaccaaggacatgcccaatggcgtccagggggagcacgtggcagcaggatggccgagatggctcacagaggtggcggcagaggcggttcgtgggtggcaacctcggagggccgagtcttttgagaagttggacaagataggacaaggtacatatagcagcgtttataaagcacgtgatcttgagaacggaaaaattgtggctctgaagaaagttcggtttgccaatatggaccctgagagtgtccgatttatggcaagggaaatccacatcttaagaagacttgatcatccaaatgtcatcaaacttgaaggtttggtgacgtcacgcatgtcaagcagcttgtatcttgtatttgaatacatggagcatgaccttgcaggccttgcagctaccccaggcttaaaattctcagaacctcaggtcaagtgttacatgcaacagctactctctggacttgaccattgtcataaccgtggtgttttgcatcgggatataaagggtgcaaatctcctacttgacaataatggcattcttaaaatagcagattttggtctagctacattctttaatcccaaccaaaaacaacatttgacaagtcgcgtagtaacattgtggtaccggcctcctgagcttttgttgggttctactaactatggtgctgctgttgatctatggagtgccggttgcattcttgctgagttgctgtcagggaagcctatcatgccaggacgaactgaggtggaacagttacacaagatttttaagctttgtggttcaccatcagaggagttttgggctaatctgaagttatcccgagctaccatattcaagcctcagcatccgtaccgccgatgtgtgaatgatgtatataaggacttccctactactgctttaacacttctggactatctacttgctgtagaacctgggaataggggtaccgctgcatctgcccttgacagtgaattctttacaacaaagccttatgcctgtgatccatcaaatctacccaaatatcccccaagcaaggaatacgatgctaagcttcgagatgaagaagctaggaggcaaagagcagctgctaaaggacaggaagctgaagctggacggaggaagcaacttcctgcacccgatggtaatagtggattgcagcaccgccgagttcaggtgaattccaaaaacagcacttacaagttcactccaaaggaggatgtttctggatttccaattgatccgtcagcaagagctgcagataatggttacccacagcgtgttcctttgatgcaagctggccgttcttcgtccactctgggcagatcaagtggaatggatccaaaagcccaacgatttcacacctcccaaattgttactattactacagaaatgtccaaccaatctactgcatctgggcagagaggcaatgctccgaagatgtctaaccttggggaaagtgcccggaggcaatatttgagagagcaccggtccagttcaagatacagtcagctcaccgctgctgacccttctgacagacctgagtggaatcatcagttccaagaaagaccatcatcttcccatcggaaggatgatgctgcggtgaatggcacaaagaagaacagaatccactattcgggaccactgatgcctcacggagcgaatatggatgagattcttagagagcacgagcgacagatccaacaggcggtacgaagagcccgccttgacaaggggaagggaaagcacaacggcgagagagaccagtcagaggcactgctgtacaccaccgggaatgtcagggctgatcgctgaaaagttcagtttggtgtggacccccgatttgagcaaccatcagaagcgtagaaaatagcattgagtcccttctatttttccacaccaagtggagaggtttttgctttgccagaaactccaactcctgatgcggtttggtgcccaggagatacagctgccaaaaagaaaacctgttcctgtagagatttaccacccagagtttagcattaggctgtctaaaatatttttttctcaagatttgttgctggttatccatagccatcaattgtatatctcaagtcaagagtactctccctgaaagttgatccacatacctgttttgacatatgacaagatgaatacagatcgaaatacaggccactgtctgctaccctctgaactctg

SEQ ID NO: 60586 - DNA, 3193 bp, Zea Mays
ggaaagggaaatcgaccaactgaccaagtgttcgccaaaaaccaagcatagcaaagaccaaagcaaaaggccatcactgacggcaagaaagaggaaggagaccccccgagggtcgacgtctcgcgatttccggtggcaaggttcggttttgatccagacgcggccccaggttgctcatcccagtaacagtcgccgcttccggcggagcaaccgtaggaaaagatcccgatttcctttttatccggtagcagttcgtggtggcgccgccgccccccgctaccttcgttttgcgaggttccgattcgccagctgctggagtgaggtggggagcgcgtgtcgtgggattcccgttcggatctgcggagggggctgctctcctgctccaatttggttggccggcaatgagggtccttgaatcttgttgatgcgctgccagatgcgggaggagtactgggggaaggtttcttgaaatcttcgtctgggctccgtggagtgaggtccctcgccgggatcgccctgtcgtcctatgggctgtgtcagttccagacaattccacggcggggacgaccgtggggacggcaagccgcgccggcggccctcgagcaactcgctgaagcgcctggttagttccagttccagcaagaggcatgaggagttagaagaggagtatgaggaaggggtggctgtggcagccacgtcctcaagcgccggacgccgcgctgggaatgacgccagcacggcgaggttgatccggaagcctccagcattggtggtcgaggctgtgccggcattgttagaggaggcagccactttggcggttggtgtagttgatgcagaaagggaggtttctgcaacgactgggaaccggaagaggcctccagcggatgtacaagtcaatggtgtggcggaacaagagccgaggagcggtggcgttagagcagagggggaggccaaactgaggaccaaggacatgcccaatggcgtccagggggagcacgtggcagcaggatggccgagatggctcacagaggtggcggcagaggcggttcgtgggtggcaacctcggagggccgagtcttttgagaagttggacaagataggacaaggtacatatagcagcgtttataaagcacgtgatcttgagaacggaaaaattgtggctctgaagaaagttcggtttgccaatatggaccctgagagtgtccgatttatggcaagggaaatccacatcttaagaagacttgatcatccaaatgtcatcaaacttgaaggtttggtgacgtcacgcatgtcaagcagcttgtatcttgtatttgaatacatggagcatgaccttgcaggccttgcagctaccccaggcttaaaattctcagaacctcaggtcaagtgttacatgcaacagctactctctggacttgaccattgtcataaccgtggtgttttgcatcgggatataaagggtgcaaatctcctacttgacaataatggcattcttaaaatagcagattttggtctagctacattctttaatcccaaccaaaaacaacatttgacaagtcgcgtagtaacattgtggtaccggcctcctgagcttttgttgggttctactaactatggtgctgctgttgatctatggagtgccggttgcattcttgctgagttgctgtcagggaagcctatcatgccaggacgaactgaggtggaacagttacacaagatttttaagctttgtggttcaccatcagaggagttttgggctaatctgaagttatcccgagctaccatattcaagcctcagcatccgtaccgccgatgtgtgaatgatgtatataaggacttccctactactgctttaacacttctggactatctacttgctgtagaacctgggaataggggtaccgctgcatctgcccttgacagtgaatttgttgttttctttttgtagttctttacaacaaagccttatgcctgtgatccatcaaatctacccaaatatcccccaagcaaggaatacgatgctaagcttcgagatgaagaagctaggaggcaaagagcagctgctaaaggacaggaagctgaagctggacggaggaagcaacttcctgcacccgatggtaatagtggattgcagcaccgccgagttcaggtgaattccaaaaacagcacttacaagttcactccaaaggaggatgtttctggatttccaattgatccgtcagcaagagctgcagataatggttacccacagcgtgttcctttgatgcaagctggccgttcttcgtccactctgggcagatcaagtggaatggatccaaaagcccaacgatttcacacctcccaaattgttactattactacagaaatgtccaaccaatctactgcatctgggcagagaggcaatgctccgaagatgtctaaccttggggaaagtgcccggaggcaatatttgagagagcaccggtccagttcaagatacagtcagctcaccgctgctgacccttctgacagacctgagtggaatcatcagttccaagaaagaccatcatcttcccatcggaaggatgatgctgcggtaaacaaagagactacagtggtgaatggcacaaagaagaacagaatccactattcgggaccactgatgcctcacggagcgaatatggatgagattcttagagagcacgagcgacagatccaacaggcggtacgaagagcccgccttgacaaggggaagggaaagcacaacggcgagagagaccagtcagaggcactgctgtacaccaccgggaatgtcagggctgatcgctgaaaagttcagtttggtgtggacccccgatttgagcaaccatcagaagcgtagaaaatagcattgagtcccttctatttttccacaccaagtggagaggtttttgctttgccagaaactccaactcctgatgcggtttggtgcccaggagatacagctgccaaaaagaaaacctgttcctgtagagatttaccacccagagtttagcattaggctgtctaaaatatttttttctcaagatttgttgctggttatccatagccatcaattgtatatctcaagtcaagagtactctccctgaaagttgatccacatacctgttttgacatatgacaagatgaatacagatcgaaatacaggccactgtctgctaccctctgaactctg

SEQ ID NO: 60587 - DNA, 998 bp, Zea Mays
ggttacagatatagaaattgaagcggagaaatccctcatcgaagaccaagctaaagaaaagatggagaaggcgatcgaaacagtccaaactaacttcaacactgtgaggacagggcgtgcaagcccggccatgcttgaccggatcgaggtcgagtactacggaactccagtgaacttgaagagcattgcacagataagcactccagatgcaacttctcttcttattcaaccatatgacaagtcaagcctcaagcttatcgagaaaactatagttgccgcaaatcttggtgtgacaccaagcaatgacggagaagtgatacgagtgactgtcccaccattgacatctgatcgcagaaaggaattagcaaagacagtagctaaattggctgaagatggcaaggttgctataaggaacataagaagagatgcaatcaaagcttacgataaactacagaaggaaaagaagctttctgaagacaatgtgaaagatttgtcagctgacctacaaaaagtcacggacgagtacatgaaaaatatcgattccatccagaagcagaaggaacaggaactgatgaaaatctagatcttcaacaagctgagctgactgtgtatgactgcttggcgccgcgccgccggggactgcgcacgttttgaggtcaggtcaggtgctttgctgcaaccttctggatgcacacatgctgaggcaatgctgttgtgggtcgtttctctttttttttttcgtatttcttttgtaatgctcgtaaataggctctcgctcgtcgccgtgttgtctgactgttgttacgttgtcaatacttgtcgccatctgaatcgaatgtctgaaatgttcctgcccgactctcgtacgcttgtttgtcagaactcagaactctgctgaggttgtcaaagctatttcgcaccagctagcttagctccacgtgctgggctcaagctcaagcagagagtacgtgggctttgatgggcctctcctttggttc

SEQ ID NO: 60588 - DNA, 1353 bp, Zea Mays
gcgactggttcttggacactcggacaagagttctgacgcatgccactattgaagaaattgaagcggagaaatccctcatcgaagaccaagctaaagaaaagatggagaaggcgatcgaaacagtccaaactaacttcaacactgtgaggacagggcgtgcaagcccggccatgcttgaccggatcgaggtcgagtactacggaactccagtgaacttgaagagcattgcacagataagcactccagatgcaacttctcttcttattcaaccatatgacaagtcaagcctcaagcttatcgagaaaactatagttgccgcaaatcttggtgtgacaccaagcaatgacggagaagtgatacgagtgactgtcccaccattgacatctgatcgcagaaaggaattagcaaagacagtagctaaattggctgaagatggcaaggttgctataaggaacataagaagagatgcaatcaaagcttacgataaactacagaaggaaaagaagctttctgaagacaatgtgaaagatttgtcagctgacctacaaaaagtcacggacgagtacatgaaaaatatcgattccatccagaagcagaaggaacaggaactgatgaaaatctagatcttcaacaagctgagctgactgtgtatgactggtgagtaataaccgcctctgtaaagcatgaacccctgcatatatgttgggggaatgtatctggtgctcatcagggatacggtactcacgtgtacatttaacagcagcatcaattttataaagaactgttccacccccttcccatggagggaggggttctttgtaaaattagtttctaccattggatacaaggtagatgtcacaaatttaaatatgcactcctttgaacaccggatacgttctcatatgtcggtgagtccagaacgcagcgatgggaatgctttctgaagcagtgttctctgttcatggttggcagcttggcgccgcgccgccggggactgcgcacgttttgaggtcaggtcaggtgctttgctgcaaccttctggatgcacacatgctgaggcaatgctgttgtgggtcgtttctctttttttttttcgtatttcttttgtaatgctcgtaaataggctctcgctcgtcgccgtgttgtctgactgttgttacgttgtcaatacttgtcgccatctgaatcgaatgtctgaaatgttcctgcccgactctcgtacgcttgtttgtcagaactcagaactctgctgaggttgtcaaagctatttcgcaccagctagcttagctccacgtgctgggctcaagctcaagcagagagtacgtgggctttgatgggcctctcctttggttc

SEQ ID NO: 60589 - DNA, 703 bp, Zea Mays
aggtccgtgcattattctcaagttgggctcagcccatgtaggaggagcattccatccgggcccacttgtcatcggaccgagtggcgtcttcctcttcccttcgtaaccttccagacccgaccgcagcagcccggggcaacaagcgaaccggcggcgtcatcggaccgagtggcgtcttcctcctcccttcgtaaccttccagacccgaccgcagcagcccggggcaacaagcgaaccggcggcagcgatggggatcggtgagcacttcgagggcgtcaagcagcactgggcgagcaacttcgccttcctcgactacttcaagaagctctacgagatggacaagcagggggccaacctcaggttcatctactggtgggaggacaaggtctcaggccagaagagctgaaccacatcgagtgatgcctattctactgagcacaccagcgtgacaacaaaacattgacgtctctcatgccgagttcttagtttttctttcctagttttctctaataagtgtggaattggttgaggaagccaactggacaatgcatttttcatctccgtcatgggttatgttcatccatggtcaatctggtgtaaacagcaaatcctatccgttttcgagatatgttttctcaaactactgatggagtttagagtgttcattccacctctgctacaaaactgtagctattgctgtatc

SEQ ID NO: 60590 - DNA, 966 bp, Zea Mays
aggtccgtgcattattctcaagttgggctcagcccatgtaggaggagcattccatccgggcccacttgtcatcggaccgagtggcgtcttcctcttcccttcgtaaccttccagacccgaccgcagcagcccggggcaacaagcgaaccggcggcgtcatcggaccgagtggcgtcttcctcctcccttcgtaaccttccagacccgaccgcagcagcccggggcaacaagcgaaccggcggcagcgatggggatcggtgagcacttcgagggcgtcaagcagcactgggcgagcaacttcgccttcctcgactacttcaagaaggtctacggccgcgccgagccccctccccaagtgggtccgacgccgacgtcgacgagttcatcgcctccgaccccggtctacgggccccagctcaaggccctgcgggagtcgaggaagttcgcgctcgccggggccctcgtcggcgccgcccacctcggcggcgtcgcgctcaagtactccaaggcgccgcacggcgtcctgctggcgacgggcttcggcgcgatcaccggcgccgtgctgggatctgaggtggcggaccactggtaccagctctacgagatggacaagcagggggccaacctcaggttcatctactggtgggaggacaaggccagaagagctgaaccacatcgagtgatgcctattctactgagcacaccagcgtgacaacaaaacattgacgtctctcatgccgagttcttagtttttctttcctagttttctctaataagtgtggaattggttgaggaagccaactggacaatgcatttttcatctccgtcatgggttatgttcatccatggtcaatctggtgtaaacagcaaatcctatccgttttcgagatatgttttctcaaactactgatggagtttagagtgttcattccacctctgctacaaaactgtagctattgctgtatc

SEQ ID NO: 60591 - DNA, 628 bp, Zea Mays
aggtccgtgcattattctcaagttgggctcagcccatgtaggaggagcattccatccgggcccacttgtcatcggaccgagtggcgtcttcctcttcccttcgtaaccttccagacccgaccgcagcagcccggggcaacaagcgaaccggcggcgtcatcggaccgagtggcgtcttcctcctcccttcgtaaccttccagacccgaccgcagcagcccggggcaacaagcgaaccggcggcagcgatggggatcggtgagcacttcgagggcgtcaagcagcactgggcgagcaacttcgccttcctcgactacttcaagaagagctgaaccacatcgagtgatgcctattctactgagcacaccagcgtgacaacaaaacattgacgtctctcatgccgagttcttagtttttctttcctagttttctctaataagtgtggaattggttgaggaagccaactggacaatgcatttttcatctccgtcatgggttatgttcatccatggtcaatctggtgtaaacagcaaatcctatccgttttcgagatatgttttctcaaactactgatggagtttagagtgttcattccacctctgctacaaaactgtagctattgctgtatc

SEQ ID NO: 60592 - DNA, 1409 bp, Zea Mays
gtcccttttgttcacttggcttatctgggttcaaactggcttgatgtgccctgcatcgtccttcagcatgttacccctcggctaaaggagcttatgacattcaagtctcaagaggaggctaaagttgaggcttaccctaacctcaatgataattctaatgcaaatgattcctctcagaaaagaaaaccaagtaacaataaacagcagccccctgctaagaaaagaaaagagaatccaccaaaaagtaccatgccatcagatgaccaaggatcaaatgtgcaaagtgggcacagtggtgctgttactgatgtagaagtcggaggggccagcagggagaaggtcatggcatctatcgagatgaaagtggacagtgacagccgaacagggaaatcaagttcaaatgaaccaaagccatccttttataatgacaactgtacagtttttgtgtcaaatattgacttgaaagcaaatgaggatgatctcaggcgattcttctctgatattggtggtgccacagcaataagattgctgagggacagattcaccaaaaaatcaagggggttggcctatgtggactttttagacaacaagcatcttgaggcagctattaagaaaaacaagcagaagctgcttggaaagaaagtgagtatcgcgcgatcagatccaagcaagggtaagaagagccgtgaagcaggtcaaacaagccaggataatttacctccgagtggtggtgatgatgcaaaagcaacaggatccagtggaccagacaatgaagtacccaagggtgatgcaaaaaccatagggaagaataccctttttgcaccacgagctctggttaaacctcttggatggacaaacaaggatgagaagaaaccagatgttgcaggggagttgaaatcaaatgaggagttccgaaatctgttactaaagaagtgatatcagttggcaggtgtggatctccatgccccaatccagtgccaagatttgtggtgccttcatctctatgttagaatgatggacctgtagtagcagcttgaactggggatctacaaccgttatgtcttaccccgatgtagacatgaatatttctttctgctagggagattatacaagccatgccgaattgcagggtggtgaaggtgaaaacgggacgttgcgttcgagcagaaaaaccctgcccatgtgaaaagaaaacactgaccttataatatgtgctcactttctttttgaaccatacgtacgcattgctggtgaaacatcactgcatctcaaaaatgtgtaatctactctacgcggcttgattggagatgcagatttatttgattgtacgttgggaccttttggaccttgcaactgcatatgttgagaggctaacatcttttcagagcggcagcccaacgacactttgc

SEQ ID NO: 60593 - DNA, 2960 bp, Zea Mays
atggcgacggaagaggagctgccggaggcggcggccgcgcctgcgccagcaggtggaggaggcggggacgacgcggagatgcccgatgccgccgtgccgtcgggctcccactcggactcgtccgactccgactccgacgacgaagccgccactgccgccgccgagctccgcatccaggccctagagaaaaccctacaggagcagccactggactacgagacccacgtgcagtatatccagtgcctgaggaaggcaggcaacattgagaagcttcgcgtggcaagggaagagatgaacaagtactttcctctaaccccgaagatgtggcaggagtgggccaaggacgagatctcattgagctcgagtgaggaatcttttggtgacattgaaaagatctacgggcatggggtgcaggaatacctgtccatcaagttatggcgggattaccttgattatgttgaagagcatgatcattcagtgtctcagtgtacaccttctggcctctccaagatgagaaatttgtttgaaagtgctattaccgcaggtgggctccatgttactgagggcagcaagctatgggcagcctatagagaatatgagatggccattttgatcaccatcgctgatgccaatgatgaggagagggaaaagcaagttcagcgtatacgcatgctattccaccgccagttatctgttcctttggctgatatggaatctacacttgctgagtataagagctgggaggctgagcaggggaatgcaaatgatcctggtgcagattttgatggtgtcccctcaaatgttgtatctgcttacaaaaaggccaatgatatgtacaatgaaaggaagcaatacgaggatcaactaagcaatgcaggcacatttgaaggtgacaaactgcagcaatttatgaagtacatcaaatttgaggaggcttctggtgaccctgctcgtgttcaagttctgtatgagcgagctgtttcagagcttcctgtttcaagtgatatatggatgggatatacaagttacctggatagaaccctgaaggtgccttctgtagtcagaagtgtttattacagagccacaagaaattgtacatgggttggtgagttatgggtccattatttgttgtctttggagcgtattcgtgcttctgaagaagagctgcagcatgtatttgaacgggcaatacaatgtaccttttcaaccatacaagagtatttcaatatttatcttactcgagttcatggtttaagacggaggatttctgatggcttggattttcaactgattaggcagacattaacgaatttctctcatctcaactgagtaccaaggagttactgcgcttatatgcttattgggccaaactagagcttagtctcggcaaagatctttctgcagctcgtggagtttgggaaaacgcgatcaagaaaagtttgggagcagtacattttaatggagataaaaatggaccatgtacatgaggcgagatccctttataagcgttgttatagcaaaagatttgctgggtctggatcagaggagatatgctactcatggataagatttgaagaggagaatggcaccttggatgattatgatcttgctgtaaagaaggttacccctcggctaaaggagcttatgacattcaagtctcaagaggaggctaaagttgaggcttaccctaacctcaatgataattctaatgcaaatgattcctctcagaaaagaaaaccaagtaacaataaacagcagccccctgctaagaaaagaaaagagaatccaccaaaaagtaccatgccatcagatgaccaaggatcaaatgtgcaaagtgggcacagtggtgctgttactgatgtagaagtcggaggggccagcagggagaaggtcatggcatctatcgagatgaaagtggacagtgacagccgaacagggaaatcaagttcaaatgaaccaaagccatccttttataatgacaactgtacagtttttgtgtcaaatattgacttgaaagcaaatgaggatgatctcaggcgattcttctctgatattggtggtgccacagcaataagattgctgagggacagattcaccaaaaaatcaagggggttggcctatgtggactttttagacaacaagcatcttgaggcagctattaagaaaaacaagcagaagctgcttggaaagaaagtgagtatcgcgcgatcagatccaagcaagggtaagaagagccgtgaagcaggtcaaacaagccaggataatttacctccgagtggtggtgatgatgcaaaagcaacaggatccagtggaccagacaatgaagtacccaagggtgatgcaaaaaccatagggaagaataccctttttgcaccacgagctctggttaaacctcttggatggacaaacaaggatgagaagaaaccagatgttgcaggggagttgaaatcaaatgaggagttccgaaatctgttactaaagaagtgatatcagttggcaggtgtggatctccatgccccaatccagtgccaagatttgtggtgccttcatctctatgttagaatgatggacctgtagtagcagcttgaactggggatctacaaccgttatgtcttaccccgatgtagacatgaatatttctttctgctagggagattatacaagccatgccgaattgcagggtggtgaaggtgaaaacgggacgttgcgttcgagcagaaaaaccctgcccatgtgaaaagaaaacactgaccttataatatgtgctcactttctttttgaaccatacgtacgcattgctggtgaaacatcactgcatctcaaaaatgtgtaatctactctacgcggcttgattggagatgcagatttatttgattgtacgttgggaccttttggaccttgcaactgcatatgttgagaggctaacatcttttcagagcggcagcccaacgacactttgc

SEQ ID NO: 60594 - DNA, 2984 bp, Zea Mays
atggcgacggaagaggagctgccggaggcggcggccgcgcctgcgccagcaggtggaggaggcggggacgacgcggagatgcccgatgccgccgtgccgtcgggctcccactcggactcgtccgactccgactccgacgacgaagccgccactgccgccgccgagctccgcatccaggccctagagaaaaccctacaggagcagccactggactacgagacccacgtgcagtatatccagtgcctgaggaaggcaggcaacattgagaagcttcgcgtggcaagggaagagatgaacaagtactttcctctaaccccgaagatgtggcaggagtgggccaaggacgagatctcattgagctcgagtgaggaatcttttggtgacattgaaaagatctacgggcatggggtgcaggaatacctgtccatcaagttatggcgggattaccttgattatgttgaagagcatgatcattcagtgtctcagtgtacaccttctggcctctccaagatgagaaatttgtttgaaagtgctattaccgcaggtgggctccatgttactgagggcagcaagctatgggcagcctatagagaatatgagatggccattttgatcaccatcgctgatgccaatgatgaggagagggaaaagcaagttcagcgtatacgcatgctattccaccgccagttatctgttcctttggctgatatggaatctacacttgctgagtataagagctgggaggctgagcaggggaatgcaaatgatcctggtgcagattttgatggtgtcccctcaaatgttgtatctgcttacaaaaaggccaatgatatgtacaatgaaaggaagcaatacgaggatcaactaagcaatgcaggcacatttgaaggtgacaaactgcagcaatttatgaagtacatcaaatttgaggaggcttctggtgaccctgctcgtgttcaagttctgtatgagcgagctgtttcagagcttcctgtttcaagtgatatatggatgggatatacaagttacctggatagaaccctgaaggtgccttctgtagtcagaagtgtttattacagagccacaagaaattgtacatgggttggtgagttatgggtccattatttgttgtctttggagcgtattcgtgcttctgaagaagagctgcagcatgtatttgaacgggcaatacaatgtaccttttcaaccatacaagagtatttcaatatttatcttactcgagttcatggtttaagacggaggatttctgatggcttggattttcaactgattaggcagacattaacggatgctgcagaatttctctcatctcaactgagtaccaaggagttactgcgcttatatgcttattgggccaaactagagcttagtctcggcaaagatctttctgcagctcgtggagtttgggaaaacgcgatcaagaaaagtgggtctgtttttgaagtttgggagcagtacattttaatggagataaaaatggaccatgtacatgaggcgagatccctttataagcgttgttatagcaaaagatttgctgggtctggatcagagatatgctactcatggataagatttgaagaggagaatggcaccttggatgattatgatcttgctgtaaagaaggttacccctcggctaaaggagcttatgacattcaagtctcaagaggaggctaaagttgaggcttaccctaacctcaatgataattctaatgcaaatgattcctctcagaaaagaaaaccaagtaacaataaacagcagccccctgctaagaaaagaaaagagaatccaccaaaaagtaccatgccatcagatgaccaaggatcaaatgtgcaaagtgggcacagtggtgctgttactgatgtagaagtcggaggggccagcagggagaaggtcatggcatctatcgagatgaaagtggacagtgacagccgaacagggaaatcaagttcaaatgaaccaaagccatccttttataatgacaactgtacagtttttgtgtcaaatattgacttgaaagcaaatgaggatgatctcaggcgattcttctctgatattggtggtgccacagcaataagattgctgagggacagattcaccaaaaaatcaagggggttggcctatgtggactttttagacaacaagcatcttgaggcagctattaagaaaaacaagcagaagctgcttggaaagaaagtgagtatcgcgcgatcagatccaagcaagggtaagaagagccgtgaagcaggtcaaacaagccaggataatttacctccgagtggtggtgatgatgcaaaagcaacaggatccagtggaccagacaatgaagtacccaagggtgatgcaaaaaccatagggaagaataccctttttgcaccacgagctctggttaaacctcttggatggacaaacaaggatgagaagaaaccagatgttgcaggggagttgaaatcaaatgaggagttccgaaatctgttactaaagaagtgatatcagttggcaggtgtggatctccatgccccaatccagtgccaagatttgtggtgccttcatctctatgttagaatgatggacctgtagtagcagcttgaactggggatctacaaccgttatgtcttaccccgatgtagacatgaatatttctttctgctagggagattatacaagccatgccgaattgcagggtggtgaaggtgaaaacgggacgttgcgttcgagcagaaaaaccctgcccatgtgaaaagaaaacactgaccttataatatgtgctcactttctttttgaaccatacgtacgcattgctggtgaaacatcactgcatctcaaaaatgtgtaatctactctacgcggcttgattggagatgcagatttatttgattgtacgttgggaccttttggaccttgcaactgcatatgttgagaggctaacatcttttcagagcggcagcccaacgacactttgc

SEQ ID NO: 60595 - DNA, 3041 bp, Zea Mays
gggaaaacgaatcgacctccacctgagattgcacagttgcgcaaattggcacacgggcacgcacgagagacatggcgacggaagaggagctgccggaggcggcggccgcgcctgcgccagcaggtggaggaggcggggacgacgcggagatgcccgatgccgccgtgccgtcgggctcccactcggactcgtccgactccgactccgacgacgaagccgccactgccgccgccgagctccgcatccaggccctagagaaaaccctacaggagcagccactggactacgagacccacgtgcagtatatccagtgcctgaggaaggcaggcaacattgagaagcttcgcgtggcaagggaagagatgaacaagtactttcctctaaccccgaagatgtggcaggagtgggccaaggacgagatctcattgagctcgagtgaggaatcttttggtgacattgaaaagatctacgggcatggggtgcaggaatacctgtccatcaagttatggcgggattaccttgattatgttgaagagcatgatcattcagtgtctcagtgtacaccttctggcctctccaagatgagaaatttgtttgaaagtgctattaccgcaggtgggctccatgttactgagggcagcaagctatgggcagcctatagagaatatgagatggccattttgatcaccatcgctgatgccaatgatgaggagagggaaaagcaagttcagcgtatacgcatgctattccaccgccagttatctgttcctttggctgatatggaatctacacttgctgagtataagagctgggaggctgagcaggggaatgcaaatgatcctggtgcagattttgatggtgtcccctcaaatgttgtatctgcttacaaaaaggccaatgatatgtacaatgaaaggaagcaatacgaggatcaactaagcaatgcaggcacatttgaaggtgacaaactgcagcaatttatgaagtacatcaaatttgaggaggcttctggtgaccctgctcgtgttcaagttctgtatgagcgagctgtttcagagcttcctgtttcaagtgatatatggatgggatatacaagttacctggatagaaccctgaaggtgccttctgtagtcagaagtgtttattacagagccacaagaaattgtacatgggttggtgagttatgggtccattatttgttgtctttggagcgtattcgtgcttctgaagaagagctgcagcatgtatttgaacgggcaatacaatgtaccttttcaaccatacaagagtatttcaatatttatcttactcgagttcatggtttaagacggaggatttctgatggcttggattttcaactgattaggcagacattaacggatgctgcagaatttctctcatctcaactgagtaccaaggagttactgcgcttatatgcttattgggccaaactagagcttagtctcggcaaagatctttctgcagctcgtggagtttgggaaaacgcgatcaagaaaagtttgggagcagtacattttaatggagataaaaatggaccatgtacatgaggcgagatccctttataagcgttgttatagcaaaagatttgctgggtctggatcagaggagatatgctactcatggataagatttgaagaggagaatggcaccttggatgattatgatcttgctgtaaagaaggttacccctcggctaaaggagcttatgacattcaagtctcaagaggaggctaaagttgaggcttaccctaacctcaatgataattctaatgcaaatgattcctctcagaaaagaaaaccaagtaacaataaacagcagccccctgctaagaaaagaaaagagaatccaccaaaaagtaccatgccatcagatgaccaaggatcaaatgtgcaaagtgggcacagtggtgctgttactgatgtagaagtcggaggggccagcagggagaaggtcatggcatctatcgagatgaaagtggacagtgacagccgaacagggaaatcaagttcaaatgaaccaaagccatccttttataatgacaactgtacagtttttgtgtcaaatattgacttgaaagcaaatgaggatgatctcaggcgattcttctctgatattggtggtgccacagcaataagattgctgagggacagattcaccaaaaaatcaagggggttggcctatgtggactttttagacaacaagcatcttgaggcagctattaagaaaaacaagcagaagctgcttggaaagaaagtgagtatcgcgcgatcagatccaagcaagggtaagaagagccgtgaagcaggtcaaacaagccaggataatttacctccgagtggtggtgatgatgcaaaagcaacaggatccagtggaccagacaatgaagtacccaagggtgatgcaaaaaccatagggaagaataccctttttgcaccacgagctctggttaaacctcttggatggacaaacaaggatgagaagaaaccagatgttgcaggggagttgaaatcaaatgaggagttccgaaatctgttactaaagaagtgatatcagttggcaggtgtggatctccatgccccaatccagtgccaagatttgtggtgccttcatctctatgttagaatgatggacctgtagtagcagcttgaactggggatctacaaccgttatgtcttaccccgatgtagacatgaatatttctttctgctagggagattatacaagccatgccgaattgcagggtggtgaaggtgaaaacgggacgttgcgttcgagcagaaaaaccctgcccatgtgaaaagaaaacactgaccttataatatgtgctcactttctttttgaaccatacgtacgcattgctggtgaaacatcactgcatctcaaaaatgtgtaatctactctacgcggcttgattggagatgcagatttatttgattgtacgttgggaccttttggaccttgcaactgcatatgttgagaggctaacatcttttcagagcggcagcccaacgacactttgc

SEQ ID NO: 60596 - DNA, 3088 bp, Zea Mays
caaggttccttttgaaaagaaatcgaattcctgagacgcccttgtccgaaaattctagaaatggggaaaacgaatcgacctccacctgagattgcacagttgcgcaaattggcacacgggcacgcacgagagacatggcgacggaagaggagctgccggaggcggcggccgcgcctgcgccagcaggtggaggaggcggggacgacgcggagatgcccgatgccgccgtgccgtcgggctcccactcggactcgtccgactccgactccgacgacgaagccgccactgccgccgccgagctccgcatccaggccctagagaaaaccctacaggagcagccactggactacgagacccacgtgcagtatatccagtgcctgaggaaggcaggcaacattgagaagcttcgcgtggcaagggaagagatgaacaagtactttcctctaaccccgaagatgtggcaggagtgggccaaggacgagatctcattgagctcgagtgaggaatcttttggtgacattgaaaagatctacgggcatggggtgcaggaatacctgtccatcaagttatggcgggattaccttgattatgttgaagagcatgatcattcagtgtctcagtgtacaccttctggcctctccaagatgagaaatttgtttgaaagtgctattaccgcaggtgggctccatgttactgagggcagcaagctatgggcagcctatagagaatatgagatggccattttgatcaccatcgctgatgccaatgatgaggagagggaaaagcaagttcagcgtatacgcatgctattccaccgccagttatctgttcctttggctgatatggaatctacacttgctgagtataagagctgggaggctgagcaggggaatgcaaatgatcctggtgcagattttgatggtgtcccctcaaatgttgtatctgcttacaaaaaggccaatgatatgtacaatgaaaggaagcaatacgaggatcaactaagcaatgcaggcacatttgaagaagtacatcaaatttgaggaggcttctggtgaccctgctcgtgttcaagttctgtatgagcgagctgtttcagagcttcctgtttcaagtgatatatggatgggatatacaagttacctggatagaaccctgaaggtgccttctgtagtcagaagtgtttattacagagccacaagaaattgtacatgggttggtgagttatgggtccattatttgttgtctttggagcgtattcgtgcttctgaagaagagctgcagcatgtatttgaacgggcaatacaatgtaccttttcaaccatacaagagtatttcaatatttatcttactcgagttcatggtttaagacggaggatttctgatggcttggattttcaactgattaggcagacattaacgaatttctctcatctcaactgagtaccaaggagttactgcgcttatatgcttattgggccaaactagagcttagtctcggcaaagatctttctgcagctcgtggagtttgggaaaacgcgatcaagaaaagtgggtctgtttttgaagtttgggagcagtacattttaatggagataaaaatggaccatgtacatgaggcgagatccctttataagcgttgttatagcaaaagatttgctgggtctggatcagaggagatatgctactcatggataagatttgaagaggagaatggcaccttggatgattatgatcttgctgtaaagaaggttacccctcggctaaaggagcttatgacattcaagtctcaagaggaggctaaagttgaggcttaccctaacctcaatgataattctaatgcaaatgattcctctcagaaaagaaaaccaagtaacaataaacagcagccccctgctaagaaaagaaaagagaatccaccaaaaagtaccatgccatcagatgaccaaggatcaaatgtgcaaagtgggcacagtggtgctgttactgatgtagaagtcggaggggccagcagggagaaggtcatggcatctatcgagatgaaagtggacagtgacagccgaacagggaaatcaagttcaaatgaaccaaagccatccttttataatgacaactgtacagtttttgtgtcaaatattgacttgaaagcaaatgaggatgatctcaggcgattcttctctgatattggtggtgccacagcaataagattgctgagggacagattcaccaaaaaatcaagggggttggcctatgtggactttttagacaacaagcatcttgaggcagctattaagaaaaacaagcagaagctgcttggaaagaaagtgagtatcgcgcgatcagatccaagcaagggtaagaagagccgtgaagcaggtcaaacaagccaggataatttacctccgagtggtggtgatgatgcaaaagcaacaggatccagtggaccagacaatgaagtacccaagggtgatgcaaaaaccatagggaagaataccctttttgcaccacgagctctggttaaacctcttggatggacaaacaaggatgagaagaaaccagatgttgcaggggagttgaaatcaaatgaggagttccgaaatctgttactaaagaagtgatatcagttggcaggtgtggatctccatgccccaatccagtgccaagatttgtggtgccttcatctctatgttagaatgatggacctgtagtagcagcttgaactggggatctacaaccgttatgtcttaccccgatgtagacatgaatatttctttctgctagggagattatacaagccatgccgaattgcagggtggtgaaggtgaaaacgggacgttgcgttcgagcagaaaaaccctgcccatgtgaaaagaaaacactgaccttataatatgtgctcactttctttttgaaccatacgtacgcattgctggtgaaacatcactgcatctcaaaaatgtgtaatctactctacgcggcttgattggagatgcagatttatttgattgtacgttgggaccttttggaccttgcaactgcatatgttgagaggctaacatcttttcagagcggcagcccaacgacactttgc

SEQ ID NO: 60597 - DNA, 3111 bp, Zea Mays
caaggttccttttgaaaagaaatcgaattcctgagacgcccttgtccgaaaattctagaaatggggaaaacgaatcgacctccacctgagattgcacagttgcgcaaattggcacacgggcacgcacgagagacatggcgacggaagaggagctgccggaggcggcggccgcgcctgcgccagcaggtggaggaggcggggacgacgcggagatgcccgatgccgccgtgccgtcgggctcccactcggactcgtccgactccgactccgacgacgaagccgccactgccgccgccgagctccgcatccaggccctagagaaaaccctacaggagcagccactggactacgagacccacgtgcagtatatccagtgcctgaggaaggcaggcaacattgagaagcttcgcgtggcaagggaagagatgaacaagtactttcctctaaccccgaagatgtggcaggagtgggccaaggacgagatctcattgagctcgagtgaggaatcttttggtgacattgaaaagatctacgggcatggggtgcaggaatacctgtccatcaagttatggcgggattaccttgattatgttgaagagcatgatcattcagtgtctcagtgtacaccttctggcctctccaagatgagaaatttgtttgaaagtgctattaccgcaggtgggctccatgttactgagggcagcaagctatgggcagcctatagagaatatgagatggccattttgatcaccatcgctgatgccaatgatgaggagagggaaaagcaagttcagcgtatacgcatgctattccaccgccagttatctgttcctttggctgatatggaatctacacttgctgagtataagagctgggaggctgagcaggggaatgcaaatgatcctggtgcagattttgatggtgtcccctcaaatgttgtatctgcttacaaaaaggccaatgatatgtacaatgaaaggaagcaatacgaggatcaactaagcaatgcaggcacatttgaaggtgacaaactgcagcaatttatgaagtacatcaaatttgaggaggcttctggtgaccctgctcgtgttcaagttctgtatgagcgagctgtttcagagcttcctgtttcaagtgatatatggatgggatatacaagttacctggatagaaccctgaaggtgccttctgtagtcagaagtgtttattacagagccacaagaaattgtacatgggttggtgagttatgggtccattatttgttgtctttggagcgtattcgtgcttctgaagaagagctgcagcatgtatttgaacgggcaatacaatgtaccttttcaaccatacaagagtatttcaatatttatcttactcgagttcatggtttaagacggaggatttctgatggcttggattttcaactgattaggcagacattaacgaatttctctcatctcaactgagtaccaaggagttactgcgcttatatgcttattgggccaaactagagcttagtctcggcaaagatctttctgcagctcgtggagtttgggaaaacgcgatcaagaaaagtgggtctgtttttgaagtttgggagcagtacattttaatggagataaaaatggaccatgtacatgaggcgagatccctttataagcgttgttatagcaaaagatttgctgggtctggatcagaggagatatgctactcatggataagatttgaagaggagaatggcaccttggatgattatgatcttgctgtaaagaaggttacccctcggctaaaggagcttatgacattcaagtctcaagaggaggctaaagttgaggcttaccctaacctcaatgataattctaatgcaaatgattcctctcagaaaagaaaaccaagtaacaataaacagcagccccctgctaagaaaagaaaagagaatccaccaaaaagtaccatgccatcagatgaccaaggatcaaatgtgcaaagtgggcacagtggtgctgttactgatgtagaagtcggaggggccagcagggagaaggtcatggcatctatcgagatgaaagtggacagtgacagccgaacagggaaatcaagttcaaatgaaccaaagccatccttttataatgacaactgtacagtttttgtgtcaaatattgacttgaaagcaaatgaggatgatctcaggcgattcttctctgatattggtggtgccacagcaataagattgctgagggacagattcaccaaaaaatcaagggggttggcctatgtggactttttagacaacaagcatcttgaggcagctattaagaaaaacaagcagaagctgcttggaaagaaagtgagtatcgcgcgatcagatccaagcaagggtaagaagagccgtgaagcaggtcaaacaagccaggataatttacctccgagtggtggtgatgatgcaaaagcaacaggatccagtggaccagacaatgaagtacccaagggtgatgcaaaaaccatagggaagaataccctttttgcaccacgagctctggttaaacctcttggatggacaaacaaggatgagaagaaaccagatgttgcaggggagttgaaatcaaatgaggagttccgaaatctgttactaaagaagtgatatcagttggcaggtgtggatctccatgccccaatccagtgccaagatttgtggtgccttcatctctatgttagaatgatggacctgtagtagcagcttgaactggggatctacaaccgttatgtcttaccccgatgtagacatgaatatttctttctgctagggagattatacaagccatgccgaattgcagggtggtgaaggtgaaaacgggacgttgcgttcgagcagaaaaaccctgcccatgtgaaaagaaaacactgaccttataatatgtgctcactttctttttgaaccatacgtacgcattgctggtgaaacatcactgcatctcaaaaatgtgtaatctactctacgcggcttgattggagatgcagatttatttgattgtacgttgggaccttttggaccttgcaactgcatatgttgagaggctaacatcttttcagagcggcagcccaacgacactttgc

SEQ ID NO: 60598 - DNA, 1099 bp, Zea Mays
gttcatctttcttgggttcacctgccatgtgcttctgtccgctgcagtgtggcatctctccttttgttcgtgtgttttgtgtcatggcatcttatgttggggttactgaagaaaacctggcagcactatttataaattgtggacaggttgtggactgtcgcatgtgtggagacccaaactcagtccttcggttcgccttcatagagttcactgatgaggagggtgcaagggctgctctgaatctgtcaggaactgtgctcggatattatcctgtcagggttctgccatcgaaaactgccattgcaccagtcaatccaacattcctacccaggtctgatgatgaacgggaaatgtgtgcgaggactatttactgcacaaacattgacaagaaggtcactcaggcagatctgaaattgttctttgagtctatatgtggagaggtctttcggctgaggttgcttggtgactaccatcattctactcgcatcgcttttgtggaatttgtgatggcagaaagtgctaccgctgccctgaactgcagtggcgtgatactgggatccttgccaataagggtgagcccctcgaagactcccgtgcgtccccgtgcgcctcgccagctgatgcactagaggtgtcctaggtacaggaggtgcggaaggcactgcttatatatcatcatcatatatatataatagagaatagacatatatgaaagaggggaggggaaaagtggcgtcacttgttctaagttatgggctcggcctttttgttttgggttcttgcttcaccaccgtgtgactgagtactaaagtgcctacgtacgccccgggtcgacgccggctggcagggcccttttgtttactaccttgcacatagaaggagaggagatggagagcttctcactagaaggatcggaagcgcgcgcgggggggtctgcctgatgctcttgtccttgatgcaacaacaggcggaaaactcctggacttttaccctgctgttcagttgtttgctgctgtgtcctggttgctactgaaacaaactggttaaaaaaaacttgggtattggagactatgtgccctgcctgttggtttggttgcta

SEQ ID NO: 60599 - DNA, 1090 bp, Zea Mays
ggcatacgccaccacgcacgcagtaggcagtactagaggcatgggcgttgccgccccccgagttactgaagaaaacctggcagcactatttataaattgtggacaggttgtggactgtcgcatgtgtggagacccaaactcagtccttcggttcgccttcatagagttcactgatgaggagggtgcaagggctgctctgaatctgtcaggaactgtgctcggatattatcctgtcagggttctgccatcgaaaactgccattgcaccagtcaatccaacattcctacccaggtctgatgatgaacgggaaatgtgtgcgaggactatttactgcacaaacattgacaagaaggtcactcaggcagatctgaaattgttctttgagtctatatgtggagagtatcattggctcatcgcaatgactgctacaggtctttcggctgaggttgcttggtgactaccatcattctactcgcatcgcttttgtggaatttgtgatggcagaaagtgctaccgctgccctgaactgcagtggcgtgatactgggatccttgccaataagggtgagcccctcgaagactcccgtgcgtccccgtgcgcctcgccagctgatgcactagaggtgtcctaggtacaggaggtgcggaaggcactgcttatatatcatcatcatatatatataatagagaatagacatatatgaaagaggggaggggaaaagtggcgtcacttgttctaagttatgggctcggcctttttgttttgggttcttgcttcaccaccgtgtgactgagtactaaagtgcctacgtacgccccgggtcgacgccggctggcagggcccttttgtttactaccttgcacatagaaggagaggagatggagagcttctcactagaaggatcggaagcgcgcgcgggggggtctgcctgatgctcttgtccttgatgcaacaacaggcggaaaactcctggacttttaccctgctgttcagttgtttgctgctgtgtcctggttgctactgaaacaaactggttaaaaaaaacttgggtattggagactatgtgccctgcctgttggtttggttgcta

SEQ ID NO: 60600 - DNA, 980 bp, Zea Mays
gccgtgacgattaattccgggttctgtccgtgcgtgctcctgggcaacaggatgagatcacgagagcggatgatgttttgtcatgagcgtgatggctcggggagcacaggttggggtgtggcatacgccaccacgcacgcagtaggcagtactagaggcatgggcgttgccgccccccgagttactgaagaaaacctggcagcactatttataaattgtggacaggttgtggactgtcgcatgtgtggagacccaaactcagtccttcggttcgccttcatagagttcactgatgaggagggtgcaagggctgctctgaatctgtcaggaactgtgctcggatattatcctgtcagggttctgccatcgaaaactgccattgcaccagtcaatccaacattcctacccaggtctgatgatgaacgggaaatgtgtgcgaggactatttactgcacaaacattgacaagaaggtcactcaggcagatctgaaattgttctttgagtctatatgtggagaggtctttcggctgaggttgcttggtgactaccatcattctactcgcatcgcttttgtggaatttgtgatggcagaaagtgctaccgctgccctgaactgcagtggcgtgatactgggatccttgccaataagggtgagcccctcgaagactcccgtgcgtccccgtgcgcctcgccagctgatgcactagaggtgtcctaggtacaggagggcccttttgtttactaccttgcacatagaaggagaggagatggagagcttctcactagaaggatcggaagcgcgcgcgggggggtctgcctgatgctcttgtccttgatgcaacaacaggcggaaaactcctggacttttaccctgctgttcagttgtttgctgctgtgtcctggttgctactgaaacaaactggttaaaaaaaacttgggtattggagactatgtgccctgcctgttggtttggttgcta

SEQ ID NO: 60601 - DNA, 2536 bp, Zea Mays
cgaagcagcagaagggaacaggcgcaccacgggactgggagagagagagagagagagagagagaaagaaaaaaaaagcagcaggcaccagtgcatcgccaccgtaccggagggggcagcgcccaaaaaaggcaaacgggagggtgggcgagcctgctcttcctgtctgggagagagaccgaagaagaggagagagaggcgcagcgcagcgcagcgcaggcgcgcatctcccccctccccttgccggctggcccctgctgcagctctgctccggtcggctctgcccccccgctctgctgactgctctgccgctgctgctgtcgcaggcgcgccaccaacccgccgatgcgcgcgtagcggcgtaggtaccatcatcatccatccccgcgacgacccaccacccacccctgcagtctgcagcatccccttccccactcccggctggtctgctgcggccacccctgcgccgatccacctccgctgcttcctgcctcaatatattcgcccgcctcgtcgcgtccgaccccgccacagaaggccttccagaaccctccgacccctcacctccgccccgctccactctcctcctcctcccgggccggccgactccgatggccgtcgtcgaggccgccgccgccgaccacgccgcgccgccgctccaggaggaggcaccgggcgcgggcgcgggcgctggcgccgacgccggggagcgcgagatgcgggatctggaggacctgctctccaagctcaaccccatggccgaggagttcgtcccgccgtccctcgcctcccccgccgccctcacgcccgcgccgctctcccccgccgcctacggcttctacccggccggcgccggcttcgcggtcgcctcgccgggccacggcggcgtcgtcggcttcccggccgtcgcggacgcccacgccgcacgaggcaggaagaagggcggagccggaggagggttcagcggccacggtcaccccgccaggaggcggaccaacagccgcaccagcatggcgcagcgcgacgagatcatccgccgcaccgtctacgtctccgacatcgatcaccaggttactgaagaaaacctggcagcactatttataaattgtggacaggttgtggactgtcgcatgtgtggagacccaaactcagtccttcggttcgccttcatagagttcactgatgaggagggtgcaagggctgctctgaatctgtcaggaactgtgctcggatattatcctgtcagggttctgccatcgaaaactgccattgcaccagtcaatccaacattcctacccaggtctgatgatgaacgggaaatgtgtgcgaggactatttactgcacaaacattgacaagaaggtcactcaggcagatctgaaattgttctttgagtctatatgtggagaggtctttcggctgaggttgcttggtgactaccatcattctactcgcatcgcttttgtggaatttgtgatggttagctagcaaaccttcttcatatttgtgcatttattttgagggaaatactttgcgcagaaattgcatgcagtgtgcggtttaaatatgtttttagcggtttaaaaatgataagaatacgctgcttgagattcgagtggatcatgtttggttggtcagtgcctccaagtgaaggtctgctgttcaaatgtctaagtctgcgtgctaatctacgctgactgtctaagactgagcctttttagtggtcctaactctggtagaaatgttaatacccgcgccttgtcactgtgttcctttttcttctaatttaagacatttcccagtagcttgtgaaggcaggggctcaattcaatgtatttgtaaaaatctgctgggcccccttttgttgtaacataactgttacctctctattttttgtttcaagaaacaaaccccgatggtaagagacatttgcttcttaatatttcaggcagaaagtgctaccgctgccctgaactgcagtggcgtgatactgggatccttgccaataagggtgagcccctcgaagactcccgtgcgtccccgtgcgcctcgccagctgatgcactagaggtgtcctaggtacaggaggtgcggaaggcactgcttatatatcatcatcatatatatataatagagaatagacatatatgaaagaggggaggggaaaagtggcgtcacttgttctaagttatgggctcggcctttttgttttgggttcttgcttcaccaccgtgtgactgagtactaaagtgcctacgtacgccccgggtcgacgccggctggcagggcccttttgtttactaccttgcacatagaaggagaggagatggagagcttctcactagaaggatcggaagcgcgcgcgggggggtctgcctgatgctcttgtccttgatgcaacaacaggcggaaaactcctggacttttaccctgctgttcagttgtttgctgctgtgtcctggttgctactgaaacaaactggttaaaaaaaacttgggtattggagactatgtgccctgcctgttggtttggttgcta

SEQ ID NO: 60602 - DNA, 5178 bp, Zea Mays
tttagctggatcgtatggctgctggcttcctgactcccattatggtcgatctgcagatgcatcttccatctccctagagcttgttgtgagggtggcacagtttgttgtgagggcgtgcagaggggtggcgcaggttgctgtgtgggcaggagagggggagcaggactcaccagagcttgctgtgagggcgtgcagaggaggggcgggcggcggccagaggggttggaggcggctagaggctcttctcagacttaaccagatgattacagattctcttgatccgagtaatggtagtggtatttgggaagatcctggaatcttgagattaaaccatgatgatgttcgtaccagaagatacgcaccatactttctctcgaatgacacatcattgccctttaggttcaaggtgtaccgaggtgctgttaattcagatgatattggcagtttctctgtaatagatgaaaactctgtgccggcggggtatgctgtcccaatttacgtcgaagaaactcctgatgaatttttcttccaacacagagaagcacgatcatcagaccatctcatcgagaaacgaatgagtgctctatcacactacatgatctccattgagtttgatggaacatcaggcccttcaaaaccaatgtcaatggaccttgtgggcatttacttctttgaagtaaatttctcttcaagtaaaaagccaattctcggcgaagaaagtttaggagcattttcgtctaatgcaaaaggcaacgatgggttaattgtgcctgtggtgctcgatgtttccttacagaactacagcaagcgtatacgagtttattcgacggtaatactatacaatgcaacatcaatgcccctcgagttgaggtttgatataccatttggtcttgcatcaaaggtaattgggcccattcctccaaacaaagagattccactgccggttcatttgtctgaagctggccagattaggtggcaccctgtcggcagaacatacttgtggagtgaaacccgctccttgtcaagtttgctttcacgtgaaaacagggttgggttcatgaaatcatctgtttgttatccttctcaccctagtaatgacccatttcgttgttgtgtatctgttgaagaatacaatgtcccttcatctgttagtaccaagaaaaaacagttgtgcagtgaaagattgaacacacaagtttctggaagttctactccaaatacttttaagcaaaatttgacaaggacacattttatacggcatgtcaagcttaataccccgcttctcataaagaactatctgcctgtttacatttccttggcaatagataatggtgggtctgcgcgggtaatttcgctaaaggaggtagggtctgcctctattttgtttgttgatccctccaatgatcttggaattacaattgatattcaagattataggtccttgaacataaagtttccccgggctgaatcattctcaactacagccaagttaaatggcttcaaattctccataactgagtcaattactttctactcaaatttgtctaattttcctcttaatgttatgctggaaaaatcaatggatgctcgttctggcgcaagagagttgtatctttctgttccattcttgttgtacaattgcacagatctattgcttactgtcactgaaagcagctctgagaggagtgggcctactcttgtgattccccctagttttgaattggatggatatgcaagacatatgcttgaaaagggtggtctttctcttgtcaatccttctgtacaatgctttacaggcaaaatgccccagatatatttgatggatggacactgctcttcttcagatataagttgtacacgtaacagtgagtctgtaaagaaagatttggacaacagtgttaaagcttatatgtttgctcctgatgggcacactccagcaactgaactttcagttaagttgaatgcttctccgcctaataatggaactgaaacaactcggcgaaattggtcaaatcccttcctccttgtccctgccagtggttcaacaaatgttactattcctcagtcatctacttctggtgccttcttagttgcagtggcatctatacctgtttcaacagaactttttggcaggacaagggctattgctttcaggccaagatacgtcatatgtaatgcatgcagcaatgatttgttctttcgacaaaaaggaacacggttttctaagcacttaagttctgggcaacactcttttcttcactggtctgatacagccagagatctgctggtatccattcggattgatggcccaggatggcaatggtcaggaagttttttccctgatcacctgggagatgctcaattgaaaatgcggaatagtgcctcaggtttatcatatatggttcgagttgaagtgcaaaatgccgatctagacttaaacagcaatagattttctggaaaaaataatatcaatactggtacagtactgattctgctttctgatgataagactggttttgtaccttacaggatcgacaatttttcaatggagaaactgcggatatatcaacagagatgtgaatctattgaaacaattgtttatccctacacatcctgtcaatatgcttgggatgagccttgctatcctcatcgccttactgttgagattcctggagaacggagtttgggtacattcaatctggacattctcaatgatgatgttcatgtgtcactaccatccacatccgagaaagctgcaagacaattctgcatctcaatacatgcggaaggagcaattaaggtgctaagtgttcttgattcaaattgccacaataaggaaacaaatgaaaaggattttctgggatcaaaggaacctaaagttgttgatcacaaactggagcttgatatgaattttgctgaggttatcaaattacacttaccattcatcgggatatctttaataagttcttgtccacaggaattgttgtttgcttctgccaaggagatgactgttgttgccatgcagagtttagatcagcagagatttacggttcagatacaatctatgcaaatcgataatcagttccctgatagcccacacccggtcatgttgtcatttgagggcagtcataagggaaaatccatgaacttttttaagagtaaagatactaagctgaaatcagcaaatgacattctttccagtaccagtgaacctgtgctgcagtttgctgcagctaaatggagaaccaaagatgtatcatttgtttcctatcaatatataaacataagtctagcacctcttcgccttgaacttgaagaacgacttgtcttgagcatgattgaattttttagatctgtttcctctcgaataaatattggacacttggagaaaagtattgagctaagtataggtggtgctacggacatgttaagagaatatgaaaaaatctcaaagaatatatcagacaagctcctggtgcaagacagtgaattgttgccttctgttgtcccagttggggctccatggcaacagatacaccttttagccagaaaacagaaaaaggtgtacattgaattgtttcagttgactcctgtcaagttgactttcagttttacgagcacaccttggctcaataggaatgaaggtggttcagaccccagcgtaggtttcaacaacgctactgcaatccagagaggtcttatggccctcttggacgttgaaggagtaccagtttaccttggagaaattatagtggaaaatcttatggccagctggcaatctgttcaggacattcttatgaggcattatagtaggcaaatcctccacgaactttataaggttttgggttctgctggcgttataggaaatcctatgggttttgctaggaatgttgggtttggtttaaaggacttcatatctgcttcaagaaaagggaaattgcagagcccagttgaactattaaacggtatagcacaaggttcaaagactcttattggaagtacggtttatgcagtcagcagtgccacttctcacttcagtaaaactgcttataagggccttgttgcctttacatatgatgagcaagctgcttcgaagatggaagaacgggaaagacagctaggtttgcatggggaaggagtactgaatggttttctagagggtctgactgggctccttcaatcaccgattaggggagctgagaaacatggtcttcccggggtcatctcaggtttagcaatgggaacagctgggcttgtggcacggcctatggctagcattcttgaagccacaggcagaactgcccagagcattagaaaccgaagcaaccctcacgaatccaactacttgcgagtacgtttccccaggcctgttgccagagatcgccctttgtttccctactcctgggaagaagccatcggtgaatcgttgcttgcccaagctgacagtggcagactaaaggaggagacatttgtcatgtgcaagacactcaagggggctgggaagttccttgtgctaactgagaagctgcttctgctagtctcaagcccatacttggtggatctaggatcgcctcggttcatcggtgttcctcctgacccgcagtggtcgatcgacacggagatgcacctcaagagcgttgttcatctggacaggtctcaggaggtagtgaacattgttgggagcaacggacagacctcacctagggacaaaagaggtggcacgagaaacagggtcatgagctcggccttcgtccccctgtttcacctcagcatagagctgccaaatgaggaggatgcagaagggacggtgcaggtcctacaggcactcatcgagaagggcaaggcacggaggtgggacaagaacatcctacaccggagcaacatcagttgaggttttcacaacagtagtagaggttggtgttttgattgaagtggaagataaactaaattccaccccgtgactcaggtggattaaatatacaaacaaggcctcaaggcagagcagtcaccagcatacataagcttagtgtgaataagaaaacaaagtgttccataggtggtcaccgttggacacgtgcttcggttttgttttaagcttagtgtgaataagaaaacaaagtgttccataggtgatcaccgttggacacgtgcttcggttttttttttttttttgcggtc

SEQ ID NO: 60603 - DNA, 8795 bp, Zea Mays
caccattctgcatggaacaacccaatgagccttgtgggtggcaagagaaccatcagagtggaacttgtgcttaaatatttcacttgcccgtcacaatgttggcgctgggccccaaggtactttcttctctaaatcggttcaataatttgggaacaagacttgtctccaaactgaagtacatgtctgctaatcgtaaaaaacttatttgggatttgaggatttatcatttcgtcattaggataccatcacagaattgtgaaaggaaagaacttgccatggttattgatgctggggatgtattcattcagtctaaagatacaattgacgatatttctcgaacacaagaaagcaattcctttcttgatcacatatcaaaaagtcttcctagttatttttctgatgatctgttactcggtatccagttggatgagctttataaccagtttgagcttggccttactgggtttcaggtgaaggtattgttgcctgacagacataatgtttcctctacactgattaagcttgatgcttccattgcacttcgattgtgtgtattcctagatgaaccagtgctaaaacaattggaggtcggttttattgtgtcatctattgatgcatacctctctcagacaatgtacagtaccattgttaatttgcctagaatgaaagaaactaaccttttcaagaacagcgtatttgataataccaagacacatgtacccaagaaattggccttgaatgtgtctgtgtctctgaagctcgccaagttaggtttacatgttgaccttgatggtaattttgaggaaagttctggtctcattgttggcattgaagacattgatatcaggtatgctatctgtgaattgtcagatctttctcttgccatgaagacggtcaatgttactttcagatattggaaggataaatcagattcacatgtgctatgcttatctgggaacttaacacgatgtcctgaaaattctgttgaaacttgtttggatctgcattatagaactcacaagcatgacgatcaaatacatcatgtataccggctgattttatgtgatgttgatctgcatgttaacccatctgttattggtcagataaggatgtttttaagaaaacttgattcaggaccttcaattggcagtgatgttgaatccacaatgattggtcagagttccatgaaatccggggcagctaatggcatacttcccatgttctttttgtcaaatttatgtggtgcagatggcactgtattcgcaggagtttctgttgaccacttcccatttttagttgcagatcacagttgtggatataattttgggtgcttaggaactcaaaatgttgaagcacaagaaagtttatactcaaagaatgagcactgtcatgacacttcaggtttgaatggttatcatgcatcagatctcaccagcaatacatacggtaaaacccagcgttcagattgttcatctggctcatcaaatgaccccaagaatgccagcagaactgttctggatctatcacttatttctgttagaatacattttcctgaatcatgtggtactttagtaacaataaccattcctgaatcgatatcaacactcacttattttgatgcaagctcatgggacttactattgtctgctaacaatttgactcttgcttcaccatggactccaccaaatgtcaacgagctggtctggggcacagcttcacatcgcaatgctagtgtactcaacgttcgagttaaaaaggacttacctgcactgtcaaccgaaaacaggaattccttgtggcagataacaaccttgaaggcttgagagaatcacatgactgtgtaacatataaatttgatatcagtgattgtgttgtattttttcctgtggaagagcaaggtttatcgtgtctaaagctggaggttccacattttttctgtgagttcattgcgaacggaagctctgtagaatttgcaaagcgtatccccaaagaattcttcagttcagagtgcatagtttccagaagagttgatgtcatctgcatatatgcaagaaatgcatccatatcacttctaattgtaagcgaccaaacagattttatgctaaagcttgatgagaacgttcctaagagaatccattctcttattgaaaagcttgatgccgacgtatggattcaggttccttgcaaagatataccatactcgcagcagcctacttcacctacctccgttatgagcaaaatatcacgatgcaacttgattgctgaagatttatattttataaatgggatggagacagttattggtgttgttgaccagttgatttcgatcggcaatgaaagtaaaatgtacaaaggcaatgcctcacagtttttagatcatagaagtttctgtgagggcaaccctgatcctaatgagtgtaccaatctcactatttcgatcaaggatctgatgattctcttgggccagtctaaagctaaaggtctggcactggagaggattgccactgcaaacatggagtttgatgtttctgctgtactagttggtgaaaaaccagagcgcatagactttgacgttgtttctttaacactgcagtcacctggtggttacacactcatctccattgtttcggatgggccactatctcctgtttttttcaagtttacaaagcaccatactggacaagatgagatattactaagtgtacccctttttgagatctggttatatttacaggattggaatacaattatcaatcattcccattcatacataaagacagaagtaaacagtatgcctgtggagcatgcagctgctttgtctcagtttccagaaatggtatcgtcaccacttattgcatcagaatttggttcaccagatgacttcaacttagtggtaacatgtgaaactatttctggtgtactccatatacctatctgggggaaagaagaaaatcacacaagcaatcacatgggtgtgactcctgcttcttttccaatggaagtgggcactcatgagacagatgatattcaatattgtgaaccaaaaggttgcaagtttgtcaccttaacttttgatactaaacattttgtggtgatgtcaggtgatagctgcataaattttagatgtgatttagagagattgaaggtattgctggaaatgattcaagagaataagggtacctctgttccatttgtgcatatatctaaggttaaatcttctggttatgttcgtcaatcagaaaggaatttggaacatctttctgttgatctacaagctgaatacatggatgttagtttttcacaccagatatttaacttctggcataacatggaactcaaatttcctgctgcatcatctgcatcctctttttattctgtggcattcaaggcaggattgaggaaagggtctcttctgctaagcgatggaaggtggagcagtcatggacctgtaatagagacgttattgaagaatctaactgtgcagttcagtcaaatgaaggataggacagaagtgtctgcttttgttgaccttttagtaaattacaataacattgataaggttatgtgggaaccttttgtagaaccctcaagatttcagttaaatatgctaagaaaatgtggtgattgtggattggatatatcacccagtactgatgtgtgtttaagttcaagcaagcagcttaatctgaatatatcagaacccttaattgaggctcttctcagacttaaccagatgattacagattctcttgatccgagtaatggtagtggtatttgggaagatcctggaatcttgagattaaaccatgatgatgttcgtaccagaagatacgcaccatactttctctcgaatgacacatcattgccctttaggttcaaggtgtaccgaggtgctgttaattcagatgatattggcagtttctctgtaatagatgaaaactctgtgccggcggggtatgctgtcccaatttacgtcgaagaaactcctgatgaatttttcttccaacacagagaagcacgatcatcagaccatctcatcgagaaacgaatgagtgctctatcacactacatgatctccattgagtttgatggaacatcaggcccttcaaaaccaatgtcaatggaccttgtgggcatttacttctttgaagtaaatttctcttcaagtaaaaagccaattctcggcgaagaaagtttaggagcattttcgtctaatgcaaaaggcaacgatgggttaattgtgcctgtggtgctcgatgtttccttacagaactacagcaagcgtatacgagtttattcgacggtaatactatacaatgcaacatcaatgcccctcgagttgaggtttgatataccatttggtcttgcatcaaaggtaattgggcccattcctccaaacaaagagattccactgccggttcatttgtctgaagctggccagattaggtggcaccctgtcggcagaacatacttgtggagtgaaacccgctccttgtcaagtttgctttcacgtgaaaacagggttgggttcatgaaatcatctgtttgttatccttctcaccctagtaatgacccatttcgttgttgtgtatctgttgaagaatacaatgtcccttcatctgttagtaccaagaaaaaacagttgtgcagtgaaagattgaacacacaagtttctggaagttctactccaaatacttttaagcaaaatttgacaaggacacattttatacggcatgtcaagcttaataccccgcttctcataaagaactatctgcctgtttacatttccttggcaatagataatggtgggtctgcgcgggtaatttcgctaaaggaggtagggtctgcctctattttgtttgttgatccctccaatgatcttggaattacaattgatattcaagattataggtccttgaacataaagtttccccgggctgaatcattctcaactacagccaagttaaatggcttcaaattctccataactgagtcaattactttctactcaaatttgtctaattttcctcttaatgttatgctggaaaaatcaatggatgctcgttctggcgcaagagagttgtatctttctgttccattcttgttgtacaattgcacagatctattgcttactgtcactgaaagcagctctgagaggagtgggcctactcttgtgattccccctagttttgaattggatggatatgcaagacatatgcttgaaaagggtggtctttctcttgtcaatccttctgtacaatgctttacaggcaaaatgccccagatatatttgatggatggacactgctcttcttcagatataagttgtacacgtaacagtgagtctgtaaagaaagatttggacaacagtgttaaagcttatatgtttgctcctgatgggcacactccagcaactgaactttcagttaagttgaatgcttctccgcctaataatggaactgaaacaactcggcgaaattggtcaaatcccttcctccttgtccctgccagtggttcaacaaatgttactattcctcagtcatctacttctggtgccttcttagttgcagtggcatctatacctgtttcaacagaactttttggcaggacaagggctattgctttcaggccaagatacgtcatatgtaatgcatgcagcaatgatttgttctttcgacaaaaaggaacacggttttctaagcacttaagttctgggcaacactcttttcttcactggtctgatacagccagagatctgctggtatccattcggattgatggcccaggatggcaatggtcaggaagttttttccctgatcacctgggagatgctcaattgaaaatgcggaatagtgcctcaggtttatcatatatggttcgagttgaagtgcaaaatgccgatctagacttaaacagcaatagattttctggaaaaaataatatcaatactggtacagtactgattctgctttctgatgataagactggttttgtaccttacaggatcgacaatttttcaatggagaaactgcggatatatcaacagagatgtgaatctattgaaacaattgtttatccctacacatcctgtcaatatgcttgggatgagccttgctatcctcatcgccttactgttgagattcctggagaacggagtttgggtacattcaatctggacattctcaatgatgatgttcatgtgtcactaccatccacatccgagaaagctgcaagacaattctgcatctcaatacatgcggaaggagcaattaaggtgctaagtgttcttgattcaaattgccacaataaggaaacaaatgaaaaggattttctgggatcaaaggaacctaaagttgttgatcacaaactggagcttgatatgaattttgctgaggttatcaaattacacttaccattcatcgggatatctttaataagttcttgtccacaggaattgttgtttgcttctgccaaggagatgactgttgttgccatgcagagtttagatcagcagagatttacggttcagatacaatctatgcaaatcgataatcagttccctgatagcccacacccggtcatgttgtcatttgagggcagtcataagggaaaatccatgaacttttttaagagtaaagatactaagctgaaatcagcaaatgacattctttccagtaccagtgaacctgtgctgcagtttgctgcagctaaatggagaaccaaagatgtatcatttgtttcctatcaatatataaacataagtctagcacctcttcgccttgaacttgaagaacgacttgtcttgagcatgattgaattttttagatctgtttcctctcgaataaatattggacacttggagaaaagtattgagctaagtataggtggtgctacggacatgttaagagaatatgaaaaaatctcaaagaatatatcagacaagctcctggtgcaagacagtgaattgttgccttctgttgtcccagttggggctccatggcaacagatacaccttttagccagaaaacagaaaaaggtgtacattgaattgtttcagttgactcctgtcaagttgactttcagttttacgagcacaccttggctcaataggaatgaaggtggttcagaccccagcgtaggtttcaacaacgctactgcaatccagagaggtcttatggccctcttggacgttgaaggagtaccagtttaccttggagaaattatagtggaaaatcttatggccagctggcaatctgttcaggacattcttatgaggcattatagtaggcaaatcctccacgaactttataaggttttgggttctgctggcgttataggaaatcctatgggttttgctaggaatgttgggtttggtttaaaggacttcatatctgcttcaagaaaagggaaattgcagagcccagttgaactattaaacggtatagcacaaggttcaaagactcttattggaagtacggtttatgcagtcagcagtgccacttctcacttcagtaaaactgcttataagggccttgttgcctttacatatgatgagcaagctgcttcgaagatggaagaacgggaaagacagctaggtttgcatggggaaggagtactgaatggttttctagagggtctgactgggctccttcaatcaccgattaggggagctgagaaacatggtcttcccggggtcatctcaggtttagcaatgggaacagctgggcttgtggcacggcctatggctagcattcttgaagccacaggcagaactgcccagagcattagaaaccgaagcaaccctcacgaatccaactacttgcgagtacgtttccccaggcctgttgccagagatcgccctttgtttccctactcctgggaagaagccatcggtgaatcgttgcttgcccaagctgacagtggcagactaaaggaggagacatttgtcatgtgcaagacactcaagggggctgggaagttccttgtgctaactgagaagctgcttctgctagtctcaagcccatacttggtggatctaggatcgcctcggttcatcggtgttcctcctgacccgcagtggtcgatcgacacggagatgcacctcaagagcgttgttcatctggacaggtctcaggaggtagtgaacattgttgggagcaacggacagacctcacctagggacaaaagaggtggcacgagaaacagggtcatgagctcggccttcgtccccctgtttcacctcagcatagagctgccaaatgaggaggatgcagaagggacggtgcaggtcctacaggcactcatcgagaagggcaaggcacggaggtgggacaagaacatcctacaccggagcaacatcagttgaggttttcacaacagtagtagaggttggtgttttgattgaagtggaagataaactaaattccaccccgtgactcaggtggattaaatatacaaacaaggcctcaaggcagagcagtcaccagcatacataagcttagtgtgaataagaaaacaaagtgttccataggtggtcaccgttggacacgtgcttcggttttgttttaagcttagtgtgaataagaaaacaaagtgttccataggtgatcaccgttggacacgtgcttcggttttttttttttttttgcggtctaggtgtagcttctagaagttttgtcgacggctcttgtaaatgaagtgtgagagggcttatgttatgtgtagcaacaccactgttttatgccacggctatgtttacaaacttcgccgttcatgggccatggatatttctgatt

SEQ ID NO: 60604 - DNA, 9256 bp, Zea Mays
tcaaatgtgacctgtttccttttttgcttttcttttatatataaataaatatttacaataataggggcttcccctctattttccttaaaaacttaaagaggtattatcgactaacttttctgcacattgatggtcctaggaggtttggcacgaagcttgtagatacaatgttttctgggcttggtatggaatgtaaaatatgggatgatgcagcaactattcttgcttggcttgattctcttcgggttatcaacccactgaataaaacgaaaatcttatgggctgaaaagcaccggtgatggtcttggggcacctgttgtcagtatccaagtcgactttcccaagtcaaatgaaagatcagaagcttcaacaagggtcgttgtccaggaattcaacgccatctatgaaccagaattctttgttaatgtcctgtacatctacaatgtgttttccgctttccaatttcagcatgatagggtactttcttctctaaatcggttcaataatttgggaacaagacttgtctccaaactgaagtacatgtctgctaatcgtaaaaaacttatttgggatttgaggatttatcatttcgtcattaggataccatcacagaattgtgaaaggaaagaacttgccatggttattgatgctggggatgtattcattcagtctaaagatacaattgacgatatttctcgaacacaagaaagcaattcctttcttgatcacatatcaaaaagtcttcctagttatttttctgatgatctgttactcggtatccagttggatgagctttataaccagtttgagcttggccttactgggtttcaggtgaaggtattgttgcctgacagacataatgtttcctctacactgattaagcttgatgcttccattgcacttcgattgtgtgtattcctagatgaaccagtgctaaaacaattggaggtcggttttattgtgtcatctattgatgcatacctctctcagacaatgtacagtaccattgttaatttgcctagaatgaaagaaactaaccttttcaagaacagcgtatttgataataccaagacacatgtacccaagaaattggccttgaatgtgtctgtgtctctgaagctcgccaagttaggtttacatgttgaccttgatggtaattttgaggaaagttctggtctcattgttggcattgaagacattgatatcaggtatgctatctgtgaattgtcagatctttctcttgccatgaagacggtcaatgttactttcagatattggaaggataaatcagattcacatgtgctatgcttatctgggaacttaacacgatgtcctgaaaattctgttgaaacttgtttggatctgcattatagaactcacaagcatgacgatcaaatacatcatgtataccggctgattttatgtgatgttgatctgcatgttaacccatctgttattggtcagataaggatgtttttaagaaaacttgattcaggaccttcaattggcagtgatgttgaatccacaatgattggtcagagttccatgaaatccggggcagctaatggcatacttcccatgttctttttgtcaaatttatgtggtgcagatggcactgtattcgcaggagtttctgttgaccacttcccatttttagttgcagatcacagttgtggatataattttgggtgcttaggaactcaaaatgttgaagcacaagaaagtttatactcaaagaatgagcactgtcatgacacttcaggtttgaatggttatcatgcatcagatctcaccagcaatacatacggtaaaacccagcgttcagattgttcatctggctcatcaaatgaccccaagaatgccagcagaactgttctggatctatcacttatttctgttagaatacattttcctgaatcatgtggtactttagtaacaataaccattcctgaatcgatatcaacactcacttattttgatgcaagctcatgggacttactattgtctgctaacaatttgactcttgcttcaccatggactccaccaaatgtcaacgagctggtctggggcacagcttcacatcgcaatgctagtgtactcaacgttcgagttaaaaaggacttacctgcactgtcaaccgaagtatgtgttggaattcaaaacgtttgttgtgtattaccatccaagttactggctatgtttgttggattctttttgttggatgattggaatcgtattgcagaacaggaattccttgtggcagataacaaccttgaaggcttgagagaatcacatgactgtgtaacatataaatttgatatcagtgattgtgttgtattttttcctgtggaagagcaaggtttatcgtgtctaaagctggaggttccacattttttctgtgagttcattgcgaacggaagctctgtagaatttgcaaagcgtatccccaaagaattcttcagttcagagtgcatagtttccagaagagttgatgtcatctgcatatatgcaagaaatgcatccatatcacttctaattgtaagcgaccaaacagattttatgctaaagcttgatgagaacgttcctaagagaatccattctcttattgaaaagcttgatgccgacgtatggattcaggttccttgcaaagatataccatactcgcagcagcctacttcacctacctccgttatgagcaaaatatcacgatgcaacttgattgctgaagatttatattttataaatgggatggagacagttattggtgttgttgaccagttgatttcgatcggcaatgaaagtaaaatgtacaaaggcaatgcctcacagtttttagatcatagaagtttctgtgagggcaaccctgatcctaatgagtgtaccaatctcactatttcgatcaaggatctgatgattctcttgggccagtctaaagctaaaggtctggcactggagaggattgccactgcaaacatggagtttgatgtttctgctgtactagttggtgaaaaaccagagcgcatagactttgacgttgtttctttaacactgcagtcacctggtggttacacactcatctccattgtttcggatgggccactatctcctgtttttttcaagtttacaaagcaccatactggacaagatgagatattactaagtgtacccctttttgagatctggttatatttacaggattggaatacaattatcaatcattcccattcatacataaagacagaagtaaacagtatgcctgtggagcatgcagctgctttgtctcagtttccagaaatggtatcgtcaccacttattgcatcagaatttggttcaccagatgacttcaacttagtggtaacatgtgaaactatttctggtgtactccatatacctatctgggggaaagaagaaaatcacacaagcaatcacatgggtgtgactcctgcttcttttccaatggaagtgggcactcatgagacagatgatattcaatattgtgaaccaaaaggttgcaagtttgtcaccttaacttttgatactaaacattttgtggtgatgtcaggtgatagctgcataaattttagatgtgatttagagagattgaaggtattgctggaaatgattcaagagaataagggtacctctgttccatttgtgcatatatctaaggttaaatcttctggttatgttcgtcaatcagaaaggaatttggaacatctttctgttgatctacaagctgaatacatggatgttagtttttcacaccagatatttaacttctggcataacatggaactcaaatttcctgctgcatcatctgcatcctctttttattctgtggcattcaaggcaggattgaggaaagggtctcttctgctaagcgatggaaggtggagcagtcatggacctgtaatagagacgttattgaagaatctaactgtgcagttcagtcaaatgaaggataggacagaagtgtctgcttttgttgaccttttagtaaattacaataacattgataaggttatgtgggaaccttttgtagaaccctcaagatttcagttaaatatgctaagaaaatgtggtgattgtggattggatatatcacccagtactgatgtgtgtttaagttcaagcaagcagcttaatctgaatatatcagaacccttaattgaggctcttctcagacttaaccagatgattacagattctcttgatccgagtaatggtagtggtatttgggaagatcctggaatcttgagattaaaccatgatgatgttcgtaccagaagatacgcaccatactttctctcgaatgacacatcattgccctttaggttcaaggtgtaccgaggtgctgttaattcagatgatattggcagtttctctgtaatagatgaaaactctgtgccggcggggtatgctgtcccaatttacgtcgaagaaactcctgatgaatttttcttccaacacagagaagcacgatcatcagaccatctcatcgagaaacgaatgagtgctctatcacactacatgatctccattgagtttgatggaacatcaggcccttcaaaaccaatgtcaatggaccttgtgggcatttacttctttgaagtaaatttctcttcaagtaaaaagccaattctcggcgaagaaagtttaggagcattttcgtctaatgcaaaaggcaacgatgggttaattgtgcctgtggtgctcgatgtttccttacagaactacagcaagcgtatacgagtttattcgacggtaatactatacaatgcaacatcaatgcccctcgagttgaggtttgatataccatttggtcttgcatcaaaggtaattgggcccattcctccaaacaaagagattccactgccggttcatttgtctgaagctggccagattaggtggcaccctgtcggcagaacatacttgtggagtgaaacccgctccttgtcaagtttgctttcacgtgaaaacagggttgggttcatgaaatcatctgtttgttatccttctcaccctagtaatgacccatttcgttgttgtgtatctgttgaagaatacaatgtcccttcatctgttagtaccaagaaaaaacagttgtgcagtgaaagattgaacacacaagtttctggaagttctactccaaatacttttaagcaaaatttgacaaggacacattttatacggcatgtcaagcttaataccccgcttctcataaagaactatctgcctgtttacatttccttggcaatagataatggtgggtctgcgcgggtaatttcgctaaaggaggtagggtctgcctctattttgtttgttgatccctccaatgatcttggaattacaattgatattcaagattataggtccttgaacataaagtttccccgggctgaatcattctcaactacagccaagttaaatggcttcaaattctccataactgagtcaattactttctactcaaatttgtctaattttcctcttaatgttatgctggaaaaatcaatggatgctcgttctggcgcaagagagttgtatctttctgttccattcttgttgtacaattgcacagatctattgcttactgtcactgaaagcagctctgagaggagtgggcctactcttgtgattccccctagttttgaattggatggatatgcaagacatatgcttgaaaagggtggtctttctcttgtcaatccttctgtacaatgctttacaggcaaaatgccccagatatatttgatggatggacactgctcttcttcagatataagttgtacacgtaacagtgagtctgtaaagaaagatttggacaacagtgttaaagcttatatgtttgctcctgatgggcacactccagcaactgaactttcagttaagttgaatgcttctccgcctaataatggaactgaaacaactcggcgaaattggtcaaatcccttcctccttgtccctgccagtggttcaacaaatgttactattcctcagtcatctacttctggtgccttcttagttgcagtggcatctatacctgtttcaacagaactttttggcaggacaagggctattgctttcaggccaagatacgtcatatgtaatgcatgcagcaatgatttgttctttcgacaaaaaggaacacggttttctaagcacttaagttctgggcaacactcttttcttcactggtctgatacagccagagatctgctggtatccattcggattgatggcccaggatggcaatggtcaggaagttttttccctgatcacctgggagatgctcaattgaaaatgcggaatagtgcctcaggtttatcatatatggttcgagttgaagtgcaaaatgccgatctagacttaaacagcaatagattttctggaaaaaataatatcaatactggtacagtactgattctgctttctgatgataagactggttttgtaccttacaggatcgacaatttttcaatggagaaactgcggatatatcaacagagatgtgaatctattgaaacaattgtttatccctacacatcctgtcaatatgcttgggatgagccttgctatcctcatcgccttactgttgagattcctggagaacggagtttgggtacattcaatctggacattctcaatgatgatgttcatgtgtcactaccatccacatccgagaaagctgcaagacaattctgcatctcaatacatgcggaaggagcaattaaggtgctaagtgttcttgattcaaattgccacaataaggaaacaaatgaaaaggattttctgggatcaaaggaacctaaagttgttgatcacaaactggagcttgatatgaattttgctgaggttatcaaattacacttaccattcatcgggatatctttaataagttcttgtccacaggaattgttgtttgcttctgccaaggagatgactgttgttgccatgcagagtttagatcagcagagatttacggttcagatacaatctatgcaaatcgataatcagttccctgatagcccacacccggtcatgttgtcatttgagggcagtcataagggaaaatccatgaacttttttaagagtaaagatactaagctgaaatcagcaaatgacattctttccagtaccagtgaacctgtgctgcagtttgctgcagctaaatggagaaccaaagatgtatcatttgtttcctatcaatatataaacataagtctagcacctcttcgccttgaacttgaagaacgacttgtcttgagcatgattgaattttttagatctgtttcctctcgaataaatattggacacttggagaaaagtattgagctaagtataggtggtgctacggacatgttaagagaatatgaaaaaatctcaaagaatatatcagacaagctcctggtgcaagacagtgaattgttgccttctgttgtcccagttggggctccatggcaacagatacaccttttagccagaaaacagaaaaaggtgtacattgaattgtttcagttgactcctgtcaagttgactttcagttttacgagcacaccttggctcaataggaatgaaggtggttcagaccccagcgtaggtttcaacaacgctactgcaatccagagaggtcttatggccctcttggacgttgaaggagtaccagtttaccttggagaaattatagtggaaaatcttatggccagctggcaatctgttcaggacattcttatgaggcattatagtaggcaaatcctccacgaactttataaggttttgggttctgctggcgttataggaaatcctatgggttttgctaggaatgttgggtttggtttaaaggacttcatatctgcttcaagaaaagggaaattgcagagcccagttgaactattaaacggtatagcacaaggttcaaagactcttattggaagtacggtttatgcagtcagcagtgccacttctcacttcagtaaaactgcttataagggccttgttgcctttacatatgatgagcaagctgcttcgaagatggaagaacgggaaagacagctaggtttgcatggggaaggagtactgaatggttttctagagggtctgactgggctccttcaatcaccgattaggggagctgagaaacatggtcttcccggggtcatctcaggtttagcaatgggaacagctgggcttgtggcacggcctatggctagcattcttgaagccacaggcagaactgcccagagcattagaaaccgaagcaaccctcacgaatccaactacttgcgagtacgtttccccaggcctgttgccagagatcgccctttgtttccctactcctgggaagaagccatcggtgaatcgttgcttgcccaagctgacagtggcagactaaaggaggagacatttgtcatgtgcaagacactcaagggggctgggaagttccttgtgctaactgagaagctgcttctgctagtctcaagcccatacttggtggatctaggatcgcctcggttcatcggtgttcctcctgacccgcagtggtcgatcgacacggagatgcacctcaagagcgttgttcatctggacaggtctcaggaggtagtgaacattgttgggagcaacggacagacctcacctagggacaaaagaggtggcacgagaaacagggtcatgagctcggccttcgtccccctgtttcacctcagcatagagctgccaaatgaggaggatgcagaagggacggtgcaggtcctacaggcactcatcgagaagggcaaggcacggaggtgggacaagaacatcctacaccggagcaacatcagttgaggttttcacaacagtagtagaggttggtgttttgattgaagtggaagataaactaaattccaccccgtgactcaggtggattaaatatacaaacaaggcctcaaggcagagcagtcaccagcatacataagcttagtgtgaataagaaaacaaagtgttccataggtggtcaccgttggacacgtgcttcggttttgttttaagcttagtgtgaataagaaaacaaagtgttccataggtgatcaccgttggacacgtgcttcggttttttttttttttttgcggtctaggtgtagcttctagaagttttgtcgacggctcttgtaaatgaagtgtgagagggcttatgttatgtgtagcaacaccactgttttatgccacggctatgtttacaaacttcgccgttcatgggccatggatatttctgatt

SEQ ID NO: 60605 - DNA, 10081 bp, Zea Mays
atggcttatactgctagttcattgatgactaggtcaagacaagatgaagtaaataagataattgagatatcaaatgttggaatttactgtcatcagctggaagaagagcaggatctatgccatgttggtgctcttgaaaatgaccactcaagggattatcttgtaaatccattttgtgtgactgtatctgtgcttgctaacaaagctgccaagcttgacggtacccctcagtataacatgactgcagagctaactgcattggccctatctgttgatgaaatccagctccaacaaatcttaaatctttgtgattacttcactatctgtgctttgcgaacaaaatatggtcgttaccgtccttctcaaagctctttatctaagagatgtaaaggttggtacagaatgtggtggcaatatgctcagaattctgtattagcagatgttcgcagaagactgaagaaaacttcatggcgttatttgaagcagcgactgaatcaccaactaagatatgtgaaattgtacagaatgaaattggagcttttacagaaaggacagattgttagtgaagacattctacaagagttggaaaatatggacagagaatgtgatatagatgacatacttaactacagaacgattgcagagcaacaactgcaggaatcattggtgaaatcttccatagatactcatagtccaggaagtcctcgaagcgatgaacagttggcaggggcaagccagggatggttaaactggctttctcttggaatgcttggtgttggtggaacagctgatagtagctcatttgctggtgttatttctgaagacattattaaggatatatatgagggaacagaatttcgtccagtttcttctgctgaaaattgtttgaagaaagaaaactactattctttgtttgttagactatctatttctcagatagtcacaactgtcacctccaggaggtttggcacgaagcttgtagatacaatgttttctgggcttggtatggaatgtaaaatatgggatgatgcagcaactattcttgcttggcttgattctcttcgggttatcaacccactgaataaaacgaaaatcttatgggctgaaaagtgtagcaccggtgatggtcttggggcacctgttgtcagtatccaagtcgactttcccaagtcaaatgaaagatcagaagcttcaacaagggtcgttgtccaggaattcaacgccatctatgaaccagaattctttgttaatgtcctgtacatctacaatgtgttttccgctttccaatttcagcatgatagggtactttcttctctaaatcggttcaataatttgggaacaagacttgtctccaaactgaagtacatgtctgctaatcgtaaaaaacttatttgggatttgaggatttatcatttcgtcattaggataccatcacagaattgtgaaaggaaagaacttgccatggttattgatgctggggatgtattcattcagtctaaagatacaattgacgatatttctcgaacacaagaaagcaattcctttcttgatcacatatcaaaaagtcttcctagttatttttctgatgatctgttactcggtatccagttggatgagctttataaccagtttgagcttggccttactgggtttcaggtgaaggtattgttgcctgacagacataatgtttcctctacactgattaagcttgatgcttccattgcacttcgattgtgtgtattcctagatgaaccagtgctaaaacaattggaggtcggttttattgtgtcatctattgatgcatacctctctcagacaatgtacagtaccattgttaatttgcctagaatgaaagaaactaaccttttcaagaacagcgtatttgataataccaagacacatgtacccaagaaattggccttgaatgtgtctgtgtctctgaagctcgccaagttaggtttacatgttgaccttgatggtaattttgaggaaagttctggtctcattgttggcattgaagacattgatatcaggtatgctatctgtgaattgtcagatctttctcttgccatgaagacggtcaatgttactttcagatattggaaggataaatcagattcacatgtgctatgcttatctgggaacttaacacgatgtcctgaaaattctgttgaaacttgtttggatctgcattatagaactcacaagcatgacgatcaaatacatcatgtataccggctgattttatgtgatgttgatctgcatgttaacccatctgttattggtcagataaggatgtttttaagaaaacttgattcaggaccttcaattggcagtgatgttgaatccacaatgattggtcagagttccatgaaatccggggcagctaatggcatacttcccatgttctttttgtcaaatttatgtggtgcagatggcactgtattcgcaggagtttctgttgaccacttcccatttttagttgcagatcacagttgtggatataattttgggtgcttaggaactcaaaatgttgaagcacaagaaagtttatactcaaagaatgagcactgtcatgacacttcaggtttgaatggttatcatgcatcagatctcaccagcaatacatacggtaaaacccagcgttcagattgttcatctggctcatcaaatgaccccaagaatgccagcagaactgttctggatctatcacttatttctgttagaatacattttcctgaatcatgtggtactttagtaacaataaccattcctgaatcgatatcaacactcacttattttgatgcaagctcatgggacttactattgtctgctaacaatttgactcttgcttcaccatggactccaccaaatgtcaacgagctggtctggggcacagcttcacatcgcaatgctagtgtactcaacgttcgagttaaaaaggacttacctgcactgtcaaccgaagtatgtgttggaattcaaaacgtttgttgtgtattaccatccaagttactggctatgtttgttggattctttttgttggatgattggaatcgtattgcagaacaggaattccttgtggcagataacaaccttgaaggcttgagagaatcacatgactgtgtaacatataaatttgatatcagtgattgtgttgtattttttcctgtggaagagcaaggtttatcgtgtctaaagctggaggttccacattttttctgtgagttcattgcgaacggaagctctgtagaatttgcaaagcgtatccccaaagaattcttcagttcagagtgcatagtttccagaagagttgatgtcatctgcatatatgcaagaaatgcatccatatcacttctaattgtaagcgaccaaacagattttatgctaaagcttgatgagaacgttcctaagagaatccattctcttattgaaaagcttgatgccgacgtatggattcaggttccttgcaaagatataccatactcgcagcagcctacttcacctacctccgttatgagcaaaatatcacgatgcaacttgattgctgaagatttatattttataaatgggatggagacagttattggtgttgttgaccagttgatttcgatcggcaatgaaagtaaaatgtacaaaggcaatgcctcacagtttttagatcatagaagtttctgtgagggcaaccctgatcctaatgagtgtaccaatctcactatttcgatcaaggatctgatgattctcttgggccagtctaaagctaaaggtctggcactggagaggattgccactgcaaacatggagtttgatgtttctgctgtactagttggtgaaaaaccagagcgcatagactttgacgttgtttctttaacactgcagtcacctggtggttacacactcatctccattgtttcggatgggccactatctcctgtttttttcaagtttacaaagcaccatactggacaagatgagatattactaagtgtacccctttttgagatctggttatatttacaggattggaatacaattatcaatcattcccattcatacataaagacagaagtaaacagtatgcctgtggagcatgcagctgctttgtctcagtttccagaaatggtatcgtcaccacttattgcatcagaatttggttcaccagatgacttcaacttagtggtaacatgtgaaactatttctggtgtactccatatacctatctgggggaaagaagaaaatcacacaagcaatcacatgggtgtgactcctgcttcttttccaatggaagtgggcactcatgagacagatgatattcaatattgtgaaccaaaaggttgcaagtttgtcaccttaacttttgatactaaacattttgtggtgatgtcaggtgatagctgcataaattttagatgtgatttagagagattgaaggtattgctggaaatgattcaagagaataagggtacctctgttccatttgtgcatatatctaaggttaaatcttctggttatgttcgtcaatcagaaaggaatttggaacatctttctgttgatctacaagctgaatacatggatgttagtttttcacaccagatatttaacttctggcataacatggaactcaaatttcctgctgcatcatctgcatcctctttttattctgtggcattcaaggcaggattgaggaaagggtctcttctgctaagcgatggaaggtggagcagtcatggacctgtaatagagacgttattgaagaatctaactgtgcagttcagtcaaatgaaggataggacagaagtgtctgcttttgttgaccttttagtaaattacaataacattgataaggttatgtgggaaccttttgtagaaccctcaagatttcagttaaatatgctaagaaaatgtggtgattgtggattggatatatcacccagtactgatgtgtgtttaagttcaagcaagcagcttaatctgaatatatcagaacccttaattgaggctcttctcagacttaaccagatgattacagattctcttgatccgagtaatggtagtggtatttgggaagatcctggaatcttgagattaaaccatgatgatgttcgtaccagaagatacgcaccatactttctctcgaatgacacatcattgccctttaggttcaaggtgtaccgaggtgctgttaattcagatgatattggcagtttctctgtaatagatgaaaactctgtgccggcggggtatgctgtcccaatttacgtcgaagaaactcctgatgaatttttcttccaacacagagaagcacgatcatcagaccatctcatcgagaaacgaatgagtgctctatcacactacatgatctccattgagtttgatggaacatcaggcccttcaaaaccaatgtcaatggaccttgtgggcatttacttctttgaagtaaatttctcttcaagtaaaaagccaattctcggcgaagaaagtttaggagcattttcgtctaatgcaaaaggcaacgatgggttaattgtgcctgtggtgctcgatgtttccttacagaactacagcaagcgtatacgagtttattcgacggtaatactatacaatgcaacatcaatgcccctcgagttgaggtttgatataccatttggtcttgcatcaaaggtaattgggcccattcctccaaacaaagagattccactgccggttcatttgtctgaagctggccagattaggtggcaccctgtcggcagaacatacttgtggagtgaaacccgctccttgtcaagtttgctttcacgtgaaaacagggttgggttcatgaaatcatctgtttgttatccttctcaccctagtaatgacccatttcgttgttgtgtatctgttgaagaatacaatgtcccttcatctgttagtaccaagaaaaaacagttgtgcagtgaaagattgaacacacaagtttctggaagttctactccaaatacttttaagcaaaatttgacaaggacacattttatacggcatgtcaagcttaataccccgcttctcataaagaactatctgcctgtttacatttccttggcaatagataatggtgggtctgcgcgggtaatttcgctaaaggaggtagggtctgcctctattttgtttgttgatccctccaatgatcttggaattacaattgatattcaagattataggtccttgaacataaagtttccccgggctgaatcattctcaactacagccaagttaaatggcttcaaattctccataactgagtcaattactttctactcaaatttgtctaattttcctcttaatgttatgctggaaaaatcaatggatgctcgttctggcgcaagagagttgtatctttctgttccattcttgttgtacaattgcacagatctattgcttactgtcactgaaagcagctctgagaggagtgggcctactcttgtgattccccctagttttgaattggatggatatgcaagacatatgcttgaaaagggtggtctttctcttgtcaatccttctgtacaatgctttacaggcaaaatgccccagatatatttgatggatggacactgctcttcttcagatataagttgtacacgtaacagtgagtctgtaaagaaagatttggacaacagtgttaaagcttatatgtttgctcctgatgggcacactccagcaactgaactttcagttaagttgaatgcttctccgcctaataatggaactgaaacaactcggcgaaattggtcaaatcccttcctccttgtccctgccagtggttcaacaaatgttactattcctcagtcatctacttctggtgccttcttagttgcagtggcatctatacctgtttcaacagaactttttggcaggacaagggctattgctttcaggccaagatacgtcatatgtaatgcatgcagcaatgatttgttctttcgacaaaaaggaacacggttttctaagcacttaagttctgggcaacactcttttcttcactggtctgatacagccagagatctgctggtatccattcggattgatggcccaggatggcaatggtcaggaagttttttccctgatcacctgggagatgctcaattgaaaatgcggaatagtgcctcaggtttatcatatatggttcgagttgaagtgcaaaatgccgatctagacttaaacagcaatagattttctggaaaaaataatatcaatactggtacagtactgattctgctttctgatgataagactggttttgtaccttacaggatcgacaatttttcaatggagaaactgcggatatatcaacagagatgtgaatctattgaaacaattgtttatccctacacatcctgtcaatatgcttgggatgagccttgctatcctcatcgccttactgttgagattcctggagaacggagtttgggtacattcaatctggacattctcaatgatgatgttcatgtgtcactaccatccacatccgagaaagctgcaagacaattctgcatctcaatacatgcggaaggagcaattaaggtgctaagtgttcttgattcaaattgccacaataaggaaacaaatgaaaaggattttctgggatcaaaggaacctaaagttgttgatcacaaactggagcttgatatgaattttgctgaggttatcaaattacacttaccattcatcgggatatctttaataagttcttgtccacaggaattgttgtttgcttctgccaaggagatgactgttgttgccatgcagagtttagatcagcagagatttacggttcagatacaatctatgcaaatcgataatcagttccctgatagcccacacccggtcatgttgtcatttgagggcagtcataagggaaaatccatgaacttttttaagagtaaagatactaagctgaaatcagcaaatgacattctttccagtaccagtgaacctgtgctgcagtttgctgcagctaaatggagaaccaaagatgtatcatttgtttcctatcaatatataaacataagtctagcacctcttcgccttgaacttgaagaacgacttgtcttgagcatgattgaattttttagatctgtttcctctcgaataaatattggacacttggagaaaagtattgagctaagtataggtggtgctacggacatgttaagagaatatgaaaaaatctcaaagaatatatcagacaagctcctggtgcaagacagtgaattgttgccttctgttgtcccagttggggctccatggcaacagatacaccttttagccagaaaacagaaaaaggtgtacattgaattgtttcagttgactcctgtcaagttgactttcagttttacgagcacaccttggctcaataggaatgaaggtggttcagaccccagcgtaggtttcaacaacgctactgcaatccagagaggtcttatggccctcttggacgttgaaggagtaccagtttaccttggagaaattatagtggaaaatcttatggccagctggcaatctgttcaggacattcttatgaggcattatagtaggcaaatcctccacgaactttataaggttttgggttctgctggcgttataggaaatcctatgggttttgctaggaatgttgggtttggtttaaaggacttcatatctgcttcaagaaaagggaaattgcagagcccagttgaactattaaacggtatagcacaaggttcaaagactcttattggaagtacggtttatgcagtcagcagtgccacttctcacttcagtaaaactgcttataagggccttgttgcctttacatatgatgagcaagctgcttcgaagatggaagaacgggaaagacagctaggtttgcatggggaaggagtactgaatggttttctagagggtctgactgggctccttcaatcaccgattaggggagctgagaaacatggtcttcccggggtcatctcaggtttagcaatgggaacagctgggcttgtggcacggcctatggctagcattcttgaagccacaggcagaactgcccagagcattagaaaccgaagcaaccctcacgaatccaactacttgcgagtacgtttccccaggcctgttgccagagatcgccctttgtttccctactcctgggaagaagccatcggtgaatcgttgcttgcccaagctgacagtggcagactaaaggaggagacatttgtcatgtgcaagacactcaagggggctgggaagttccttgtgctaactgagaagctgcttctgctagtctcaagcccatacttggtggatctaggatcgcctcggttcatcggtgttcctcctgacccgcagtggtcgatcgacacggagatgcacctcaagagcgttgttcatctggacaggtctcaggaggtagtgaacattgttgggagcaacggacagacctcacctagggacaaaagaggtggcacgagaaacagggtcatgagctcggccttcgtccccctgtttcacctcagcatagagctgccaaatgaggaggatgcagaagggacggtgcaggtcctacaggcactcatcgagaagggcaaggcacggaggtgggacaagaacatcctacaccggagcaacatcagttgaggttttcacaacagtagtagaggttggtgttttgattgaagtggaagataaactaaattccaccccgtgactcaggtggattaaatatacaaacaaggcctcaaggcagagcagtcaccagcatacataagcttagtgtgaataagaaaacaaagtgttccataggtggtcaccgttggacacgtgcttcggttttgttttaagcttagtgtgaataagaaaacaaagtgttccataggtgatcaccgttggacacgtgcttcggttttttttttttttttgcggtctaggtgtagcttctagaagttttgtcgacggctcttgtaaatgaagtgtgagagggcttatgttatgtgtagcaacaccactgttttatgccacggctatgtttacaaacttcgccgttcatgggccatggatatttctgatt

SEQ ID NO: 60606 - DNA, 10857 bp, Zea Mays
gttgcctccgccgtccgcctccttctccaagcaaacggaactgaaaagaaaaggtcccgccccggcggcggcacccgactctccatccaccgctcgcctccccttgcccctcctctcgtctactcgtcaccctacgctcggctccatcctccccgcctccccacgtgtcctcccgctacatgggagcgcgggctccctagggtgcctcgaccaccgccgccgccatgttcgagggggtggtaagccaggtgctctatggcctcctccgccgctacgtcaagggcatccagaaggagcagcttaagatcggcatctggaaggaagaaatactgcttgaaaatgtagagctgattctggaagcctttgactacctgcagctgccattcgcgctgaaaaatggacgaattgggaagctaagcatccggattccttggaaaaagctaggatgggaccctatcattattgtcatagaagatgtctatgtttgcgcatgcccaagggaggactctgagtggagctcagattctctggacaagagggaactagctggaaagttggctaaacttaatgccattgagcttgctaaattttctagaagagttacagataatcaaacgggacaatcatttttgtcctacatatcagcaaagatactggatagtatccaagtttctatgcgaaatgttcatattgtatacatggatacccacaacggtcaagggaactttgtatttggtttggaattcacaagtctctcaatacaaacagatacccagaagcaaagttttacaatttcattgatgactaggtcaagacaagatgaagtaaataagataattgagatatcaaatgttggaatttactgtcatcagctggaagaagagcaggatctatgccatgttggtgctcttgaaaatgaccactcaagggattatcttgtaaatccattttgtgtgactgtatctgtgcttgctaacaaagctgccaagcttgacggtacccctcagtataacatgactgcagagctaactgcattggccctatctgttgatgaaatccagctccaacaaatcttaaatctttgtgattacttcactatctgtgctttgcgaacaaaatatggtcgttaccgtccttctcaaagctctttatctaagagatgtaaaggttggtacagaatgtggtggcaatatgctcagaattctgtattagcagatgttcgcagaagactgaagaaaacttcatggcgttatttgaagcagcgactgaatcaccaactaagatatgtgaaattgtacagaatgaaattggagcttttacagaaaggacagattgttagtgaagacattctacaagagttggaaaatatggacagagaatgtgatatagatgacatacttaactacagaacgattgcagagcaacaactgcaggaatcattggtgaaatcttccatagatactcatagtccaggaagtcctcgaagcgatgaacagttggcaggggcaagccagggatggttaaactggctttctcttggaatgcttggtgttggtggaacagctgatagtagctcatttgctggtgttatttctgaagacattattaaggatatatatgagggaacagaatttcgtccagtttcttctgctgaaaattgtttgaagaaagaaaactactattctttgtttgttagactatctatttctcagatagtcacaactgtcacctccaggaggtttggcacgaagcttgtagatacaatgttttctgggcttggtatggaatgtaaaatatgggatgatgcagcaactattcttgcttggcttgattctcttcgggttatcaacccactgaataaaacgaaaatcttatgggctgaaaagtgtagcaccggtgatggtcttggggcacctgttgtcagtatccaagtcgactttcccaagtcaaatgaaagatcagaagcttcaacaagggtcgttgtccaggaattcaacgccatctatgaaccagaattctttgttaatgtcctgtacatctacaatgtgttttccgctttccaatttcagcatgatagggtactttcttctctaaatcggttcaataatttgggaacaagacttgtctccaaactgaagtacatgtctgctaatcgtaaaaaacttatttgggatttgaggatttatcatttcgtcattaggataccatcacagaattgtgaaaggaaagaacttgccatggttattgatgctggggatgtattcattcagtctaaagatacaattgacgatatttctcgaacacaagaaagcaattcctttcttgatcacatatcaaaaagtcttcctagttatttttctgatgatctgttactcggtatccagttggatgagctttataaccagtttgagcttggccttactgggtttcaggtgaaggtattgttgcctgacagacataatgtttcctctacactgattaagcttgatgcttccattgcacttcgattgtgtgtattcctagatgaaccagtgctaaaacaattggaggtcggttttattgtgtcatctattgatgcatacctctctcagacaatgtacagtaccattgttaatttgcctagaatgaaagaaactaaccttttcaagaacagcgtatttgataataccaagacacatgtacccaagaaattggccttgaatgtgtctgtgtctctgaagctcgccaagttaggtttacatgttgaccttgatggtaattttgaggaaagttctggtctcattgttggcattgaagacattgatatcaggtatgctatctgtgaattgtcagatctttctcttgccatgaagacggtcaatgttactttcagatattggaaggataaatcagattcacatgtgctatgcttatctgggaacttaacacgatgtcctgaaaattctgttgaaacttgtttggatctgcattatagaactcacaagcatgacgatcaaatacatcatgtataccggctgattttatgtgatgttgatctgcatgttaacccatctgttattggtcagataaggatgtttttaagaaaacttgattcaggaccttcaattggcagtgatgttgaatccacaatgattggtcagagttccatgaaatccggggcagctaatggcatacttcccatgttctttttgtcaaatttatgtggtgcagatggcactgtattcgcaggagtttctgttgaccacttcccatttttagttgcagatcacagttgtggatataattttgggtgcttaggaactcaaaatgttgaagcacaagaaagtttatactcaaagaatgagcactgtcatgacacttcaggtttgaatggttatcatgcatcagatctcaccagcaatacatacggtaaaacccagcgttcagattgttcatctggctcatcaaatgaccccaagaatgccagcagaactgttctggatctatcacttatttctgttagaatacattttcctgaatcatgtggtactttagtaacaataaccattcctgaatcgatatcaacactcacttattttgatgcaagctcatgggacttactattgtctgctaacaatttgactcttgcttcaccatggactccaccaaatgtcaacgagctggtctggggcacagcttcacatcgcaatgctagtgtactcaacgttcgagttaaaaaggacttacctgcactgtcaaccgaagtatgtgttggaattcaaaacgtttgttgtgtattaccatccaagttactggctatgtttgttggattctttttgttggatgattggaatcgtattgcagaacaggaattccttgtggcagataacaaccttgaaggcttgagagaatcacatgactgtgtaacatataaatttgatatcagtgattgtgttgtattttttcctgtggaagagcaaggtttatcgtgtctaaagctggaggttccacattttttctgtgagttcattgcgaacggaagctctgtagaatttgcaaagcgtatccccaaagaattcttcagttcagagtgcatagtttccagaagagttgatgtcatctgcatatatgcaagaaatgcatccatatcacttctaattgtaagcgaccaaacagattttatgctaaagcttgatgagaacgttcctaagagaatccattctcttattgaaaagcttgatgccgacgtatggattcaggttccttgcaaagatataccatactcgcagcagcctacttcacctacctccgttatgagcaaaatatcacgatgcaacttgattgctgaagatttatattttataaatgggatggagacagttattggtgttgttgaccagttgatttcgatcggcaatgaaagtaaaatgtacaaaggcaatgcctcacagtttttagatcatagaagtttctgtgagggcaaccctgatcctaatgagtgtaccaatctcactatttcgatcaaggatctgatgattctcttgggccagtctaaagctaaaggtctggcactggagaggattgccactgcaaacatggagtttgatgtttctgctgtactagttggtgaaaaaccagagcgcatagactttgacgttgtttctttaacactgcagtcacctggtggttacacactcatctccattgtttcggatgggccactatctcctgtttttttcaagtttacaaagcaccatactggacaagatgagatattactaagtgtacccctttttgagatctggttatatttacaggattggaatacaattatcaatcattcccattcatacataaagacagaagtaaacagtatgcctgtggagcatgcagctgctttgtctcagtttccagaaatggtatcgtcaccacttattgcatcagaatttggttcaccagatgacttcaacttagtggtaacatgtgaaactatttctggtgtactccatatacctatctgggggaaagaagaaaatcacacaagcaatcacatgggtgtgactcctgcttcttttccaatggaagtgggcactcatgagacagatgatattcaatattgtgaaccaaaaggttgcaagtttgtcaccttaacttttgatactaaacattttgtggtgatgtcaggtgatagctgcataaattttagatgtgatttagagagattgaaggtattgctggaaatgattcaagagaataagggtacctctgttccatttgtgcatatatctaaggttaaatcttctggttatgttcgtcaatcagaaaggaatttggaacatctttctgttgatctacaagctgaatacatggatgttagtttttcacaccagatatttaacttctggcataacatggaactcaaatttcctgctgcatcatctgcatcctctttttattctgtggcattcaaggcaggattgaggaaagggtctcttctgctaagcgatggaaggtggagcagtcatggacctgtaatagagacgttattgaagaatctaactgtgcagttcagtcaaatgaaggataggacagaagtgtctgcttttgttgaccttttagtaaattacaataacattgataaggttatgtgggaaccttttgtagaaccctcaagatttcagttaaatatgctaagaaaatgtggtgattgtggattggatatatcacccagtactgatgtgtgtttaagttcaagcaagcagcttaatctgaatatatcagaacccttaattgaggctcttctcagacttaaccagatgattacagattctcttgatccgagtaatggtagtggtatttgggaagatcctggaatcttgagattaaaccatgatgatgttcgtaccagaagatacgcaccatactttctctcgaatgacacatcattgccctttaggttcaaggtgtaccgaggtgctgttaattcagatgatattggcagtttctctgtaatagatgaaaactctgtgccggcggggtatgctgtcccaatttacgtcgaagaaactcctgatgaatttttcttccaacacagagaagcacgatcatcagaccatctcatcgagaaacgaatgagtgctctatcacactacatgatctccattgagtttgatggaacatcaggcccttcaaaaccaatgtcaatggaccttgtgggcatttacttctttgaagtaaatttctcttcaagtaaaaagccaattctcggcgaagaaagtttaggagcattttcgtctaatgcaaaaggcaacgatgggttaattgtgcctgtggtgctcgatgtttccttacagaactacagcaagcgtatacgagtttattcgacggtaatactatacaatgcaacatcaatgcccctcgagttgaggtttgatataccatttggtcttgcatcaaaggtaattgggcccattcctccaaacaaagagattccactgccggttcatttgtctgaagctggccagattaggtggcaccctgtcggcagaacatacttgtggagtgaaacccgctccttgtcaagtttgctttcacgtgaaaacagggttgggttcatgaaatcatctgtttgttatccttctcaccctagtaatgacccatttcgttgttgtgtatctgttgaagaatacaatgtcccttcatctgttagtaccaagaaaaaacagttgtgcagtgaaagattgaacacacaagtttctggaagttctactccaaatacttttaagcaaaatttgacaaggacacattttatacggcatgtcaagcttaataccccgcttctcataaagaactatctgcctgtttacatttccttggcaatagataatggtgggtctgcgcgggtaatttcgctaaaggaggtagggtctgcctctattttgtttgttgatccctccaatgatcttggaattacaattgatattcaagattataggtccttgaacataaagtttccccgggctgaatcattctcaactacagccaagttaaatggcttcaaattctccataactgagtcaattactttctactcaaatttgtctaattttcctcttaatgttatgctggaaaaatcaatggatgctcgttctggcgcaagagagttgtatctttctgttccattcttgttgtacaattgcacagatctattgcttactgtcactgaaagcagctctgagaggagtgggcctactcttgtgattccccctagttttgaattggatggatatgcaagacatatgcttgaaaagggtggtctttctcttgtcaatccttctgtacaatgctttacaggcaaaatgccccagatatatttgatggatggacactgctcttcttcagatataagttgtacacgtaacagtgagtctgtaaagaaagatttggacaacagtgttaaagcttatatgtttgctcctgatgggcacactccagcaactgaactttcagttaagttgaatgcttctccgcctaataatggaactgaaacaactcggcgaaattggtcaaatcccttcctccttgtccctgccagtggttcaacaaatgttactattcctcagtcatctacttctggtgccttcttagttgcagtggcatctatacctgtttcaacagaactttttggcaggacaagggctattgctttcaggccaagatacgtcatatgtaatgcatgcagcaatgatttgttctttcgacaaaaaggaacacggttttctaagcacttaagttctgggcaacactcttttcttcactggtctgatacagccagagatctgctggtatccattcggattgatggcccaggatggcaatggtcaggaagttttttccctgatcacctgggagatgctcaattgaaaatgcggaatagtgcctcaggtttatcatatatggttcgagttgaagtgcaaaatgccgatctagacttaaacagcaatagattttctggaaaaaataatatcaatactggtacagtactgattctgctttctgatgataagactggttttgtaccttacaggatcgacaatttttcaatggagaaactgcggatatatcaacagagatgtgaatctattgaaacaattgtttatccctacacatcctgtcaatatgcttgggatgagccttgctatcctcatcgccttactgttgagattcctggagaacggagtttgggtacattcaatctggacattctcaatgatgatgttcatgtgtcactaccatccacatccgagaaagctgcaagacaattctgcatctcaatacatgcggaaggagcaattaaggtgctaagtgttcttgattcaaattgccacaataaggaaacaaatgaaaaggattttctgggatcaaaggaacctaaagttgttgatcacaaactggagcttgatatgaattttgctgaggttatcaaattacacttaccattcatcgggatatctttaataagttcttgtccacaggaattgttgtttgcttctgccaaggagatgactgttgttgccatgcagagtttagatcagcagagatttacggttcagatacaatctatgcaaatcgataatcagttccctgatagcccacacccggtcatgttgtcatttgagggcagtcataagggaaaatccatgaacttttttaagagtaaagatactaagctgaaatcagcaaatgacattctttccagtaccagtgaacctgtgctgcagtttgctgcagctaaatggagaaccaaagatgtatcatttgtttcctatcaatatataaacataagtctagcacctcttcgccttgaacttgaagaacgacttgtcttgagcatgattgaattttttagatctgtttcctctcgaataaatattggacacttggagaaaagtattgagctaagtataggtggtgctacggacatgttaagagaatatgaaaaaatctcaaagaatatatcagacaagctcctggtgcaagacagtgaattgttgccttctgttgtcccagttggggctccatggcaacagatacaccttttagccagaaaacagaaaaaggtgtacattgaattgtttcagttgactcctgtcaagttgactttcagttttacgagcacaccttggctcaataggaatgaaggtggttcagaccccagcgtaggtttcaacaacgctactgcaatccagagaggtcttatggccctcttggacgttgaaggagtaccagtttaccttggagaaattatagtggaaaatcttatggccagctggcaatctgttcaggacattcttatgaggcattatagtaggcaaatcctccacgaactttataaggttttgggttctgctggcgttataggaaatcctatgggttttgctaggaatgttgggtttggtttaaaggacttcatatctgcttcaagaaaagggaaattgcagagcccagttgaactattaaacggtatagcacaaggttcaaagactcttattggaagtacggtttatgcagtcagcagtgccacttctcacttcagtaaaactgcttataagggccttgttgcctttacatatgatgagcaagctgcttcgaagatggaagaacgggaaagacagctaggtttgcatggggaaggagtactgaatggttttctagagggtctgactgggctccttcaatcaccgattaggggagctgagaaacatggtcttcccggggtcatctcaggtttagcaatgggaacagctgggcttgtggcacggcctatggctagcattcttgaagccacaggcagaactgcccagagcattagaaaccgaagcaaccctcacgaatccaactacttgcgagtacgtttccccaggcctgttgccagagatcgccctttgtttccctactcctgggaagaagccatcggtgaatcgttgcttgcccaagctgacagtggcagactaaaggaggagacatttgtcatgtgcaagacactcaagggggctgggaagttccttgtgctaactgagaagctgcttctgctagtctcaagcccatacttggtggatctaggatcgcctcggttcatcggtgttcctcctgacccgcagtggtcgatcgacacggagatgcacctcaagagcgttgttcatctggacaggtctcaggaggtagtgaacattgttgggagcaacggacagacctcacctagggacaaaagaggtggcacgagaaacagggtcatgagctcggccttcgtccccctgtttcacctcagcatagagctgccaaatgaggaggatgcagaagggacggtgcaggtcctacaggcactcatcgagaagggcaaggcacggaggtgggacaagaacatcctacaccggagcaacatcagttgaggttttcacaacagtagtagaggttggtgttttgattgaagtggaagataaactaaattccaccccgtgactcaggtggattaaatatacaaacaaggcctcaaggcagagcagtcaccagcatacataagcttagtgtgaataagaaaacaaagtgttccataggtggtcaccgttggacacgtgcttcggttttgttttaagcttagtgtgaataagaaaacaaagtgttccataggtgatcaccgttggacacgtgcttcggttttttttttttttttgcggtctaggtgtagcttctagaagttttgtcgacggctcttgtaaatgaagtgtgagagggcttatgttatgtgtagcaacaccactgttttatgccacggctatgtttacaaacttcgccgttcatgggccatggatatttctgatt

SEQ ID NO: 60607 - DNA, 10890 bp, Zea Mays
gttgcctccgccgtccgcctccttctccaagcaaacggaactgaaaagaaaaggtcccgccccggcggcggcacccgactctccatccaccgctcgcctccccttgcccctcctctcgtctactcgtcaccctacgctcggctccatcctccccgcctccccacgtgtcctcccgctacatgggagcgcgggctccctagggtgcctcgaccaccgccgccgccatgttcgagggggtggtaagccaggtgctctatggcctcctccgccgctacgtcaagggcatccagaaggagcagcttaagatcggcatctggaaggaagaaatactgcttgaaaatgtagagctgattctggaagcctttgactacctgcagctgccattcgcgctgaaaaatggacgaattgggaagctaagcatccggattccttggaaaaagctaggatgggaccctatcattattgtcatagaagatgtctatgtttgcgcatgcccaagggaggactctgagtggagctcagattctctggacaagagggaactagctggaaagttggctaaacttaatgccattgagcttgctaaattttctagaagagttacagataatcaaacgggacaatcatttttgtcctacatatcagcaaagatactggatagtatccaagtttctatgcgaaatgttcatattgtatacatggatacccacaacggtcaagggaactttgtatttggtttggaattcacaagtctctcaatacaaacagatacccagaagcaaagttttacaatttcattgatgactaggtcaagacaagatgaagtaaataagataattgagatatcaaatgttggaatttactgtcatcagctggaagaagagcaggatctatgccatgttggtgctcttgaaaatgaccactcaagggattatcttgtaaatccattttgtgtgactgtatctgtgcttgctaacaaagctgccaagcttgacggtacccctcagtataacatgactgcagagctaactgcattggccctatctgttgatgaaatccagctccaacaaatcttaaatctttgtgattacttcactatctgtgctttgcgaacaaaatatggtcgttaccgtccttctcaaagctctttatctaagagatgtaaaggttggtacagaatgtggtggcaatatgctcagaattctgtattagcagatgttcgcagaagactgaagaaaacttcatggcgttatttgaagcagcgactgaatcaccaactaagatatgtgaaattgtacagaatgaaattggagcttttacagaaaggacagattgttagtgaagacattctacaagagttggaaaatatggacagagaatgtgatatagatgacatacttaactacagaacgattgcagagcaacaactgcaggttgttgatggttctgttagaagaacgttgagggaatcattggtgaaatcttccatagatactcatagtccaggaagtcctcgaagcgatgaacagttggcaggggcaagccagggatggttaaactggctttctcttggaatgcttggtgttggtggaacagctgatagtagctcatttgctggtgttatttctgaagacattattaaggatatatatgagggaacagaatttcgtccagtttcttctgctgaaaattgtttgaagaaagaaaactactattctttgtttgttagactatctatttctcagatagtcacaactgtcacctccaggaggtttggcacgaagcttgtagatacaatgttttctgggcttggtatggaatgtaaaatatgggatgatgcagcaactattcttgcttggcttgattctcttcgggttatcaacccactgaataaaacgaaaatcttatgggctgaaaagtgtagcaccggtgatggtcttggggcacctgttgtcagtatccaagtcgactttcccaagtcaaatgaaagatcagaagcttcaacaagggtcgttgtccaggaattcaacgccatctatgaaccagaattctttgttaatgtcctgtacatctacaatgtgttttccgctttccaatttcagcatgatagggtactttcttctctaaatcggttcaataatttgggaacaagacttgtctccaaactgaagtacatgtctgctaatcgtaaaaaacttatttgggatttgaggatttatcatttcgtcattaggataccatcacagaattgtgaaaggaaagaacttgccatggttattgatgctggggatgtattcattcagtctaaagatacaattgacgatatttctcgaacacaagaaagcaattcctttcttgatcacatatcaaaaagtcttcctagttatttttctgatgatctgttactcggtatccagttggatgagctttataaccagtttgagcttggccttactgggtttcaggtgaaggtattgttgcctgacagacataatgtttcctctacactgattaagcttgatgcttccattgcacttcgattgtgtgtattcctagatgaaccagtgctaaaacaattggaggtcggttttattgtgtcatctattgatgcatacctctctcagacaatgtacagtaccattgttaatttgcctagaatgaaagaaactaaccttttcaagaacagcgtatttgataataccaagacacatgtacccaagaaattggccttgaatgtgtctgtgtctctgaagctcgccaagttaggtttacatgttgaccttgatggtaattttgaggaaagttctggtctcattgttggcattgaagacattgatatcaggtatgctatctgtgaattgtcagatctttctcttgccatgaagacggtcaatgttactttcagatattggaaggataaatcagattcacatgtgctatgcttatctgggaacttaacacgatgtcctgaaaattctgttgaaacttgtttggatctgcattatagaactcacaagcatgacgatcaaatacatcatgtataccggctgattttatgtgatgttgatctgcatgttaacccatctgttattggtcagataaggatgtttttaagaaaacttgattcaggaccttcaattggcagtgatgttgaatccacaatgattggtcagagttccatgaaatccggggcagctaatggcatacttcccatgttctttttgtcaaatttatgtggtgcagatggcactgtattcgcaggagtttctgttgaccacttcccatttttagttgcagatcacagttgtggatataattttgggtgcttaggaactcaaaatgttgaagcacaagaaagtttatactcaaagaatgagcactgtcatgacacttcaggtttgaatggttatcatgcatcagatctcaccagcaatacatacggtaaaacccagcgttcagattgttcatctggctcatcaaatgaccccaagaatgccagcagaactgttctggatctatcacttatttctgttagaatacattttcctgaatcatgtggtactttagtaacaataaccattcctgaatcgatatcaacactcacttattttgatgcaagctcatgggacttactattgtctgctaacaatttgactcttgcttcaccatggactccaccaaatgtcaacgagctggtctggggcacagcttcacatcgcaatgctagtgtactcaacgttcgagttaaaaaggacttacctgcactgtcaaccgaagtatgtgttggaattcaaaacgtttgttgtgtattaccatccaagttactggctatgtttgttggattctttttgttggatgattggaatcgtattgcagaacaggaattccttgtggcagataacaaccttgaaggcttgagagaatcacatgactgtgtaacatataaatttgatatcagtgattgtgttgtattttttcctgtggaagagcaaggtttatcgtgtctaaagctggaggttccacattttttctgtgagttcattgcgaacggaagctctgtagaatttgcaaagcgtatccccaaagaattcttcagttcagagtgcatagtttccagaagagttgatgtcatctgcatatatgcaagaaatgcatccatatcacttctaattgtaagcgaccaaacagattttatgctaaagcttgatgagaacgttcctaagagaatccattctcttattgaaaagcttgatgccgacgtatggattcaggttccttgcaaagatataccatactcgcagcagcctacttcacctacctccgttatgagcaaaatatcacgatgcaacttgattgctgaagatttatattttataaatgggatggagacagttattggtgttgttgaccagttgatttcgatcggcaatgaaagtaaaatgtacaaaggcaatgcctcacagtttttagatcatagaagtttctgtgagggcaaccctgatcctaatgagtgtaccaatctcactatttcgatcaaggatctgatgattctcttgggccagtctaaagctaaaggtctggcactggagaggattgccactgcaaacatggagtttgatgtttctgctgtactagttggtgaaaaaccagagcgcatagactttgacgttgtttctttaacactgcagtcacctggtggttacacactcatctccattgtttcggatgggccactatctcctgtttttttcaagtttacaaagcaccatactggacaagatgagatattactaagtgtacccctttttgagatctggttatatttacaggattggaatacaattatcaatcattcccattcatacataaagacagaagtaaacagtatgcctgtggagcatgcagctgctttgtctcagtttccagaaatggtatcgtcaccacttattgcatcagaatttggttcaccagatgacttcaacttagtggtaacatgtgaaactatttctggtgtactccatatacctatctgggggaaagaagaaaatcacacaagcaatcacatgggtgtgactcctgcttcttttccaatggaagtgggcactcatgagacagatgatattcaatattgtgaaccaaaaggttgcaagtttgtcaccttaacttttgatactaaacattttgtggtgatgtcaggtgatagctgcataaattttagatgtgatttagagagattgaaggtattgctggaaatgattcaagagaataagggtacctctgttccatttgtgcatatatctaaggttaaatcttctggttatgttcgtcaatcagaaaggaatttggaacatctttctgttgatctacaagctgaatacatggatgttagtttttcacaccagatatttaacttctggcataacatggaactcaaatttcctgctgcatcatctgcatcctctttttattctgtggcattcaaggcaggattgaggaaagggtctcttctgctaagcgatggaaggtggagcagtcatggacctgtaatagagacgttattgaagaatctaactgtgcagttcagtcaaatgaaggataggacagaagtgtctgcttttgttgaccttttagtaaattacaataacattgataaggttatgtgggaaccttttgtagaaccctcaagatttcagttaaatatgctaagaaaatgtggtgattgtggattggatatatcacccagtactgatgtgtgtttaagttcaagcaagcagcttaatctgaatatatcagaacccttaattgaggctcttctcagacttaaccagatgattacagattctcttgatccgagtaatggtagtggtatttgggaagatcctggaatcttgagattaaaccatgatgatgttcgtaccagaagatacgcaccatactttctctcgaatgacacatcattgccctttaggttcaaggtgtaccgaggtgctgttaattcagatgatattggcagtttctctgtaatagatgaaaactctgtgccggcggggtatgctgtcccaatttacgtcgaagaaactcctgatgaatttttcttccaacacagagaagcacgatcatcagaccatctcatcgagaaacgaatgagtgctctatcacactacatgatctccattgagtttgatggaacatcaggcccttcaaaaccaatgtcaatggaccttgtgggcatttacttctttgaagtaaatttctcttcaagtaaaaagccaattctcggcgaagaaagtttaggagcattttcgtctaatgcaaaaggcaacgatgggttaattgtgcctgtggtgctcgatgtttccttacagaactacagcaagcgtatacgagtttattcgacggtaatactatacaatgcaacatcaatgcccctcgagttgaggtttgatataccatttggtcttgcatcaaaggtaattgggcccattcctccaaacaaagagattccactgccggttcatttgtctgaagctggccagattaggtggcaccctgtcggcagaacatacttgtggagtgaaacccgctccttgtcaagtttgctttcacgtgaaaacagggttgggttcatgaaatcatctgtttgttatccttctcaccctagtaatgacccatttcgttgttgtgtatctgttgaagaatacaatgtcccttcatctgttagtaccaagaaaaaacagttgtgcagtgaaagattgaacacacaagtttctggaagttctactccaaatacttttaagcaaaatttgacaaggacacattttatacggcatgtcaagcttaataccccgcttctcataaagaactatctgcctgtttacatttccttggcaatagataatggtgggtctgcgcgggtaatttcgctaaaggaggtagggtctgcctctattttgtttgttgatccctccaatgatcttggaattacaattgatattcaagattataggtccttgaacataaagtttccccgggctgaatcattctcaactacagccaagttaaatggcttcaaattctccataactgagtcaattactttctactcaaatttgtctaattttcctcttaatgttatgctggaaaaatcaatggatgctcgttctggcgcaagagagttgtatctttctgttccattcttgttgtacaattgcacagatctattgcttactgtcactgaaagcagctctgagaggagtgggcctactcttgtgattccccctagttttgaattggatggatatgcaagacatatgcttgaaaagggtggtctttctcttgtcaatccttctgtacaatgctttacaggcaaaatgccccagatatatttgatggatggacactgctcttcttcagatataagttgtacacgtaacagtgagtctgtaaagaaagatttggacaacagtgttaaagcttatatgtttgctcctgatgggcacactccagcaactgaactttcagttaagttgaatgcttctccgcctaataatggaactgaaacaactcggcgaaattggtcaaatcccttcctccttgtccctgccagtggttcaacaaatgttactattcctcagtcatctacttctggtgccttcttagttgcagtggcatctatacctgtttcaacagaactttttggcaggacaagggctattgctttcaggccaagatacgtcatatgtaatgcatgcagcaatgatttgttctttcgacaaaaaggaacacggttttctaagcacttaagttctgggcaacactcttttcttcactggtctgatacagccagagatctgctggtatccattcggattgatggcccaggatggcaatggtcaggaagttttttccctgatcacctgggagatgctcaattgaaaatgcggaatagtgcctcaggtttatcatatatggttcgagttgaagtgcaaaatgccgatctagacttaaacagcaatagattttctggaaaaaataatatcaatactggtacagtactgattctgctttctgatgataagactggttttgtaccttacaggatcgacaatttttcaatggagaaactgcggatatatcaacagagatgtgaatctattgaaacaattgtttatccctacacatcctgtcaatatgcttgggatgagccttgctatcctcatcgccttactgttgagattcctggagaacggagtttgggtacattcaatctggacattctcaatgatgatgttcatgtgtcactaccatccacatccgagaaagctgcaagacaattctgcatctcaatacatgcggaaggagcaattaaggtgctaagtgttcttgattcaaattgccacaataaggaaacaaatgaaaaggattttctgggatcaaaggaacctaaagttgttgatcacaaactggagcttgatatgaattttgctgaggttatcaaattacacttaccattcatcgggatatctttaataagttcttgtccacaggaattgttgtttgcttctgccaaggagatgactgttgttgccatgcagagtttagatcagcagagatttacggttcagatacaatctatgcaaatcgataatcagttccctgatagcccacacccggtcatgttgtcatttgagggcagtcataagggaaaatccatgaacttttttaagagtaaagatactaagctgaaatcagcaaatgacattctttccagtaccagtgaacctgtgctgcagtttgctgcagctaaatggagaaccaaagatgtatcatttgtttcctatcaatatataaacataagtctagcacctcttcgccttgaacttgaagaacgacttgtcttgagcatgattgaattttttagatctgtttcctctcgaataaatattggacacttggagaaaagtattgagctaagtataggtggtgctacggacatgttaagagaatatgaaaaaatctcaaagaatatatcagacaagctcctggtgcaagacagtgaattgttgccttctgttgtcccagttggggctccatggcaacagatacaccttttagccagaaaacagaaaaaggtgtacattgaattgtttcagttgactcctgtcaagttgactttcagttttacgagcacaccttggctcaataggaatgaaggtggttcagaccccagcgtaggtttcaacaacgctactgcaatccagagaggtcttatggccctcttggacgttgaaggagtaccagtttaccttggagaaattatagtggaaaatcttatggccagctggcaatctgttcaggacattcttatgaggcattatagtaggcaaatcctccacgaactttataaggttttgggttctgctggcgttataggaaatcctatgggttttgctaggaatgttgggtttggtttaaaggacttcatatctgcttcaagaaaagggaaattgcagagcccagttgaactattaaacggtatagcacaaggttcaaagactcttattggaagtacggtttatgcagtcagcagtgccacttctcacttcagtaaaactgcttataagggccttgttgcctttacatatgatgagcaagctgcttcgaagatggaagaacgggaaagacagctaggtttgcatggggaaggagtactgaatggttttctagagggtctgactgggctccttcaatcaccgattaggggagctgagaaacatggtcttcccggggtcatctcaggtttagcaatgggaacagctgggcttgtggcacggcctatggctagcattcttgaagccacaggcagaactgcccagagcattagaaaccgaagcaaccctcacgaatccaactacttgcgagtacgtttccccaggcctgttgccagagatcgccctttgtttccctactcctgggaagaagccatcggtgaatcgttgcttgcccaagctgacagtggcagactaaaggaggagacatttgtcatgtgcaagacactcaagggggctgggaagttccttgtgctaactgagaagctgcttctgctagtctcaagcccatacttggtggatctaggatcgcctcggttcatcggtgttcctcctgacccgcagtggtcgatcgacacggagatgcacctcaagagcgttgttcatctggacaggtctcaggaggtagtgaacattgttgggagcaacggacagacctcacctagggacaaaagaggtggcacgagaaacagggtcatgagctcggccttcgtccccctgtttcacctcagcatagagctgccaaatgaggaggatgcagaagggacggtgcaggtcctacaggcactcatcgagaagggcaaggcacggaggtgggacaagaacatcctacaccggagcaacatcagttgaggttttcacaacagtagtagaggttggtgttttgattgaagtggaagataaactaaattccaccccgtgactcaggtggattaaatatacaaacaaggcctcaaggcagagcagtcaccagcatacataagcttagtgtgaataagaaaacaaagtgttccataggtggtcaccgttggacacgtgcttcggttttgttttaagcttagtgtgaataagaaaacaaagtgttccataggtgatcaccgttggacacgtgcttcggttttttttttttttttgcggtctaggtgtagcttctagaagttttgtcgacggctcttgtaaatgaagtgtgagagggcttatgttatgtgtagcaacaccactgttttatgccacggctatgtttacaaacttcgccgttcatgggccatggatatttctgatt

SEQ ID NO: 60608 - DNA, 10938 bp, Zea Mays
gttgcctccgccgtccgcctccttctccaagcaaacggaactgaaaagaaaaggtcccgccccggcggcggcacccgactctccatccaccgctcgcctccccttgcccctcctctcgtctactcgtcaccctacgctcggctccatcctccccgcctccccacgtgtcctcccgctacatgggagcgcgggctccctagggtgcctcgaccaccgccgccgccatgttcgagggggtggtaagccaggtgctctatggcctcctccgccgctacgtcaagggcatccagaaggagcagcttaagatcggcatctggaaggaagaaatactgcttgaaaatgtagagctgattctggaagcctttgactacctgcagctgccattcgcgctgaaaaatggacgaattgggaagctaagcatccggattccttggaaaaagctaggatgggaccctatcattattgtcatagaagatgtctatgtttgcgcatgcccaagggaggactctgagtggagctcagattctctggacaagagggaactagctggaaagttggctaaacttaatgccattgagcttgctaaattttctagaagagttacagataatcaaacgggacaatcatttttgtcctacatatcagcaaagatactggatagtatccaagtttctatgcgaaatgttcatattgtatacatggatacccacaacggtcaagggaactttgtatttggtttggaattcacaagtctctcaatacaaacagatacccagaagcaaagttttacaatttcattgatgactaggtcaagacaagatgaagtaaataagataattgagatatcaaatgttggaatttactgtcatcagctggaagaagagcaggatctatgccatgttggtgctcttgaaaatgaccactcaagggattatcttgtaaatccattttgtgtgactgtatctgtgcttgctaacaaagctgccaagcttgacggtacccctcagtataacatgactgcagagctaactgcattggccctatctgttgatgaaatccagctccaacaaatcttaaatctttgtgattacttcactatctgtgctttgcgaacaaaatatggtcgttaccgtccttctcaaagctctttatctaagagatgtaaaggttggtacagaatgtggtggcaatatgctcagaattctgtattagcagatgttcgcagaagactgaagaaaacttcatggcgttatttgaagcagcgactgaatcaccaactaagatatgtgaaattgtacagaatgaaattggagcttttacagaaaggacagattgttagtgaagacattctacaagagttggaaaatatggacagagaatgtgatatagatgacatacttaactacagaacgattgcagagcaacaactgcaggaatcattggtgaaatcttccatagatactcatagtccaggaagtcctcgaagcgatgaacagttggcaggggcaagccagggatggttaaactggctttctcttggaatgcttggtgttggtggaacagctgatagtagctcatttgctggtgttatttctgaagacattattaaggatatatatgagggaacagaatttcgtccagtttcttctgctgaaaattgtttgaagaaagaaaactactattctttgtttgttagactatctatttctcagatagtcacaactgtcacctccaggaggtttggcacgaagcttgtagatacaatgttttctgggcttggtatggaatgtaaaatatgggatgatgcagcaactattcttgcttggcttgattctcttcgggttatcaacccactgaataaaacgaaaatcttatgggctgaaaagtgtagcaccggtgatggtcttggggcacctgttgtcagtatccaagtcgactttcccaagtcaaatgaaagatcagaagcttcaacaagggtcgttgtccaggaattcaacgccatctatgaaccagaattctttgttaatgtcctgtacatctacaatgtgttttccgctttccaatttcagcatgataggcgacagcctgtggggaggtggagctccggcggctgtggcatgagaggaggggatatgcgacaattgtggcttggcggagaggtactttcttctctaaatcggttcaataatttgggaacaagacttgtctccaaactgaagtacatgtctgctaatcgtaaaaaacttatttgggatttgaggatttatcatttcgtcattaggataccatcacagaattgtgaaaggaaagaacttgccatggttattgatgctggggatgtattcattcagtctaaagatacaattgacgatatttctcgaacacaagaaagcaattcctttcttgatcacatatcaaaaagtcttcctagttatttttctgatgatctgttactcggtatccagttggatgagctttataaccagtttgagcttggccttactgggtttcaggtgaaggtattgttgcctgacagacataatgtttcctctacactgattaagcttgatgcttccattgcacttcgattgtgtgtattcctagatgaaccagtgctaaaacaattggaggtcggttttattgtgtcatctattgatgcatacctctctcagacaatgtacagtaccattgttaatttgcctagaatgaaagaaactaaccttttcaagaacagcgtatttgataataccaagacacatgtacccaagaaattggccttgaatgtgtctgtgtctctgaagctcgccaagttaggtttacatgttgaccttgatggtaattttgaggaaagttctggtctcattgttggcattgaagacattgatatcaggtatgctatctgtgaattgtcagatctttctcttgccatgaagacggtcaatgttactttcagatattggaaggataaatcagattcacatgtgctatgcttatctgggaacttaacacgatgtcctgaaaattctgttgaaacttgtttggatctgcattatagaactcacaagcatgacgatcaaatacatcatgtataccggctgattttatgtgatgttgatctgcatgttaacccatctgttattggtcagataaggatgtttttaagaaaacttgattcaggaccttcaattggcagtgatgttgaatccacaatgattggtcagagttccatgaaatccggggcagctaatggcatacttcccatgttctttttgtcaaatttatgtggtgcagatggcactgtattcgcaggagtttctgttgaccacttcccatttttagttgcagatcacagttgtggatataattttgggtgcttaggaactcaaaatgttgaagcacaagaaagtttatactcaaagaatgagcactgtcatgacacttcaggtttgaatggttatcatgcatcagatctcaccagcaatacatacggtaaaacccagcgttcagattgttcatctggctcatcaaatgaccccaagaatgccagcagaactgttctggatctatcacttatttctgttagaatacattttcctgaatcatgtggtactttagtaacaataaccattcctgaatcgatatcaacactcacttattttgatgcaagctcatgggacttactattgtctgctaacaatttgactcttgcttcaccatggactccaccaaatgtcaacgagctggtctggggcacagcttcacatcgcaatgctagtgtactcaacgttcgagttaaaaaggacttacctgcactgtcaaccgaagtatgtgttggaattcaaaacgtttgttgtgtattaccatccaagttactggctatgtttgttggattctttttgttggatgattggaatcgtattgcagaacaggaattccttgtggcagataacaaccttgaaggcttgagagaatcacatgactgtgtaacatataaatttgatatcagtgattgtgttgtattttttcctgtggaagagcaaggtttatcgtgtctaaagctggaggttccacattttttctgtgagttcattgcgaacggaagctctgtagaatttgcaaagcgtatccccaaagaattcttcagttcagagtgcatagtttccagaagagttgatgtcatctgcatatatgcaagaaatgcatccatatcacttctaattgtaagcgaccaaacagattttatgctaaagcttgatgagaacgttcctaagagaatccattctcttattgaaaagcttgatgccgacgtatggattcaggttccttgcaaagatataccatactcgcagcagcctacttcacctacctccgttatgagcaaaatatcacgatgcaacttgattgctgaagatttatattttataaatgggatggagacagttattggtgttgttgaccagttgatttcgatcggcaatgaaagtaaaatgtacaaaggcaatgcctcacagtttttagatcatagaagtttctgtgagggcaaccctgatcctaatgagtgtaccaatctcactatttcgatcaaggatctgatgattctcttgggccagtctaaagctaaaggtctggcactggagaggattgccactgcaaacatggagtttgatgtttctgctgtactagttggtgaaaaaccagagcgcatagactttgacgttgtttctttaacactgcagtcacctggtggttacacactcatctccattgtttcggatgggccactatctcctgtttttttcaagtttacaaagcaccatactggacaagatgagatattactaagtgtacccctttttgagatctggttatatttacaggattggaatacaattatcaatcattcccattcatacataaagacagaagtaaacagtatgcctgtggagcatgcagctgctttgtctcagtttccagaaatggtatcgtcaccacttattgcatcagaatttggttcaccagatgacttcaacttagtggtaacatgtgaaactatttctggtgtactccatatacctatctgggggaaagaagaaaatcacacaagcaatcacatgggtgtgactcctgcttcttttccaatggaagtgggcactcatgagacagatgatattcaatattgtgaaccaaaaggttgcaagtttgtcaccttaacttttgatactaaacattttgtggtgatgtcaggtgatagctgcataaattttagatgtgatttagagagattgaaggtattgctggaaatgattcaagagaataagggtacctctgttccatttgtgcatatatctaaggttaaatcttctggttatgttcgtcaatcagaaaggaatttggaacatctttctgttgatctacaagctgaatacatggatgttagtttttcacaccagatatttaacttctggcataacatggaactcaaatttcctgctgcatcatctgcatcctctttttattctgtggcattcaaggcaggattgaggaaagggtctcttctgctaagcgatggaaggtggagcagtcatggacctgtaatagagacgttattgaagaatctaactgtgcagttcagtcaaatgaaggataggacagaagtgtctgcttttgttgaccttttagtaaattacaataacattgataaggttatgtgggaaccttttgtagaaccctcaagatttcagttaaatatgctaagaaaatgtggtgattgtggattggatatatcacccagtactgatgtgtgtttaagttcaagcaagcagcttaatctgaatatatcagaacccttaattgaggctcttctcagacttaaccagatgattacagattctcttgatccgagtaatggtagtggtatttgggaagatcctggaatcttgagattaaaccatgatgatgttcgtaccagaagatacgcaccatactttctctcgaatgacacatcattgccctttaggttcaaggtgtaccgaggtgctgttaattcagatgatattggcagtttctctgtaatagatgaaaactctgtgccggcggggtatgctgtcccaatttacgtcgaagaaactcctgatgaatttttcttccaacacagagaagcacgatcatcagaccatctcatcgagaaacgaatgagtgctctatcacactacatgatctccattgagtttgatggaacatcaggcccttcaaaaccaatgtcaatggaccttgtgggcatttacttctttgaagtaaatttctcttcaagtaaaaagccaattctcggcgaagaaagtttaggagcattttcgtctaatgcaaaaggcaacgatgggttaattgtgcctgtggtgctcgatgtttccttacagaactacagcaagcgtatacgagtttattcgacggtaatactatacaatgcaacatcaatgcccctcgagttgaggtttgatataccatttggtcttgcatcaaaggtaattgggcccattcctccaaacaaagagattccactgccggttcatttgtctgaagctggccagattaggtggcaccctgtcggcagaacatacttgtggagtgaaacccgctccttgtcaagtttgctttcacgtgaaaacagggttgggttcatgaaatcatctgtttgttatccttctcaccctagtaatgacccatttcgttgttgtgtatctgttgaagaatacaatgtcccttcatctgttagtaccaagaaaaaacagttgtgcagtgaaagattgaacacacaagtttctggaagttctactccaaatacttttaagcaaaatttgacaaggacacattttatacggcatgtcaagcttaataccccgcttctcataaagaactatctgcctgtttacatttccttggcaatagataatggtgggtctgcgcgggtaatttcgctaaaggaggtagggtctgcctctattttgtttgttgatccctccaatgatcttggaattacaattgatattcaagattataggtccttgaacataaagtttccccgggctgaatcattctcaactacagccaagttaaatggcttcaaattctccataactgagtcaattactttctactcaaatttgtctaattttcctcttaatgttatgctggaaaaatcaatggatgctcgttctggcgcaagagagttgtatctttctgttccattcttgttgtacaattgcacagatctattgcttactgtcactgaaagcagctctgagaggagtgggcctactcttgtgattccccctagttttgaattggatggatatgcaagacatatgcttgaaaagggtggtctttctcttgtcaatccttctgtacaatgctttacaggcaaaatgccccagatatatttgatggatggacactgctcttcttcagatataagttgtacacgtaacagtgagtctgtaaagaaagatttggacaacagtgttaaagcttatatgtttgctcctgatgggcacactccagcaactgaactttcagttaagttgaatgcttctccgcctaataatggaactgaaacaactcggcgaaattggtcaaatcccttcctccttgtccctgccagtggttcaacaaatgttactattcctcagtcatctacttctggtgccttcttagttgcagtggcatctatacctgtttcaacagaactttttggcaggacaagggctattgctttcaggccaagatacgtcatatgtaatgcatgcagcaatgatttgttctttcgacaaaaaggaacacggttttctaagcacttaagttctgggcaacactcttttcttcactggtctgatacagccagagatctgctggtatccattcggattgatggcccaggatggcaatggtcaggaagttttttccctgatcacctgggagatgctcaattgaaaatgcggaatagtgcctcaggtttatcatatatggttcgagttgaagtgcaaaatgccgatctagacttaaacagcaatagattttctggaaaaaataatatcaatactggtacagtactgattctgctttctgatgataagactggttttgtaccttacaggatcgacaatttttcaatggagaaactgcggatatatcaacagagatgtgaatctattgaaacaattgtttatccctacacatcctgtcaatatgcttgggatgagccttgctatcctcatcgccttactgttgagattcctggagaacggagtttgggtacattcaatctggacattctcaatgatgatgttcatgtgtcactaccatccacatccgagaaagctgcaagacaattctgcatctcaatacatgcggaaggagcaattaaggtgctaagtgttcttgattcaaattgccacaataaggaaacaaatgaaaaggattttctgggatcaaaggaacctaaagttgttgatcacaaactggagcttgatatgaattttgctgaggttatcaaattacacttaccattcatcgggatatctttaataagttcttgtccacaggaattgttgtttgcttctgccaaggagatgactgttgttgccatgcagagtttagatcagcagagatttacggttcagatacaatctatgcaaatcgataatcagttccctgatagcccacacccggtcatgttgtcatttgagggcagtcataagggaaaatccatgaacttttttaagagtaaagatactaagctgaaatcagcaaatgacattctttccagtaccagtgaacctgtgctgcagtttgctgcagctaaatggagaaccaaagatgtatcatttgtttcctatcaatatataaacataagtctagcacctcttcgccttgaacttgaagaacgacttgtcttgagcatgattgaattttttagatctgtttcctctcgaataaatattggacacttggagaaaagtattgagctaagtataggtggtgctacggacatgttaagagaatatgaaaaaatctcaaagaatatatcagacaagctcctggtgcaagacagtgaattgttgccttctgttgtcccagttggggctccatggcaacagatacaccttttagccagaaaacagaaaaaggtgtacattgaattgtttcagttgactcctgtcaagttgactttcagttttacgagcacaccttggctcaataggaatgaaggtggttcagaccccagcgtaggtttcaacaacgctactgcaatccagagaggtcttatggccctcttggacgttgaaggagtaccagtttaccttggagaaattatagtggaaaatcttatggccagctggcaatctgttcaggacattcttatgaggcattatagtaggcaaatcctccacgaactttataaggttttgggttctgctggcgttataggaaatcctatgggttttgctaggaatgttgggtttggtttaaaggacttcatatctgcttcaagaaaagggaaattgcagagcccagttgaactattaaacggtatagcacaaggttcaaagactcttattggaagtacggtttatgcagtcagcagtgccacttctcacttcagtaaaactgcttataagggccttgttgcctttacatatgatgagcaagctgcttcgaagatggaagaacgggaaagacagctaggtttgcatggggaaggagtactgaatggttttctagagggtctgactgggctccttcaatcaccgattaggggagctgagaaacatggtcttcccggggtcatctcaggtttagcaatgggaacagctgggcttgtggcacggcctatggctagcattcttgaagccacaggcagaactgcccagagcattagaaaccgaagcaaccctcacgaatccaactacttgcgagtacgtttccccaggcctgttgccagagatcgccctttgtttccctactcctgggaagaagccatcggtgaatcgttgcttgcccaagctgacagtggcagactaaaggaggagacatttgtcatgtgcaagacactcaagggggctgggaagttccttgtgctaactgagaagctgcttctgctagtctcaagcccatacttggtggatctaggatcgcctcggttcatcggtgttcctcctgacccgcagtggtcgatcgacacggagatgcacctcaagagcgttgttcatctggacaggtctcaggaggtagtgaacattgttgggagcaacggacagacctcacctagggacaaaagaggtggcacgagaaacagggtcatgagctcggccttcgtccccctgtttcacctcagcatagagctgccaaatgaggaggatgcagaagggacggtgcaggtcctacaggcactcatcgagaagggcaaggcacggaggtgggacaagaacatcctacaccggagcaacatcagttgaggttttcacaacagtagtagaggttggtgttttgattgaagtggaagataaactaaattccaccccgtgactcaggtggattaaatatacaaacaaggcctcaaggcagagcagtcaccagcatacataagcttagtgtgaataagaaaacaaagtgttccataggtggtcaccgttggacacgtgcttcggttttgttttaagcttagtgtgaataagaaaacaaagtgttccataggtgatcaccgttggacacgtgcttcggttttttttttttttttgcggtctaggtgtagcttctagaagttttgtcgacggctcttgtaaatgaagtgtgagagggcttatgttatgtgtagcaacaccactgttttatgccacggctatgtttacaaacttcgccgttcatgggccatggatatttctgatt

SEQ ID NO: 60609 - DNA, 10824 bp, Zea Mays
gccgttgcctccgccgtccgcctccttctccaagcaaacggaactgaaaagaaaaggtcccgccccggcggcggcacccgactctccatccaccgctcgcctccccttgcccctcctctcgtctactcgtcaccctacgctcggctccatcctccccgcctccccacgtgtcctcccgctacatgggagcgcgggctccctagggtgcctcgaccaccgccgccgccatgttcgagggggtggtaagccaggtgctctatggcctcctccgccgctacgtcaagggcatccagaaggagcagcttaagatcggcatctggaaggaagaaatactgcttgaaaatgtagagctgattctggaagcctttgactacctgcagctgccattcgcgctgaaaaatggacgaattgggaagctaagcatccggattccttggaaaaagctaggatgggaccctatcattattgtcatagaagattggagctcagattctctggacaagagggaactagctggaaagttggctaaacttaatgccattgagcttgctaaattttctagaagagttacagataatcaaacgggacaatcatttttgtcctacatatcagcaaagatactggatagtatccaagtttctatgcgaaatgttcatattgtatacatggatacccacaacggtcaagggaactttgtatttggtttggaattcacaagtctctcaatacaaacagatacccagaagcaaagttttacaatttcattgatgactaggtcaagacaagatgaagtaaataagataattgagatatcaaatgttggaatttactgtcatcagctggaagaagagcaggatctatgccatgttggtgctcttgaaaatgaccactcaagggattatcttgtaaatccattttgtgtgactgtatctgtgcttgctaacaaagctgccaagcttgacggtacccctcagtataacatgactgcagagctaactgcattggccctatctgttgatgaaatccagctccaacaaatcttaaatctttgtgattacttcactatctgtgctttgcgaacaaaatatggtcgttaccgtccttctcaaagctctttatctaagagatgtaaaggttggtacagaatgtggtggcaatatgctcagaattctgtattagcagatgttcgcagaagactgaagaaaacttcatggcgttatttgaagcagcgactgaatcaccaactaagatatgtgaaattgtacagaatgaaattggagcttttacagaaaggacagattgttagtgaagacattctacaagagttggaaaatatggacagagaatgtgatatagatgacatacttaactacagaacgattgcagagcaacaactgcaggaatcattggtgaaatcttccatagatactcatagtccaggaagtcctcgaagcgatgaacagttggcaggggcaagccagggatggttaaactggctttctcttggaatgcttggtgttggtggaacagctgatagtagctcatttgctggtgttatttctgaagacattattaaggatatatatgagggaacagaatttcgtccagtttcttctgctgaaaattgtttgaagaaagaaaactactattctttgtttgttagactatctatttctcagatagtcacaactgtcacctccaggaggtttggcacgaagcttgtagatacaatgttttctgggcttggtatggaatgtaaaatatgggatgatgcagcaactattcttgcttggcttgattctcttcgggttatcaacccactgaataaaacgaaaatcttatgggctgaaaagtgtagcaccggtgatggtcttggggcacctgttgtcagtatccaagtcgactttcccaagtcaaatgaaagatcagaagcttcaacaagggtcgttgtccaggaattcaacgccatctatgaaccagaattctttgttaatgtcctgtacatctacaatgtgttttccgctttccaatttcagcatgatagggtactttcttctctaaatcggttcaataatttgggaacaagacttgtctccaaactgaagtacatgtctgctaatcgtaaaaaacttatttgggatttgaggatttatcatttcgtcattaggataccatcacagaattgtgaaaggaaagaacttgccatggttattgatgctggggatgtattcattcagtctaaagatacaattgacgatatttctcgaacacaagaaagcaattcctttcttgatcacatatcaaaaagtcttcctagttatttttctgatgatctgttactcggtatccagttggatgagctttataaccagtttgagcttggccttactgggtttcaggtgaaggtattgttgcctgacagacataatgtttcctctacactgattaagcttgatgcttccattgcacttcgattgtgtgtattcctagatgaaccagtgctaaaacaattggaggtcggttttattgtgtcatctattgatgcatacctctctcagacaatgtacagtaccattgttaatttgcctagaatgaaagaaactaaccttttcaagaacagcgtatttgataataccaagacacatgtacccaagaaattggccttgaatgtgtctgtgtctctgaagctcgccaagttaggtttacatgttgaccttgatggtaattttgaggaaagttctggtctcattgttggcattgaagacattgatatcaggtatgctatctgtgaattgtcagatctttctcttgccatgaagacggtcaatgttactttcagatattggaaggataaatcagattcacatgtgctatgcttatctgggaacttaacacgatgtcctgaaaattctgttgaaacttgtttggatctgcattatagaactcacaagcatgacgatcaaatacatcatgtataccggctgattttatgtgatgttgatctgcatgttaacccatctgttattggtcagataaggatgtttttaagaaaacttgattcaggaccttcaattggcagtgatgttgaatccacaatgattggtcagagttccatgaaatccggggcagctaatggcatacttcccatgttctttttgtcaaatttatgtggtgcagatggcactgtattcgcaggagtttctgttgaccacttcccatttttagttgcagatcacagttgtggatataattttgggtgcttaggaactcaaaatgttgaagcacaagaaagtttatactcaaagaatgagcactgtcatgacacttcaggtttgaatggttatcatgcatcagatctcaccagcaatacatacggtaaaacccagcgttcagattgttcatctggctcatcaaatgaccccaagaatgccagcagaactgttctggatctatcacttatttctgttagaatacattttcctgaatcatgtggtactttagtaacaataaccattcctgaatcgatatcaacactcacttattttgatgcaagctcatgggacttactattgtctgctaacaatttgactcttgcttcaccatggactccaccaaatgtcaacgagctggtctggggcacagcttcacatcgcaatgctagtgtactcaacgttcgagttaaaaaggacttacctgcactgtcaaccgaagtatgtgttggaattcaaaacgtttgttgtgtattaccatccaagttactggctatgtttgttggattctttttgttggatgattggaatcgtattgcagaacaggaattccttgtggcagataacaaccttgaaggcttgagagaatcacatgactgtgtaacatataaatttgatatcagtgattgtgttgtattttttcctgtggaagagcaaggtttatcgtgtctaaagctggaggttccacattttttctgtgagttcattgcgaacggaagctctgtagaatttgcaaagcgtatccccaaagaattcttcagttcagagtgcatagtttccagaagagttgatgtcatctgcatatatgcaagaaatgcatccatatcacttctaattgtaagcgaccaaacagattttatgctaaagcttgatgagaacgttcctaagagaatccattctcttattgaaaagcttgatgccgacgtatggattcaggttccttgcaaagatataccatactcgcagcagcctacttcacctacctccgttatgagcaaaatatcacgatgcaacttgattgctgaagatttatattttataaatgggatggagacagttattggtgttgttgaccagttgatttcgatcggcaatgaaagtaaaatgtacaaaggcaatgcctcacagtttttagatcatagaagtttctgtgagggcaaccctgatcctaatgagtgtaccaatctcactatttcgatcaaggatctgatgattctcttgggccagtctaaagctaaaggtctggcactggagaggattgccactgcaaacatggagtttgatgtttctgctgtactagttggtgaaaaaccagagcgcatagactttgacgttgtttctttaacactgcagtcacctggtggttacacactcatctccattgtttcggatgggccactatctcctgtttttttcaagtttacaaagcaccatactggacaagatgagatattactaagtgtacccctttttgagatctggttatatttacaggattggaatacaattatcaatcattcccattcatacataaagacagaagtaaacagtatgcctgtggagcatgcagctgctttgtctcagtttccagaaatggtatcgtcaccacttattgcatcagaatttggttcaccagatgacttcaacttagtggtaacatgtgaaactatttctggtgtactccatatacctatctgggggaaagaagaaaatcacacaagcaatcacatgggtgtgactcctgcttcttttccaatggaagtgggcactcatgagacagatgatattcaatattgtgaaccaaaaggttgcaagtttgtcaccttaacttttgatactaaacattttgtggtgatgtcaggtgatagctgcataaattttagatgtgatttagagagattgaaggtattgctggaaatgattcaagagaataagggtacctctgttccatttgtgcatatatctaaggttaaatcttctggttatgttcgtcaatcagaaaggaatttggaacatctttctgttgatctacaagctgaatacatggatgttagtttttcacaccagatatttaacttctggcataacatggaactcaaatttcctgctgcatcatctgcatcctctttttattctgtggcattcaaggcaggattgaggaaagggtctcttctgctaagcgatggaaggtggagcagtcatggacctgtaatagagacgttattgaagaatctaactgtgcagttcagtcaaatgaaggataggacagaagtgtctgcttttgttgaccttttagtaaattacaataacattgataaggttatgtgggaaccttttgtagaaccctcaagatttcagttaaatatgctaagaaaatgtggtgattgtggattggatatatcacccagtactgatgtgtgtttaagttcaagcaagcagcttaatctgaatatatcagaacccttaattgaggctcttctcagacttaaccagatgattacagattctcttgatccgagtaatggtagtggtatttgggaagatcctggaatcttgagattaaaccatgatgatgttcgtaccagaagatacgcaccatactttctctcgaatgacacatcattgccctttaggttcaaggtgtaccgaggtgctgttaattcagatgatattggcagtttctctgtaatagatgaaaactctgtgccggcggggtatgctgtcccaatttacgtcgaagaaactcctgatgaatttttcttccaacacagagaagcacgatcatcagaccatctcatcgagaaacgaatgagtgctctatcacactacatgatctccattgagtttgatggaacatcaggcccttcaaaaccaatgtcaatggaccttgtgggcatttacttctttgaagtaaatttctcttcaagtaaaaagccaattctcggcgaagaaagtttaggagcattttcgtctaatgcaaaaggcaacgatgggttaattgtgcctgtggtgctcgatgtttccttacagaactacagcaagcgtatacgagtttattcgacggtaatactatacaatgcaacatcaatgcccctcgagttgaggtttgatataccatttggtcttgcatcaaaggtaattgggcccattcctccaaacaaagagattccactgccggttcatttgtctgaagctggccagattaggtggcaccctgtcggcagaacatacttgtggagtgaaacccgctccttgtcaagtttgctttcacgtgaaaacagggttgggttcatgaaatcatctgtttgttatccttctcaccctagtaatgacccatttcgttgttgtgtatctgttgaagaatacaatgtcccttcatctgttagtaccaagaaaaaacagttgtgcagtgaaagattgaacacacaagtttctggaagttctactccaaatacttttaagcaaaatttgacaaggacacattttatacggcatgtcaagcttaataccccgcttctcataaagaactatctgcctgtttacatttccttggcaatagataatggtgggtctgcgcgggtaatttcgctaaaggaggtagggtctgcctctattttgtttgttgatccctccaatgatcttggaattacaattgatattcaagattataggtccttgaacataaagtttccccgggctgaatcattctcaactacagccaagttaaatggcttcaaattctccataactgagtcaattactttctactcaaatttgtctaattttcctcttaatgttatgctggaaaaatcaatggatgctcgttctggcgcaagagagttgtatctttctgttccattcttgttgtacaattgcacagatctattgcttactgtcactgaaagcagctctgagaggagtgggcctactcttgtgattccccctagttttgaattggatggatatgcaagacatatgcttgaaaagggtggtctttctcttgtcaatccttctgtacaatgctttacaggcaaaatgccccagatatatttgatggatggacactgctcttcttcagatataagttgtacacgtaacagtgagtctgtaaagaaagatttggacaacagtgttaaagcttatatgtttgctcctgatgggcacactccagcaactgaactttcagttaagttgaatgcttctccgcctaataatggaactgaaacaactcggcgaaattggtcaaatcccttcctccttgtccctgccagtggttcaacaaatgttactattcctcagtcatctacttctggtgccttcttagttgcagtggcatctatacctgtttcaacagaactttttggcaggacaagggctattgctttcaggccaagatacgtcatatgtaatgcatgcagcaatgatttgttctttcgacaaaaaggaacacggttttctaagcacttaagttctgggcaacactcttttcttcactggtctgatacagccagagatctgctggtatccattcggattgatggcccaggatggcaatggtcaggaagttttttccctgatcacctgggagatgctcaattgaaaatgcggaatagtgcctcaggtttatcatatatggttcgagttgaagtgcaaaatgccgatctagacttaaacagcaatagattttctggaaaaaataatatcaatactggtacagtactgattctgctttctgatgataagactggttttgtaccttacaggatcgacaatttttcaatggagaaactgcggatatatcaacagagatgtgaatctattgaaacaattgtttatccctacacatcctgtcaatatgcttgggatgagccttgctatcctcatcgccttactgttgagattcctggagaacggagtttgggtacattcaatctggacattctcaatgatgatgttcatgtgtcactaccatccacatccgagaaagctgcaagacaattctgcatctcaatacatgcggaaggagcaattaaggtgctaagtgttcttgattcaaattgccacaataaggaaacaaatgaaaaggattttctgggatcaaaggaacctaaagttgttgatcacaaactggagcttgatatgaattttgctgaggttatcaaattacacttaccattcatcgggatatctttaataagttcttgtccacaggaattgttgtttgcttctgccaaggagatgactgttgttgccatgcagagtttagatcagcagagatttacggttcagatacaatctatgcaaatcgataatcagttccctgatagcccacacccggtcatgttgtcatttgagggcagtcataagggaaaatccatgaacttttttaagagtaaagatactaagctgaaatcagcaaatgacattctttccagtaccagtgaacctgtgctgcagtttgctgcagctaaatggagaaccaaagatgtatcatttgtttcctatcaatatataaacataagtctagcacctcttcgccttgaacttgaagaacgacttgtcttgagcatgattgaattttttagatctgtttcctctcgaataaatattggacacttggagaaaagtattgagctaagtataggtggtgctacggacatgttaagagaatatgaaaaaatctcaaagaatatatcagacaagctcctggtgcaagacagtgaattgttgccttctgttgtcccagttggggctccatggcaacagatacaccttttagccagaaaacagaaaaaggtgtacattgaattgtttcagttgactcctgtcaagttgactttcagttttacgagcacaccttggctcaataggaatgaaggtggttcagaccccagcgtaggtttcaacaacgctactgcaatccagagaggtcttatggccctcttggacgttgaaggagtaccagtttaccttggagaaattatagtggaaaatcttatggccagctggcaatctgttcaggacattcttatgaggcattatagtaggcaaatcctccacgaactttataaggttttgggttctgctggcgttataggaaatcctatgggttttgctaggaatgttgggtttggtttaaaggacttcatatctgcttcaagaaaagggaaattgcagagcccagttgaactattaaacggtatagcacaaggttcaaagactcttattggaagtacggtttatgcagtcagcagtgccacttctcacttcagtaaaactgcttataagggccttgttgcctttacatatgatgagcaagctgcttcgaagatggaagaacgggaaagacagctaggtttgcatggggaaggagtactgaatggttttctagagggtctgactgggctccttcaatcaccgattaggggagctgagaaacatggtcttcccggggtcatctcaggtttagcaatgggaacagctgggcttgtggcacggcctatggctagcattcttgaagccacaggcagaactgcccagagcattagaaaccgaagcaaccctcacgaatccaactacttgcgagtacgtttccccaggcctgttgccagagatcgccctttgtttccctactcctgggaagaagccatcggtgaatcgttgcttgcccaagctgacagtggcagactaaaggaggagacatttgtcatgtgcaagacactcaagggggctgggaagttccttgtgctaactgagaagctgcttctgctagtctcaagcccatacttggtggatctaggatcgcctcggttcatcggtgttcctcctgacccgcagtggtcgatcgacacggagatgcacctcaagagcgttgttcatctggacaggtctcaggaggtagtgaacattgttgggagcaacggacagacctcacctagggacaaaagaggtggcacgagaaacagggtcatgagctcggccttcgtccccctgtttcacctcagcatagagctgccaaatgaggaggatgcagaagggacggtgcaggtcctacaggcactcatcgagaagggcaaggcacggaggtgggacaagaacatcctacaccggagcaacatcagttgaggttttcacaacagtagtagaggttggtgttttgattgaagtggaagataaactaaattccaccccgtgactcaggtggattaaatatacaaacaaggcctcaaggcagagcagtcaccagcatacataagcttagtgtgaataagaaaacaaagtgttccataggtggtcaccgttggacacgtgcttcggttttgttttaagcttagtgtgaataagaaaacaaagtgttccataggtgatcaccgttggacacgtgcttcggttttttttttttttttgcggtctaggtgtagcttctagaagttttgtcgacggctcttgtaaatgaagtgtgagagggcttatgttatgtgtagcaacaccactgttttatgccacggctatgtttacaaacttcgccgttcatgggccatggatatttctgatt

SEQ ID NO: 60610 - DNA, 817 bp, Zea Mays
ggccgagcagcagaggcacacgaatcgccgttgcctccgccgtccgcctccttctccaagcaaacggaactgaaaagaaaaggtcccgccccggcggcggcacccgactctccatccaccgctcgcctccccttgcccctcctctcgtctactcgtcaccctacgctcggctccatcctccccgcctccccacgtgtcctcccgctacatgggagcgcgggctccctagggtgcctcgaccaccgccgccgccatgttcgagggggtggtaagccaggtgctctatggcctcctccgccgctacgtcaagggcatccagaaggagcagcttaagatcggcatctggaaggaagaaatactgcttgaaaatgtagagctgattctggaagcctttgactacctgcagctgccattcgcgctgaaaaatggacgaattgggaagctaagcatccggattccttggaaaaagctaggatgggaccctatcattattgtcatagaagatgtctatgtttgcgcatgcccaagggaggactctgagtggagctcagattctctggacaagagggaactagctggaaagttggctaaacttaatgccattgagcttgctaaattttctagaagagttacagataatcaaacgggacaatcatttttgtcctacatatcagcaaagatactggatagtatccaagtttctatgcgaaatgttcatattgtatacatggatacccacaacggtcaagttaccatgaaggtggtcaaaagtttttcaagctcatttttcattgatgtcacaatgactggaatttaa

SEQ ID NO: 60611 - DNA, 637 bp, Zea Mays
acctctctgctaacgccgctcgcgcatcctattgccctcgcgccaccgtcgccgccgctgcagcgagccaccgccctgccgtcgcctgaggtagacaccaagccaccgccatggggcgtatgcacagccgcgggaagggtatctcttcatcggcgctgccgtacaagaggactcctccgatctggctcaagacagctaccaccgaggtggaggagatgattaccaaggctgcgaagaagggccagatgccgtcgcagattggtgttctgctccgtgaccagcacggcatcccgcttgtcaagagcgtgactggtagcaagatcctccgcatcctcaaggcccatgggttggcgccggagatcccggaggatctctacttcctcattaagaaggccgtggcgattaggaagcatctggagaggaacaggaaggacaaggactccaaattcagactcattcttgttgagagcaggatccaccgccttgcccgctactacaagcgtaccaagaagctcccacccacctggaagtacgagtcaaccacggcgagcactctggtggcctaagtgaagattatctataagagaactttatgactgaagctagagtcgatttgcatgtctaaagatttgacaag

SEQ ID NO: 60612 - DNA, 935 bp, Zea Mays
ccatgtcttccccgcgtgatggtccaccttcgtggacggattgcaaactctgtgaatgaagggaggcttgtgccggaggacatcatatttgggttgctgacgaagcggcttgaggacggatacaacaagggtgaaaatgggttcattcttgatgggattccacgcacccgtatgcaagctgagattcttgacgagattgtggatgttgatttggttcttaatttcaagtgtgctgatggctgtttcatgaagaagcaatcgagaggcaacatctgcgcccactgtggacagctctttgacgtcagcaattcagcatctacgaactgtagccccagcctcgggagctatacatggcattctcaggcagaacctgctggtgttttaggcctcgaagcctcaaggatggagaggatgcgcacatatgctgagcagaccaagcagctggaagattactacaagaagcagaggaaaattgtggaactgaagacatctgctcgcccggtggagacatggcaggggctcgtagccgccctgcacctccagcatctggactcgcccccgacaccgcacaaactcaccgcgtaaatatcattattaattttgctacctccgagtagagagtctaaaggatcagaattccgatcctgcctgcagcatatctaatatccctatgtttgtgggttctggctcgagagagtcagtcggctgtcttttgttttgttttgttattgttatagataaaggtaagcgattttgcagacacgcttattgtatggttgtaaccgagagttgtggacttgccttggcttgcgagtgtactcgcttatatgctcctttgtgatgatgttttgcacctgtggtatcttcagttgctccattgtggtgttgtccaccatatgttttgttctgtgcatgatgttgatagtcatgccctt

SEQ ID NO: 60613 - DNA, 614 bp, Zea Mays
gtttcttggttttgggacttttctgatcctcaggatgatgcaaggctgctacactgtgatatggtgttgctcgacgaagagggaaataacatacatgctacgacatacccacccttcatagagaaattcaggccactcataaaagaaggcagcgtgtacaacatgacatactttcgagttcgagcatcgaacagcttgtacaagccagttctaaatgatatcatgattaccttcacgaattgggcaaagttagagcaggatattgagattcctcctgcatttcctacacttacctactccctcactcacatagagcagatccattcgcgcatcaaccataaagactactatacagttacttcagtctcgaatgtttcgccacatcgctccaaaggacaacaagcttccagcttgaagaggaacatttccatatgcagtgcaagaggtgcttcggtcaatgtcgtgttgtggggtgcccaagccaccctattcccaggagagcgcatatacgaagatgggcagaattccccacagattatgctatttgttggcacactcgtaaaaaaatatgcagatggcctttgtctgactggaagctcaccatgtaaagtggt

SEQ ID NO: 60614 - DNA, 1729 bp, Zea Mays
cctcgtccgggggcccggtacggtaggcaaggtcgcaacgaagaaggacacattttttttagaacgttagaattgtaattatggttttttttcagacggggagagagttagccacgtcgctgtttgcagcagcagaaataatgtacacacccagaagtcactgtagctaaaaaaaagagaggaagagagagaaaaaaaaagaaaagcccgtgattgcgagccttccctttctagcctactgcctacccctcgtgtacggcagaaagggaacagcgcaatccgtcccaccaatggcgtgcctccacctcggccagccgccgccacgtcagcgcgtgatcggggaaatgcgcctcgccaccctgctctttctcgcgggagatctctcgcttcccttccctccgaacagtcgctcggcttcagctcgcccacgacgagaacgagacaaccccccgcatttcaaagcgtccttgggccgtgagcgtgaggaggcgccatggccagcgccggcgggcggcggcggtccaaggcgaagccgcgggcgagggccgggggcaaggcgaagaagaggaccaagtaccttagcctcaccgagctgctggttaaggcgcacgcgcaggtgggagcgtcgccacggtccccgtgggaggacgaggaggcggtggcggcggaagtgaagccggaggacgacgcctgcggtgacgacgacgacgaccaccaccaccaccaccacgaggcgtccaccctgttcgaggccgtgccggcgccgtcgctctccgacatcctgggcccgtcgccgcccgagtcgccggccggctccggctccggggcgctgccgggcgccgaggaggaggacctcccgcgccgcgcgctgcggggcagggccagggagcgctgggtgtactgcaccggcgggccttcgccgccaccgccagcgacggcaaccggcaccgccaccgccaccgcgtcgccgtgctcgtccgccgcgagcacgggcgcgtcgccgcgctcgctgctgctcaagctggactacgacgagatcctcgcggcgtgggcgggctgcgggccgctctacatcggcgccgccgtcagcccgcgtccggtcctcgcggacgctgaggtggctgtaggaagggcggagagggtgaggcggtacagggagaagcggcggcggcggcggctcttcttcgcgaggcgggtccggtacgaggttcgccggctcaacgccgtcaagcggccgcggttcaagggccgtttcattaaggaagaggaaagggagctccggcctgcgcctgcatagcctcctgccctgccctccttctcctttgcttcttccacggctgaagcattcattgagctgtctgtctgtctgtctgtctgatggtgttggtattgctgcttcaaagccagatacggcgagttccaacagctccaaattgatactattcaaacaatagtttggaagaaaagatgaaagttcctgacgtgcgccgccgctgccctcccgcctccgctccgaacgcacgcatcacgcaggcaacagaaagggggaaaaaaatcaagctgtggtacctgacggccagcggctcaacagttaaagaaatggtcaaccatgctagaggagctgcattgatgtatttttaatgagctattggagttgggtatgttttttaaagctttcaaacttttgaaggagcctaacatagagatattggaaaaaaataaattttag

SEQ ID NO: 60615 - DNA, 2378 bp, Zea Mays
cgcatcgccgtccccttggcccttgcccctttctcgcgctctctctctctctacccggagaaaacaaaaccagaccatcagcaggagactggggtgtgagtgaccgtgcgagaagggggaaaaacaatccaaacactctcgccagcacacaaatctcgcgcacgggttcgggggcgccagctcgatccgcggccgaaaccctaggtggtgacgacggtggtgctccgtggtggtgctggaggacgaggaggagggctgggagcgatgacgtcgccgaggaaggacgcggggttcctgacgcaggaccagcgggagaagctgcggatcgcggtgcagaacgcggagacgcagtcgctcgcctccccgcgctcgcccacggggggcaccacctccgcgctgctgcagcagtacgagctgcagatgctggagcagaagcgcgccgccgcggccgccgccgccgcccggggcggcggcggcggcggaggtgggcccaggcacgtgcgccggtcgcattccgggaaggccatcaaggtgaagaaagggtatgcaggttgtacaaattgcagagaaaagctatctttcagcaccccaccatgcagagttaattgagcgacgatggggtggttcaacccacatcacagtagaagaggtgaagaggaggattgctgatcttctgaaggaatacatcagaaatggtgatacagctgaggcttgtaggtgcattagagaattggcagtgccgtttttccatcatgaggtggtgaagcgagctcttactcttggaatggagagtccagctgctgaagctcttattgtcaagcttctgaaggaagcatctgaagaatgtttagtaagctctagtcagatgatgaaaggattccaccgtgttgctgagagtcttgatgatctcattcttgacataccatctgcaaagtctgaatttcagttgttggtatcaaaagccatttctgagggatggttagattcttcctatgtgaactcaggtgtcaacggaagcgttgaagacgatgaacatgagaagctggctaggtacaagagggaggctgtatccataatacacgaatactttttctctgatgatacaacagaggtcatccgtagtgtcaaagagcttggttatccggaatacaatccgatcttcgtcaagaagctcataacaattgctatggaccgcaagaacagggagaaagaaatggcatcggttcttctcccttcattaagcatggagctgttctcgtctgaagacatcgccaagggatttgtaatgctccttgaatctgcagaagacaccgcgctggacatattggatgcctcagatgagctgggactgttcctagccagggctgtgattgatgacgttctcgcacctctaaacttggatgagattagcagcaagcttccaccaaactgcagtggggctgaaacattgaacatggcacgctcccttgcgtcggcccgtcatgccggtgagaggcttctgaggtgctggggcggtggaaccggatgggctgtggaggatgccaaggacaagataacaaagctcctggaggagtatgagagtggaggcgatgtaggggaggcatgcaactgcatccgtgagctgggtatgtctttcttcaaccatgaagttgtcaagaaggcgctcgtgatggcaatggagaagaagaacgagaggaccctgaacctgctgcaggagtgctttggtgaagggatcataaccatcaaccagatgaccaaggggttctcaagggtcagggatgggctcgacgatctggctctcgacattcctgatgccagggagaagttcctttcctatgtgcagcgcgcgaagaagagtggatggctcctgcctgggttcggtgtggcatcttcggcttgaacagctgggcagaagagaagtacgaagctgaagcggctcagcaaacccagtttggatgtgtgttttcgtcgttcgtggttgcccttgcgcctaggttagcggagcgagcccttcctggttgcggtggtggtggcttgtgtaggtctcgcatctgacatgttcatgctgttcttgtttcatttcatttaactctccatagaccctttttttttacatcaagctaaaacagagaagagaaaaaaaagaccatgttgtaaaagttctcccatgctccgcctgcattgcggccggttttttcatcctcatttagctgcaatcgtgcgttcctgccctctcatggccgccgtagctgtttttctatgccattggatgcttggattgtgattgctagtttgttactcttttattctttgtggaaatggtgtggcctggtgaatgcctggattgctagcatgcaccgccggccgcccggcactgt

SEQ ID NO: 60616 - DNA, 2290 bp, Zea Mays
gcggtgcggcgttcgatttgttcagtccgccatgattaagcaaatcctcggccggcttcccaagaagccgaccaaggccggcgagaaggagctggccggcgcgggcccgtcgctgcccagcccgacgtccgacgcgagaaccaccaccgatctgaccgcgtctagcaggcttgtcagccccagcaactacgcctccgcggcaacaaatccaggccagagctacgcgcccagggccgccgggctcggcgccggcgccagcaacgggttcgcgggctcggcggccgggtacgaggcgctgccgagcttcagggacgtgccggcgtccgagaagccgggcctgctcctcgggaagctggccatgtgctgcgtggtgttcgacttcgcggacccgaccaaggacgtgcgggagaaggaggtcaagaggcagacgctgctcgagctggtggactacatcacctccgccaccagcaagttcccggagcccgtcgtgcaggaggtcgtcaggatggtgtctgtgaatctgttcagggtgcccacccctgccccgagagagaacaaggcgctcgagtcgttcgacatggaggaggaggagcccgtcatggaccccgcgtggtcgcacttgcagatcgtgtatgagctgttcttgaggtttattcagtctccggagacggacgcgaagctggccaagagatacattgaccacggcttcattatcaggcttctcgacctcttcgactcagaggatcctagggagagagagtacctgaagacgatccttcacaggatatacggcaagttcatggtgcatcgccccttcatcaggaaggcaatcaacaatatcttctaccggtttatattcgagacggagaagcataatggtatcgcagagctgttagagattctggggagtataattaatggctttgctttgccgctcaaggaagagcacaaattgtttctagtccgagcgctgattccactccacaaaccaaaatgtgttgccatgtaccatcagcaactgtcgtactgcgtcactcagtttgttgagaaagattgcaagcttgctgatactgtcataagggggttactcaagtattggcccatcacaaatagctcaaaggaggtgatgtttttgggtgagttagaggaggtgctggaagctacacagccagcagagtttcagaggtgtatggtgccacttttccgtcagattgcccgctgtttaagcagttctcactttcaggtggcagagagggctctctttctatggaacaacgaccatatcgagggtttgatcaaacagaacaacaaggttatactgcccataatcttcccagcgttagaacgaaacacgaaaggccactggaaccaggcggttcaaagcttgagtctaaatgtccggaaaatattcatggaccatgatcccgcgctgtttgaggagtgtcacaagaagtttgaggaagaggaagcccaagaagctggcgtaaggtcaagacgggaggctagatggaggcgcctagaagaaatcgcctcgtcaaagtctcctcagtgaagtagcgcgtcctcctgaggctgtagttcttcatcagtagagttcttctagctatcttgtcttggggacttgcatattagcagctcttttggacaggatcaagtaaatgctgatgatgtagttgctggatgtcttcttgccgcctgttacttgtgaccgaacgttctacaggccgacatgtaaatacgaggcacatgatgggctgtgaagcttcaacagagcctcggcgggttctctttgccgtgtgatccactgatgacagtgtcggtttcatcatcataggacaaaggaaaggaggtaaaatggtctttttccgggtcaatgtcttgatccaaggactgttaggagcacttgaaagacgaggaaggaggcaggtagcacttgctcttgctgatggtgattttgctgaaatgtaatactatgctttatgtatgatgcatggtaacttgaagccatgtctggtgataatatgtaatcctggtgtacatgtcttttccttcctttgatgtatacagaaatttggaatgaagccctgattgaaggctgttttctacaagtttgaccccactcatgtgggctgtctttttttaaaatcaggtgtttagggtcaccggagggaggggctcctgaataggtgcaagatcagggatgcgtacgccaagtttggtgtcatgaaccgaatgtaatgttgagcttgcatcatggtggggggtttcgtttgggataactgtaatgctg

SEQ ID NO: 60617 - DNA, 549 bp, Zea Mays
catgcatgcacccggccacacgccttcttgtgcacggagcgtctggcccgggggaaacggatcttgatttggtttctcgctgatgaagaggaggaggcggcggcgggccgacgcgatggcggcgatcaaggcgcggatcctgcggtgcagcgaggccaaggccgaccaccacaaccagggccgccggttcaagcgcggctacctcgcccccggctgcggcgctgtcgactccgccgtcttctacctcgcctgcctcgtctgcaccccgccgcggccgtcgtcgtcggcggtctcgattatattggcgtccaggaactagctaggatgatatattaacaaccagttggcaaggcgcagcaggtagatactacgacgatcgactagtgttcagtgttcttgtgcgtgctgtggtacgtggactgtaattataataattaaggtggtgatgtggtcaaatgtaatgtaattaaccgtttgtttctcatcagtaatgcatgaatgagaccattaaaacatggcagcatgcgaccatatatatacaaatctgat

SEQ ID NO: 60618 - DNA, 802 bp, Zea Mays
atgtcggaatcatgtgatcaagtgaaggccatcatcaactgtttcttcctctatctattcatcatcaataattttgttgagtggtgggttttggcaggctgttttcttggagctatgtatgagcagagttgcaattttgacaccactaaaccttcaggtataagagagggggaacctgtgcttcatgctcgtggagatggcacatgctcctattgtgacattgcaaaccataagtattcaccggctatcgatatgtggagcatcggttgcatttttgcggagattttgactgggaagcctttattccctggtaaaaatgtggttcaccagttggatttgatgactgatctcctgggtacaccatcaacagatactatttcacagattcggaatgagaaggcaaggaggtatctaagcagcatgaggaggaaacagccaatacccgtttctgacagatgtggttgtaactgttgcaatgttcatattaattggcttattctagatgcaacactacaggacaaaattggatggctctttgcacctttggtgctacttcagtttattctaacggggagcgttgagttagtgaacatgcacaaatacaatagttatgttctaaaaggctataatccagtctacaccttccggtatttgagacgaggtaattctgagatttggacatctcctagagtggtctcctagagtggtgatgcttagcatcacatgtcattggcaatttaactgctacttttgtatcaattgtatgatgaaatagagttatctatatgccttttctatcaac

SEQ ID NO: 60619 - DNA, 598 bp, Zea Mays
atgtcggaatcatgtgatcaagtgaaggccatcatcaactgtttcttcctctatctattcatcatcaataattttgttgagtggtgggttttggcaggctgttttcttggagctatgtatgagcagagttgcaattttgacaccactaaaccttcaggtataagagagggggaacctgtgcttcatgctcgtggagatggcacatgctcctattgtgacattgcaaaccataagtattcaccggctatcgatatgtggagcatcggttgcatttttgcggagattttgactgggaagcctttattccctggtaaaaatgtggttcaccagttggatttgatgactgatctcctgggtacaccatcaacagatactatttcacagattcggaatgagaagacaaggaggtatctaagcagcatgaggaggaaacaaccaatacccttctcagagaagttccccaatgcagatcattcggcgctcaagctcttacaaaggcttcttgcatttgatcctaaggatcgaccaacagcagaagaggcattggttgatccctacaattcaaaggcattgcaaaagtagagagggaaccatcctg

SEQ ID NO: 60620 - DNA, 1957 bp, Zea Mays
cgaacttcgtcgagctgcaagaaggaaaaggaggtagtcgccggggtcggctgtgtgcgagtcgacgctcgggtctgggtggttgaaggctcgtctgtgcgtggaggctctggcaagctacaggcgatgcgacggcgcgcctctaaccagcctcgaagttcactcgagggggtgctacaggacgccggagcgaacagtcggccggccagccaagtcgtcgtcgctcaaaccaggcaaatcgtctcacccgcgtgcaaccggggcgcgacgtggaggtcaagctcaagccccgcctcttcccctgtgacggctccgcctgctcctaccgtatcctttttccgggctacccgcggcgtcggcgtctacgtccacgcttatctcctcggcgacgttcacgcagcaccgccgccctgggtcaatcactcaatcggatgggggacgatgaagatgactcatacaccgttgattaggaaatgcgtggctccgatcatatggccaaggtaacgtttcgctcggatttatccaatgccgtagatctaggatcgtatggtcgcgggcgcacgtaatatatttaccatagatctcggatccgacgaccgtaatcgcataccagttcattaagcgccagatctaatcttagccacagaactctgatcctacggcctgtgtcgccccataccctttcgctcagacctctttgcatagaagccccagtttttagttaaattagagcctgcagtcctgcattggatgatgctaagtcttaggaatctttgcgggttagtccctgtgctttccaatattttgcgcgcagttcagacaataaataaaatcagagaaattcattttaatacaaaaataatggtagaagcttgtataaatcatagaaaatgcatattaaatcctttttagtccattccaatttctataattttgtaatattatggtttatcatctagtaccattgttttcacatgaaagtcatattaaaatttatatcctatttaatcttgtgtaaaacacataaaatcattagaaattcataacttaaatctatgatcccgatttgatccattcaaattgcgttagtctcgtataaatatttaatatgcaatagcaacacttattgtaccatgtctcattattttataattagatctatatttaacttatgttggttagtcttgttaaactgctcatctactaaaatatgatctatggtcaatttataatttagattaagttgaattaattactactataggttaccttttctctgggattataaaataaacacagaacctggtgttaatcatgtaatcacatcataacttgatgaccacgactccgatcttagtagttctcgaacccacgatctcgtagcaacgtgtagattactattattcagtttgtacttatgtttggtgtaatgttaattttgtctatacactgtttgtttgtattgctacgactagcggtgaggtcacgaggatctgaagaatcaccctggtaactggaatctcaagtgccaggtcaagaacaggtaccgcaggatgaggcgcatggaggatgctgcgatgagttcgtgagagatctaggtcgtcgtctcccagtcaactttgggttgctggaccgttgtctccttgtaatgtaattatttatttattttgtatagaactcctattatatagtaaagatgtgacattcgatccagtgccatgatttatcatatgtgtgagacttggtcccagcacacctggtgattatgttcgcgcccgggtcttggtgccccgaaacccgggtgtgacagaagtggtatcagagcaatgttgactgtaggacgaaacctagatagaactggacaaccattctctacttacctttgctactctgattcttttctaaacgtatcttaatcttttctcatctattttcgcttactctgattactcataac

SEQ ID NO: 60621 - DNA, 2938 bp, Zea Mays
gttaaaaatatatctatcctcatagatccatcttatcttaaaagatactctattatcttagtagattcatcttatcttgaaaagattttatctcatcctaattgatctaactgacctcaaaagattctaccttatctttatggattcatcttgccctaataagcctatttattccacattattgtaacaaccatgatctaaataacaagatcttatctagtctattctagtcataaccaatcctatctaatttattatgaccaagcctattggaagtcactcaaacaggattggctaatgctgaggaaatacaatagaccctactcctataaacccgtttgagatcttagatcaactcgaccatactcctaattcacttaagcctaaattggtgacttagatcgacttagccatacataaacaacttgacctacataattggttacataactaatcccaactatcatatagccacctactaaaccctctacctgactattacctaccgatctatcttaacctcttggagacaccaaagctcatgagggaaaggatcaaccccgtcaaggaaggagagaagtcaaactcgatcttcagatgcattaccacccaacacggagttctttctcaccggaaactttcttacccaggctattattttcctaacctatccaactcttatatcctacataataagtagctggatacctatactctcctaattacacattatggactaaaaaatgtgagactctgaatttttttaaccaattagaaaattaaaggctaaaagcataaaccaattcttctgtgtccctttttcttacaaatctcgaggacgagatttctgttaagggggtaggaattgtaaaccctaaaatatacctttaatggtgttaggaagttccttcggcaattgagaataaaagtcaacatttattctagtatgtgaattatgattagagcatatccatctaaataaattggattttgatgactcaaaatttaaatttgacttttaaaattttaaagtataattctgaaactcggaataaaaaaataataggagggtttcctatttaattaagtgaatgctccttccattaatattacatctagaagcatttacataaacaaataagtaaaagatatctacatctcatgtgggactttgtttgtgcatctaaaattgaactaaacttaagattgaaattagatttaaaactagaaaattagtagaaatgaaaatagagaatgaaaatgaaatagaaaaaaaacgaggaagaggatgcgtatttttccttcatgcagccccacaccacactccaccgatgccacccctttgatttttttgttttattatttccatcagcctggagtcactcgtatttccctgccattttctacgtactcggctcacttgctggcgggacccagtggtcatcccctcacccatcttgcatccacttccgatttagaacagctggtgcgtggggccaggatgtggaagtcatctccttccctccgtcctacggaccacaacagatcgcaacaaacgctctccggtattctctcaacaactagcgtcgttcctgggcatgccgcatggatgcttcactttgacgtcatctcttgcatgtgggtcctggtgatcctccgtggctgcgggtggggacgcggcaccagtgcgttcctctctgttgtacccgataaagcgtaacaggagccggattgttaggatgcggagaaatccggcagcctgggatccttatcatctgggctccgggtatatatcacgtgagcctctcgccctcatccacaccagaaagccaatccaaaatcaaaagaccccatacgaacttcgtcgagctgcaagaaggaaaaggaggtagtcgccggggtcggctgtgtgcgagtcgacgctcgggtctgggtggttgaaggctcgtctgtgcgtggaggctctggcaagctacaggcgatgcgacggcgcgcctctaaccagcctcgaagttcactcgagggggtgctacaggacgccggagcgaacagtcggccggccagccaagtcgtcgtcgctcaaaccaggcaaatcgtctcacccgcgtgcaaccggggcgcgacgtggaggtcaagctcaagccccgcctgtgggtggcactctccttcatcccgtcgccctcaacgccacagtcgggaggcctcgatgctcgcgcccggcgtctctgacctccttatccacgtcatccagcttcccctgtgacggctccgcctgctcctaccgtatcctttttccgggctacccgcggcgtcggcgtctacgtccacgcttatctcctcggcgacgttcacgcagcaccgccgccctgggtcaatcactcaatcggatgggggacgatgaagatgactcatacaccgttgattaggaaatgcgtggctccgatcatatggccaagcggtgaggtcacgaggatctgaagaatcaccctggtaactggaatctcaagtgccaggtcaagaacaggtaccgcaggatgaggcgcatggaggatgctgcgatgagttcgtgagagatctaggtcgtcgtctcccagtcaactttgggttgctggaccgttgtctccttgtaatgtaattatttatttattttgtatagaactcctattatatagtaaagatgtgacattcgatccagtgccatgatttatcatatgtgtgagacttggtcccagcacacctggtgattatgttcgcgcccgggtcttggtgccccgaaacccgggtgtgacagaagtggtatcagagcaatgttgactgtaggacgaaacctagatagaactggacaaccattctctacttacctttgctactctgattcttttctaaacgtatcttaatcttttctcatctattttcgcttactctgattactcataac

SEQ ID NO: 60622 - DNA, 2911 bp, Zea Mays
aaactagtgcgctcgctctccggcctctctcgcacccccctctctcccctacctctctccggctctcttcttccaaggcagacagcatcagaattttccgacagagaagaagggagtacccatggaaacatcgctgatggggatgcaccaaggagacgtcaacgtcgccgccgcatattcaggcgttccacggagaggaagaacccagagaatttagagtttgaacgtcaagtagctgcattcgaggctaggcaggaacaacaacggcaggaccagatgactgatgcttttattggatcattgagtttcaaagtatattttcctcatctgaaaatattgtcagacgatgtgcaagatggagacagcactcagccggctggtaaaggacggcttctaaaagattcagctaagccacctgatgatacagatttcctggaaggtacttttatcaagataaattcagacaaacagaaagctacaagaaataagaagagcggcaagaacaacaaaaagaagaaaaagggcaagagcaagggcaaaggcaagggtagaaaacagtcacatgcttcagaaatgcagactgggtcacccacccaacaaccttcttccacatgcgctaacgcgaccggtggcgaaacctcggcgtcctcgtccagccgtgttgccgttcgggtgccactactggaatacagttcttcctcctccagctgtcgggtgacagcaaaacttgtcatcacttctgctgtaaacagtgcatcttctggtaacgagaaggaactatctgcttctagcagcagtgatgacttcaaaagctttgagagcactacttcatacaccactgctgctagtcgttcatctgctaatgactattatactggtggcaatgcatggaactgcaccatgggtgattatgctggcagcttgtcagatgcgagaagtgagccgtcattgtctgcatcagattattctacagattcacgaggttttaggcgcaagacgacgagtggtgaaggaaacagaccaaatgttcaccatcaaagcttcagtttattagcagtcggtcctggctgtagccaagaagccttgctctgcagcggttattctagcaatggtggtgatttccaggaagttgtctccaggaaagcagcacagaagatgaaaaggatgcaacgatcaactcctgctacgactagttcatctaccatggctgcttcaggacctattgtagcacgtgcacacttcccaagagctccattccgtgaggtcattacaataggacattacataaatgatgatacattttatgctagaaaaccaaaccagaaaaagggtaaataccagaaggcccgcagtttcagtaacatgtcgtcaaagaccggttatactactgatcatggagataatgtttcagctggtagcaacagaatgcttcttataacgacagtgcaccaagcaaaacccaggagtggtcatcatgttaccctagaggctatcgaggaaactagttctccaagctgtcttcccaatcccaaggcaggagagctgaaagccatggctccagttggtgatggcatcatcaaggacacagattcaaaaacaccatcttcttctgataaactttcatcactactaggtcatctggataactcttcatgtgttgatagtagggaaggacagaaaaaagctatggcggccccagtcgatggtgacaccgaagacgcaagagcaccaccatcttctgataaaacttcatcactagataatctggataatccttcatacgttggcaaggaagaacaggaagaagttgtggctccagttggtgttggcactgaagcagacagagattctacagcaccaacttctgataaaacttcgttactaggttacatggttaattcttcatgtgtggatagggacgaagaacagcagaacaaagcaaaattcagtactgatgcatcatcgtctgagttggataagattattgaagccgttaataatgcatatggagttcagcaagcagcatctgatgtgtacatgatcagtgccggtatccatgccgatattgaaaacttcttacatgcggccaccccagtgattggacagacatcttgcacaaaaggtaacatgagcttgcaagatctgcgtctgtggaacgtgtggagctggtatgaagaacctgagtgctgtgggattgaagttcagatgcagggaaagaccaattctagctggccagaactttctacatattttgtacctcttctatctgcggttcagttgtttggacagccagctgggaagtcacaaagtcacggcagcggactcgtctttgagtacttcgaatcggagaatcccttttcacggcctccaatcttcaccaagatcaaacagcttcggcacggcgtaaacctctctgctggtaatccaatatttggggatcctaagcaacttgaaagtgtcaagctatctgatcttcatcctgcttcctggttctgtgttgcctggtaccctatttgtcagatacctgcagctgcagggagctgccaagcttcattcctgacataccactccctaggaaaattggttccacaaatttgctctacggataataaggctgatgcgtatgatcgtatgatctgtccgattgtgggtctgcttgcctacaaagaccagggagagaagtggtttcaactgagagaacaacaactcaggatcaaaccaaggccaccctcgggaaccgaccatgctgaactcctgaacaagaggctgagggcactgaggcaatgtgcatcaatcatgtcgaaggcagtggtgccaagggcgccatctggagaagccatgaactatcattcagattacgagttctttttgtcaaggtcgtctctgcagtaagcatgcgcgttatgtattg

SEQ ID NO: 60623 - DNA, 2931 bp, Zea Mays
ctccttgccaaactagtgcgctcgctctccggcctctctcgcacccccctctctcccctacctctctccggctctcttcttccaaggcagacagcatcagaattttccgacatatgccaccaggagaagaagggagtacccatggaaacatcgctgatggggatgcaccaaggagacgtcaacgtcgccgccgcatattcaggcgttccacggagaggaagaacccagagaatttagagtttgaacgtcaagtagctgcattcgaggctaggcaggaacaacaacggcaggaccagatgactgatgcttttattggatcattgagtttcaaagtatattttcctcatctgaaaatattgtcagacgatgtgcaagatggagacagcactcagccggctggtaaaggacggcttctaaaagattcagctaagccacctgatgatacagatttcctggaaggtacttttatcaagataaattcagacaaacagaaagctacaagaaataagaagagcggcaagaacaacaaaaagaagaaaaagggcaagagcaagggcaaaggcaagggtagaaaacagtcacatgcttcagaaatgcagactgggtcacccacccaacaaccttcttccacatgcgctaacgcgaccggtggcgaaacctcggcgtcctcgtccagccgtgttgccgttcgggtgccactactggaatacagttcttcctcctccagctgtcgggtgacagcaaaacttgtcatcacttctgctgtaaacagtgcatcttctggtaacgagaaggaactatctgcttctagcagcagtgatgacttcaaaagctttgagagcactacttcatacaccactgctgctagtcgttcatctgctaatgactattatactggtggcaatgcatggaactgcaccatgggtgattatgctggcagcttgtcagatgcgagaagtgagccgtcattgtctgcatcagattattctacagattcacgaggttttaggcgcaagacgacgagtggtgaaggaaacagaccaaatgttcaccatcaaagcttcagtttattagcagtcggtcctggctgtagccaagaagccttgctctgcagcggttattctagcaatggtggtgatttccaggaagttgtctccaggaaagcagcacagaagatgaaaaggatgcaacgatcaactcctgctacgactagttcatctaccatggctgcttcaggacctattgtagcacgtgcacacttcccaagagctccattccgtgaggtcattacaataggacattacataaatgatgatacattttatgctagaaaaccaaaccagaaaaagggtaaataccagaaggcccgcagtttcagtaacatgtcgtcaaagaccggttatactactgatcatggagataatgtttcagctggtagcaacagaatgcttcttataacgacagtgcaccaagcaaaacccaggagtggtcatcatgttaccctagaggctatcgaggaaactagttctccaagctgtcttcccaatcccaaggcaggagagctgaaagccatggctccagttggtgatggcatcatcaaggacacagattcaaaaacaccatcttcttctgataaactttcatcactactaggtcatctggataactcttcatgtgttgatagtagggaaggacagaaaaaagctatggcggccccagtcgatggtgacaccgaagacgcaagagcaccaccatcttctgataaaacttcatcactagataatctggataatccttcatacgttggcaaggaagaacaggaagaagttgtggctccagttggtgttggcactgaagcagacagagattctacagcaccaacttctgataaaacttcgttactaggttacatggttaattcttcatgtgtggatagggacgaagaacagcagaacaaagcaaaattcagtactgatgcatcatcgtctgagttggataagattattgaagccgttaataatgcatatggagttcagcaagcagcatctgatgtgtacatgatcagtgccggtatccatgccgatattgaaaacttcttacatgcggccaccccagtgattggacagacatcttgcacaaaaggtaacatgagcttgcaagatctgcgtctgtggaacgtgtggagctggtatgaagaacctgagtgctgtgggattgaagttcagatgcagggaaagaccaattctagctggccagaactttctacatattttgtacctcttctatctgcggttcagttgtttggacagccagctgggaagtcacaaagtcacggcagcggactcgtctttgagtacttcgaatcggagaatcccttttcacggcctccaatcttcaccaagatcaaacagcttcggcacggcgtaaacctctctgctggtaatccaatatttggggatcctaagcaacttgaaagtgtcaagctatctgatcttcatcctgcttcctggttctgtgttgcctggtaccctatttgtcagatacctgcagctgcagggagctgccaagcttcattcctgacataccactccctaggaaaattggttccacaaatttgctctacggataataaggctgatgcgtatgatcgtatgatctgtccgattgtgggtctgcttgcctacaaagaccagggagagaagtggtttcaactgagagaacaacaactcaggatcaaaccaaggccaccctcgggaaccgaccatgctgaactcctgaacaagaggctgagggcactgaggcaatgtgcatcaatcatgtcgaaggcagtggtgccaagggcgccatctggagaagccatgaactatcattcagattacgagttctttttgtcaaggtcgtctctgcagtaagcatgcgcgttatgtattg

SEQ ID NO: 60624 - DNA, 2953 bp, Zea Mays
ctttctccttgccaaactagtgcgctcgctctccggcctctctcgcacccccctctctcccctacctctctccggctctcttcttccaaggcagacagcatcagaattttccgacaaaacgggggtgtatgcagtatgccaccaggagaagaagggagtacccatggaaacatcgctgatggggatgcaccaaggagacgtcaacgtcgccgccgcatattcaggcgttccacggagaggaagaacccagagaatttagagtttgaacgtcaagtagctgcattcgaggctaggcaggaacaacaacggcaggaccagatgactgatgcttttattggatcattgagtttcaaagtatattttcctcatctgaaaatattgtcagacgatgtgcaagatggagacagcactcagccggctggtaaaggacggcttctaaaagattcagctaagccacctgatgatacagatttcctggaaggtacttttatcaagataaattcagacaaacagaaagctacaagaaataagaagagcggcaagaacaacaaaaagaagaaaaagggcaagagcaagggcaaaggcaagggtagaaaacagtcacatgcttcagaaatgcagactgggtcacccacccaacaaccttcttccacatgcgctaacgcgaccggtggcgaaacctcggcgtcctcgtccagccgtgttgccgttcgggtgccactactggaatacagttcttcctcctccagctgtcgggtgacagcaaaacttgtcatcacttctgctgtaaacagtgcatcttctggtaacgagaaggaactatctgcttctagcagcagtgatgacttcaaaagctttgagagcactacttcatacaccactgctgctagtcgttcatctgctaatgactattatactggtggcaatgcatggaactgcaccatgggtgattatgctggcagcttgtcagatgcgagaagtgagccgtcattgtctgcatcagattattctacagattcacgaggttttaggcgcaagacgacgagtggtgaaggaaacagaccaaatgttcaccatcaaagcttcagtttattagcagtcggtcctggctgtagccaagaagccttgctctgcagcggttattctagcaatggtggtgatttccaggaagttgtctccaggaaagcagcacagaagatgaaaaggatgcaacgatcaactcctgctacgactagttcatctaccatggctgcttcaggacctattgtagcacgtgcacacttcccaagagctccattccgtgaggtcattacaataggacattacataaatgatgatacattttatgctagaaaaccaaaccagaaaaagggtaaataccagaaggcccgcagtttcagtaacatgtcgtcaaagaccggttatactactgatcatggagataatgtttcagctggtagcaacagaatgcttcttataacgacagtgcaccaagcaaaacccaggagtggtcatcatgttaccctagaggctatcgaggaaactagttctccaagctgtcttcccaatcccaaggcaggagagctgaaagccatggctccagttggtgatggcatcatcaaggacacagattcaaaaacaccatcttcttctgataaactttcatcactactaggtcatctggataactcttcatgtgttgatagtagggaaggacagaaaaaagctatggcggccccagtcgatggtgacaccgaagacgcaagagcaccaccatcttctgataaaacttcatcactagataatctggataatccttcatacgttggcaaggaagaacaggaagaagttgtggctccagttggtgttggcactgaagcagacagagattctacagcaccaacttctgataaaacttcgttactaggttacatggttaattcttcatgtgtggatagggacgaagaacagcagaacaaagcaaaattcagtactgatgcatcatcgtctgagttggataagattattgaagccgttaataatgcatatggagttcagcaagcagcatctgatgtgtacatgatcagtgccggtatccatgccgatattgaaaacttcttacatgcggccaccccagtgattggacagacatcttgcacaaaaggtaacatgagcttgcaagatctgcgtctgtggaacgtgtggagctggtatgaagaacctgagtgctgtgggattgaagttcagatgcagggaaagaccaattctagctggccagaactttctacatattttgtacctcttctatctgcggttcagttgtttggacagccagctgggaagtcacaaagtcacggcagcggactcgtctttgagtacttcgaatcggagaatcccttttcacggcctccaatcttcaccaagatcaaacagcttcggcacggcgtaaacctctctgctggtaatccaatatttggggatcctaagcaacttgaaagtgtcaagctatctgatcttcatcctgcttcctggttctgtgttgcctggtaccctatttgtcagatacctgcagctgcagggagctgccaagcttcattcctgacataccactccctaggaaaattggttccacaaatttgctctacggataataaggctgatgcgtatgatcgtatgatctgtccgattgtgggtctgcttgcctacaaagaccagggagagaagtggtttcaactgagagaacaacaactcaggatcaaaccaaggccaccctcgggaaccgaccatgctgaactcctgaacaagaggctgagggcactgaggcaatgtgcatcaatcatgtcgaaggcagtggtgccaagggcgccatctggagaagccatgaactatcattcagattacgagttctttttgtcaaggtcgtctctgcagtaagcatgcgcgttatgtattg

SEQ ID NO: 60625 - DNA, 1403 bp, Zea Mays
ggttctgctgctctatcacaatatctgtactgccagtacgtacatgttcaagtacgacaccgtgcacggccaatggaagcacagcgacatcgccctcaaggactccaagacgcttctcttcggcgagaagccggtcaccgtctttggcatcaggaaccccgaggagatcccgtggggtgaggctggtgctgagtatgtcgtggagtccaccggtgtcttcactgacaaggacaaggctgctgcacatctgaagggtggtgccaagaaggttgttatctctgccccaagcaaagatgcgcccatgtttgttgttggtgtcaatgaggacaagtacacctccgatgttaacattgtttccaatgctagctgcaccacaaactgccttgctccccttgctaaggtcattcatgacaactttggcattattgagggcttgatgacaactgttcatgccatcactgccacccagaagactgttgatggaccctcagccaaggactggagaggtggcagggctgccagctttaacatcattcccagcagcaccggtgctgccaaggctgtcggtaaggttcttcctgaattgaatggcaagctcactggcatgtccttccgggttcccaccgtggatgtgtcagttgttgacctcactgtcagaatcgagaagggggcctcttacgaggaaatcaagaaagctattaaggctgcttctgagggcccactcaagggtattatgggctacgtggaggaggatctggtttccaccgacttcaccggtgacagcaggtcgagcatcttcgacgccaaggccgggattgccctgaacgaccacttcatcaagctcgtctcttggtacgacaacgagtggggctacagcaaccgcgtcgtcgacctgatccgccacatgttcaagacccagtagagagagatatttctgcctccctatcgtgggtcgtccccaatggcctttggtcgcagaccatctttgctgcttgtctatgctgagaataaatgtgaacggtgcccctggacgctggatccatgctggttttggacacgttgtctttttgtgtttaacttatctgctaccgtcctgtaacgaattcactaagttctagttcttttgtgctttgttaagaatataaacaatgaggtttcaattttggtggcgccatccggtctgattgcgtactagtatcatgcatatctgagctggtctttccggagtaacagtttttttttgtttcgtgtcaatgattctcagcctgttcatttggtcttaatccatatcggttactactataatgttgtcttgtctctatagattgcagcagtctaacacatgttcttggtatccttttgggtgtgtttaatgctatttgctctgtgttgtctttttcgtt

SEQ ID NO: 60626 - DNA, 1742 bp, Zea Mays
aaagaaagaaaagaaaagcggggggaaatatgccttccttccttcttgcgtcacagaccacgcgcggatacaccgcacaacagccaggcagcaagcagagcacccaccgccggaagcggccgtcggacagaacgacacgtggggcacggcacagtccgggcccgcacgtcatcgaagacacctgacctgcccatgcgtcttctagagaaaggcggacggacaggtcacccccgcacctcattccaggagttgcatttcgctttctcctttatttatttataccaataaaaaataaatccgccttttctcctccctatcgtgtgtctcctctcgccggctttaaaaacgcacacaagcgctaaaaccctctccaccgtccacctcagctcccatatccgctcccctacctctccagcatcctcccgtctccgtcgtctcgtctccgctcctcacctcgccagccatgggcaagatcaagatcggaatcaacggtttcggaaggatcggcaggctcgtggccagggtcgccctgcagagcgaggatgtcgagctcgtcgccgtcaacgaccccttcatcaccacggattacatgggtggtgccaagaaggttgttatctctgccccaagcaaagatgcgcccatgtttgttgttggtgtcaatgaggacaagtacacctccgatgttaacattgtttccaatgctagctgcaccacaaactgccttgctccccttgctaaggtcattcatgacaactttggcattattgagggcttgatgacaactgttcatgccatcactgccacccagaagactgttgatggaccctcagccaaggactggagaggtggcagggctgccagctttaacatcattcccagcagcaccggtgctgccaaggctgtcggtaaggttcttcctgaattgaatggcaagctcactggcatgtccttccgggttcccaccgtggatgtgtcagttgttgacctcactgtcagaatcgagaagggggcctcttacgaggaaatcaagaaagctattaaggctgcttctgagggcccactcaagggtattatgggctacgtggaggaggatctggtttccaccgacttcaccggtgacagcaggtcgagcatcttcgacgccaaggccgggattgccctgaacgaccacttcatcaagctcgtctcttggtacgacaacgagtggggctacagcaaccgcgtcgtcgacctgatccgccacatgttcaagacccagtagagagagatatttctgcctccctatcgtgggtcgtccccaatggcctttggtcgcagaccatctttgctgcttgtctatgctgagaataaatgtgaacggtgcccctggacgctggatccatgctggttttggacacgttgtctttttgtgtttaacttatctgctaccgtcctgtaacgaattcactaagttctagttcttttgtgctttgttaagaatataaacaatgaggtttcaattttggtggcgccatccggtctgattgcgtactagtatcatgcatatctgagctggtctttccggagtaacagtttttttttgtttcgtgtcaatgattctcagcctgttcatttggtcttaatccatatcggttactactataatgttgtcttgtctctatagattgcagcagtctaacacatgttcttggtatccttttgggtgtgtttaatgctatttgctctgtgttgtctttttcgtt

SEQ ID NO: 60627 - DNA, 1718 bp, Zea Mays
aaagaaagaaaagaaaagcggggggaaatatgccttccttccttcttgcgtcacagaccacgcgcggatacaccgcacaacagccaggcagcaagcagagcacccaccgccggaagcggccgtcggacagaacgacacgtggggcacggcacagtccgggcccgcacgtcatcgaagacacctgacctgcccatgcgtcttctagagaaaggcggacggacaggtcacccccgcacctcattccaggagttgcatttcgctttctcctttatttatttataccaataaaaaataaatccgccttttctcctccctatcgtgtgtctcctctcgccggctttaaaaacgcacacaagcgctaaaaccctctccaccgtccacctcagctcccatatccgctcccctacctctccagcatcctcccgtctccgtcgtctcgtctccgctcctcacctcgccagccatgggcaagatcaagatcggaatcaacggtttcggaaggatcggcaggctcgtggccagggtcgccctgcagagcgaggatgtcgagctcgtcgccgtcaacgaccccttcatcaccacggattacatgacgtacatgttcaagtacgacaccgtgcacggccaatggaagcacagcgacaagtacacctccgatgttaacattgtttccaatgctagctgcaccacaaactgccttgctccccttgctaaggtcattcatgacaactttggcattattgagggcttgatgacaactgttcatgccatcactgccacccagaagactgttgatggaccctcagccaaggactggagaggtggcagggctgccagctttaacatcattcccagcagcaccggtgctgccaaggctgtcggtaaggttcttcctgaattgaatggcaagctcactggcatgtccttccgggttcccaccgtggatgtgtcagttgttgacctcactgtcagaatcgagaagggggcctcttacgaggaaatcaagaaagctattaaggctgcttctgagggcccactcaagggtattatgggctacgtggaggaggatctggtttccaccgacttcaccggtgacagcaggtcgagcatcttcgacgccaaggccgggattgccctgaacgaccacttcatcaagctcgtctcttggtacgacaacgagtggggctacagcaaccgcgtcgtcgacctgatccgccacatgttcaagacccagtagagagagatatttctgcctccctatcgtgggtcgtccccaatggcctttggtcgcagaccatctttgctgcttgtctatgctgagaataaatgtgaacggtgcccctggacgctggatccatgctggttttggacacgttgtctttttgtgtttaacttatctgctaccgtcctgtaacgaattcactaagttctagttcttttgtgctttgttaagaatataaacaatgaggtttcaattttggtggcgccatccggtctgattgcgtactagtatcatgcatatctgagctggtctttccggagtaacagtttttttttgtttcgtgtcaatgattctcagcctgttcatttggtcttaatccatatcggttactactataatgttgtcttgtctctatagattgcagcagtctaacacatgttcttggtatccttttgggtgtgtttaatgctatttgctctgtgttgtctttttcgtt

SEQ ID NO: 60628 - DNA, 694 bp, Zea Mays
ctcagatcctctcagcagcctctatgaaaggagccttgagaggatctggtttccaccgacttcaccggtgacagcaggtcgagcatcttcgacgccaaggccgggattgccctgaacgaccacttcatcaagctcgtctcttggtacgacaacgagtggggctacagcaaccgcgtcgtcgacctgatccgccacatgttcaagacccagtagagagagatatttctgcctccctatcgtgggtcgtccccaatggcctttggtcgcagaccatctttgctgcttgtctatgctgagaataaatgtgaacggtgcccctggacgctggatccatgctggttttggacacgttgtctttttgtgtttaacttatctgctaccgtcctgtaacgaattcactaagttctagttcttttgtgctttgttaagaatataaacaatgaggtttcaattttggtggcgccatccggtctgattgcgtactagtatcatgcatatctgagctggtctttccggagtaacagtttttttttgtttcgtgtcaatgattctcagcctgttcatttggtcttaatccatatcggttactactataatgttgtcttgtctctatagattgcagcagtctaacacatgttcttggtatccttttgggtgtgtttaatgctatttgctctgtgttgtctttttcgtt

SEQ ID NO: 60629 - DNA, 383 bp, Zea Mays
atggccgggagatccgcacccaccttgcctccactcaacaaccgcacacccactccgcatcccaatccactagctccggcctcgccccctcacccgcgtgttcccctcccccgcctcgttcgcccctaccgcaccatcaacgtgcctccccaccgcccttgtcctccccatgcccgccactcccacccgagatggttagcgcccctcctccttccggtcccttcccctgcctccgctctcaacgtggccggccagccatggagtaaggctaggggattcgccggattcaccaagcgggctctggtggcggccggcgccgccgtcgtgtcctccattcccgtcaaccccctcgacgtcgccaagatatgtttaccagaggaatt

SEQ ID NO: 60630 - DNA, 3037 bp, Zea Mays
cttccccgccccctcgaatcgagggttctggttagggggtcgcctcctgctcccccggcgaccgcggaataagctagccccccctctcgtgtctcgcctcgggggggcttagggttaggttcttatccggaattgcgggcgaaattccacggccaaggcggcgcattgctacccgggaggaggaggctacgcagtgtgtctccgcagccgcagccagcaatgatggggaagacgaataggttctccaagggccaccagctcggcttcgtgcctgactaccggcatggcgtggaggctatgggggagtccaaggggctcgggagccccccgaggatcgactcggggagctcctgcgcgccgcccaagaggaagtgcgtcagtgtgaattcagaggagggggaaggcgcctcggggttcagcatgcctcgggcccgggaggtgttctcgctgcccaggatgactcgtctggacaagaaggacctagagatgaagctccgccatgagcttgcacaggtgagggacgtccagagtaggctgtttctgagagggtctgcggtcagcatgaatggtgcagcggtcgcgtcggtccccgcaggcgatgtgcaacccaagaaaaaggttgagaagctcaagcggagcgattcggtgcaaacggacaggggagcgccgccaccagcggccacggtcgtcgccgcacctgttgctagctctgttaactacacatcatcgtttaaacaatgtgccaaccttctcaagtccattatgagccatgtatgggcaggcccgtttcttgttccggttgatattgtgaagttgaacatacctgactatttccaaatagtcaagcagcccatggatttgggtacgatccagaaaaagttgaaggcagggatgtactctacacctcgggaatttgcagctgatgtgaggctcactttcagcaatgccatgaattataacccagtcaataatgatgttcatttaatggccaaaactttgagcaagaactttgaaactcgatggaagcttattgagaagaagctccctaaaccagacgataagcctcaaccagttgagaagcctcctgtgagggagcctacagaaaagaattcaactaagggagttgccgttgagaaagaagacatcaccaagaaaaaaccctcaaagaagagtgtacctaagcaagacatatttcaggaaggatattcagcggacaatccagttttgcaaccaaagaaaaggaaaacatctcctttgatacaagatgcttctttggtagaggatgttgttccaaccggaaagagaatgatgacgagtgagcaaaaatatgatattagtgcaagattacaatcatttggtgcattcattccagaccatgtagttgagttcataaggagtcgcgttgatgattgcgatgctgatgaagaggaaatggagcttgatattgatgttcttggagatgatactctttttgaattacagcagctacttgatgactatgacagggttaatccgtcgagaaaccttacaaaagaggaccctcacgaagctgagtctcggagtcaatatgaactcatcaatccatcagtgtgtaacgatggcaatgagctcattgacgaggatgttgatattggggagaatgaccccccaattttggctcttcctcctgtggtacttgaagatgaaacagcagacagaaacagcaagcatagtacatccagcagttctagtagtgactcagaatcatcctctagtgactcagattcaagtagctcttctggaagtgatgccgatgccaaagctcctcaacaaaacagcgggtcaaaggaaaaagttctacctgtcgatggcgtggatcaggaaaaggattcactgagcacattaaatttaccagagcaaagtacaaaccctatatctgtttctgctgatgggggaaatgtatctgagaagcaggtctcccctgacaagcaaatacgagctgcccttctgagaagccgctttgctgatacgatccttaaggctcgtgaaaaggcccttgatcagactacaaagaaggaccccgagaagcttcgacgcgaaagggaggaacttgagagggtacaaagagaagagagagctcggttgcaagctgaggctaaagctgcagaggacgttcgcaagagggctgaagcagcagcagctgctgaggctgctgctgaagctaagcgacaaagagaacttgagagagaagcagctcgcaaagctttgcaagagatggagaaaactgttgacatcaatgaagggagccattttttgaaagatcttgaaatgctcggaagtgtcacaggtgaacagatacccaacttggttggtgaaacaagtcctgggtttcaaatgggaagcaacacactagaaaagctcgggctgtacatgaaaaacgatgaggatgatgaggatggtgatttcacagatgaaccagtggctgatgttgaagagggagaaatagattaactgtgtttctggaccatttttgatacgttacaggagacctgttggcatgactgatctgcatagctttcctttggtatacaaagtgacctgacgaaagatcgtgtcgcatcgaacctgaaggtctggtattcatttttgtaactgcctaagttttggagccaagttggcaaatgacagcgagcctcagacatgttggaagttcgtcgtgctgcatgtgaggagagcatcgagcgtgcgtatcgtttggattgagaattctctctggactttccatatccatacaatggaacggcgagtttattgcatatatgatgaggccataaaaggggagagggttggaggagggaccacaaggagtgatggtgatggttcttggctcttgcacaggtgcgagccgtttttgaggggtagttttagagccatttccgtgttgtgaatgtaacatcggaaactgtacaaaagttagcctgatagatggaaaacattgacttgaatttatgcagtgcctgttcttcatcgatcacttttttacgtacttgttttcatg

SEQ ID NO: 60631 - DNA, 3080 bp, Zea Mays
gtgagtccgctcgatcccctcgccgcgggagctttcgctcgagcttccccgccccctcgaatcgagggttctggttagggggtcgcctcctgctcccccggcgaccgcggaataagctagccccccctctcgtgtctcgcctcgggggggcttagggttaggttcttatccggaattgcgggcgaaattccacggccaaggcggcgcattgctacccgggaggaggaggctacgcagtgtgtctccgcagccgcagccagcaatgatggggaagacgaataggttctccaagggccaccagctcggcttcgtgcctgactaccggcatggcgtggaggctatgggggagtccaaggggctcgggagccccccgaggatcgactcggggagctcctgcgcgccgcccaagaggaagtgcgtcagtgtgaattcagaggagggggaaggcgcctcggggttcagcatgcctcgggcccgggaggtgttctcgctgcccaggatgactcgtctggacaagaaggacctagagatgaagctccgccatgagcttgcacaggtgagggacgtccagagtaggctgtttctgagagggtctgcggtcagcatgaatggtgcagcggtcgcgtcggtccccgcaggcgatgtgcaacccaagaaaaaggttgagaagctcaagcggagcgattcggtgcaaacggacaggggagcgccgccaccagcggccacggtcgtcgccgcacctgttgctagctctgttaactacacatcatcgtttaaacaatgtgccaaccttctcaagtccattatgagccatgtatgggcaggcccgtttcttgttccggttgatattgtgaagttgaacatacctgactatttccaaatagtcaagcagcccatggatttgggtacgatccagaaaaagttgaaggcagggatgtactctacacctcgggaatttgcagctgatgtgaggctcactttcagcaatgccatgaattataacccagtcaataatgatgttcatttaatggccaaaactttgagcaagaactttgaaactcgatggaagcttattgagaagaagctccctaaaccagacgataagcctcaaccagttgagaagcctcctgtgagggagcctacagaaaagaattcaactaagggagttgccgttgagaaagaagacatcaccaagaaaaaaccctcaaagaagagtgtacctaagcaagacatatttcaggaaggatattcagcggacaatccagttttgcaaccaaagaaaaggaaaacatctcctttgatacaagatgcttctttggtagaggatgttgttccaaccggaaagagaatgatgacgagtgagcaaaaatatgatattagtgcaagattacaatcatttggtgcattcattccagaccatgtagttgagttcataaggagtcgcgttgatgattgcgatgctgatgaagaggaaatggagcttgatattgatgttcttggagatgatactctttttgaattacagcagctacttgatgactatgacagggttaatccgtcgagaaaccttacaaaagaggaccctcacgaagctgagtctcggagtcaatatgaactcatcaatccatcagtgtgtaacgatggcaatgagctcattgacgaggatgttgatattggggagaatgaccccccaattttggctcttcctcctgtggtacttgaagatgaaacagcagacagaaacagcaagcatagtacatccagcagttctagtagtgactcagaatcatcctctagtgattcaagtagctcttctggaagtgatgccgatgccaaagctcctcaacaaaacagcgggtcaaaggaaaaagttctacctgtcgatggcgtggatcaggaaaaggattcactgagcacattaaatttaccagagcaaagtacaaaccctatatctgtttctgctgatggtgaggggggaaatgtatctgagaagcaggtctcccctgacaagcaaatacgagctgcccttctgagaagccgctttgctgatacgatccttaaggctcgtgaaaaggcccttgatcagactacaaagaaggaccccgagaagcttcgacgcgaaagggaggaacttgagagggtacaaagagaagagagagctcggttgcaagctgaggctaaagctgcagaggacgttcgcaagagggctgaagcagcagcagctgctgaggctgctgctgaagctaagcgacaaagagaacttgagagagaagcagctcgcaaagctttgcaagagatggagaaaactgttgacatcaatgaagggagccattttttgaaagatcttgaaatgctcggaagtgtcacaggtgaacagatacccaacttggttggtgaaacaagtcctgggtttcaaatgggaagcaacacactagaaaagctcgggctgtacatgaaaaacgatgaggatgatgaggatggtgatttcacagatgaaccagtggctgatgttgaagagggagaaatagattaactgtgtttctggaccatttttgatacgttacaggagacctgttggcatgactgatctgcatagctttcctttggtatacaaagtgacctgacgaaagatcgtgtcgcatcgaacctgaaggtctggtattcatttttgtaactgcctaagttttggagccaagttggcaaatgacagcgagcctcagacatgttggaagttcgtcgtgctgcatgtgaggagagcatcgagcgtgcgtatcgtttggattgagaattctctctggactttccatatccatacaatggaacggcgagtttattgcatatatgatgaggccataaaaggggagagggttggaggagggaccacaaggagtgatggtgatggttcttggctcttgcacaggtgcgagccgtttttgaggggtagttttagagccatttccgtgttgtgaatgtaacatcggaaactgtacaaaagttagcctgatagatggaaaacattgacttgaatttatgcagtgcctgttcttcatcgatcacttttttacgtacttgttttcatg

SEQ ID NO: 60632 - DNA, 3028 bp, Zea Mays
gctggttctcggtgagtccgctcgatcccctcgccgcgggagctttcgctcgagcttccccgccccctcgaatcgagggttctggttagggggtcgcctcctgctcccccggcgaccgcggaataagctagccccccctctcgtgtctcgcctcgggggggcttagggttaggttcttatccggaattgcggccgcagccagcaatgatggggaagacgaataggttctccaagggccaccagctcggcttcgtgcctgactaccggcatggcgtggaggctatgggggagtccaaggggctcgggagccccccgaggatcgactcggggagctcctgcgcgccgcccaagaggaagtgcgtcagtgtgaattcagaggagggggaaggcgcctcggggttcagcatgcctcgggcccgggaggtgttctcgctgcccaggatgactcgtctggacaagaaggacctagagatgaagctccgccatgagcttgcacaggtgagggacgtccagagtaggctgtttctgagagggtctgcggtcagcatgaatggtgcagcggtcgcgtcggtccccgcaggcgatgtgcaacccaagaaaaaggttgagaagctcaagcggagcgattcggtgcaaacggacaggggagcgccgccaccagcggccacggtcgtcgccgcacctgttgctagctctgttaactacacatcatcgtttaaacaatgtgccaaccttctcaagtccattatgagccatgtatgggcaggcccgtttcttgttccggttgatattgtgaagttgaacatacctgactatttccaaatagtcaagcagcccatggatttgggtacgatccagaaaaagttgaaggcagggatgtactctacacctcgggaatttgcagctgatgtgaggctcactttcagcaatgccatgaattataacccagtcaataatgatgttcatttaatggccaaaactttgagcaagaactttgaaactcgatggaagcttattgagaagaagctccctaaaccagacgataagcctcaaccagttgagaagcctcctgtgagggagcctacagaaaagaattcaactaagggagttgccgttgagaaagaagacatcaccaagaaaaaaccctcaaagaagagtgtacctaagcaagacatatttcaggaaggatattcagcggacaatccagttttgcaaccaaagaaaaggaaaacatctcctttgatacaagatgcttctttggtagaggatgttgttccaaccggaaagagaatgatgacgagtgagcaaaaatatgatattagtgcaagattacaatcatttggtgcattcattccagaccatgtagttgagttcataaggagtcgcgttgatgattgcgatgctgatgaagaggaaatggagcttgatattgatgttcttggagatgatactctttttgaattacagcagctacttgatgactatgacagggttaatccgtcgagaaaccttacaaaagaggaccctcacgaagctgagtctcggagtcaatatgaactcatcaatccatcagtgtgtaacgatggcaatgagctcattgacgaggatgttgatattggggagaatgaccccccaattttggctcttcctcctgtggtacttgaagatgaaacagcagacagaaacagcaagcatagtacatccagcagttctagtagtgactcagaatcatcctctagtgactcagattcaagtagctcttctggaagtgatgccgatgccaaagctcctcaacaaaacagcgggtcaaaggaaaaagttctacctgtcgatggcgtggatcaggaaaaggattcactgagcacattaaatttaccagagcaaagtacaaaccctatatctgtttctgctgatggtgaggggggaaatgtatctgagaagcaggtctcccctgacaagcaaatacgagctgcccttctgagaagccgctttgctgatacgatccttaaggctcgtgaaaaggcccttgatcagactacaaagaaggaccccgagaagcttcgacgcgaaagggaggaacttgagagggtacaaagagaagagagagctcggttgcaagctgaggctaaagctgcagaggacgttcgcaagagggctgaagcagcagcagctgctgaggctgctgctgaagctaagcgacaaagagaacttgagagagaagcagctcgcaaagctttgcaagagatggagaaaactgttgacatcaatgaagggagccattttttgaaagatcttgaaatgctcggaagtgtcacaggtgaacagatacccaacttggttggtgaaacaagtcctgggtttcaaatgggaagcaacacactagaaaagctcgggctgtacatgaaaaacgatgaggatgatgaggatggtgatttcacagatgaaccagtggctgatgttgaagagggagaaatagattaactgtgtttctggaccatttttgatacgttacaggagacctgttggcatgactgatctgcatagctttcctttggtatacaaagtgacctgacgaaagatcgtgtcgcatcgaacctgaaggtctggtattcatttttgtaactgcctaagttttggagccaagttggcaaatgacagcgagcctcagacatgttggaagttcgtcgtgctgcatgtgaggagagcatcgagcgtgcgtatcgtttggattgagaattctctctggactttccatatccatacaatggaacggcgagtttattgcatatatgatgaggccataaaaggggagagggttggaggagggaccacaaggagtgatggtgatggttcttggctcttgcacaggtgcgagccgtttttgaggggtagttttagagccatttccgtgttgtgaatgtaacatcggaaactgtacaaaagttagcctgatagatggaaaacattgacttgaatttatgcagtgcctgttcttcatcgatcacttttttacgtacttgttttcatg

SEQ ID NO: 60633 - DNA, 3288 bp, Zea Mays
gaagccgcccgcgaagagagagagagagagagagggcgagaggggcggaggagagagaaacccctagtctccagccgcctcgcctccccccatcgccgcctcagcctccgcctcggcgcggggcgaggaggaggaggagagaggaagccctagaaggttcgcgccgcggacggcggcgcttgcgcctgcgccaggccacgagatctcgtggcagcgccgccggctggtgtatcggggtgcagcggctggcgggcgctgggcggtgctggttctcggtgagtccgctcgatcccctcgccgcgggagctttcgctcgagcttccccgccccctcgaatcgagggttctggttagggggtcgcctcctgctcccccggcgaccgcggaataagctagccccccctctcgtgtctcgcctcgggggggcttagggttaggttcttatccggaattgcgggcgaaattccacggccaaggcggcgcattgctacccgggaggaggaggctacgcagtgtgtctccgcagccgcagccagcaatgatggggaagacgaataggttctccaagggccaccagctcggcttcgtgcctgactaccggcatggcgtggaggctatgggggagtccaaggggctcgggagccccccgaggatcgactcggggagctcctgcgcgccgcccaagaggaagtgcgtcagtgtgaattcagaggagggggaaggcgcctcggggttcagcatgcctcgggcccgggaggtgttctcgctgcccaggatgactcgtctggacaagaaggacctagagatgaagctccgccatgagcttgcacaggtgagggacgtccagagtaggctgtttctgagagggtctgcggtcagcatgaatggtgcagcggtcgcgtcggtccccgcaggcgatgtgcaacccaagaaaaaggttgagaagctcaagcggagcgattcggtgcaaacggacaggggagcgccgccaccagcggccacggtcgtcgccgcacctgttgctagctctgttaactacacatcatcgtttaaacaatgtgccaaccttctcaagtccattatgagccatgtatgggcaggcccgtttcttgttccggttgatattgtgaagttgaacatacctgactatttccaaatagtcaagcagcccatggatttgggtacgatccagaaaaagttgaaggcagggatgtactctacacctcgggaatttgcagctgatgtgaggctcactttcagcaatgccatgaattataacccagtcaataatgatgttcatttaatggccaaaactttgagcaagaactttgaaactcgatggaagcttattgagaagaagctccctaaaccagacgataagcctcaaccagttgagaagcctcctgtgagggagcctacagaaaagaattcaactaagggagttgccgttgagaaagaagacatcaccaagaaaaaaccctcaaagaagagtgtacctaagcaagacatatttcaggaaggatattcagcggacaatccagttttgcaaccaaagaaaaggaaaacatctcctttgatacaagatgcttctttggtagaggatgttgttccaaccggaaagagaatgatgacgagtgagcaaaaatatgatattagtgcaagattacaatcatttggtgcattcattccagaccatgtagttgagttcataaggagtcgcgttgatgattgcgatgctgatgaagaggaaatggagcttgatattgatgttcttggagatgatactctttttgaattacagcagctacttgatgactatgacagggttaatccgtcgagaaaccttacaaaagaggaccctcacgaagctgagtctcggagtcaatatgaactcatcaatccatcagtgtgtaacgatggcaatgagctcattgacgaggatgttgatattggggagaatgaccccccaattttggctcttcctcctgtggtacttgaagatgaaacagcagacagaaacagcaagcatagtacatccagcagttctagtagtgactcagaatcatcctctagtgactcagattcaagtagctcttctggaagtgatgccgatgccaaagctcctcaacaaaacagcgggtcaaaggaaaaagttctacctgtcgatggcgtggatcaggaaaaggattcactgagcacattaaatttaccagagcaaagtacaaaccctatatctgtttctgctgatggtgaggggggaaatgtatctgagaagcaggtctcccctgacaagcaaatacgagctgcccttctgagaagccgctttgctgatacgatccttaaggctcgtgaaaaggcccttgatcagactacaaagaaggaccccgagaagcttcgacgcgaaagggaggaacttgagagggtacaaagagaagagagagctcggttgcaagctgaggctaaagctgcagaggacgttcgcaagagggctgaagcagcagcagctgctgaggctgctgctgaagctaagcgacaaagagaacttgagagagaagcagctcgcaaagctttgcaagaggtgaacagatacccaacttggttggtgaaacaagtcctgggtttcaaatgggaagcaacacactagaaaagctcgggctgtacatgaaaaacgatgaggatgatgaggatggtgatttcacagatgaaccagtggctgatgttgaagagggagaaatagattaactgtgtttctggaccatttttgatacgttacaggagacctgttggcatgactgatctgcatagctttcctttggtatacaaagtgacctgacgaaagatcgtgtcgcatcgaacctgaaggtctggtattcatttttgtaactgcctaagttttggagccaagttggcaaatgacagcgagcctcagacatgttggaagttcgtcgtgctgcatgtgaggagagcatcgagcgtgcgtatcgtttggattgagaattctctctggactttccatatccatacaatggaacggcgagtttattgcatatatgatgaggccataaaaggggagagggttggaggagggaccacaaggagtgatggtgatggttcttggctcttgcacaggtgcgagccgtttttgaggggtagttttagagccatttccgtgttgtgaatgtaacatcggaaactgtacaaaagttagcctgatagatggaaaacattgacttgaatttatgcagtgcctgttcttcatcgatcacttttttacgtacttgttttcatg

SEQ ID NO: 60634 - DNA, 804 bp, Zea Mays
acaggaagcagttcttcaaatagtctggtaatgagaaactatttatgattggtggacatgagggagactttatgactaaaccaggatcacctgtttttaaatgttggtggaactacagagaagcatgccatcaccaagaagctgattcttgttggtgaagtcttccgttttgatttggaagcattgacctggtcagtcattgggcgcatgcctttccgaatcaagacatccttatctaggtactgactactgagaggggagggggggcggctctgttttacttctgggcagcgagatcatgggcctgacaatccagctccaaagaaagttgttgggagtctgggactatgtggagaacgaggctgcacttgtgatggcagaagttgtgacagtttgtttcccctgaaaattgtagatttgcatctgatttcctgtccaacagctaggtccctttcagagaagagagttgcttgttttgattcccacatccggaatctgaagttcagagatgtctccaaacaaccagaagatatgtacgtaagcaactaccaaagatcattcttattggagatattcagcacaaagcccacccaccaaataatcctgatgttcttctttccctagctgttccagagaggtcggaactgtttggggctttcattagccaattaaaatattaagtagcaagctgagtaccatgtcagtattaaatctgtctctgtaattgcctccgaaattggtgtgcgtgtttctcatcttgttggtttcttagtatatgtaatctgcactcagaggtacaatata

SEQ ID NO: 60635 - DNA, 843 bp, Zea Mays
tagtcttctggaaacatggcacaatacaggaagcagttcttcaaatagtctgggcatgtgtggtaggtaatgagaaactatttatgattggtggacatgagggagactttatgactaaaccaggatcacctgtttttaaatgttggtggaactacagagaagcatgccatcaccaagaagctgattcttgttggtgaagtcttccgttttgatttggaagcattgacctggtcagtcattgggcgcatgcctttccgaatcaagacatccttatctaggtactgactactgagaggggagggggggcggctctgttttacttctgggcagcgagatcatgggcctgacaatccagctccaaagaaagttgttgggagtctgggactatgtggagaacgaggctgcacttgtgatggcagaagttgtgacagtttgtttcccctgaaaattgtagatttgcatctgatttcctgtccaacagctaggtccctttcagagaagagagttgcttgttttgattcccacatccggaatctgaagttcagagatgtctccaaacaaccagaagatatgtacgtaagcaactaccaaagatcattcttattggagatattcagcacaaagcccacccaccaaataatcctgatgttcttctttccctagctgttccagagaggtcggaactgtttggggctttcattagccaattaaaatattaagtagcaagctgagtaccatgtcagtattaaatctgtctctgtaattgcctccgaaattggtgtgcgtgtttctcatcttgttggtttcttagtatatgtaatctgcactcagaggtacaatata

SEQ ID NO: 60636 - DNA, 3842 bp, Zea Mays
caactccaagagattagctaaaaagactagccaaatttactgatttagctaatctctaaaatagattttagagaaaaagtgtaggctaatccaacagactcggtaaacctacggactgaatagagagtgaagcaggctatccaaaattggagagcgaagatggagaaatagagagccactaaatttgaagagtcatttacagagtctattggatacaattttcttttaatattagctaaatttacctttacaaaaccatatatctagtctcttggagttgctctaactttttaggcctgcagactgaccaccaacgcagtgaccagtggcggccactctaccaccaacggtttggtcttcgtctgtacacccgaacctggcatattcatacggtgactgcaaggtgagccacaactcagaggcaagcagagtcagcaaagatatatgaaagggaggagaggggttgaacagattattactctcagaaaccagccccttctaccctaccgttcttcctcctatacaatacaacaactactctcttgcgttgtactcggagccaggatcagatggatgcccttgctttgctgcctatcctgatctcttctcctctcaggatgtaggcagatcgagtaatcagtggctcacattttgacaagacactcaaggcaaacatgcgaatacttcctcagcaaatcctatccagccactccaaaaagtatccacagattccaaagacttttagcaaatccttaagggagcggcactgatgctataaggtgagccttgaccttattccaagtctgatcgaataagaagggatggcagagattgctgttcttctcgtcctgaagaagattgccatagctctggcaggagagaccctaagttttgctaaaccattgcttgcaaagaagtctgagtcggtggcagcactcccagatgacatgaaactgattagtaatgagctcgagcttatccgggcgtttctcaaggaaatcggcaggaaaggctggaaaagcgaagtgatagaaacatggatagggcaggtccgaagactggcttatgatatggaagacactgtagaccattttatttacgttgttggtacacacgatcagatgggatcatgctgggattacatgaagaagatagccaagaagcctcggcgtctggtttcactagatgaaattgctagtgagattaagaagataaagcaagagcttaaacaactctcggaaagtagagaccgctggactaaacccttggatggcgggagtggtatacctgcaggaagctatgaaactgaaaaggaaatgtatcttcctggacatgattacacaatcagcgacgaggagcttgcaggaattgatgaaaataagcaaaccttgattagttcattaaaatttgaagatccatcacttcggatcattgctgtctggggtatgggtggcgttggaaaaagcactcttgtaaataatgtgtacaaaaatgaaggatccaactttgactgccgtgcatgggtttctatctctcagtcatatagactagaagatatatggaagaaaatgctgacagatctcatcgggaaagataagatagaatttgatcttggaacaatggatagtgcagaactaagagagcaattgacaaaaactctagacaaaaggcagtacctgatcatactggatgatgtctggatggctaatgttttttttaaaattaaagaagttcttgtagataatggccttggaagcagagtaataatcacaacaagaattgaggaggtagcttcactagctaagggtagttgtaagatcaaagtagaacctctgggtgtcgatgattcctggcatgtattttgtaggaaggcatttctgaaagatgaaaaccatatctgccctccagagttgcgtcagtgtggtataaacattgtggagaaatgtgatggtttgccattagcccttgtggcaataggaagcatattgtcgctgagaccgaagaatgttgacgagtggaagctattttatgaccagcttatctgggagctacacaacaatgagaaccttaatcgcgtggagaaaattatgaatctaagttataaatacttaccagactatttgaagaactgcttcctgtattgtgctatgtttccagaagactatctaatacacagaaagagattgattagattgtggatagctgaaggatttattgaacaaaaaggggcatgcagcttagaagacactgctgaaagttatcttaaagaacttatacgacggagcatgcttcacgttgcagagaggaactgctttggtaggattaaatgtattcgaatgcatgatcttgtgcgtgaacttgccattttccaatctaaaagagagggtttcagtacaacttatggtggaaataatgaagcagtgctagtgggatcatattctcgacgagtggctgtgctccaatgcagcaagggcattccatcaaccattgatccatccaggcttcgcaccttaattacattcgacaccagcagagcattatctgtgtggtattcttctatttcctccaaaccaaagtaccttgcagtattagacttatcaagcttgcctattgagactattccaaattcaattggagagcttttcaaccttaggcttttatgcctcaataaaaccaaagtgaaagagctccctaaatctattacaaaacttcaaaacctacagacaatgagtcttgagaatggggagttagtgaagttcccacaagggttttcaaaactgaagaaattgcgacatcttatggtttcacggttgcaagatgtaactttcagcggtttcaaaagttgggaagctgtggagccatttaagggcttgtggactttgattgaactgcaaactctgtatgccattacagcaagtgaagtattagttgcaaaacttggaaatttatcccagctgaggcggcttataatttgtgatgtaaggagtaacttatgtgcacagttgtgtggctctttgtcaaagttgtgccagctgtcacgattaacgataagagcatgcaatgaagatgaagtgctacagctggatcatttgacatttccaaatcctcttcaaacccttagtttagatggacgactgtcagaaggaactttcaaatctccctttttcttaaatcatggaaatgggcttcttaggctaatgttgttttacagtcagctttcagaaaatccagtaccacacctctctgaattgtcaaacttgactaggttatcccttataaaggcatacaccggccaagaattatacttccaagcaggttggttcctgaatttaaaagaactttacttgaagaatttgtcccggctcaatcaaatagacatacaggagggagctttggccagccttgaacgtataacaatgaaacacctcccggagctacgggaggttccagtcggtttcagatttctcaagtccctaaaaacaatatttttttccgatatgcatcctgagtttgaaagcagctttcaaaaggaaatgtagatcatatcccgtacatatgcaggacaacaacataagtatggttcgtttgtgtgtctacgggtaaccttatgtgcctccaccgaaaatagggcgggttgcattggcgaaaggttcatgatggctgttttgagcttgggcaattactgtgaagatgaaatgcagcggtagaatccaaactttcgagcagaaagcagcactgaaggtgaagggcatgtcatgtcatccatgtacctaggatccaaaccttcgagcagaaagcaccaaagaggaagcgtagccggcaggcaacatgaagcccagtgt

SEQ ID NO: 60637 - DNA, 358 bp, Zea Mays
gattaggccaggttgttgcgtcgcccggcaatcgcgctaaccacaggtccacctcgtcgcagcttcaaaagaggacaggcccctggttcttccccaagtcgcgcgcacctcgcatcccttggccacaccaaatccgaccctgagccacaccagtaaagctctgtgtgcttgtcgcggacagcagtgatagaaagcgaggagagagggactgggggaagccgcctccgtcgttcatcgtccacaatgccgatggggcctggggtcaattgctcgccggtgaagatgcttcgtcgggggaccgcaccgatccgcggatggggtatcgccacgctatgcactgctcggatgggcacgtcac

SEQ ID NO: 60638 - DNA, 521 bp, Zea Mays
gattaggccaggttgttgcgtcgcccggcaatcgcgctaaccacaggtccacctcgtcgcagcttcaaaagaggacaggcccctggttcttccccaagtcgcgcgcacctcgcatcccttggccacaccaaatccgaccctgagccacaccagtaaagctctgtgtgcttgtcgcggacagcagtgatagaaagcgaggagagagggactgggggaagccgcctccgtcgttcatcgtccacaatgccgatggggcctggggtcaattgctcgccggtgaagatgcttcgtcgggggaccgcaccgatccgcggatggggtatcgccacgctatgcactgctttttcggccactgcgaactcgccctctgttctcctagccacggaatttgtgatcgatgacctgtccaccgtcgcgcgcgggtggttcgctgaacgccataggcgggtccaaactcgacgccgtctccatctgcgcctccctcgccaacgtgttcgccggcttcgaccactggatccgcc

SEQ ID NO: 60639 - DNA, 3891 bp, Zea Mays
gagcaactccaagagattagctaaaaagactagccaaatttactgatttagctaatctctaaaatagattttagagaaaaagtgtaggctaatccaacagactcggtaaacctacggactgaatagagagtgaagcaggctatccaaaattggagagcgaagatggagaaatagagagccactaaatttgaagagtcatttacagagtctattggatacaattttcttttaatattagctaaatttacctttacaaaaccatatatctagtctcttggagttgctctaactttttaggcctgcagactgaccaccaacgcagtgaccagtggcggccactctaccaccaacggtttggtcttcgtctgtacacccgaacctggcatattcatacggtgactgcaaggtgagccacaactcagaggcaagcagagtcagcaaagatatatgaaagggaggagaggggttgaacagattattactctcagaaaccagccccttctaccctaccgttcttcctcctatacaatacaacaactactctcttgcgttgtactcggagccaggatcagatggatgcccttgctttgctgcctatcctgatctcttctcctctcaggatgtaggcagatcgagtaatcagtggctcacattttgacaagacactcaagggagcggcactgatgctataaggtgagccttgaccttattccaagtctgatcgaataagaagggatggcagagattgctgttcttctcgtcctgaagaagattgccatagctctggcaggagagaccctaagttttgctaaaccattgcttgcaaagaagtctgagtcggtggcagcactcccagatgacatgaaactgattagtaatgagctcgagcttatccgggcgtttctcaaggaaatcggcaggaaaggctggaaaagcgaagtgatagaaacatggatagggcaggtccgaagactggcttatgatatggaagacactgtagaccattttatttacgttgttggtacacacgatcagatgggatcatgctgggattacatgaagaagatagccaagaagcctcggcgtctggtttcactagatgaaattgctagtgagattaagaagataaagcaagagcttaaacaactctcggaaagtagagaccgctggactaaacccttggatggcgggagtggtatacctgcaggaagctatgaaactgaaaaggaaatgtatcttcctggacatgattacacaatcagcgacgaggagcttgcaggaattgatgaaaataagcaaaccttgattagttcattaaaatttgaagatccatcacttcggatcattgctgtctggggtatgggtggcgttggaaaaagcactcttgtaaataatgtgtacaaaaatgaaggatccaactttgactgccgtgcatgggtttctatctctcagtcatatagactagaagatatatggaagaaaatgctgacagatctcatcgggaaagataagatagaatttgatcttggaacaatggatagtgcagaactaagagagcaattgacaaaaactctagacaaaaggcagtacctgatcatactggatgatgtctggatggctaatgttttttttaaaattaaagaagttcttgtagataatggccttggaagcagagtaataatcacaacaagaattgaggaggtagcttcactagctaagggtagttgtaagatcaaagtagaacctctgggtgtcgatgattcctggcatgtattttgtaggaaggcatttctgaaagatgaaaaccatatctgccctccagagttgcgtcagtgtggtataaacattgtggagaaatgtgatggtttgccattagcccttgtggcaataggaagcatattgtcgctgagaccgaagaatgttgacgagtggaagctattttatgaccagcttatctgggagctacacaacaatgagaaccttaatcgcgtggagaaaattatgaatctaagttataaatacttaccagactatttgaagaactgcttcctgtattgtgctatgtttccagaagactatctaatacacagaaagagattgattagattgtggatagctgaaggatttattgaacaaaaaggggcatgcagcttagaagacactgctgaaagttatcttaaagaacttatacgacggagcatgcttcacgttgcagagaggaactgctttggtaggattaaatgtattcgaatgcatgatcttgtgcgtgaacttgccattttccaatctaaaagagagggtttcagtacaacttatggtggaaataatgaagcagtgctagtgggatcatattctcgacgagtggctgtgctccaatgcagcaagggcattccatcaaccattgatccatccaggcttcgcaccttaattacattcgacaccagcagagcattatctgtgtggtattcttctatttcctccaaaccaaagtaccttgcagtattagacttatcaagcttgcctattgagactattccaaattcaattggagagcttttcaaccttaggcttttatgcctcaataaaaccaaagtgaaagagctccctaaatctattacaaaacttcaaaacctacagacaatgagtcttgagaatggggagttagtgaagttcccacaagggttttcaaaactgaagaaattgcgacatcttatggtttcacggttgcaagatgtaactttcagcggtttcaaaagttgggaagctgtggagccatttaagggcttgtggactttgattgaactgcaaactctgtatgccattacagcaagtgaagtattagttgcaaaacttggaaatttatcccagctgaggcggcttataatttgtgatgtaaggagtaacttatgtgcacagttgtgtggctctttgtcaaagttgtgccagctgtcacgattaacgataagagcatgcaatgaagatgaagtgctacagctggatcatttgacatttccaaatcctcttcaaacccttagtttagatggacgactgtcagaaggaactttcaaatctccctttttcttaaatcatggaaatgggcttcttaggctaatgttgttttacagtcagctttcagaaaatccagtaccacacctctctgaattgtcaaacttgactaggttatcccttataaaggcatacaccggccaagaattatacttccaagcaggttggttcctgaatttaaaagaactttacttgaagaatttgtcccggctcaatcaaatagacatacaggagggagctttggccagccttgaacgtataacaatgaaacacctcccggagctacgggaggttccagtcggtttcagatttctcaagtccctaaaaacaatatttttttccgatatgcatcctgagtttgaaagcagctttcaaaaggaaatgtagatcatatcccgtacatatgcaggacaacaacataagtatggtttgtttgtatgtctacgtgtaccttctgtcctctcccaaaaatagggcgggttgcattggcgaaaagttcatgatgggtgttttgagcttgggcaattactgtggagaggaaatgcagcactaggatccaagctttcgagcagaaagcagcgctgaagctgaagggcatgtcatgtcattcaggtacctagtaggatccaaaccttcgagcagaaagcagcacaggcactggcaccaaagaggaaccatagccgccaggcaacatcagtcatcaggaccggttaataatgtttatgtgtgataatgttgtttcaataattatttggaaccatttcgaactccgaatacttgagagtctgtacgaagcatttggcaataaatactatttcagagtaa

SEQ ID NO: 60640 - DNA, 2026 bp, Zea Mays
ggaacccacttcacacctgggtggctgggtctggctggttccttccttcccgcttccctcgtcaaccaaatcaactcgtgaggtctcctccccatcgccacacccacgcgccgcgcaccgcccgcccgctcgccccgcctccgatccctaatcaatcggcctgaccctagcccgccgccggccgcccacgcccgcccgcctcggctcgtctcaaatcgggcgccccaggggagcgaggcctcgatcgcggcggaccccgatgctccgcattccggcccctccggcgacgtcggcggcagcggaggcatgatccggtggggactcggcggacctgccagccatggacgccaccgcacgcccggccatcgtcatcgacaacggcacaggcaaacttggattttctgggaactcggagccgtctttcactctccccactgtagtagctgcgaatgaatcttttctagaccagacagagctgttgagtagtgcaaactggatagcacagtataatgcaggcatcatggctgatcttgacttttttattggagatgaggctttatcgcggcttaggtctagtgggctgtacactttaagaaggccaatccgtcatggtcaggttcatgactgggatacaatggagagattttggcagcaatgtattttcaattatctacgttgcaatcccgaagagcattatttccttcttacagatagtcctgtcagtacacctgaaagtcgtgaatgtacaggagaaataatgttcgaaaccttcaatgtccctggactatatatttccgttcaatctgttctcagcctttctgctggatatgcctatctgaaaagtatttctgatgacgattcagatactgtgtctgatatgacaggggtagtagttgatattggggatggagctccacaaattgtgccagttgtaaatggctatgtaatcgggagtagcataaagtcttttcctttctccggaagtgatgtaacccagtttgtttcacagcttttacaggaaagaggtgagcttttgccacctgaggattctttagatatatctcgtaaagtgaaagaaatgtattgttatacttgttcagacattgtcaaggagttcaagaagcatgacaggaagcctgataagtacatcaaacattggtcagctgttaaaccaaagactggggtcccatatacaattgacattggatatgaacgctttcttgggccagagatcttcttcaatcctgagatttactctgccgatttctccactcctttgcccgagttgattgacaactgtgttcagtctgcaccaattgacacaaggagagctctgtacaagaatatagtattatctggtggatctaccatgtttaaagacttccacaagagactccaaactgatataaagaagatagtggatgaccgtgttgctgcgactaatgcccgtcatcgtgtggaagtgagacctattgaagtcaacgtggttgcccatccaatacagagttacgcggtttggttcggggggtcactagctgcatctaaccctgacttctttgagttttgccacacaaaggaggactacgaggaacatggagccagcatctgcagaacaagccccgttttcaaaggaatgtactgaatttttcctcacgacccatcctctagctggtgagctcatttaggtttcttcgacagaatatagtcaattttgattcttttttggtgcgttccaaccattgtcgggccaccctgattaggtatgtagctctgtttgtactagttgtttgttttgtgttctgcgtcgaatgttgtgtatagccaacagtttggttcctgttcgaggtgcttcattgtagccagaacctcggacagtttagaggaaaaatatttggttattcttttacattagcttgttcagacagatttacgggactcttattaataagagaagtcaaatttaggactttgtcgtggatgaccacattatttcaattgaataatatggtatccctactttcaacga

SEQ ID NO: 60641 - DNA, 1934 bp, Zea Mays
ggaacccacttcacacctgggtggctgggtctggctggttccttccttcccgcttccctcgtcaaccaaatcaactcgtgaggtctcctccccatcgccacacccacgcgccgcgcaccgcccgcccgctcgccccgcctccgatccctaatcaatcggcctgaccctagcccgccgccggccgcccacgcccgcccgcctcggctcgtctcaaatcgggcgccccaggggagcgaggcctcgatcgcggcggaccccgatgctccgcattccggcccctccggcgacgtcggcggcagcggaggcatgatccggtggggactcggcggacctgccagccatggacgccaccgcacgcccggccatcgtcatcgacaacggcacagggtatagcaaacttggattttctgggaactcggagccgtctttcactctccccactgtagtagctgcgaatgaatcttttctagaccagacagagctgttgagtagtgcaaactggatagcacagtataatgcaggcatcatggctgatcttgacttttttattggagatgaggctttatcgcggcttaggtctagtgggctgtacactttaagaaggccaatccgtcatggttcatgactgggatacaatggagagattttggcagcaatgtattttcaattatctacgttgcaatcccgaagagcattatttccttcttacagatagtcctgtcagtacacctgaaagtcgtgaatgtacaggagaaataatgttcgaaaccttcaatgtccctggactatatatttccgttcaatctgttctcagcctttctgctggatatgcctatctgaaaagtatttctgatgacgattcagatactgtgtctgatatgacaggggtagtagttgatattggggatggagctccacaaattgtgccagttgtaaatggctatgtaatcgggagtagcataaagtcttttcctttctccggaagtgatgtaacccagtttgtttcacagcttttacaggagttcaagaagcatgacaggaagcctgataagtacatcaaacattggtcagctgttaaaccaaagactggggtcccatatacaattgacattggatatgaacgctttcttgggccagagatcttcttcaatcctgagatttactctgccgatttctccactcctttgcccgagttgattgacaactgtgttcagtctgcaccaattgacacaaggagagctctgtacaagaatatagtattatctggtggatctaccatgtttaaagacttccacaagagactccaaactgatataaagaagatagtggatgaccgtgttgctgcgactaatgcccgtcatcgtgtggaagtgagacctattgaagtcaacgtggttgcccatccaatacagagttacgcggtttggttcggggggtcactagctgcatctaaccctgacttctttgagttttgccacacaaaggaggactacgaggaacatggagccagcatctgcagaacaagccccgttttcaaaggaatgtactgaatttttcctcacgacccatcctctagctggtgagctcatttaggtttcttcgacagaatatagtcaattttgattcttttttggtgcgttccaaccattgtcgggccaccctgattaggtatgtagctctgtttgtactagttgtttgttttgtgttctgcgtcgaatgttgtgtatagccaacagtttggttcctgttcgaggtgcttcattgtagccagaacctcggacagtttagaggaaaaatatttggttattcttttacattagcttgttcagacagatttacgggactcttattaataagagaagtcaaatttaggactttgtcgtggatgaccacattatttcaattgaataatatggtatccctactttcaacga

SEQ ID NO: 60642 - DNA, 1819 bp, Zea Mays
ggaacccacttcacacctgggtggctgggtctggctggttccttccttcccgcttccctcgtcaaccaaatcaactcgtgaggtctcctccccatcgccacacccacgcgccgcgcaccgcccgcccgctcgccccgcctccgatccctaatcaatcggcctgaccctagcccgccgccggccgcccacgcccgcccgcctcggctcgtctcaaatcgggcgccccaggggagcgaggcctcgatcgcggcggaccccgatgctccgcattccggcccctccggcgacgtcggcggcagcggaggcatgatccggtggggactcggcggacctgccagccatggacgccaccgcacgcccggccatcgtcatcgacaacggcacagggtatagcaaacttggattttctgggaactcggagccgtctttcactctccccactgtagtagctgcgaatgaatcttttctagaccagacagagctgttgagtagtgcaaactggatagcacagtataatgcaggcatcatggctgatcttgacttttttattggagatgaggctttatcgcggcttaggtctagtgggctgtacactttaagaaggccaatccgtcatggtcaggttcatgactgggatacaatggagagattttggcagcaatgtattttcaattatctacgttgcaatcccgaagagcattatttccttcttacagatagtcctgtcagtacacctgaaagtcgtgaatgtacaggagaaataatgttcgaaaccttcaatgtccctggactatatatttccgttcaatctgttctcagcctttctgctggatatgcctatctgaaaagtatttctgatgacgattcagatactgtgtctgatatgacaggggtagtagttgatattggggatggagctccacaaattgtgccagttgtaaatggctatgtaatcgggagtagcataaagtcttttcctttctccggaagtgatgtaacccagtttgtttcacagcttttacagatcttcttcaatcctgagatttactctgccgatttctccactcctttgcccgagttgattgacaactgtgttcagtctgcaccaattgacacaaggagagctctgtacaagaatatagtattatctggtggatctaccatgtttaaagacttccacaagagactccaaactgatataaagaagatagtggatgaccgtgttgctgcgactaatgcccgtcatcgtgtggaagtgagacctattgaagtcaacgtggttgcccatccaatacagagttacgcggtttggttcggggggtcactagctgcatctaaccctgacttctttgagttttgccacacaaaggaggactacgaggaacatggagccagcatctgcagaacaagccccgttttcaaaggaatgtactgaatttttcctcacgacccatcctctagctggtgagctcatttaggtttcttcgacagaatatagtcaattttgattcttttttggtgcgttccaaccattgtcgggccaccctgattaggtatgtagctctgtttgtactagttgtttgttttgtgttctgcgtcgaatgttgtgtatagccaacagtttggttcctgttcgaggtgcttcattgtagccagaacctcggacagtttagaggaaaaatatttggttattcttttacattagcttgttcagacagatttacgggactcttattaataagagaagtcaaatttaggactttgtcgtggatgaccacattatttcaattgaataatatggtatccctactttcaacga

SEQ ID NO: 60643 - DNA, 1169 bp, Zea Mays
ggaacccacttcacacctgggtggctgggtctggctggttccttccttcccgcttccctcgtcaaccaaatcaactcgtgaggtctcctccccatcgccacacccacgcgccgcgcaccgcccgcccgctcgccccgcctccgatccctaatcaatcggcctgaccctagcccgccgccggccgcccacgcccgcccgcctcggctcgtctcaaatcgggcgccccaggggagcgaggcctcgatcgcggcggaccccgatgctccgcattccggcccctccggcgacgtcggcggcagcggaggcatgatccggtggggactcggcggacctgccagccatggacgccaccgcacgcccggccatcgtcatcgacaacggcacagggtatagcaaacttggattttctgggaactcggagccgtctttcactctccccactgtagtagctgcgaatgaatcttttctagaccagacagagctgttgagtagtgcaaactggatagcacagtataatgcaggcatcatggctgatcttgacttttttattggagatgaggctttatcgcggcttaggtctagtgggctgtacactttaagaaggccaatccgtcatggtcaggttcatgactgggatacaatggagagattttggcagcaatgtattttcaattatctacgttgcaatcccgaagagcattatttccttcttacagatagtcctgtcagtacacctgaaagtcgtgaatgtacaggagaaataatgttcgaaaccttcaatgtccctggactatatatttccgttcaatctgttctcagcctttctgctggatatgcctatctgaaaagtatttctgatgacgattcagatactgtgtctgatatgacaggggtagtagttgatattggggatggagctccacaaattgtgccagttgtaaatggctatgtaatcgggagtagcataaagtcttttcctttctccggaagtgatgtaacccagtttgtttcacagcttttacaggtacaccatgctctccaatttttgttgtgattaccttcagatgcaaaaatttctcatattgttcataaatagggctgtatctatctctgattctgtgcttttaaaccaatgttttcaagtcggacgatttgctagtcgttctgac

SEQ ID NO: 60644 - DNA, 1093 bp, Zea Mays
attctaatgagcatgtggttactggaatagtcaggcttggggctaaatgcctgtctgcaattcatgcatatgattgcacactggaacagttggatattgaatctgctcagttgaagtttgatgatatactgaattcctcttcactagatggtgcttgtgacaagatcaaaagcttagccaaggctaaagaacttgattcatctctaattcttctcattaacagagcttgggctgctgcaaaagaatctacaactatgaatgataaggtcaaggacataatgtatcatatttatacaactacaaaagaaagcctcaagagcatctcacctccggagatgaagctgctgaagtatttgctgaatattgaagagcctgaagagagatttggtgctcttgcaactgctttctctcccggagatgggcgtgaagctaaggatgaagatgctctatacaccgaactccacaaatggatcaaaatgcttctcgactcataccatctcaacaaggaggagacggattttatggatgcgagaaagatgagcgacccggtgatcatccaaaggctaaccttgctgaaggagatgatcgaggaagaatacatgaagcggtatatacatcctgaggaggaagaagaacccatggacgacagctagcaccagaatgctctgagcgaagcgagcctgtatgtgtaacgccgactcggaacaaacggtgaagatttagaagggacattctaatcgctgccaacgttgacgatccatataagtagtagatagccgatgccctgctccttttttttacgaggcgatggatggtaaatttgtagcatggcaatggcatcatcaggaatggtactttctgttacatgtgtaaagctcaggatttgttttgttcttaggttcgcaattttaaagatgacacgtttaattctggagtctctgatttggacaatcctaagaaaatggttctttcagagtataaagtgcctaccagtgaagacatagcttacatgtatgttggattgatgatggtgcaaaacttgagaacttcccgcagaagtcacaacatgaagccaccttttcatactttttat

SEQ ID NO: 60645 - DNA, 1786 bp, Zea Mays
tccactccgccgctcaccggcaggtccattccgttcggccggctgttccccaccacggcgagcgcgagctgcgctgccggtgtcccacgcggtgactgggactcggcgaggcagcggtcccggcgtccacatcgcgcgcggcgaggcaagcgccaagcgaggcgtcggccagcccgctggtccagctgttgctggattgctgctcgagcttggcgaggccagcccgcagtccgccacccgctcgttcagccggttcctctcaccgcgctgccaccgatggcgacgaacctgggcgtcttctgccgtgctccccgaccctcgcccgcgtcaacggccgccgccccctcgcagtccctctctccctcctccgcctccgtacacattccccattcgacccagcgcggccgcctcgccgcagctccaccactgccacgttgtgtagctagtccaaccattgctaatgtgaaagaccaaactgaggctgaagttgcaatggggtacacaatgactgaaatctgcgacaaattcattgagttcttcatgtatatgaaaccagaaacaaaggactggagaaaattattggtgtttagagaggagtggcaaaggtatagagggcacttctacaagcgttgtcaagtgcgcatacatattgaggctgatccctcattgaaacaaaagttggttgtacttgctagaaaagttaaaaaggaatagtcaggcttggggctaaatgcctgtctgcaattcatgcatatgattgcacactggaacagttggatattgaatctgctcagttgaagtttgatgatatactgaattcctcttcactagatggtgcttgtgacaagatcaaaagcttagccaaggctaaagaacttgattcatctctaattcttctcattaacagagcttgggctgctgcaaaagaatctacaactatgaatgataaggtcaaggacataatgtatcatatttatacaactacaaaagaaagcctcaagagcatctcacctccggagatgaagctgctgaagtatttgctgaatattgaagagcctgaagagagatttggtgctcttgcaactgctttctctcccggagatgggcgtgaagctaaggatgaagatgctctatacacgactcccagcgaactccacaaatggatcaaaatgcttctcgactcataccatctcaacaaggaggagacggattttatggatgcgagaaagatgagcgacccggtgatcatccaaaggctaaccttgctgaaggagatgatcgaggaagaatacatgaagcggtatatacatcctgaggaggaagaagaacccatggacgacagctagcaccagaatgctctgagcgaagcgagcctgtatgtgtaacgccgactcggaacaaacggtgaagatttagaagggacattctaatcgctgccaacgttgacgatccatataagtagtagatagccgatgccctgctccttttttttacgaggcgatggatggtaaatttgtagcatggcaatggcatcatcaggaatggtactttctgttacatgtgtaaagctcaggatttgttttgttcttaggttcgcaattttaaagatgacacgtttaattctggagtctctgatttggacaatcctaagaaaatggttctttcagagtataaagtgcctaccagtgaagacatagcttacatgtatgttggattgatgatggtgcaaaacttgagaacttcccgcagaagtcacaacatgaagccaccttttcatactttttat

SEQ ID NO: 60646 - DNA, 1948 bp, Zea Mays
tccactccgccgctcaccggcaggtccattccgttcggccggctgttccccaccacggcgagcgcgagctgcgctgccggtgtcccacgcggtgactgggactcggcgaggcagcggtcccggcgtccacatcgcgcgcggcgaggcaagcgccaagcgaggcgtcggccagcccgctggtccagctgttgctggattgctgctcgagcttggcgaggccagcccgcagtccgccacccgctcgttcagccggttcctctcaccgcgctgccaccgatggcgacgaacctgggcgtcttctgccgtgctccccgaccctcgcccgcgtcaacggccgccgccccctcgcagtccctctctccctcctccgcctccgtacacattccccattcgacccagcgcggccgcctcgccgcagctccaccactgccacgttgtgtagctagtccaaccattgctaatgtgaaagaccaaactgaggctgaagttgcaatggggtacacaatgactgaaatctgcgacaaattcattgagttcttcatgtatatgaaaccagaaacaaaggactggagaaaattattggtgtttagagaggagtggcaaaggtatagagggcacttctacaagcgttgtcaagtgcgcatacatattgaggctgatccctcattgaaacaaaagttggttgtacttgctagaaaagttaaaaagatgatgaaatagagaagtacatggaactcttcactgagctcagagagaaccctgctgatattaatgccattgttgcaagacgacggaaggatttcactggggacttcttccgccatcttaatttccttgtgaatgcttataatggccttgatgagcgagatggaatagtcaggcttggggctaaatgcctgtctgcaattcatgcatatgattgcacactggaacagttggatattgaatctgctcagttgaagtttgatgatatactgaattcctcttcactagatggtgcttgtgacaagatcaaaagcttagccaaggctaaagaacttgattcatctctaattcttctcattaacagagcttgggctgctgcaaaagaatctacaactatgaatgataaggtcaaggacataatgtatcatatttatacaactacaaaagaaagcctcaagagcatctcacctccggagatgaagctgctgaagtatttgctgaatattgaagagcctgaagagagatttggtgctcttgcaactgctttctctcccggagatgggcgtgaagctaaggatgaagatgctctatacacgactcccagcgaactccacaaatggatcaaaatgcttctcgactcataccatctcaacaaggaggagacggattttatggatgcgagaaagatgagcgacccggtgatcatccaaaggctaaccttgctgaaggagatgatcgaggaagaatacatgaagcggtatatacatcctgaggaggaagaagaacccatggacgacagctagcaccagaatgctctgagcgaagcgagcctgtatgtgtaacgccgactcggaacaaacggtgaagatttagaagggacattctaatcgctgccaacgttgacgatccatataagtagtagatagccgatgccctgctccttttttttacgaggcgatggatggtaaatttgtagcatggcaatggcatcatcaggaatggtactttctgttacatgtgtaaagctcaggatttgttttgttcttaggttcgcaattttaaagatgacacgtttaattctggagtctctgatttggacaatcctaagaaaatggttctttcagagtataaagtgcctaccagtgaagacatagcttacatgtatgttggattgatgatggtgcaaaacttgagaacttcccgcagaagtcacaacatgaagccaccttttcatactttttat

SEQ ID NO: 60647 - DNA, 1786 bp, Zea Mays
tgggggtggatgagggagagggagttctgaagcagaccaacacattgccagataagccgtcacctgcaactgctcctgcaacaacagaacagcaatctaacaatttacctgcaaccaggtaaaattcataaaacataactcgagaattaatctattttcaaacagctgcaccgttttaatgcttgattgttgttttttcacagttcagcgtcaaggctggctgccttgcaaaagcttccccagcactttctgaagtttctccaaacaaagaaatcagttaccaaaaaggttcattgtctgtttccgtgtgctctgtttgttctgaaccgctttttttttttttgttttgcttgtgacttttcctttcgttctaggacgttgcgggtataaacaagtggaggtttatgaagctaaaggaacatatgcaaggagataccgacgctgaaaacgaagcgtacgagaggtatacgcagaacgtcgggttactggaggaagcattctgtcccatggaagaagatgctgatgttgatcctgaggctgaagcaacttcttcttcagaggaagaaaggatggacctgttggtttcggcggcaaaggcgaggttgaagtcggataacgaagctgccaatagcttcagggagagggttgccactatcttggaccagaagctgaaggacctgcgcgggagccaaagcgccagtgagggtgacgaaccgtctggcccaagtctggacgatcgtctaaccccgaccccgatgaagttcagcacagcgcagaagatggggagagccacggaactgaacgagctgctgggtaagctgacaggagcacggagcgaggacgatctgaagccttgccgtgatcttgccgagcagctgtttgggaaggaggacggctcctctgttggcaattcgaacagagtggatacggagactgagccgggcgatcaggagtcagctgcagcagtagcacggcgctattccgtcccaacgctgtgcagcaggatggaggtgggtgaggacttcgcctcagagatgaacgatgaattctgctctttgactcaggtggcccagctatgaaacctgaaacctggactaatcgcaatgtgacatttttaggggatttcatcacatttaagcctagtttagaaactcaaatttcatccgaaattcgagtgaactgagggaaaaataaaataatttctctcaatcccctccaactcctgagtatttaagttcctaaactaatccttagggaacttaaatccttttttggaattgaaggggattaaggaaaaatatagttacctcaatgtgctttccaatttagaaggagatttgagtttttggaactcgcactgtagtgtcagcaagtgtttggctgttcgaagtgaggccagagcagtgtgggacgttttgtcgtacccctgtttcttagcccgtatttgttctggtatacacgaaagaagcatggagtgaatggatcgaacacgtcgcctcgaagttgcatggacaattcttgagcagctctctttggtgaagtacagtcagagatgcaaatgggtttgttctgctctttgatgattgggttgcattgcatcccaagttcccgatctgttatctggcagaattactattaggcgtttatctctcttcctgtaaaagtctcggttcattgcggatccagtatgctgatcagagctattatctgaacaggagagagaaccgaagggtgtacagtagagatcttctttcgttcgtctctaattttcaataatagaaatggg

SEQ ID NO: 60648 - DNA, 2216 bp, Zea Mays
aggcagccgcccagccttgaagccgtcagcgtcgacccgcctcacgcttgttcgcccgttctccctcttcccggagttaggtacgacgacgtgccgccgctaggtacctccgcgcgaagacgacgcgccgctggtaggtaggccgtaggcgcgcagcccgcagccgtagagctgcccaggcccggccgactcccgatctgcatctctcggaccgcccgatgccctgcgggctgcgtccagcgtaacctcgcctcccagcgccagggtaaaccggccccagcgagggacgcgcctcaagcggagcccgacagaccggcagctgaaacccttgccaactggctcctggacatgaagcccgccgctgctgcagtcgccaaggtggtggctggtgactcgcctccctctgctgctagtcctgctcctgcgccagcagtggccaacagcaatgggacaccacagaagccgcctcctattcctgccgccgccttcgacatgcccaagccaaacctccggggccttaacaagcccaagtgcatcctgtgtggtaacatcgcccgctcccggtgcccattccagtgttgcaagagctgctgctacaaggctcagaatccttgccacatccatgttctgaagcagaccaacacattgccagataagccgtcacctgcaactgctcctgcaacaacagaacagcaatctaacaatttacctgcaaccagttcagcgtcaaggctggctgccttgcaaaagcttccccagcactttctgaagtttctccaaacaaagaaatcagttaccaaaaaggacgttgcgggtataaacaagtggaggtttatgaagctaaaggaacatatgcaaggagataccgacgctgaaaacgaagcgtacgagaggtatacgcagaacgtcgggttactggaggaagcattctgtcccatggaagaagatgctgatgttgatcctgaggctgaagcaacttcttcttcagaggaagaaaggatggacctgttggtttcggcggcaaaggcgaggttgaagtcggataacgaagctgccaatagcttcagggagagggttgccactatcttggaccagaagctgaaggacctgcgcgggagccaaagcgccagtgagggtgacgaaccgtctggcccaagtctggacgatcgtctaaccccgaccccgatgaagttcagcacagcgcagaagatggggagagccacggaactgaacgagctgctgggtaagctgacaggagcacggagcgaggacgatctgaagccttgccgtgatcttgccgagcagctgtttgggaaggaggacggctcctctgttggcaattcgaacagagtggatacggagactgagccgggcgatcaggagtcagctgcagcagtagcacggcgctattccgtcccaacgctgtgcagcaggatggaggtgggtgaggacttcgcctcagagatgaacgatgaattctgctctttgactcaggtggcccagctatgaaacctgaaacctggactaatcgcaatgtgacatttttaggggatttcatcacatttaagcctagtttagaaactcaaatttcatccgaaattcgagtgaactgagggaaaaataaaataatttctctcaatcccctccaactcctgagtatttaagttcctaaactaatccttagggaacttaaatccttttttggaattgaaggggattaaggaaaaatatagttacctcaatgtgctttccaatttagaaggagatttgagtttttggaactcgcactgtagtgtcagcaagtgtttggctgttcgaagtgaggccagagcagtgtgggacgttttgtcgtacccctgtttcttagcccgtatttgttctggtatacacgaaagaagcatggagtgaatggatcgaacacgtcgcctcgaagttgcatggacaattcttgagcagctctctttggtgaagtacagtcagagatgcaaatgggtttgttctgctctttgatgattgggttgcattgcatcccaagttcccgatctgttatctggcagaattactattaggcgtttatctctcttcctgtaaaagtctcggttcattgcggatccagtatgctgatcagagctattatctgaacaggagagagaaccgaagggtgtacagtagagatcttctttcgttcgtctctaattttcaataatagaaatggg

SEQ ID NO: 60649 - DNA, 3200 bp, Zea Mays
ctgccccttgtttgtttccgtcctcctccacgactccacattccgctgggcgctgtccgatctcctttatttagtggttacagcgccactgccgctactgatagcgccagtcgctctctgcctcattattctcaacgccggcggccaccgcggtcgtggctgcggtctttgttggaatagctaggttgagctgattcggggctgtttgtgggcatacccaggtcgaactgattcgaggctcgttctggtagagtggaatgcgtcggatttgagctgcttagggttgggattggggggtttcggtatttctttttcttttttagctgcagttttcgtccctctcctgtggccttcctttactcccgagtcccgacgacgacaggagcccttcaccggcgacgcacccttcgccgggcacttcaccgccgacgaccacgctcctgatgaaagaggaaatcatgtttgacaaccaaacaaagccatgcagatcgagggttgactccaaaagcaattcaagttctctgaaacctaagtttggatcatcatggggttcccaaattgtcaaagggtttacaacagacaagaaaaccaagaagacagcagcaaatgcaagcaaaaaaccacctcttccaagtgtcgaaaatgttaatcaggccaaccaacagattccgtatcactctagggtgaaaagatcccttattggggatttcccttgttcacctgctggtgctcaagtccacccccatgtctttgattgccacaatattaggtcccctgcatcccatgatctttttcttgagctggatcatctcagagagcagcttcgtgagtcgaaagaaagggaattgacattacagtcagagttgagacagtgcagagaaaacccaaaagtttcagaacttgagaaggagcttgattctatgagggatgaagttgacaggcttgcacgactgaaaatttcattagaagctgagaaaacaagcatatctgaacagttatcagctctatcttctatggaagaacatcatgaagaaaatgtaagattagatagccacggcaatcggatacttactgtagatggggacaatgcaccttcagaaaacttggagtttgaagttgttgaactacgccggttaaacaaagagctacagtttcagaaacgaaatcttgcaattaaactctcttcagctgaatccaaattggctggccttgagaagaatgaagagagtgatattgttgccaaagttcaagctgaggcatcgttgttgaggcatacaaatgcaaacctcagcaagcaagttgagggattgcaaatgagccgactaacagaggttgaggagcttgcttatctacggtggatcaattcttgtctacgccatgagctttgtaactcagatcaagcagctagagcaacgacggatatagattacaatggtggcatggcttttaatgaggatgataatagcgaaggtgatgcaaaaacttccgaggacagttctgatataaaattcagcattgcagaacgcatcaagcagtggtcccagaatgataagagctgccaagcatcgaaaaaggaatcccttcttgatagggcatggattgaagctgcagaagcacgaagcccgacacgtaggcactcactcggtggaccaaagggatgtgcacaagacttcaacatcattaaaagaaggcaatccgatacctttatcagcctcccggatgcgacagatgagtcatttgcctttaataaggatcctgcaatcagggagaagcgtgatcttcttgtagacaagtatgattttggtcgatctgaaagttcaagatttgttctcagcaagccagaagtatgcaaatcacagtgtctggatgttgaaaagcgtgcgttgcgcatccctaatcctccaccaagaccttctgtttctgtgtcaaattctggtccatcaaatggatcgactgtaaatccaccgcgaccaccgccgccgccgccgcctccaaagttttcctcaaaaagtactggggtcatgaagagggcacctcaggttgcagagctctaccattcacttatgagaagggactccaaaaaggatacttccggtggcggaatctgtgaagcagctaattctgcgaatgtgcggagtagcatgattggtgaaatcgagaaccggtcttcccatttgcaagctatcaaggcagatgttgagactcaaggtgaatttgtgaaatcattaatcaaggaggtgactagtgcagcctacaaagatatcgaagatgtggttgcatttgtgaagtggttagatgatgaacttggcttcctagtggatgagagagcagtgttgaagcattttgattggcctgagagaaaggcggacactctacgagaggcagcttttggctaccaggacctgaagaagctggagtcggaagtttcaaactacaaagatgatccacgcctgccctgtgaaatcgcactgaagaaaatggttgcattatctgaaaagaccgagagaggtgtctacagccttctaaggacaagagatgctatgatgaggcagtgcaaggagttcaatatccctacagactggatgcttgataacaatcttattagcaagataaagtttgcttctgtgaaattagcgaagatgtacatgaaaagggttgcaatggagcttcagtacatgggtcctctgaacaaggatccagctctggagtacatgctgcttcaggctgtgagatttgccttcaggatgcatcagtttgctggaggtttcgatccggagaccatggatgcattcgaggagctgaggaacctcgttcacgtcagaaacagcacccagtagctaggacgcggcaccgcaatgtagtgtttgaagaagaggattagttttcagactctcaggcttaccatctcagtaagcgtagcaggcacgatttttggtcgtgtgatgtttgcatgtgttcctgcgtggtgtgtttcagtgtttgcagtgtgtaagatatgtttgttctgtaccgcgtgtggtgggtgggatgaagtgacccgccggcgctggcttttaacctcactgttgccagaaaatagaaaacgcactgggacatgcacatgcttttgttttgtgcctattgagcacagaagtagcggtggggttttgatttgagggtttgtttaggacgtattcaattgctttggatattgtcggaga

SEQ ID NO: 60650 - DNA, 3251 bp, Zea Mays
agcactgccccttgtttgtttccgtcctcctccacgactccacattccgctgggcgctgtccgatctcctttatttagtggttacagcgccactgccgctactgatagcgccagtcgctctctgcctcattattctcaacgccggcggccaccgcggtcgtggctgcggtctttgttggaatagctaggttgagctgattcggggctgtttgtgggcatacccaggtcgaactgattcgaggctcgttctggtagagtggaatgcgtcggatttgagctgcttagggttgggattggggggtttcggtatttctttttcttttttagctgcagttttcgtccctctcctgtggccttcctttactcccgagtcccgacgacgacaggagcccttcaccggcgacgcacccttcgccgggcacttcaccgccgacgaccacgctcctgtgttgaatggtgtttggagtgtggtaaactggtaatcctgggaaaagatgaaagaggaaatcatgtttgacaaccaaacaaagccatgcagatcgagggttgactccaaaagcaattcaagttctctgaaacctaagtttggatcatcatggggttcccaaattgtcaaagggtttacaacagacaagaaaaccaagaagacagcagcaaatgcaagcaaaaaaccacctcttccaagtgtcgaaaatgttaatcaggccaaccaacagattccgtatcactctagggtgaaaagatcccttattggggatttcccttgttcacctgctggtgctcaagtccacccccatgtctttgattgccacaatattaggtcccctgcatcccatgatctttttcttgagctggatcatctcagagagcagcttcgtgagtcgaaagaaagggaattgacattacagtcagagttgagacagtgcagagaaaacccaaaagtttcagaacttgagaaggagcttgattctatgagggatgaagttgacaggcttgcacgactgaaaatttcattagaagctgagaaaacaagcatatctgaacagttatcagctctatcttctatggaagaacatcatgaagaaaatgtaagattagatagccacggcaatcggatacttactgtagatggggacaatgcaccttcagaaaacttggagtttgaagttgttgaactacgccggttaaacaaagagctacagtttcagaaacgaaatcttgcaattaaactctcttcagctgaatccaaattggctggccttgagaagaatgaagagagtgatattgttgccaaagttcaagctgaggcatcgttgttgaggcatacaaatgcaaacctcagcaagcaagttgagggattgcaaatgagccgactaacagaggttgaggagcttgcttatctacggtggatcaattcttgtctacgccatgagctttgtaactcagatcaagcagctagagcaacgacggatatagattacaatggtggcatggcttttaatgaggatgataatagcgaaggtgatgcaaaaacttccgaggacagttctgatataaaattcagcattgcagaacgcatcaagcagtggtcccagaatgataagagctgccaagcatcgaaaaaggaatcccttcttgatagggcatggattgaagctgcagaagcacgaagcccgacacgtaggcactcactcggtggaccaaagggatgtgcacaagacttcaacatcattaaaagaaggcaatccgatacctttatcagcctcccggatgcgacagatgagtcatttgcctttaataaggatcctgcaatcagggagaagcgtgatcttcttgtagacaagtatgattttggtcgatctgaaagttcaagatttgttctcagcaagccagaagtatgcaaatcacagtgtctggatgttgaaaagcgtgcgttgcgcatccctaatcctccaccaagaccttctgtttctgtgtcaaattctggtccatcaaatggatcgactgtaaatccaccgcgaccaccgccgccgccgccgcctccaaagttttcctcaaaaagtactggggtcatgaagagggcacctcaggttgcagagctctaccattcacttatgagaagggactccaaaaaggatacttccggtggcggaatctgtgaagcagctaattctgcgaatgtgcggagtagcatgattggtgaaatcgagaaccggtcttcccatttgcaagctatcaaggcagatgttgagactcaaggtgaatttgtgaaatcattaatcaaggaggtgactagtgcagcctacaaagatatcgaagatgtggttgcatttgtgaagtggttagatgatgaacttggcttcctagtggatgagagagcagtgttgaagcattttgattggcctgagagaaaggcggacactctacgagaggcagcttttggctaccaggacctgaagaagctggagtcggaagtttcaaactacaaagatgatccacgcctgccctgtgaaatcgcactgaagaaaatggttgcattatctgaaaagaccgagagaggtgtctacagccttctaaggacaagagatgctatgatgaggcagtgcaaggagttcaatatccctacagactggatgcttgataacaatcttattagcaagataaagtttgcttctgtgaaattagcgaagatgtacatgaaaagggttgcaatggagcttcagtacatgggtcctctgaacaaggatccagctctggagtacatgctgcttcaggctgtgagatttgccttcaggatgcatcagtttgctggaggtttcgatccggagaccatggatgcattcgaggagctgaggaacctcgttcacgtcagaaacagcacccagtagctaggacgcggcaccgcaatgtagtgtttgaagaagaggattagttttcagactctcaggcttaccatctcagtaagcgtagcaggcacgatttttggtcgtgtgatgtttgcatgtgttcctgcgtggtgtgtttcagtgtttgcagtgtgtaagatatgtttgttctgtaccgcgtgtggtgggtgggatgaagtgacccgccggcgctggcttttaacctcactgttgccagaaaatagaaaacgcactgggacatgcacatgcttttgttttgtgcctattgagcacagaagtagcggtggggttttgatttgagggtttgtttaggacgtattcaattgctttggatattgtcggaga

SEQ ID NO: 60651 - DNA, 3065 bp, Zea Mays
tcgccttctctcttctccacgggagcgaggccgaggccgagacctcgaggcggtcgcgtggcgtctcggaacccgggaggaatccacagaaaaatccgcgcgtggggggccgaatctctgctcctggggcgagccggcgagctgcagttttcgtccctctcctgtggccttcctttactcccgagtcccgacgacgacaggagcccttcaccggcgacgcacccttcgccgggcacttcaccgccgacgaccacgctcctgtgttgaatggtgtttggagtgtggtaaactggtaatcctgggaaaagatgaaagaggaaatcatgtttgacaaccaaacaaagccatgcagatcgagggttgactccaaaagcaattcaagttctctgaaacctaagtttggatcatcatggggttcccaaattgtcaaagggtttacaacagacaagaaaaccaagaagacagcagcaaatgcaagcaaaaaaccacctcttccaagtgtcgaaaatgttaatcaggccaaccaacagattccgtatcactctagggtgaaaagatcccttattggggatttcccttgttcacctgctggtgctcaagtccacccccatgtctttgattgccacaatattaggtcccctgcatcccatgatctttttcttgagctggatcatctcagagagcagcttcgtgagtcgaaagaaagggaattgacattacagtcagagttgagacagtgcagagaaaacccaaaagtttcagaacttgagaaggagcttgattctatgagggatgaagttgacaggcttgcacgactgaaaatttcattagaagctgagaaaacaagcatatctgaacagttatcagctctatcttctatggaagaacatcatgaagaaaatgtaagattagatagccacggcaatcggatacttactgtagatggggacaatgcaccttcagaaaacttggagtttgaagttgttgaactacgccggttaaacaaagagctacagtttcagaaacgaaatcttgcaattaaactctcttcagctgaatccaaattggctggccttgagaagaatgaagagagtgatattgttgccaaagttcaagctgaggcatcgttgttgaggcatacaaatgcaaacctcagcaagcaagttgagggattgcaaatgagccgactaacagaggttgaggagcttgcttatctacggtggatcaattcttgtctacgccatgagctttgtaactcagatcaagcagctagagcaacgacggatatagattacaatggtggcatggcttttaatgaggatgataatagcgaaggtgatgcaaaaacttccgaggacagttctgatataaaattcagcattgcagaacgcatcaagcagtggtcccagaatgataagagctgccaagcatcgaaaaaggaatcccttcttgatagggcatggattgaagctgcagaagcacgaagcccgacacgtaggcactcactcggtggaccaaagggatgtgcacaagacttcaacatcattaaaagaaggcaatccgatacctttatcagcctcccggatgcgacagatgagtcatttgcctttaataaggatcctgcaatcagggagaagcgtgatcttcttgtagacaagtatgattttggtcgatctgaaagttcaagatttgttctcagcaagccagaagtatgcaaatcacagtgtctggatgttgaaaagcgtgcgttgcgcatccctaatcctccaccaagaccttctgtttctgtgtcaaattctggtccatcaaatggatcgactgtaaatccaccgcgaccaccgccgccgccgccgcctccaaagttttcctcaaaaagtactggggtcatgaagagggcacctcaggttgcagagctctaccattcacttatgagaagggactccaaaaaggatacttccggtggcggaatctgtgaagcagctaattctgcgaatgtgcggagtagcatgattggtgaaatcgagaaccggtcttcccatttgcaagctatcaaggcagatgttgagactcaaggtgaatttgtgaaatcattaatcaaggaggtgactagtgcagcctacaaagatatcgaagatgtggttgcatttgtgaagtggttagatgatgaacttggcttcctagtggatgagagagcagtgttgaagcattttgattggcctgagagaaaggcggacactctacgagaggcagcttttggctaccaggacctgaagaagctggagtcggaagtttcaaactacaaagatgatccacgcctgccctgtgaaatcgcactgaagaaaatggttgcattatctgaaaagaccgagagaggtgtctacagccttctaaggacaagagatgctatgatgaggcagtgcaaggagttcaatatccctacagactggatgcttgataacaatcttattagcaagataaagtttgcttctgtgaaattagcgaagatgtacatgaaaagggttgcaatggagcttcagtacatgggtcctctgaacaaggatccagctctggagtacatgctgcttcaggctgtgagatttgccttcaggatgcatcagtttgctggaggtttcgatccggagaccatggatgcattcgaggagctgaggaacctcgttcacgtcagaaacagcacccagtagctaggacgcggcaccgcaatgtagtgtttgaagaagaggattagttttcagactctcaggcttaccatctcagtaagcgtagcaggcacgatttttggtcgtgtgatgtttgcatgtgttcctgcgtggtgtgtttcagtgtttgcagtgtgtaagatatgtttgttctgtaccgcgtgtggtgggtgggatgaagtgacccgccggcgctggcttttaacctcactgttgccagaaaatagaaaacgcactgggacatgcacatgcttttgttttgtgcctattgagcacagaagtagcggtggggttttgatttgagggtttgtttaggacgtattcaattgctttggatattgtcggaga

SEQ ID NO: 60652 - DNA, 3012 bp, Zea Mays
tcgccttctctcttctccacgggagcgaggccgaggccgagacctcgaggcggtcgcgtggcgtctcggaacccgggaggaatccacagaaaaatccgcgcgtggggggccgaatctctgctcctggggcgagccggcgagttttcgtccctctcctgtggccttcctttactcccgagtcccgacgacgacaggagcccttcaccggcgacgcacccttcgccgggcacttcaccgccgacgaccacgctcctgatgaaagaggaaatcatgtttgacaaccaaacaaagccatgcagatcgagggttgactccaaaagcaattcaagttctctgaaacctaagtttggatcatcatggggttcccaaattgtcaaagggtttacaacagacaagaaaaccaagaagacagcagcaaatgcaagcaaaaaaccacctcttccaagtgtcgaaaatgttaatcaggccaaccaacagattccgtatcactctagggtgaaaagatcccttattggggatttcccttgttcacctgctggtgctcaagtccacccccatgtctttgattgccacaatattaggtcccctgcatcccatgatctttttcttgagctggatcatctcagagagcagcttcgtgagtcgaaagaaagggaattgacattacagtcagagttgagacagtgcagagaaaacccaaaagtttcagaacttgagaaggagcttgattctatgagggatgaagttgacaggcttgcacgactgaaaatttcattagaagctgagaaaacaagcatatctgaacagttatcagctctatcttctatggaagaacatcatgaagaaaatgtaagattagatagccacggcaatcggatacttactgtagatggggacaatgcaccttcagaaaacttggagtttgaagttgttgaactacgccggttaaacaaagagctacagtttcagaaacgaaatcttgcaattaaactctcttcagctgaatccaaattggctggccttgagaagaatgaagagagtgatattgttgccaaagttcaagctgaggcatcgttgttgaggcatacaaatgcaaacctcagcaagcaagttgagggattgcaaatgagccgactaacagaggttgaggagcttgcttatctacggtggatcaattcttgtctacgccatgagctttgtaactcagatcaagcagctagagcaacgacggatatagattacaatggtggcatggcttttaatgaggatgataatagcgaaggtgatgcaaaaacttccgaggacagttctgatataaaattcagcattgcagaacgcatcaagcagtggtcccagaatgataagagctgccaagcatcgaaaaaggaatcccttcttgatagggcatggattgaagctgcagaagcacgaagcccgacacgtaggcactcactcggtggaccaaagggatgtgcacaagacttcaacatcattaaaagaaggcaatccgatacctttatcagcctcccggatgcgacagatgagtcatttgcctttaataaggatcctgcaatcagggagaagcgtgatcttcttgtagacaagtatgattttggtcgatctgaaagttcaagatttgttctcagcaagccagaagtatgcaaatcacagtgtctggatgttgaaaagcgtgcgttgcgcatccctaatcctccaccaagaccttctgtttctgtgtcaaattctggtccatcaaatggatcgactgtaaatccaccgcgaccaccgccgccgccgccgcctccaaagttttcctcaaaaagtactggggtcatgaagagggcacctcaggttgcagagctctaccattcacttatgagaagggactccaaaaaggatacttccggtggcggaatctgtgaagcagctaattctgcgaatgtgcggagtagcatgattggtgaaatcgagaaccggtcttcccatttgcaagctatcaaggcagatgttgagactcaaggtgaatttgtgaaatcattaatcaaggaggtgactagtgcagcctacaaagatatcgaagatgtggttgcatttgtgaagtggttagatgatgaacttggcttcctagtggatgagagagcagtgttgaagcattttgattggcctgagagaaaggcggacactctacgagaggcagcttttggctaccaggacctgaagaagctggagtcggaagtttcaaactacaaagatgatccacgcctgccctgtgaaatcgcactgaagaaaatggttgcattatctgaaaagaccgagagaggtgtctacagccttctaaggacaagagatgctatgatgaggcagtgcaaggagttcaatatccctacagactggatgcttgataacaatcttattagcaagataaagtttgcttctgtgaaattagcgaagatgtacatgaaaagggttgcaatggagcttcagtacatgggtcctctgaacaaggatccagctctggagtacatgctgcttcaggctgtgagatttgccttcaggatgcatcagtttgctggaggtttcgatccggagaccatggatgcattcgaggagctgaggaacctcgttcacgtcagaaacagcacccagtagctaggacgcggcaccgcaatgtagtgtttgaagaagaggattagttttcagactctcaggcttaccatctcagtaagcgtagcaggcacgatttttggtcgtgtgatgtttgcatgtgttcctgcgtggtgtgtttcagtgtttgcagtgtgtaagatatgtttgttctgtaccgcgtgtggtgggtgggatgaagtgacccgccggcgctggcttttaacctcactgttgccagaaaatagaaaacgcactgggacatgcacatgcttttgttttgtgcctattgagcacagaagtagcggtggggttttgatttgagggtttgtttaggacgtattcaattgctttggatattgtcggaga

SEQ ID NO: 60653 - DNA, 3062 bp, Zea Mays
cactcgccttctctcttctccacgggagcgaggccgaggccgagacctcgaggcggtcgcgtggcgtctcggaacccgggaggaatccacagaaaaatccgcgcgtggggggccgaatctctgctcctggggcgagccggcgagttttcgtccctctcctgtggccttcctttactcccgagtcccgacgacgacaggagcccttcaccggcgacgcacccttcgccgggcacttcaccgccgacgaccacgctcctgtgttgaatggtgtttggagtgtggtaaactggtaatcctgggaaaagatgaaagaggaaatcatgtttgacaaccaaacaaagccatgcagatcgagggttgactccaaaagcaattcaagttctctgaaacctaagtttggatcatcatggggttcccaaattgtcaaagggtttacaacagacaagaaaaccaagaagacagcagcaaatgcaagcaaaaaaccacctcttccaagtgtcgaaaatgttaatcaggccaaccaacagattccgtatcactctagggtgaaaagatcccttattggggatttcccttgttcacctgctggtgctcaagtccacccccatgtctttgattgccacaatattaggtcccctgcatcccatgatctttttcttgagctggatcatctcagagagcagcttcgtgagtcgaaagaaagggaattgacattacagtcagagttgagacagtgcagagaaaacccaaaagtttcagaacttgagaaggagcttgattctatgagggatgaagttgacaggcttgcacgactgaaaatttcattagaagctgagaaaacaagcatatctgaacagttatcagctctatcttctatggaagaacatcatgaagaaaatgtaagattagatagccacggcaatcggatacttactgtagatggggacaatgcaccttcagaaaacttggagtttgaagttgttgaactacgccggttaaacaaagagctacagtttcagaaacgaaatcttgcaattaaactctcttcagctgaatccaaattggctggccttgagaagaatgaagagagtgatattgttgccaaagttcaagctgaggcatcgttgttgaggcatacaaatgcaaacctcagcaagcaagttgagggattgcaaatgagccgactaacagaggttgaggagcttgcttatctacggtggatcaattcttgtctacgccatgagctttgtaactcagatcaagcagctagagcaacgacggatatagattacaatggtggcatggcttttaatgaggatgataatagcgaaggtgatgcaaaaacttccgaggacagttctgatataaaattcagcattgcagaacgcatcaagcagtggtcccagaatgataagagctgccaagcatcgaaaaaggaatcccttcttgatagggcatggattgaagctgcagaagcacgaagcccgacacgtaggcactcactcggtggaccaaagggatgtgcacaagacttcaacatcattaaaagaaggcaatccgatacctttatcagcctcccggatgcgacagatgagtcatttgcctttaataaggatcctgcaatcagggagaagcgtgatcttcttgtagacaagtatgattttggtcgatctgaaagttcaagatttgttctcagcaagccagaagtatgcaaatcacagtgtctggatgttgaaaagcgtgcgttgcgcatccctaatcctccaccaagaccttctgtttctgtgtcaaattctggtccatcaaatggatcgactgtaaatccaccgcgaccaccgccgccgccgccgcctccaaagttttcctcaaaaagtactggggtcatgaagagggcacctcaggttgcagagctctaccattcacttatgagaagggactccaaaaaggatacttccggtggcggaatctgtgaagcagctaattctgcgaatgtgcggagtagcatgattggtgaaatcgagaaccggtcttcccatttgcaagctatcaaggcagatgttgagactcaaggtgaatttgtgaaatcattaatcaaggaggtgactagtgcagcctacaaagatatcgaagatgtggttgcatttgtgaagtggttagatgatgaacttggcttcctagtggatgagagagcagtgttgaagcattttgattggcctgagagaaaggcggacactctacgagaggcagcttttggctaccaggacctgaagaagctggagtcggaagtttcaaactacaaagatgatccacgcctgccctgtgaaatcgcactgaagaaaatggttgcattatctgaaaagaccgagagaggtgtctacagccttctaaggacaagagatgctatgatgaggcagtgcaaggagttcaatatccctacagactggatgcttgataacaatcttattagcaagataaagtttgcttctgtgaaattagcgaagatgtacatgaaaagggttgcaatggagcttcagtacatgggtcctctgaacaaggatccagctctggagtacatgctgcttcaggctgtgagatttgccttcaggatgcatcagtttgctggaggtttcgatccggagaccatggatgcattcgaggagctgaggaacctcgttcacgtcagaaacagcacccagtagctaggacgcggcaccgcaatgtagtgtttgaagaagaggattagttttcagactctcaggcttaccatctcagtaagcgtagcaggcacgatttttggtcgtgtgatgtttgcatgtgttcctgcgtggtgtgtttcagtgtttgcagtgtgtaagatatgtttgttctgtaccgcgtgtggtgggtgggatgaagtgacccgccggcgctggcttttaacctcactgttgccagaaaatagaaaacgcactgggacatgcacatgcttttgttttgtgcctattgagcacagaagtagcggtggggttttgatttgagggtttgtttaggacgtattcaattgctttggatattgtcggaga

SEQ ID NO: 60654 - DNA, 2980 bp, Zea Mays
ctccgatttcaaaattcaaaagtccccttcctcactcgccttctctcttctccacgggagcgaggccgaggccgagacctcgaggcggtcgcgtggcgtctcggaacccgggaggaatccacagaaaaatccgcgcgtggggggccgaatctctgctcctggggcgagccggcgagtgttgaatggtgtttggagtgtggtaaactggtaatcctgggaaaagatgaaagaggaaatcatgtttgacaaccaaacaaagccatgcagatcgagggttgactccaaaagcaattcaagttctctgaaacctaagtttggatcatcatggggttcccaaattgtcaaagggtttacaacagacaagaaaaccaagaagacagcagcaaatgcaagcaaaaaaccacctcttccaagtgtcgaaaatgttaatcaggccaaccaacagattccgtatcactctagggtgaaaagatcccttattggggatttcccttgttcacctgctggtgctcaagtccacccccatgtctttgattgccacaatattaggtcccctgcatcccatgatctttttcttgagctggatcatctcagagagcagcttcgtgagtcgaaagaaagggaattgacattacagtcagagttgagacagtgcagagaaaacccaaaagtttcagaacttgagaaggagcttgattctatgagggatgaagttgacaggcttgcacgactgaaaatttcattagaagctgagaaaacaagcatatctgaacagttatcagctctatcttctatggaagaacatcatgaagaaaatgtaagattagatagccacggcaatcggatacttactgtagatggggacaatgcaccttcagaaaacttggagtttgaagttgttgaactacgccggttaaacaaagagctacagtttcagaaacgaaatcttgcaattaaactctcttcagctgaatccaaattggctggccttgagaagaatgaagagagtgatattgttgccaaagttcaagctgaggcatcgttgttgaggcatacaaatgcaaacctcagcaagcaagttgagggattgcaaatgagccgactaacagaggttgaggagcttgcttatctacggtggatcaattcttgtctacgccatgagctttgtaactcagatcaagcagctagagcaacgacggatatagattacaatggtggcatggcttttaatgaggatgataatagcgaaggtgatgcaaaaacttccgaggacagttctgatataaaattcagcattgcagaacgcatcaagcagtggtcccagaatgataagagctgccaagcatcgaaaaaggaatcccttcttgatagggcatggattgaagctgcagaagcacgaagcccgacacgtaggcactcactcggtggaccaaagggatgtgcacaagacttcaacatcattaaaagaaggcaatccgatacctttatcagcctcccggatgcgacagatgagtcatttgcctttaataaggatcctgcaatcagggagaagcgtgatcttcttgtagacaagtatgattttggtcgatctgaaagttcaagatttgttctcagcaagccagaagtatgcaaatcacagtgtctggatgttgaaaagcgtgcgttgcgcatccctaatcctccaccaagaccttctgtttctgtgtcaaattctggtccatcaaatggatcgactgtaaatccaccgcgaccaccgccgccgccgccgcctccaaagttttcctcaaaaagtactggggtcatgaagagggcacctcaggttgcagagctctaccattcacttatgagaagggactccaaaaaggatacttccggtggcggaatctgtgaagcagctaattctgcgaatgtgcggagtagcatgattggtgaaatcgagaaccggtcttcccatttgcaagctatcaaggcagatgttgagactcaaggtgaatttgtgaaatcattaatcaaggaggtgactagtgcagcctacaaagatatcgaagatgtggttgcatttgtgaagtggttagatgatgaacttggcttcctagtggatgagagagcagtgttgaagcattttgattggcctgagagaaaggcggacactctacgagaggcagcttttggctaccaggacctgaagaagctggagtcggaagtttcaaactacaaagatgatccacgcctgccctgtgaaatcgcactgaagaaaatggttgcattatctgaaaagaccgagagaggtgtctacagccttctaaggacaagagatgctatgatgaggcagtgcaaggagttcaatatccctacagactggatgcttgataacaatcttattagcaagataaagtttgcttctgtgaaattagcgaagatgtacatgaaaagggttgcaatggagcttcagtacatgggtcctctgaacaaggatccagctctggagtacatgctgcttcaggctgtgagatttgccttcaggatgcatcagtttgctggaggtttcgatccggagaccatggatgcattcgaggagctgaggaacctcgttcacgtcagaaacagcacccagtagctaggacgcggcaccgcaatgtagtgtttgaagaagaggattagttttcagactctcaggcttaccatctcagtaagcgtagcaggcacgatttttggtcgtgtgatgtttgcatgtgttcctgcgtggtgtgtttcagtgtttgcagtgtgtaagatatgtttgttctgtaccgcgtgtggtgggtgggatgaagtgacccgccggcgctggcttttaacctcactgttgccagaaaatagaaaacgcactgggacatgcacatgcttttgttttgtgcctattgagcacagaagtagcggtggggttttgatttgagggtttgtttaggacgtattcaattgctttggatattgtcggaga

SEQ ID NO: 60655 - DNA, 687 bp, Zea Mays
ccggattttgacgctgctgtgcgtcgatctgtgattgatcgaatggatacattatagatagatgcacatgtagatctatctaaacgactcgattataacagccggtggagcctttatttcttgccgacaaaatgaacggaataattacatcgcaaatggcacattattgaagatatacccaaaaccaccagccatgtgctctttgaacacccgcaagcagatcaactcgatcgaaacgctgctgccagctgttcattcgggacttttgccggatcctgctacaataattaaaaaaaaatggaccgagcaggtcgtttggattttgtgttcacctatcttgtgtcccgtgctagcaaagttctccttgctgccgagagagagagggagagccaacaggctggctggcgagcgtctcgtgtggctagggaacctggcaatagtccccaaacacgacacgcccttggtatcccgctgcctttgcacatcctgatccatctatcaaagcttcacgcatcatacgtaaatgcatgcatgtgccaaccgtagcattgttgccaatgcatcttgcacacccaagcagaaagatgtgcatggttttctatatcaccagtgttctagctaactgacatgtatgaatgagtgaatagatgcgatgatgggtggaagtaagtagagaggttgcccggc

SEQ ID NO: 60656 - DNA, 2067 bp, Zea Mays
gcttggctaggcttcaagtcctcgccgtcgccgagatagttgaaaaggacccaaacaaggctgtaccattgttttgggcagctataaacagtggtgaccggatagagagcgcattgaaggatatggccaatgtactaaaacaagcaaaccggtctgaagaagccattgaggcaataagatcctttcgtgatcgatgtccctatgaagctcaggagtcacttgacaatattcttctagatctatacaagaaatgtggtaggacagatgagcagattgaaatgctgacattaaagctgcgaattgttgatgaggagctagcttctggtcggtggaaaacaaaactgtctaaatctcatggaagagtagtctacctttctctcagagatgaaaaagcaaggctattggggaaccttgcttgggcctatatgcagtccgaaaattatgaggaagcggagatgctctataggcaagctcttgctatagaagctgactacaacaaagagtgtaacttggccatctgtttgatgaagactggaaagttggctgaagctaaatatctgattcatgctataccttacaactgtaatgatgaaagtcatgttaagtctctctcccgggctactgaaatgcttagggaatttgacttgcaatccctcccctctcccataactcaggcgaagtccaaagaaccacggaattttgttgctgatgatgtggagatgcttgtagatctacagccacaaacactatcaactccttttagtgaactgaaatataaagaagcacatatttcagtttcacaaaatgcagagaagcatgagaactgcaattcatgccttccatctcccataactcaattgagacgggaagaaccacacactatggttactgctgatgccgaaaagaatgaaggctttgcagagttccaagatctttctcgactgttcaatgatgctgccacgcctcattcagtacttgagaaactacgaaagaggctagttaaagaggcaccaaaagtcagtattcatgatcaaattcagactcctccaactgaaagcttgccaaactctgaaagaaacctagatgctagtgagacttccgtgcaagaagggaagctattgaccaaaggtgttagaaaaacatggtctgacatggtggatgaagaggaacagcaattgggtgatgacaaaccatgggctgacatggtggcgaaggatgaccagcaattgggtgatggcaagtcaacacatggtgttggaattactgaacaaaacgagagcagtaagcatgcaagtaagctggagtatagaacaccatcgtcctctcaagaaagcaggacccatcaaagaccagtcatgggtggtcaactgcaaggttcttcagcaggttcatggagacgcagtgactccaaaatctacatggataagaacgtgaactgggatcttgtgaggactgctccgacatggagcaggcataaggtacatgaccacaacaatcgagtttggcaaaggcttcacacaattcatccccgtgagagagcctcaggcacgaagcaagtaccacggagaagcaacacatctcagcgcgctctttttcctgactggaaatcaaaaggtgaaggatatggccatggctatgttccgtttgatgataacgaacacactcagtgttccagtcacattgaggccgccactcatcgctggcataataatgaggcaagtacagggtcatggaggccacagaaccgtctgcgggtcttccaggaaatcacaaatgagatcaaccaaaatgttgtgtaactatgtccttgttccttgctgtcgatggaagttctcctttccagcaacatgttgtttgcactacaaatgggatctgtgaaatagttcagcaataaacagtttttcgcttcagttgcttctgtttttgagattcagcatagctacagaaaactatgtgaatatcttcactgcccaccgttcatactactggcacgttggtggatcgtgatatctgtatatattttctttatcactagtgtgccaaagtatctgtaaaaaaaaactggtg

SEQ ID NO: 60657 - DNA, 2719 bp, Zea Mays
ttccttgcctcgctgctgtttcttgctctacggattcactggtggtggtggtggtggcggagctctccgtcctaggaggcgctggtggttttccggattgtttcgtctcgcccctcccctcttggtttgagcttggtggcgatcacaccaaactcacatacagatggagatggcagagaccttgcatgtattgcccgatgatggcaatggaagtgctgcagttcagactgagccttattgccatgaagacgccattgaggacatggaatctttcttggatgaagtaaacgacagggttcatgtttcaggaattgtgactggtgctatcatcaaggggatcctaagtgatgtgcggcaagaagctgctagccaaattgctctcaaggatgcagagatatcatcactgaaccagaagctgcagcagccagtaaatggcagcttgagtttatctgagggacgggataaaagacatgatgagttttatagtctccgccagcagcttgactccatttccaagtcactgttgaattctgaatgggggctatcgggatcacagcataactttgaagattcagaaaatgccagcaagcagcaggacaaagaaaattcctctagaaatggtgtagcaaagaccattcatcctggagactctaaagaagaagtttttggtgatccgaaactcttggatcacatggataaggttgctttgatagcccatttcaataaatcaatgaatgagatgaaaaggcagcatgattcagttctgtaccagaggacggaagagatattcaaactgaagcgtgaaatcctgaagaaggatggatcaaacccttttcatttacgaaataacaaagaacttgagcaaacaaggaagaaaattgaggaagtcatctcaaagttggatgtgctcctcctggagaataaaagagcctctgtccgtatcaagtcaaatgcaattcctggtcaacaagataagaacaatgtattaggttctgaaatcgagcaactagaaagcggtgcaagtaataatgaagactaccattgctctattccaactcactcatcacattttgcatccagagaggcagatcatgaactgaatattgtaaggcctcaatttgacgttgaagatgccagaattgcagccacctttagagaagaaatagaaaggattatcataaaagagttcattagtgaaataaacatagaattgcatggttatgagattgagggtggtatgaagcaggaagtttgctcaataattcacaatgaggctattgctagagcaatgtcaaacattgattctttgttgttgaagtacgaggagaaaaagggtcatgctgaagaggaatctctacataagcaaaagattgaaaaactgaaactaattgtggattccttcactgaagtattgagtgaaaaggagaaatttgtatcacagattggattggaagcgatgcagactcgcgtggagtcaatgtgttgtgaacttgatttgttaagggacaaagtggcaaagcaagattcctacctatctgaaaagaacagggaatttgatgccattatgtgcaggttggagcaagctcagcagcatgttcaacacaatgatgttaccttggttgagctgaatgatagacttagaaccatttcaaactctctaaaagacctagagaaacagaatcaagctctacattatgccatggaagaaaaagagaagatgctaacatctgctgtttccaaagacaatgatatgagagaattcatggaaaatcttgttaaatctatcaaagattttgaaattgtcatgatgaatcagcaggctgttgttgcaaataaagtcgatcatcatgaatcaaggttctgtttattaaaagaacaatgtaaacaccttgcaaaagaaggcaatcttttaagaaagaaggccttacgatacaaagagatatctgagacaagagactctaatcttcagaaagctgaacttgaggtggatttgcttggtgatgaggttgaggccttaacggatcttcttgcaaaaatctatactgcacttgatcactattctccagtactgcaacactacaccggcgttatggagaccttgagcatgattaagaagcacattagcatggcgaagtaaaatgcttctggtcggcttgacactgtagaattgtaggtttgacagcaggcttccagtggtttgacataagtttgtagaattgtagatggcagcaagcttttgtttccgactcaaggactaggtgattacccccttttgcaggcagagtagtggtcttggtagcttttgagcactctgtaaatgacccaacccaaccgtagctattagttcttgtgcttggcttttgatgctatggcctatgggctttgccacctgctatgctgggttgcaaaggtgaactcttgtaacattggtagccgagaggatgttagagaagctgagttttcatgtggatctttattttttcctggcacaatggtagataaatctacactatagcctggcgttcaggctttgtagtgatcatgcgtgccaccaaagtaacatttacattgaaatgcaagtaggctgtaatgcagacgattcagaatctgcactatcctgattggatgaacggacgacctcggttaccaggattcatgtaatttcaaacaactatgtgcaagctcatcccttcaatgtaataatacattgaagagaatt

SEQ ID NO: 60658 - DNA, 2543 bp, Zea Mays
ggggactggaggtgaaaggcggctgctttcgctgtctccccaccacccgcgcacagtggcggcgctgacggtggcaggaaaggaaagtggcgatcacaccaaactcacatacagatggagatggcagagaccttgcatgtattgcccgatgatggcaatggaagtgctgcagttcagactgagccttattgccatgaagacgccattgaggacatggaatctttcttggatgaagtaaacgacagggttcatgtttcaggaattgtgactggtgctatcatcaaggggatcctaagtgatgtgcggcaagaagctgctagccaaattgctctcaaggatgcagagatatcatcactgaaccagaagctgcagcagccagtaaatggcagcttgagtttatctgagggacgggataaaagacatgatgagttttatagtctccgccagcagcttgactccatttccaagtcactgttgaattctgaatgggggctatcgggatcacagcataactttgaagattcagaaaatgccagcaagcagcaggacaaagaaaattcctctagaaatggtgtagcaaagaccattcatcctggagactctaaagaagaagtttttggtgatccgaaactcttggatcacatggataaggttgctttgatagcccatttcaataaatcaatgaatgagatgaaaaggcagcatgattcagttctgtaccagaggacggaagagatattcaaactgaagcgtgaaatcctgaagaaggatggatcaaacccttttcatttacgaaataacaaagaacttgagcaaacaaggaagaaaattgaggaagtcatctcaaagttggatgtgctcctcctggagaataaaagagcctctgtccgtatcaagtcaaatgcaattcctggtcaacaagataagaacaatgtattaggttctgaaatcgagcaactagaaagcggtgcaagtaataatgaagactaccattgctctattccaactcactcatcacattttgcatccagagaggcagatcatgaactgaatattgtaaggcctcaatttgacgttgaagatgccagaattgcagccacctttagagaagaaatagaaaggattatcataaaagagttcattagtgaaataaacatagaattgcatggttatgagattgagggtggtatgaagcaggaagtttgctcaataattcacaatgaggctattgctagagcaatgtcaaacattgattctttgttgttgaagtacgaggagaaaaagggtcatgctgaagaggaatctctacataagcaaaagattgaaaaactgaaactaattgtggattccttcactgaagtattgagtgaaaaggagaaatttgtatcacagattggattggaagcgatgcagactcgcgtggagtcaatgtgttgtgaacttgatttgttaagggacaaagtggcaaagcaagattcctacctatctgaaaagaacagggaatttgatgccattatgtgcaggttggagcaagctcagcagcatgttcaacacaatgatgttaccttggttgagctgaatgatagacttagaaccatttcaaactctctaaaagacctagagaaacagaatcaagctctacattatgccatggaagaaaaagagaagatgctaacatctgctgtttccaaagacaatgatatgagagaattcatggaaaatcttgttaaatctatcaaagattttgaaattgtcatgatgaatcagcaggctgttgttgcaaataaagtcgatcatcatgaatcaaggtggatttgcttggtgatgaggttgaggccttaacggatcttcttgcaaaaatctatactgcacttgatcactattctccagtactgcaacactacaccggcgttatggagaccttgagcatgattaagaagcacattagcatggcgaagtaaaatgcttctggtcggcttgacactgtagaattgtaggtttgacagcaggcttccagtggtttgacataagtttgtagaattgtagatggcagcaagcttttgtttccgactcaaggactaggtgattacccccttttgcaggcagagtagtggtcttggtagcttttgagcactctgtaaatgacccaacccaaccgtagctattagttcttgtgcttggcttttgatgctatggcctatgggctttgccacctgctatgctgggttgcaaaggtgaactcttgtaacattggtagccgagaggatgttagagaagctgagttttcatgtggatctttattttttcctggcacaatggtagataaatctacactatagcctggcgttcaggctttgtagtgatcatgcgtgccaccaaagtaacatttacattgaaatgcaagtaggctgtaatgcagacgattcagaatctgcactatcctgattggatgaacggacgacctcggttaccaggattcatgtaatttcaaacaactatgtgcaagctcatcccttcaatgtaataatacattgaagagaatt

SEQ ID NO: 60659 - DNA, 2773 bp, Zea Mays
gggccggcctcacggcggtggcacttgagcagcaactacagtcaaccttcaagagataaccttagcacgttaacggcggcggcggtgagaaaaggcgggggagggggactggaggtgaaaggcggctgctttcgctgtctccccaccacccgcgcacagtggcggcgctgacggtggcaggaaaggaaagtggcgatcacaccaaactcacatacagatggagatggcagagaccttgcatgtattgcccgatgatggcaatggaagtgctgcagttcagactgagccttattgccatgaagacgccattgaggacatggaatctttcttggatgaagtaaacgacagggttcatgtttcaggaattgtgactggtgctatcatcaaggggatcctaagtgatgtgcggcaagaagctgctagccaaattgctctcaaggatgcagagatatcatcactgaaccagaagctgcagcagccagtaaatggcagcttgagtttatctgagggacgggataaaagacatgatgagttttatagtctccgccagcagcttgactccatttccaagtcactgttgaattctgaatgggggctatcgggatcacagcataactttgaagattcagaaaatgccagcaagcagcaggacaaagaaaattcctctagaaatggtgtagcaaagaccattcatcctggagactctaaagaagaagtttttggtgatccgaaactcttggatcacatggataaggttgctttgatagcccatttcaataaatcaatgaatgagatgaaaaggcagcatgattcagttctgtaccagaggacggaagagatattcaaactgaagcgtgaaatcctgaagaaggatggatcaaacccttttcatttacgaaataacaaagaacttgagcaaacaaggaagaaaattgaggaagtcatctcaaagttggatgtgctcctcctggagaataaaagagcctctgtccgtatcaagtcaaatgcaattcctggtcaacaagataagaacaatgtattaggttctgaaatcgagcaactagaaagcggtgcaagtaataatgaagactaccattgctctattccaactcactcatcacattttgcatccagagaggcagatcatgaactgaatattgtaaggcctcaatttgacgttgaagatgccagaattgcagccacctttagagaagaaatagaaaggattatcataaaagagttcattagtgaaataaacatagaattgcatggttatgagattgagggtggtatgaagcaggaagtttgctcaataattcacaatgaggctattgctagagcaatgtcaaacattgattctttgttgttgaagtacgaggagaaaaagggtcatgctgaagaggaatctctacataagcaaaagattgaaaaactgaaactaattgtggattccttcactgaagtattgagtgaaaaggagaaatttgtatcacagattggattggaagcgatgcagactcgcgtggagtcaatgtgttgtgaacttgatttgttaagggacaaagtggcaaagcaagattcctacctatctgaaaagaacagggaatttgatgccattatgtgcaggttggagcaagctcagcagcatgttcaacacaatgatgttaccttggttgagctgaatgatagacttagaaccatttcaaactctctaaaagacctagagaaacagaatcaagctctacattatgccatggaagaaaaagagaagatgctaacatctgctgtttccaaagacaatgatatgagagaattcatggaaaatcttgttaaatctatcaaagattttgaaattgtcatgatgaatcagcaggctgttgttgcaaataaagtcgatcatcatgaatcaaggttctgtttattaaaagaacaatgtaaacaccttgcaaaagaaggcaatcttttaagaaagaaggccttacgatacaaagagatatctgagacaagagactctaatcttcagaaagctgaacttgaggtggatttgcttggtgatgaggttgaggccttaacggatcttcttgcaaaaatctatactgcacttgatcactattctccagtactgcaacactacaccggcgttatggagaccttgagcatgattaagaagcacattagcatggcgaagtaaaatgcttctggtcggcttgacactgtagaattgtaggtttgacagcaggcttccagtggtttgacataagtttgtagaattgtagatggcagcaagcttttgtttccgactcaaggactaggtgattacccccttttgcaggcagagtagtggtcttggtagcttttgagcactctgtaaatgacccaacccaaccgtagctattagttcttgtgcttggcttttgatgctatggcctatgggctttgccacctgctatgctgggttgcaaaggtgaactcttgtaacattggtagccgagaggatgttagagaagctgagttttcatgtggatctttattttttcctggcacaatggtagataaatctacactatagcctggcgttcaggctttgtagtgatcatgcgtgccaccaaagtaacatttacattgaaatgcaagtaggctgtaatgcagacgattcagaatctgcactatcctgattggatgaacggacgacctcggttaccaggattcatgtaatttcaaacaactatgtgcaagctcatcccttcaatgtaataatacattgaagagaatt

SEQ ID NO: 60660 - DNA, 2601 bp, Zea Mays
atcaaatataaatagcatcgtctcactttttttcccaactagtgtgtgatctgtgtgtgagtgtgagattggttcaaattcctatttgaattttagcctttttttactatttaaacatgggagcaggctacccattagtaggtggtaccgtggtagtcagcggtcagcacagccttccctaactatctcgtcaatcgtcagctgcactgcaatctgtggtcgcaacgcaacgtcccccgtcgtggccgcgtgctatcttcctcctccctccctccttgccgcacgcgtcaaaccttgcaaagagagttcggtcgacggcgccagccggcgatggcagcgccgcgccaccgccagggccacattgcgcagtgccttggcaggatcctcgcctgccgcggcagcgccaccgccgccgtcgctgccggcccaggcggccgacggctcaccggcgcggagttcgtcgacggcgtgcggagcctggccgctggcctcgccgaccgcggggtgcgccctggccacgtcgtcgccgccgtcgccctcaacagcgtcgagtacgtgcagctgttcctcgccgtcacctacgccggagccatcatcgcccctctcaactaccgctggagcttcgaggaggcggcgcaggcggtggagctcgtgcggccgacggcgttcgccttcgacggcgcgttcagctcctgggcgcttcggctgatggagggcgacaggttcccatccatcggcctctacctcctcctgggcgatccttgcaggaccggccgcgctgctgcagctgtacccattaccgacgtcacggggagcctcggcggagctacggcagcggcggcgatggagcccgtgtcggctccagacgacattgctctaatatgcttcacatccggaaccacggggcggcccaagggcgtagcgataagccacacgtccttgatcatccagtccctcgccaagatcgccattgtcggctacggcgaggacgatgtttacctgcacacagcgcctctgtgccacatcggaggggtctcgtcgtgcatggcagtcctgatggccggaggctgccacgtcctggcgccgaagttcgacgccaggtcggcgttcgccgccatccaggagcacggagtgacctgcttcatcaccgtccccgcgatcatggctgacctgctgtcctacgctcggaaagaggagatggcgccgggctgcgggaggacgacggtgaccaagattctgaacggcggcggcgggctgccgctccacctcgtaaacgcagcctcgcaatcctttcctcgggctgctattttctcagcttacgggatgaccgaggcctgctcgtctctgacgttcatggccctcaccacgccaaagcttcaagagccggagccggagccggagacccaaccgtgcggccaccacggaggtgtctgcgtcggcaaaccggcgccgcacgttgagatacggatcggcatggatgacgacggcaccaccgccggttcttcgccgaccgggaacgtcttgaccagaggcttgcacaccatggttggctactgggcaaacggcaaggcggactcatccgagtgtgacaggaacggatggcttgacaccggagacactgggtgggtggacgaggagggtaatctgtggctcttgggaaggcacaagggccgcatcaagaccggaggcgaaaatgtttacccggaagaggttgaatcggtgctgtcccagcaccccggagtggcgagagctgtggtggtcggcgtgccggatagccgtctcggggagagagtcgttgcgtgtgtcagcgtcaaggacggctggaactgggtggatgcgagagctgagcacgagcaccgaggcggaggcgaggaggtgtctcctcagatcctccatggccactgcaggacgaaagaactgagcagatttaaggtgccaaggtcttattaccagtggaggcagccatttccggtgaccacgacggggaagatcagaagggaggagctgaagagggaactcctggcagcaattcgactgcccagcaacctgtagctttttgaggcgatgatctgtttttggaccaaatcttggttcagttcgactccgattgaagtcttctgttttttttggtctgtaggtgcttttagcttttacctggttggagtttaagatgcgaaaaaaagagcgtttgattattggaaacctgtaacatccatgacttttcttcaccttgacaaaagaagtcgagtcaatggcaagtcccatgaaattcagagcatccgattcttggagaactgaaaattgttgacgccttttcagagcgccaatcactcaagaagaaccggcggcggtgctctctggtcagccgcggacggtccgcggcctggggctggatggtccgcgacctggtgtgaggcggcggtgctccctggtcagacgcggacggtccgcggcacaggaccggacggtccgcgacctggtgcagcaggagcccgggttccctgcctgacggctggacggtccgcgcgtgcgcaggggcggcagaggatcgctggcggcgcctgaatctcgctcccgggagggaccccgtcggggaggaga

SEQ ID NO: 60661 - DNA, 2622 bp, Zea Mays
atcaaatataaatagcatcgtctcactttttttcccaactagtgtgtgatctgtgtgtgagtgtgagattggttcaaattcctatttgaattttagcctttttttactatttaaacatgggagcaggctacccattagtaggtggtaccgtggtagtcagcggtcagcacagccttccctaactatctcgtcaatcgtcagctgcactgcaatctgtggtcgcaacgcaacgtcccccgtcgtggccgcgtgctatcttcctcctccctccctccttgccgcacgcgtcaaaccttgcaaagagagttcggtcgacggcgccagccggcgatggcagcgccgcgccaccgccagggccacattgcgcagtgccttggcaggatcctcgcctgccgcggcagcgccaccgccgccgtcgctgccggcccaggcggccgacggctcaccggcgcggagttcgtcgacggcgtgcggagcctggccgctggcctcgccgaccgcggggtgcgccctggccacgtcgtcgccgccgtcgccctcaacagcgtcgagtacgtgcagctgttcctcgccgtcacctacgccggagccatcatcgcccctctcaactaccgctggagcttcgaggaggcggcgcaggcggtggagctcgtgcggccgacggcgttcgccttcgacggcgcgttcagctcctgggcgcttcggctgatggagggcgacaggttcccatccatcggcctctacctcctcctgggcgatccttgcaggaccggccgcgctgctgcagctgtacccattaccgacgtcacggggagcctcggcggagctacggcagcggcggcgatggagcccgtgtcggctccagacgacattgctctaatatgcttcacatccggaaccacggggcggcccaagggcgtagcgataagccacacgtccttgatcatccagtccctcgccaagatcgccattgtcggctacggcgaggacgatgtttacctgcacacagcgcctctgtgccacatcggaggggtctcgtcgtgcatggcagtcctgatggccggaggctgccacgtcctggcgccgaagttcgacgccaggtcggcgttcgccgccatccaggagcacggagtgacctgcttcatcaccgtccccgcgatcatggctgacctgctgtcctacgctcggaaagaggagatggcgccgggctgcgggaggacgacggtgaccaagattctgaacggcggcggcgggctgccgctccacctcgtaaacgcagcctcgcaatcctttcctcgggctgctattttctcagcttacgtagctctgtaatctgcaacagggatgaccgaggcctgctcgtctctgacgttcatggccctcaccacgccaaagcttcaagagccggagccggagccggagacccaaccgtgcggccaccacggaggtgtctgcgtcggcaaaccggcgccgcacgttgagatacggatcggcatggatgacgacggcaccaccgccggttcttcgccgaccgggaacgtcttgaccagaggcttgcacaccatggttggctactgggcaaacggcaaggcggactcatccgagtgtgacaggaacggatggcttgacaccggagacactgggtgggtggacgaggagggtaatctgtggctcttgggaaggcacaagggccgcatcaagaccggaggcgaaaatgtttacccggaagaggttgaatcggtgctgtcccagcaccccggagtggcgagagctgtggtggtcggcgtgccggatagccgtctcggggagagagtcgttgcgtgtgtcagcgtcaaggacggctggaactgggtggatgcgagagctgagcacgagcaccgaggcggaggcgaggaggtgtctcctcagatcctccatggccactgcaggacgaaagaactgagcagatttaaggtgccaaggtcttattaccagtggaggcagccatttccggtgaccacgacggggaagatcagaagggaggagctgaagagggaactcctggcagcaattcgactgcccagcaacctgtagctttttgaggcgatgatctgtttttggaccaaatcttggttcagttcgactccgattgaagtcttctgttttttttggtctgtaggtgcttttagcttttacctggttggagtttaagatgcgaaaaaaagagcgtttgattattggaaacctgtaacatccatgacttttcttcaccttgacaaaagaagtcgagtcaatggcaagtcccatgaaattcagagcatccgattcttggagaactgaaaattgttgacgccttttcagagcgccaatcactcaagaagaaccggcggcggtgctctctggtcagccgcggacggtccgcggcctggggctggatggtccgcgacctggtgtgaggcggcggtgctccctggtcagacgcggacggtccgcggcacaggaccggacggtccgcgacctggtgcagcaggagcccgggttccctgcctgacggctggacggtccgcgcgtgcgcaggggcggcagaggatcgctggcggcgcctgaatctcgctcccgggagggaccccgtcggggaggaga

SEQ ID NO: 60662 - DNA, 3023 bp, Zea Mays
atcaaatataaatagcatcgtctcactttttttcccaactagtgtgtgatctgtgtgtgagtgtgagattggttcaaattcctatttgaattttagcctttttttactatttaaacatgggagcaggctacccattagtaggtggtaccgtggtagtcagcggtcagcacagccttccctaactatctcgtcaatcgtcagctgcactgcaatctgtggtcgcaacgcaacgtcccccgtcgtggccgcgtgctatcttcctcctccctccctccttgccgcacgcgtcaaaccttgcaaagagagttcggtcgacggcgccagccggcgatggcagcgccgcgccaccgccagggccacattgcgcagtgccttggcaggatcctcgcctgccgcggcagcgccaccgccgccgtcgctgccggcccaggcggccgacggctcaccggcgcggagttcgtcgacggcgtgcggagcctggccgctggcctcgccgaccgcggggtgcgccctggccacgtcgtcgccgccgtcgccctcaacagcgtcgagtacgtgcagctgttcctcgccgtcacctacgccggagccatcatcgcccctctcaactaccgctgggtgcgtgcgtgctcctccacttcatctccttttctcggttcttacagcacacagcactcactccggcaaagagtgcaagtaagtttcgtcgtcgtctccccctgttctgaagcagagcttcgaggaggcggcgcaggcggtggagctcgtgcggccgacggcgttcgccttcgacggcgcgttcagctcctgggcgcttcggctgatggagggcgacaggttcccatccatcggcctctacctcctcctgggcgatccttgcaggaccggccgcgctgctgcaggttgtgctgtacccattaccgacgtcacggggagcctcggcggagctacggcagcggcggcgatggagcccgtgtcggctccagacgacattgctctaatatgcttcacatccggtgaaaaaaccaggctgttacagaacgaatagaattgaaatcgagaaacttggctacaggatgtatagctgatggtacgtactctgattctgatccaaccaggaaccacggggcggcccaagggcgtagcgataagccacacgtccttgatcatccagtccctcgccaagatcgccattgtcggctacggcgaggacgatgtacgtacggtttcaggaccccaacaagcactatcgcatacagtttccatgccatgttagcgactctttacgcagttcaggactcaagagaaccaaaagttgtatgacttccagaatttcgcatccctctctctactcttcggcccctgcaggtttacctgcacacagcgcctctgtgccacatcggaggggtctcgtcgtgcatggcagtcctgatggccggaggctgccacgtcctggcgccgaagttcgacgccaggtcggcgttcgccgccatccaggagcacggagtgacctgcttcatcaccgtccccgcgatcatggctgacctgctgtcctacgctcggaaagaggagatggcgccgggctgcgggaggacgacggtgaccaagattctgaacggcggcggcgggctgccgctccacctcgtaaacgcagcctcgcaatcctttcctcgggctgctattttctcagcttacgacagtaacacgtcgactggatttcagtagctctgtaatctgcaacagggatgaccgaggcctgctcgtctctgacgttcatggccctcaccacgccaaagcttcaagagccggagccggagccggagacccaaccgtgcggccaccacggaggtgtctgcgtcggcaaaccggcgccgcacgttgagatacggatcggcatggatgacgacggcaccaccgccggttcttcgccgaccgggaacgtcttgaccagaggcttgcacaccatggttggctactgggcaaacggcaaggcggactcatccgagtgtgacaggaacggatggcttgacaccggagacactgggtgggtggacgaggagggtaatctgtggctcttgggaaggcacaagggccgcatcaagaccggaggcgaaaatgtttacccggaagaggttgaatcggtgctgtcccagcaccccggagtggcgagagctgtggtggtcggcgtgccggatagccgtctcggggagagagtcgttgcgtgtgtcagcgtcaaggacggctggaactgggtggatgcgagagctgagcacgagcaccgaggcggaggcgaggaggtgtctcctcagatcctccatggccactgcaggacgaaagaactgagcagatttaaggtgccaaggtcttattaccagtggaggcagccatttccggtgaccacgacggggaagatcagaagggaggagctgaagagggaactcctggcagcaattcgactgcccagcaacctgtagctttttgaggcgatgatctgtttttggaccaaatcttggttcagttcgactccgattgaagtcttctgttttttttggtctgtaggtgcttttagcttttacctggttggagtttaagatgcgaaaaaaagagcgtttgattattggaaacctgtaacatccatgacttttcttcaccttgacaaaagaagtcgagtcaatggcaagtcccatgaaattcagagcatccgattcttggagaactgaaaattgttgacgccttttcagagcgccaatcactcaagaagaaccggcggcggtgctctctggtcagccgcggacggtccgcggcctggggctggatggtccgcgacctggtgtgaggcggcggtgctccctggtcagacgcggacggtccgcggcacaggaccggacggtccgcgacctggtgcagcaggagcccgggttccctgcctgacggctggacggtccgcgcgtgcgcaggggcggcagaggatcgctggcggcgcctgaatctcgctcccgggagggaccccgtcggggaggaga

SEQ ID NO: 60663 - DNA, 1316 bp, Zea Mays
ggaaggaggaaaccctagcgctcctgctccctccaacactataaaaaccacggccgcagccgtttatcagctaggttaaagcgacgccgccgccgcaagccgtccgccttgcccttcacgaaggcttggtcctcctccttgtatctccactccccccttcacagatccgttcctccagctagggttagcgttcctctgcagcgatggcgatcaagcggactaaggcggagaagaagatcgcgtacgacaagaagctgtgcagcctgctcgatgagtacaccaaggtgctcatcgccctggccgacaacgtcggttccaagcagctccaggacatccgccggggcctcaggggcgactcggtggtgctcatggggaagaacacgctcatcaggcgttgcatcaaggtgtacgccgagaagaccggtaaccacacctttgacccgctcatggacctcctggtcggcaacgtaggcctcatcttcaccaagggagacctcaaggaggtgcgcgaggaggtcgccaagtacaaggtgggggctcctgctcgtgttggtctggttgctccagttgatgttgttgtgccccctggcaacactgggctggatccgtcccagacctctttcttccaggtgcttaacatccccaccaagattaacaagggtaccgtggaaattatcacccctgtggagctgatcaagaagggtgaaaaggtgggctcgtccgagtctgccctgctcgccaagctgggtatccgccccttctcgtacggcctccaggtcaccagtgtctacgagtgattgagaagtttgccactggtgtctccatggttgcctccctgtcactggcgatctcgtacccgacccttgctgctgtgccccacatgttcatcaatgggtacaagaatgtgcttgctgttgctgtcgagacagactactcgtacccacatgctgacaagatcaaggagtacctcaaggacccaagcaagtttgctgttgccgccccggttgctgctggggactctggcgctgcagctgctcccaaggaagaagagaaggctgcggagcctgaagaggagtcggacgaggaaatgggcttcagcctcttcgacgactagagctgctgttttcgtcaaactgctgcaagttttggcttttttttttatcatctacaagtactgtttcctatattttttagcagacaaattatcgtgtgtaatcgacaatgatatctccttaaattttaagtacctgtgttgtgtcactcgggttgatgctgtttacctaacaaatccgtttggattttttttgcgtaaaaga

SEQ ID NO: 60664 - DNA, 1725 bp, Zea Mays
aaacagctgcccagaacagtgcagcccatcggctgcacccggactttcccttctcgttccagcggcctcgagtctggagaggactcgcctgttctagggttcggtgcccagtcgctgctcgcgtctccgccctccggccaggtcactggcgctaggaggcgctaaatcgagttggcgacgcctccctcacccgtccccgatcgacgtcgggaggcattcctggcggcgtcagcgtcggcgtcggcgtccccgcacgcgcgcactactgactcatctgtgcagatcgagcccaatggacattcctagggggcgtttggcttgaagataatcactctcaaccagccaaacgttcaaaattccaactgattcaggaatccaatggaatcctcaatcaaagaatcaaggagtagagctgaagaatcaggaagtggagctctcccaaacttctgttaatttcgataaccggcattcagctctagaagatagctgttgcaagatacgccactggagggtgacaactctggcttactcctcgacgtcatcatgctctgcacctgaagtttgtggctacgatctgcatacaactccagcgaggcacaaccccgtcgagatggatcgatgccgtgctcactgggacgacaccaccacaagaatattcctggacctctgcatcgccgagaaggaaaagcagaactacaacagcaaggggttgaccaagatagggtggcacaatctgtaccgcaacttcaaggaagagacacgcaggtcttatgataccaagcagctgcagaacaagttcaacggcctgaagaggatgtacagcctgtggagactgcagaacgacaaggctggacctggaggaggaggcgggtgggacaagagttcgagcactgttacacaggatgctgacggatgggacaaccagatcacggagaccagtgcagcagaagacttccgtggcaaggcgctcgcgcacgaggacgcgctcgccgttcttttcggccccaaagacggcacaaattcgccgtccgtaggtggtggcgccggtgacagaacaccaggcgggggcggaggaggcgaggaagagaaccatgctcgagcgtcaggggacaatgccgcttgtccggaggagagcctggggtgttacaggtctggccgtgcgtccccatggtcaagccaggaccaccacatccacatggtcggcagccgcccagccaagaagcctaagaacacggggtactatgccgaaggcgtgtccgagagcatgctcggaagcaggaacgagagcagcagtgccatcaggcgtgagcaagaagaggtggtagagttgctgcagctcgtagaaaaggacggcgtgtctcagggatctgagctgttcttcatagctactgagctgtttaggtcgccgatccgacgcgcggcatttaggtgcatcaccactccgaagaaccgagttgcatggctccggtggacttgggacaatgttaagatgtgatgatggcggcgttcttgcttagttttcagttgcctgtactgagaattcttcctcgggcagttcgtgagaaactagttgtattgtattataccctgtcctgtccgttcttttttatttgtcgtgttttagttgcgacaaatattcgagatcggatttagtattattgtaaatatatacagatttccagcacagcgcgttctgtcaatatatacaatgcacacataaaagta

SEQ ID NO: 60665 - DNA, 1691 bp, Zea Mays
aaacagctgcccagaacagtgcagcccatcggctgcacccggactttcccttctcgttccagcggcctcgagtctggagaggactcgcctgttctagggttcggtgcccagtcgctgctcgcgtctccgccctccggccaggtcactggcgctaggaggcgctaaatcgagttggcgacgcctccctcacccgtccccgatcgacgtcgggaggcattcctggcggcgtcagcgtcggcgtcggcgtccccgcacgcgcgcactactgactcatctgtgcagatcgagccgtcagtgagcatgacagatcttcctttataagaagagttgacaatgtgaatccaatggaatcctcaatcaaagaatcaaggagtagagctgaagaatcaggaagtggagctctcccaaacttctgttaatttcgataaccggcattcagctctagaagatagctgttgcaagatacgccactggagggtgacaactctggcttactcctcgacgtcatcatgctctgcacctgaagtttgtggctacgatctgcatacaactccagcgaggcacaaccccgtcgagatggatcgatgccgtgctcactgggacgacaccaccacaagaatattcctggacctctgcatcgccgagaaggaaaagcagaactacaacagcaaggggttgaccaagatagggtggcacaatctgtaccgcaacttcaaggaagagacacgcaggtcttatgataccaagcagctgcagaacaagttcaacggcctgaagaggatgtacagcctgtggagactgcagaacgacaaggctggacctggaggaggaggcgggtgggacaagagttcgagcactgttacacaggatgctgacggatgggacaaccagatcacggagaccagtgcagcagaagacttccgtggcaaggcgctcgcgcacgaggacgcgctcgccgttcttttcggccccaaagacggcacaaattcgccgtccgtaggtggtggcgccggtgacagaacaccaggcgggggcggaggaggcgaggaagagaaccatgctcgagcgtcaggggacaatgccgcttgtccggaggagagcctggggtgttacaggtctggccgtgcgtccccatggtcaagccaggaccaccacatccacatggtcggcagccgcccagccaagaagcctaagaacacggggtactatgccgaaggcgtgtccgagagcatgctcggaagcaggaacgagagcagcagtgccatcaggcgtgagcaagaagaggtggtagagttgctgcagctcgtagaaaaggacggcgtgtctcagggatctgagctgttcttcatagctactgagctgtttaggtcgccgatccgacgcgcggcatttaggtgcatcaccactccgaagaaccgagttgcatggctccggtggacttgggacaatgttaagatgtgatgatggcggcgttcttgcttagttttcagttgcctgtactgagaattcttcctcgggcagttcgtgagaaactagttgtattgtattataccctgtcctgtccgttcttttttatttgtcgtgttttagttgcgacaaatattcgagatcggatttagtattattgtaaatatatacagatttccagcacagcgcgttctgtcaatatatacaatgcacacataaaagta

SEQ ID NO: 60666 - DNA, 2399 bp, Zea Mays
ccgttgactttggaggctcgtattgtaatctcagttgtaaatgcctcgcacatggtactgcacatctggtcttcccagtgatatatctgtggtagttggggaacagtctttccatcttcacaagtttcctctactatcgaaaagtggcctgttggagaagcgaatcagagagaaaatcgataacagggacgatagctgtgcaattgatctatctgatattcctggtggggcgaaggcttttgaactggctgccaaattttgctatggtgtaaagtttgaaatgactgcctccaacgttgtacaccttcgttgtgctgctgattaccttgagatgacggaagagatatccgaggggaatttgatcgcagagacagagagcttccttacccaaacagtcctcaagagctggaaggattcagtcaaggcgcttcaaacttgcgacaacgtccttgatgttgctgaaagattgcagattgtaaagaggtgtgtagactctattgcgactagatcatgcagtgaccctgatttatttggctggccagtagcccattatggaggccccatgcagagtcctggagggagtctcttgtggaatggtattagcacgggagcaaggcccagaaatagcagcccggattggtggtatgatgatgtctcatgtttaagcctcccgttatacaaaaagctcatctcagccatggagtatcggggcatcagtcagggggttattgttggatcccttaaccattatgcaaaaaggcgtttgcctggtttgaatcggcgtaaaagcatcggtgatgctagcaactgtctttctatgactagtttaacatccatcccttctgaagatgaccagaagtatcttctcgaggagatcgatagactactccctttccaaaggggtgttacatcatgcaagctgctgtttggcctcctgcgcacggcaatcttcctgaaagccagcccctcctgtgtgtcgaacttggagagacggataggtatgcagcttgacaaggccagcttggaagaccttttgataccgaatgtctctgattctgtggaaaccctgtatgatgtggagtgtgtgcagaggattgtagaccatttcttgtcaatggaccaagaaactggtggggcctcccctggcattggtgaagatgggcaaatgttagcatcaccatccttaatgccaataactatggttgctaagttgattgatggctatctggctgaagttgcaccagacatgaacttgaagttgccaaagtttcggtctttggctgctgctataccggattatgctcgtccaatagatgatgggctttatcgtgctattgacatatatctcaaggcgcacccatatctgccagaatcggacaaggaagagctctgccgggtgatggactgccagaagctgtccctggaggcctgcacacacgcggcgcagaacgagcgcctcccgctccgtgtcatcctgcaggtcctcttcttcgagcagctccagctgcggagctccatcgcggaatgcctcatgatctcagagcccctagacggcggcggcggcttctcgcggcagctcggcggcctgcctgtctcgggcgagcacctccgcggcgctggctggcccctggccgccagggagaaccagacgctgcgggaaggtatggacagcatgaagcagcgcgtgtcggagctggagaaggagtgctttgccatgaaggaggacatcgagcggctcggccgcagcaggagcgcgggcaagagcaggttcccgttcgcgctcgccgcaaagccccacgtctgcggcaccaaggacaaggaggctgctccggaatcgtcaaagtcggagacgtcaaagtcgaaggcagcggcggcgaccaggagcgatgacaagttggctgtggtcaagggcggtgccgctgccgccggtgatggcgggccgcagctgaagcacaggaagcacaagacgagcctgtctgcctgttagtttttagatatctacaagcacacagtataggccctgaatgaacaacgactgtgagtgagagacgctatcgatgtgatgctcatttttttttcttggacatttgctcagtgaaaaatgcatagcgttaccagcgtgtcttggacttccagctgtaccatgcttccccgttgtggttgtacatgtccatgaatcggaaaagaatttactagtagaatcctaccgagttcctgtgaattactggggttccaaaccgtctctcaaactcaaacctcaaacttgaaagggatccgcattgattttgataaatgtattgtcacttgttcttctcaaattgggtggataactgaactgcactacctgtttgtctgtcgttgtatttctgttggttctttcattctaaactataaatcgc

SEQ ID NO: 60667 - DNA, 2383 bp, Zea Mays
caatttttttcctttctactgctttggaacttatcgaggtactgcacatctggtcttcccagtgatatatctgtggtagttggggaacagtctttccatcttcacaagtttcctctactatcgaaaagtggcctgttggagaagcgaatcagagagaaaatcgataacagggacgatagctgtgcaattgatctatctgatattcctggtggggcgaaggcttttgaactggctgccaaattttgctatggtgtaaagtttgaaatgactgcctccaacgttgtacaccttcgttgtgctgctgattaccttgagatgacggaagagatatccgaggggaatttgatcgcagagacagagagcttccttacccaaacagtcctcaagagctggaaggattcagtcaaggcgcttcaaacttgcgacaacgtccttgatgttgctgaaagattgcagattgtaaagaggtgtgtagactctattgcgactagatcatgcagtgaccctgatttatttggctggccagtagcccattatggaggccccatgcagagtcctggagggagtctcttgtggaatggtattagcacgggagcaaggcccagaaatagcagcccggattggtggtatgatgatgtctcatgtttaagcctcccgttatacaaaaagctcatctcagccatggagtatcggggcatcagtcagggggttattgttggatcccttaaccattatgcaaaaaggcgtttgcctggtttgaatcggcgtaaaagcatcggtgatgctagcaactgtctttctatgactagtttaacatccatcccttctgaagatgaccagaagtatcttctcgaggagatcgatagactactccctttccaaaggggtgttacatcatgcaagctgctgtttggcctcctgcgcacggcaatcttcctgaaagccagcccctcctgtgtgtcgaacttggagagacggataggtatgcagcttgacaaggccagcttggaagaccttttgataccgaatgtctctgattctgtggaaaccctgtatgatgtggagtgtgtgcagaggattgtagaccatttcttgtcaatggaccaagaaactggtggggcctcccctggcattggtgaagatgggcaaatgttagcatcaccatccttaatgccaataactatggttgctaagttgattgatggctatctggctgaagttgcaccagacatgaacttgaagttgccaaagtttcggtctttggctgctgctataccggattatgctcgtccaatagatgatgggctttatcgtgctattgacatatatctcaaggcgcacccatatctgccagaatcggacaaggaagagctctgccgggtgatggactgccagaagctgtccctggaggcctgcacacacgcggcgcagaacgagcgcctcccgctccgtgtcatcctgcaggtcctcttcttcgagcagctccagctgcggagctccatcgcggaatgcctcatgatctcagagcccctagacggcggcggcggcttctcgcggcagctcggcggcctgcctgtctcgggcgagcacctccgcggcgctggctggcccctggccgccagggagaaccagacgctgcgggaaggtatggacagcatgaagcagcgcgtgtcggagctggagaaggagtgctttgccatgaaggaggacatcgagcggctcggccgcagcaggagcgcgggcaagagcaggttcccgttcgcgctcgccgcaaagccccacgtctgcggcaccaaggacaaggaggctgctccggaatcgtcaaagtcggagacgtcaaagtcgaaggcagcggcggcgaccaggagcgatgacaagttggctgtggtcaagggcggtgccgctgccgccggtgatggcgggccgcagctgaagcacaggaagcacaagacgagcctgtctgcctgttagtttttagatatctacaagcacacagtataggccctgaatgaacaacgactgtgagtgagagacgctatcgatgtgatgctcatttttttttcttggacatttgctcagtgaaaaatgcatagcgttaccagcgtgtcttggacttccagctgtaccatgcttccccgttgtggttgtacatgtccatgaatcggaaaagaatttactagtagaatcctaccgagttcctgtgaattactggggttccaaaccgtctctcaaactcaaacctcaaacttgaaagggatccgcattgattttgataaatgtattgtcacttgttcttctcaaattgggtggataactgaactgcactacctgtttgtctgtcgttgtatttctgttggttctttcattctaaactataaatcgc

SEQ ID NO: 60668 - DNA, 2401 bp, Zea Mays
gttatacctacgaccacaatcgaccactagtatttgtctacgcgcgcgaatcaaaggtactgcacatctggtcttcccagtgatatatctgtggtagttggggaacagtctttccatcttcacaagtttcctctactatcgaaaagtggcctgttggagaagcgaatcagagagaaaatcgataacagggacgatagctgtgcaattgatctatctgatattcctggtggggcgaaggcttttgaactggctgccaaattttgctatggtgtaaagtttgaaatgactgcctccaacgttgtacaccttcgttgtgctgctgattaccttgagatgacggaagagatatccgaggggaatttgatcgcagagacagagagcttccttacccaaacagtcctcaagagctggaaggattcagtcaaggcgcttcaaacttgcgacaacgtccttgatgttgctgaaagattgcagattgtaaagaggtgtgtagactctattgcgactagatcatgcagtgaccctgatttatttggctggccagtagcccattatggaggccccatgcagagtcctggagggagtctcttgtggaatggtattagcacgggagcaaggcccagaaatagcagcccggattggtggtatgatgatgtctcatgtttaagcctcccgttatacaaaaagctcatctcagccatggagtatcggggcatcagtcagggggttattgttggatcccttaaccattatgcaaaaaggcgtttgcctggtttgaatcggcgtaaaagcatcggtgatgctagcaactgtctttctatgactagtttaacatccatcccttctgaagatgaccagaagtatcttctcgaggagatcgatagactactccctttccaaaggggtgttacatcatgcaagctgctgtttggcctcctgcgcacggcaatcttcctgaaagccagcccctcctgtgtgtcgaacttggagagacggataggtatgcagcttgacaaggccagcttggaagaccttttgataccgaatgtctctgattctgtggaaaccctgtatgatgtggagtgtgtgcagaggattgtagaccatttcttgtcaatggaccaagaaactggtggggcctcccctggcattggtgaagatgggcaaatgttagcatcaccatccttaatgccaataactatggttgctaagttgattgatggctatctggctgaagttgcaccagacatgaacttgaagttgccaaagtttcggtctttggctgctgctataccggattatgctcgtccaatagatgatgggctttatcgtgctattgacatatatctcaaggcgcacccatatctgccagaatcggacaaggaagagctctgccgggtgatggactgccagaagctgtccctggaggcctgcacacacgcggcgcagaacgagcgcctcccgctccgtgtcatcctgcaggtcctcttcttcgagcagctccagctgcggagctccatcgcggaatgcctcatgatctcagagcccctagacggcggcggcggcttctcgcggcagctcggcggcctgcctgtctcgggcgagcacctccgcggcgctggctggcccctggccgccagggagaaccagacgctgcgggaaggtatggacagcatgaagcagcgcgtgtcggagctggagaaggagtgctttgccatgaaggaggacatcgagcggctcggccgcagcaggagcgcgggcaagagcaggttcccgttcgcgctcgccgcaaagccccacgtctgcggcaccaaggacaaggaggctgctccggaatcgtcaaagtcggagacgtcaaagtcgaaggcagcggcggcgaccaggagcgatgacaagttggctgtggtcaagggcggtgccgctgccgccggtgatggcgggccgcagctgaagcacaggaagcacaagacgagcctgtctgcctgttagtttttagatatctacaagcacacagtataggccctgaatgaacaacgactgtgagtgagagacgctatcgatgtgatgctcatttttttttcttggacatttgctcagtgaaaaatgcatagcgttaccagcgtgtcttggacttccagctgtaccatgcttccccgttgtggttgtacatgtccatgaatcggaaaagaatttactagtagaatcctaccgagttcctgtgaattactggggttccaaaccgtctctcaaactcaaacctcaaacttgaaagggatccgcattgattttgataaatgtattgtcacttgttcttctcaaattgggtggataactgaactgcactacctgtttgtctgtcgttgtatttctgttggttctttcattctaaactataaatcgc

SEQ ID NO: 60669 - DNA, 2793 bp, Zea Mays
ccagctccagccctcccaccgctccagccagtcccaccagctgctccttccctgcctgcttcccctgtttctttggctccttccccgctgccctccgcgccgcacgcccgcacgccacgccatagaacagaatgttcttggatgctctcgcgcccgcaacattcccttcctagtacggcccgccccttcgatccataaacaaaaggcaaggaaggctgcgccgccgtctgcctctctcctctcttcgtccacggcccacggggttcttgcctctccctagtcccttcttcatcaccctgaccagtgggtttagcgagcgagcgcaggcgccgtcggttgatttcccgcgtaaagcttggatcttggcgcgtggactgccgtaggtgccggcggcggcgaggccgcgagggtctggaagtttgggcggatttctctgtcccgagttcaggtactgcacatctggtcttcccagtgatatatctgtggtagttggggaacagtctttccatcttcacaagtttcctctactatcgaaaagtggcctgttggagaagcgaatcagagagaaaatcgataacagggacgatagctgtgcaattgatctatctgatattcctggtggggcgaaggcttttgaactggctgccaaattttgctatggtgtaaagtttgaaatgactgcctccaacgttgtacaccttcgttgtgctgctgattaccttgagatgacggaagagatatccgaggggaatttgatcgcagagacagagagcttccttacccaaacagtcctcaagagctggaaggattcagtcaaggcgcttcaaacttgcgacaacgtccttgatgttgctgaaagattgcagattgtaaagaggtgtgtagactctattgcgactagatcatgcagtgaccctgatttatttggctggccagtagcccattatggaggccccatgcagagtcctggagggagtctcttgtggaatggtattagcacgggagcaaggcccagaaatagcagcccggattggtggtatgatgatgtctcatgtttaagcctcccgttatacaaaaagctcatctcagccatggagtatcggggcatcagtcagggggttattgttggatcccttaaccattatgcaaaaaggcgtttgcctggtttgaatcggcgtaaaagcatcggtgatgctagcaactgtctttctatgactagtttaacatccatcccttctgaagatgaccagaagtatcttctcgaggagatcgatagactactccctttccaaaggggtgttacatcatgcaagctgctgtttggcctcctgcgcacggcaatcttcctgaaagccagcccctcctgtgtgtcgaacttggagagacggataggtatgcagcttgacaaggccagcttggaagaccttttgataccgaatgtctctgattctgtggaaaccctgtatgatgtggagtgtgtgcagaggattgtagaccatttcttgtcaatggaccaagaaactggtggggcctcccctggcattggtgaagatgggcaaatgttagcatcaccatccttaatgccaataactatggttgctaagttgattgatggctatctggctgaagttgcaccagacatgaacttgaagttgccaaagtttcggtctttggctgctgctataccggattatgctcgtccaatagatgatgggctttatcgtgctattgacatatatctcaaggcgcacccatatctgccagaatcggacaaggaagagctctgccgggtgatggactgccagaagctgtccctggaggcctgcacacacgcggcgcagaacgagcgcctcccgctccgtgtcatcctgcaggtcctcttcttcgagcagctccagctgcggagctccatcgcggaatgcctcatgatctcagagcccctagacggcggcggcggcttctcgcggcagctcggcggcctgcctgtctcgggcgagcacctccgcggcgctggctggcccctggccgccagggagaaccagacgctgcgggaaggtatggacagcatgaagcagcgcgtgtcggagctggagaaggagtgctttgccatgaaggaggacatcgagcggctcggccgcagcaggagcgcgggcaagagcaggttcccgttcgcgctcgccgcaaagccccacgtctgcggcaccaaggacaaggaggctgctccggaatcgtcaaagtcggagacgtcaaagtcgaaggcagcggcggcgaccaggagcgatgacaagttggctgtggtcaagggcggtgccgctgccgccggtgatggcgggccgcagctgaagcacaggaagcacaagacgagcctgtctgcctgttagtttttagatatctacaagcacacagtataggccctgaatgaacaacgactgtgagtgagagacgctatcgatgtgatgctcatttttttttcttggacatttgctcagtgaaaaatgcatagcgttaccagcgtgtcttggacttccagctgtaccatgcttccccgttgtggttgtacatgtccatgaatcggaaaagaatttactagtagaatcctaccgagttcctgtgaattactggggttccaaaccgtctctcaaactcaaacctcaaacttgaaagggatccgcattgattttgataaatgtattgtcacttgttcttctcaaattgggtggataactgaactgcactacctgtttgtctgtcgttgtatttctgttggttctttcattctaaactataaatcgc

SEQ ID NO: 60670 - DNA, 3258 bp, Zea Mays
ccagctccagccctcccaccgctccagccagtcccaccagctgctccttccctgcctgcttcccctgtttctttggctccttccccgctgccctccgcgccgcacgcccgcacgccacgccatagaacagaatgttcttggatgctctcgcgcccgcaacattcccttcctagtacggcccgccccttcgatccataaacaaaaggcaaggaaggctgcgccgccgtctgcctctctcctctcttcgtccacggcccacggggttcttgcctctccctagtcccttcttcatcaccctgaccagtgggtttagcgagcgagcgcaggcgccgtcggttgatttcccgcgtaaagcttggatcttggcgcgtggactgccgtaggtgccggcggcggcgaggccgcgagggtctggaagtttgggcggatttctctgtcccgagttcaggagcgcttctccgcagatgtgcaacttcgtctggctcttccgcgtgctctggcggatcctcagcgtcgccttctgagccccagcctcccagcccccgcgcgccgtccgctccgcctcgcccgccggcgactcccggactggactggactggactgactgagcctctctccgcgcggggaaaagttttcccgtcggtggggtttcctgtcgagttcgttcggtccaagcgcgtcgcgtgcggttcggcggaaagctgggacgctgctggtgctcgctgggtgctgcctttggtctcattggcgctgcagtgtggcggtgtccgccgtcctgccggctggccgtcttggaggctggaaccagctagcagcagctccgtccgggacgatggcctgcctcaagctgggatccagggctgatgtcttccggaagcaagggcaggagtgggacatgtcgattttgttgcaggtactgcacatctggtcttcccagtgatatatctgtggtagttggggaacagtctttccatcttcacaagtttcctctactatcgaaaagtggcctgttggagaagcgaatcagagagaaaatcgataacagggacgatagctgtgcaattgatctatctgatattcctggtggggcgaaggcttttgaactggctgccaaattttgctatggtgtaaagtttgaaatgactgcctccaacgttgtacaccttcgttgtgctgctgattaccttgagatgacggaagagatatccgaggggaatttgatcgcagagacagagagcttccttacccaaacagtcctcaagagctggaaggattcagtcaaggcgcttcaaacttgcgacaacgtccttgatgttgctgaaagattgcagattgtaaagaggtgtgtagactctattgcgactagatcatgcagtgaccctgatttatttggctggccagtagcccattatggaggccccatgcagagtcctggagggagtctcttgtggaatggtattagcacgggagcaaggcccagaaatagcagcccggattggtggtatgatgatgtctcatgtttaagcctcccgttatacaaaaagctcatctcagccatggagtatcggggcatcagtcagggggttattgttggatcccttaaccattatgcaaaaaggcgtttgcctggtttgaatcggcgtaaaagcatcggtgatgctagcaactgtctttctatgactagtttaacatccatcccttctgaagatgaccagaagtatcttctcgaggagatcgatagactactccctttccaaaggggtgttacatcatgcaagctgctgtttggcctcctgcgcacggcaatcttcctgaaagccagcccctcctgtgtgtcgaacttggagagacggataggtatgcagcttgacaaggccagcttggaagaccttttgataccgaatgtctctgattctgtggaaaccctgtatgatgtggagtgtgtgcagaggattgtagaccatttcttgtcaatggaccaagaaactggtggggcctcccctggcattggtgaagatgggcaaatgttagcatcaccatccttaatgccaataactatggttgctaagttgattgatggctatctggctgaagttgcaccagacatgaacttgaagttgccaaagtttcggtctttggctgctgctataccggattatgctcgtccaatagatgatgggctttatcgtgctattgacatatatctcaaggcgcacccatatctgccagaatcggacaaggaagagctctgccgggtgatggactgccagaagctgtccctggaggcctgcacacacgcggcgcagaacgagcgcctcccgctccgtgtcatcctgcaggtcctcttcttcgagcagctccagctgcggagctccatcgcggaatgcctcatgatctcagagcccctagacggcggcggcggcttctcgcggcagctcggcggcctgcctgtctcgggcgagcacctccgcggcgctggctggcccctggccgccagggagaaccagacgctgcgggaaggtatggacagcatgaagcagcgcgtgtcggagctggagaaggagtgctttgccatgaaggaggacatcgagcggctcggccgcagcaggagcgcgggcaagagcaggttcccgttcgcgctcgccgcaaagccccacgtctgcggcaccaaggacaaggaggctgctccggaatcgtcaaagtcggagacgtcaaagtcgaaggcagcggcggcgaccaggagcgatgacaagttggctgtggtcaagggcggtgccgctgccgccggtgatggcgggccgcagctgaagcacaggaagcacaagacgagcctgtctgcctgttagtttttagatatctacaagcacacagtataggccctgaatgaacaacgactgtgagtgagagacgctatcgatgtgatgctcatttttttttcttggacatttgctcagtgaaaaatgcatagcgttaccagcgtgtcttggacttccagctgtaccatgcttccccgttgtggttgtacatgtccatgaatcggaaaagaatttactagtagaatcctaccgagttcctgtgaattactggggttccaaaccgtctctcaaactcaaacctcaaacttgaaagggatccgcattgattttgataaatgtattgtcacttgttcttctcaaattgggtggataactgaactgcactacctgtttgtctgtcgttgtatttctgttggttctttcattctaaactataaatcgc

SEQ ID NO: 60671 - DNA, 3326 bp, Zea Mays
caccccttcaccttccattccattccccttctctcctctctcggtccagtctccagctccagccctcccaccgctccagccagtcccaccagctgctccttccctgcctgcttcccctgtttctttggctccttccccgctgccctccgcgccgcacgcccgcacgccacgccatagaacagaatgttcttggatgctctcgcgcccgcaacattcccttcctagtacggcccgccccttcgatccataaacaaaaggcaaggaaggctgcgccgccgtctgcctctctcctctcttcgtccacggcccacggggttcttgcctctccctagtcccttcttcatcaccctgaccagtgggtttagcgagcgagcgcaggcgccgtcggttgatttcccgcgtaaagcttggatcttggcgcgtggactgccgtaggtgccggcggcggcgaggccgcgagggtctggaagtttgggcggatttctctgtcccgagttcagatgtgcaacttcgtctggctcttccgcgtgctctggcggatcctcagcgtcgccttctgagccccagcctcccagcccccgcgcgccgtccgctccgcctcgcccgccggcgactcccggactggactggactggactgactgagcctctctccgcgcggggaaaagttttcccgtcggtggggtttcctgtcgagttcgttcggtccaagcgcgtcgcgtgcggttcggcggaaagctgggacgctgctggtgctcgctgggtgctgcctttggtctcattggcgctgcagtgtggcggtgtccgccgtcctgccggctggccgtcttggaggctggaaccagctagcagcagctccgtccgggacgatggcctgcctcaagctgggatccagggctgatgtcttccggaagcaagggcaggagtggtacgcactttcccctaccatgcaccacgaaactcggtctgttggtggaggccagtactgcacatctggtcttcccagtgatatatctgtggtagttggggaacagtctttccatcttcacaagtttcctctactatcgaaaagtggcctgttggagaagcgaatcagagagaaaatcgataacagggacgatagctgtgcaattgatctatctgatattcctggtggggcgaaggcttttgaactggctgccaaattttgctatggtgtaaagtttgaaatgactgcctccaacgttgtacaccttcgttgtgctgctgattaccttgagatgacggaagagatatccgaggggaatttgatcgcagagacagagagcttccttacccaaacagtcctcaagagctggaaggattcagtcaaggcgcttcaaacttgcgacaacgtccttgatgttgctgaaagattgcagattgtaaagaggtgtgtagactctattgcgactagatcatgcagtgaccctgatttatttggctggccagtagcccattatggaggccccatgcagagtcctggagggagtctcttgtggaatggtattagcacgggagcaaggcccagaaatagcagcccggattggtggtatgatgatgtctcatgtttaagcctcccgttatacaaaaagctcatctcagccatggagtatcggggcatcagtcagggggttattgttggatcccttaaccattatgcaaaaaggcgtttgcctggtttgaatcggcgtaaaagcatcggtgatgctagcaactgtctttctatgactagtttaacatccatcccttctgaagatgaccagaagtatcttctcgaggagatcgatagactactccctttccaaaggggtgttacatcatgcaagctgctgtttggcctcctgcgcacggcaatcttcctgaaagccagcccctcctgtgtgtcgaacttggagagacggataggtatgcagcttgacaaggccagcttggaagaccttttgataccgaatgtctctgattctgtggaaaccctgtatgatgtggagtgtgtgcagaggattgtagaccatttcttgtcaatggaccaagaaactggtggggcctcccctggcattggtgaagatgggcaaatgttagcatcaccatccttaatgccaataactatggttgctaagttgattgatggctatctggctgaagttgcaccagacatgaacttgaagttgccaaagtttcggtctttggctgctgctataccggattatgctcgtccaatagatgatgggctttatcgtgctattgacatatatctcaaggcgcacccatatctgccagaatcggacaaggaagagctctgccgggtgatggactgccagaagctgtccctggaggcctgcacacacgcggcgcagaacgagcgcctcccgctccgtgtcatcctgcaggtcctcttcttcgagcagctccagctgcggagctccatcgcggaatgcctcatgatctcagagcccctagacggcggcggcggcttctcgcggcagctcggcggcctgcctgtctcgggcgagcacctccgcggcgctggctggcccctggccgccagggagaaccagacgctgcgggaaggtatggacagcatgaagcagcgcgtgtcggagctggagaaggagtgctttgccatgaaggaggacatcgagcggctcggccgcagcaggagcgcgggcaagagcaggttcccgttcgcgctcgccgcaaagccccacgtctgcggcaccaaggacaaggaggctgctccggaatcgtcaaagtcggagacgtcaaagtcgaaggcagcggcggcgaccaggagcgatgacaagttggctgtggtcaagggcggtgccgctgccgccggtgatggcgggccgcagctgaagcacaggaagcacaagacgagcctgtctgcctgttagtttttagatatctacaagcacacagtataggccctgaatgaacaacgactgtgagtgagagacgctatcgatgtgatgctcatttttttttcttggacatttgctcagtgaaaaatgcatagcgttaccagcgtgtcttggacttccagctgtaccatgcttccccgttgtggttgtacatgtccatgaatcggaaaagaatttactagtagaatcctaccgagttcctgtgaattactggggttccaaaccgtctctcaaactcaaacctcaaacttgaaagggatccgcattgattttgataaatgtattgtcacttgttcttctcaaattgggtggataactgaactgcactacctgtttgtctgtcgttgtatttctgttggttctttcattctaaactataaatcgc

SEQ ID NO: 60672 - DNA, 312 bp, Zea Mays
ctgttttgtttaagggtcacggcaatgatccttccgcaggttcacctacggaaaccttgttacgacttctccttcctctaaatgataaggttcaatggacttctcgcgacgtcgggggcggcgaaacgccctcgtcgccgcgatccgaacacttcaccggaccattcaatcggtaggagcgacgggcggtgtgtacaaagggcagggacgtagtcaacgcgagctgatgactcgcgcttactaggcattcctcgttgaagaccaacaattgcaatgatctatccccatcacgatgaaatttcccaagattta

SEQ ID NO: 60673 - DNA, 1188 bp, Zea Mays
ctaaactactcgtcacattaacaattatatcccctatataattacgaatcccatcacgttgcataaaacaaatacacttttcacataaacacatatcgacgcatttcccaaaacaaaatccgcattttgtaacttagttttcgcatttaaacaacgcatcacatatttttcctatcaaatataaaaatataaaaacatccgagttcttttctacttcattttctttctactcgcgtccattcatacaattatattttcacgcacatattcacgtcatcgactaaatcgtaaatgaaacaaaagcaacctggccggatcagtgagtcgcatgtgttgtccaccggctagcatttcgtcgcataggttgagcacgaggcacgacatcgatagctagctgcacacaacaacgtcgatttactgatttagtcatttcatcgagcaagagaagtgcgggacagcgaggagctcaccgcggattgacggcgacgcgcaaatgctgcgcagatcgatagcgtgaggcccgtcctggcgagtgcgacgcagcgaagggcgtcgctgctgctgctgcggcatttcgtcgagcacgccgagggcgcgacacagcgagaacccatgtggctgcgtgaactggcgtcgcagctgctgcgcgaggttgacggcgagctcgctgcggctgctgttttgtggggaagagagtaggagcaggggacgtcggcttcgacaagagcagggagagggcgcaggcaagagctactgctcctgcggcaagggacacaggaaggtggtcggtgtcaagctcctggccatggggcgagctcagccatggggaacacaggaaccgatggatcccggccgtgcatatgaactaggcgccatggaaggagctggaggggctgcagcttgcctgcagggagtggggcgccatgaggaggagctatggcatgccatggaagggagcagagagttgtgctcgagctctgcgttttctggacagaggggacagagttcccatgcaccagcacttggggaaaatggcggccaggtggggctgccgagggggaagcccgagctcgcagggggaaatgcagcaggggcgcgcgccggccatggggacctcctgctcggcaaatcccgcgcacgagcagagagagtcgcggcgcgttgctgaggacgagctgctgctccttg

SEQ ID NO: 60674 - DNA, 504 bp, Zea Mays
ccagatagcctcgtcaaaatcacggctctgagtcgattcggaaacggaacgttaattaatcgcgcgatgcggaagacaagccaagtcgacctcaagtgcaagctaatccgcaggataaagcggatggaccaacttgaagatgatcgccaagtggtcgccacttaacaacactaacctagtgttactcaggcaagccccggtgcatttgccacctccttgctgttttaaaatcttttatcaccttgtttgatgcattaggtgataggagttgtgtgctaaaccgttggtgcatttccttccttgattaaacaaccctaatacccattttatgaaaatttagtgatgcttagccctgcttattaatttaggattgtttttaaaagatgatgtgtaacacgggatatgggagtttgtgaaataaaatgacttgtgatgatgaagccattgtggccgcgatgatttcatcattcaagtagggtacctctctcaggtatcaagttttgg

SEQ ID NO: 60675 - DNA, 233 bp, Zea Mays
tagtatactcagccttgcttgtggcacaatttttgcaggtactcattgatttggttgatggtgtgacttggccttcatctctgccaccgggatagatggtcgagtgggttactgcttccgcgggagaggaccaggaggagtagcgtggccaggcttcgccatgttactcggttttctccgttagttatttccgctgcattaaaaattatggttattatttctgaaactccgat

SEQ ID NO: 60676 - DNA, 1666 bp, Zea Mays
ttttgcactcccacccctcaaaaatttgcagccgccacagcctccttgccttcttctccctcgtgcagcagtcctcccacgcacagcagccagcacagggagctcagctccacctctccccatggctgcgagctcccttctccagctgcgcgacgccctccctgctcctccttgtggcgagcggctgcagcagggactcccatggccggacctctgctcctctcttcacggcgccccttcttcctcctgcttcacggcagcaagcaccttccatggacgcgagctcccaaccatggcgccccaatcccttcttccccctacttggagcttcccatggcgcccccttctctccccttggtcgtggcttcctctgctccttgctccacgacgcctagatttttcagcagagagctttttccccatggcgccaccccctgcttgcattcctccctggcgcccagaaaaattgcagatcagcgcccctgctcctcttctatctactgtgcagcagcgctcacctcccgtggaaaaccagccggcttcctgcctccagcaagccgcttttgttccctgcacgcgagctcgctgcggggtgccctagccgctgctcgccccgaccacatctccatggccaagcagcccccttgcagcgagcttctccttttccctcgctgcgcagctcctcggcgaaacgccactgttcctgcagccacgacgtccaagttcctgcgcccagccctccgatccaaaaaacagcagccctgcgcaaagccccttcccttgctcctttccgatgtgcgcagggtgctcgacgaactgtgcagcagcctcgacggctccgcgcgctgccggcttgctgttttgttgcgcagtgagcagcacgccgtgatgcccgtcggtggtttgctatttttttgcgcagccccgtcgtcgtcgttgttcaccccggtgagaccatgacaatccttgtttgtttcacatcggcatttttttccggtgattaattgtgtatatgtgttgttttcttttgtttatggaggagaggaaccccgtgttttgcgtggagaaggcaagccgctcgatgctcgtcgatgttcgtagcgatgcacaaatcggaatcaccgtcgttcttgcaaacgccgtttgggtttgtttatggaccgagaggtgacgaccgtgcaagtaatgtggtgacaaccacaagatgcagttggtggacatactgaaggatggtggacttaaccagtggatgctcgccaagcgagtgccaccccgcaaacactgtctaagtgttaaattaaaggcaagccccggttttatgcataacatgttatttatgctattttacttcacttaatgattgtaggattgattgtgctcttaggtgtaggaattgtttgaaaccctagttgcatgatctcaggaatcctattgagatgaatactagtatgataggtcgagtagttgctttatttaattaggatctcggtagaagacgggtgatttttctagcactcgtgcgagatcaggaaattgattgtacccactttcactctatcaagatactagttggtgaacaacaatccatggggattggttgtttacgagatgggaaaatggaataaggattaacgtgcggatacctgtgtcaagcgtttgaacgtac

SEQ ID NO: 60677 - DNA, 104 bp, Zea Mays
ttccgggctagttgattcggcaggtgagttgttacacactccttagcggatttcgacttccatgaccaccgtcctgctgtcttaatcgaccaacaccctttgtg

SEQ ID NO: 60678 - DNA, 311 bp, Zea Mays
ccgacgacggctgccgggggcgcctagggcccccgggctttggccgccggcgcgggcgacaacggtccacgccccgagccgatcggcggaccagcaggagccattccgcatacggccggtgcgcgtcgccagcccccatccgcttccctcccggcaatttcaagcactctttgactctcttttcaaagtccttttcatctttccctcgcggtacttgttcgctatcggtctctcgcctgtatttagccttggacggagtttaccgcccgatttgggctgcattcccaaacaacccgactcgttgacagcgc

SEQ ID NO: 60679 - DNA, 1314 bp, Zea Mays
ggcggctcttggctttcctctcccaattttaaaaccaagctagcgagatctgttcttgcctcctggtctgtctcgccgctccacgctttaggcccaggattagctgttcgctgttccgtcggcgttccgatgatgccgtaggcgacctgagcctgtggttccctttccgactgggacatttggggggaggtatcaatttttcaactgtatgcactcaaatctttttgaagaatataagttcttccccaagtatcctgataagcagcttaagatagcagctattctgtttgctgattgatgcagttaaagagctggacgaatagatgagatggagaagaagcaggtctcttctttacgctataagttcatgacatttgcatctattatactgaaccatgcaatcttaagtttatggaaaggctataagaaaaaaacagaaattgtacttggaatagatgttttgacaacttagcatgataatgaaggaaccaatacaataagtaagcaacattatgttgagtaaatctttgtacatcattatctgtctataccagcagtcagttttgtatgattgaaacacatatttggtcgacgctgggccagcaggggtaggttttacacctcatgttatttttgtaaaagctacagagttatgaagaaggttctgaagattatcactattgtcttatcaggttgaacttcctctgaagcaactggaaaccatcttgacataataaaaccaagctctaatatcattgtaacaatctatggtaggatttgttggttatactgataatgctttccctctcatttattgctaatgaatgggcaacaaaaaacaaactaatgctttccctctcatttattgctaatgaatggtcaacagaaacccagaagatgcagatcatgtgcctgggcatgaagctgatgctgccggagtctcataaccagccgctcgaagcagcagcagcagcagagatccgctgagcaagacaaccacgattagcagaagtccaaagagatgatcaaatgaacagctcatgatgagctctggaaggaagaagacgacgattaggactaccactactgaaccatcgatcgccagctgcatacgtttgctgatttctctttaacagccatgtctacctcctatctgacgagctctctaaaggcattcagttcagcactcatgtttcaagggccttttgtgctttgcttctttataatacccttctcgactctattcttttggctcggtagggcgccgcgaagcgcgcctctttttctagttatccttcaagagttggccggccg

SEQ ID NO: 60680 - DNA, 841 bp, Zea Mays
cgcttctgtccttcgctccctgttcccatgtcatgtagtgagtgcctcctctcccatatgtatcccctacggcggcggctcttggctttcctctcccaattttaaaaccaagctagcgagatctgttcttgcctcctggtctgtctcgccgctccacgctttaggcccaggattagctcgctgttccgtcggcgttccgatgatgccgtaggcgacctgagcctgtggttccctttccgactgggacatttggggggaggtatcaatttttcaactgtatgcactcaaatctttttgaagaatataagttcttccccaagtatcctgataagcagcttaagatagcagctattctgtttgctgattgatgcagttaaagagctggacgaatagatgagatggagaagaagcagaaacccagaagatgcagatcatgtgcctgggcatgaagctgatgctgccggagtctcataaccagccgctcgaagcagcagcagcagcagagatccgctgagcaagacaaccacgattagcagaagtccaaagagatgatcaaatgaacagctcatgatgagctctggaaggaagaagacgacgattaggactaccactactgaaccatcgatcgccagctgcatacgtttgctgatttctctttaacagccatgtctacctcctatctgacgagctctctaaaggcattcagttcagcactcatgtttcaagggccttttgtgctttgcttctttataatacccttctcgactctattcttttggctcggtagggcgccgcgaagcgcgcctctttttctagttatccttcaagagttggccggccg

SEQ ID NO: 60681 - DNA, 801 bp, Zea Mays
cgcttctgtccttcgctccctgttcccatgtcatgtagtgagtgcctcctctcccatatgtatcccctacggcggcggctcttggctttcctctcccaattttaaaaccaagctagcgagatctgttcttgcctcctgcgctgttccgtcggcgttccgatgatgccgtaggcgacctgagcctgtggttccctttccgactgggacatttggggggaggtatcaatttttcaactgtatgcactcaaatctttttgaagaatataagttcttccccaagtatcctgataagcagcttaagatagcagctattctgtttgctgattgatgcagttaaagagctggacgaatagatgagatggagaagaagcagaaacccagaagatgcagatcatgtgcctgggcatgaagctgatgctgccggagtctcataaccagccgctcgaagcagcagcagcagcagagatccgctgagcaagacaaccacgattagcagaagtccaaagagatgatcaaatgaacagctcatgatgagctctggaaggaagaagacgacgattaggactaccactactgaaccatcgatcgccagctgcatacgtttgctgatttctctttaacagccatgtctacctcctatctgacgagctctctaaaggcattcagttcagcactcatgtttcaagggccttttgtgctttgcttctttataatacccttctcgactctattcttttggctcggtagggcgccgcgaagcgcgcctctttttctagttatccttcaagagttggccggccg

SEQ ID NO: 60682 - DNA, 1335 bp, Zea Mays
cgacgcttctgtccttcgctccctgttcccatgtcatgtacgctgttccgtcggcgttccgatgatgccgtaggcgacctgagcctgtggttccctttccgactgggacatttggggagcaagaagaagaagaagaagttgttgaagaagggataccacccacctctgatcctcaggcagacaattgcttttattttgatatctgcggatccgagcaagacacctctgataacaaagggaggtatcaatttttcaactgtatgcactcaaatctttttgaagaatataagttcttccccaagtatcctgataagcagcttaagatagcagctattctgtttgctgattgatgcagttaaagagctggacgaatagatgagatggagaagaagcaggtctcttctttacgctataagttcatgacatttgcatctattatactgaaccatgcaatcttaagtttatggaaaggctataagaaaaaaacagaaattgtacttggaatagatgttttgacaacttagcatgataatgaaggaaccaatacaataagtaagcaacattatgttgagtaaatctttgtacatcattatctgtctataccagcagtcagttttgtatgattgaaacacatatttggtcgacgctgggccagcaggggtaggttttacacctcatgttatttttgtaaaagctacagagttatgaagaaggttctgaagattatcactattgtcttatcaggttgaacttcctctgaagcaactggaaaccatcttgacataataaaaccaagctctaatatcattgtaacaatctatgaaacccagaagatgcagatcatgtgcctgggcatgaagctgatgctgccggagtctcataaccagccgctcgaagcagcagcagcagcagagatccgctgagcaagacaaccacgattagcagaagtccaaagagatgatcaaatgtaattctccctccctgcaacaaagccactttagttgccatcatcagcaaaaatgaaatctgagcactacacaatattgtattaggaacagctcatgatgagctctggaaggaagaagacgacgattaggactaccactactgaaccatcgatcgccagctgcatacgtttgctgatttctctttaacagccatgtctacctcctatctgacgagctctctaaaggcattcagttcagcactcatgtttcaagggccttttgtgctttgcttctttataatacccttctcgactctattcttttggctcggtagggcgccgcgaagcgcgcctctttttctagttatccttcaagagttggccggccg

SEQ ID NO: 60683 - DNA, 408 bp, Zea Mays
ggcggctcttggctttcctctcccaattttaaaaccaagctagcgagatctgttcttgcctcctggtctgtctcgccgctccacgctttaggcccaggattagctgttcgctgttccgtcggcgttccgatgatgccgtaggcgacctgagcctgtggttccctttccgactgggacatttggggggaggtatcaatttttcaactgtatgcactcaaatctttttgaagaatataagttcttccccaagtatcctgataagcagcttaagatagcagctattctgtttgcaagtatgcccaagaggtcaagtctgcaattctgaatggcaactctaatttcctagaaacctcagattctgaaattgataaactgtccttggggtattctgatttgctggtgtagtta

SEQ ID NO: 60684 - DNA, 378 bp, Zea Mays
ggcggctcttggctttcctctcccaattttaaaaccaagctagcgagatctgttcttgcctcctgcgctgttccgtcggcgttccgatgatgccgtaggcgacctgagcctgtggttccctttccgactgggacatttgggggaggggaagtagcagacttttgctgcttctgtactaaggtggttcccaagggagaacatcaagactgaagtgcgggaggactcggtcctccacttgagatcttttgtttttttagtccttcgggagaagttgtgtctccccggtttgtataattattacccttatgcactcactttttagaactggtctgtaataacttaacttgagcttactttggaaataaatgtaagattatg

SEQ ID NO: 60685 - DNA, 1273 bp, Zea Mays
ggcggctcttggctttcctctcccaattttaaaaccaagctagcgagatctgttcttgcctcctggtctgtctcgccgctccacgctttaggcccaggattagctcgctgttccgtcggcgttccgatgatgccgtaggcgacctgagcctgtggttccctttccgactgggacatttgggggacattgttggagcgacggctcggggagtcaccggccttttttttcctggctggtttactggtgcagatttaggagagtttccactgctattgtttttatttgctgctcgttatcaggatgtaggaccggtgagacgaccagaggggggtgaatgggagccaatcaaattttgcctccaaacactgaaaatgaacgccacgcttcaattgagatgaagcaagcgctcaaaccaagaacacatcagcgaaccagtgatctcatgattacaaaatgttcctaatactcacatgagaccagcaaaacaaacggatcgcaaatcggacaccgaaaagtccgaatcggtccaaaaccgtgtcgcgaacaagtgctgttttcagcagcacgaaattctgttcttggatccaaaactgaaccaaacaaactccgattgagatgaaattttgcacacacctgagcagatatgtttccaaggtctccacaaattttgagctcaatcggacttgtgagtcaaccgcagatctaaaattacagccagaaattggggttttgttggggttttctagaacgagttcaaactgagttcttctcaaatcacgaccaaaaactgcaccgagtgggcgtatgtagtgatccgagaagtgcaactcaccaccaaacaatcctcaaaccaaatcctctcaaaagaatcaaagattttccaccaaaaacacaagagagggggaaaggaagaacaagtgaccaaaacaactccaaatttcagcaagtatgtaaaactgagatggagatgtgaacaaacgctgtgggccgtaccggcgacccttcctcggattaaacttgaagatcaagaacacagtcgaaggttacaaaatcgctgtggatcacttggcacaagaggtggctactagagggaaaactaggagctctagaatgagtagtctaaaacaaaatggcagccaaggatactgaaataatcagccctacccctctatttatagaccatagagggttatttctattcctaaactaaccctatttacatagagcctatccactccactgggggcgaaatggaccaactcctggataattg

SEQ ID NO: 60686 - DNA, 1272 bp, Zea Mays
gtagtgagtgcctcctctcccatatgtatcccctacggcggcggctcttggctttcctctcccaattttaaaaccaagctagcgagatctgttcttgcctcctgcgctgttccgtcggcgttccgatgatgccgtaggcgacctgagcctgtggttccctttccgactgggacatttgggggacattgttggagcgacggctcggggagtcaccggccttttttttcctggctggtttactggtgcagatttaggagagtttccactgctattgtttttatttgctgctcgttatcaggatgtaggaccggtgagacgaccagaggggggtgaatgggagccaatcaaattttgcctccaaacactgaaaatgaacgccacgcttcaattgagatgaagcaagcgctcaaaccaagaacacatcagcgaaccagtgatctcatgattacaaaatgttcctaatactcacatgagaccagcaaaacaaacggatcgcaaatcggacaccgaaaagtccgaatcggtccaaaaccgtgtcgcgaacaagtgctgttttcagcagcacgaaattctgttcttggatccaaaactgaaccaaacaaactccgattgagatgaaattttgcacacacctgagcagatatgtttccaaggtctccacaaattttgagctcaatcggacttgtgagtcaaccgcagatctaaaattacagccagaaattggggttttgttggggttttctagaacgagttcaaactgagttcttctcaaatcacgaccaaaaactgcaccgagtgggcgtatgtagtgatccgagaagtgcaactcaccaccaaacaatcctcaaaccaaatcctctcaaaagaatcaaagattttccaccaaaaacacaagagagggggaaaggaagaacaagtgaccaaaacaactccaaatttcagcaagtatgtaaaactgagatggagatgtgaacaaacgctgtgggccgtaccggcgacccttcctcggattaaacttgaagatcaagaacacagtcgaaggttacaaaatcgctgtggatcacttggcacaagaggtggctactagagggaaaactaggagctctagaatgagtagtctaaaacaaaatggcagccaaggatactgaaataatcagccctacccctctatttatagaccatagagggttatttctattcctaaactaaccctatttacatagagcctatccactccactgggggcgaaatggaccaactcctggataattg

SEQ ID NO: 60687 - DNA, 2551 bp, Zea Mays
cacgctatctgtggcggcaacagtaccccctccaagcgttcaccggtgcacgctccctcctcctcaaccgcgcgtgtagcttctctctcacactacatggagagtgagtgccgggagacgctaccattggcaggcgccgctctccctctctccactcccgcgcgtgaagactccagaggtgccgagttgctcggtgcgactccttcgtcgccgtccacggaagcggaggccggcgaccaacctccccgcgcggcgaagggtacaggcggccggatccgttgggcctcacgcgaggagagccacgcgaacggattcgacgaccgaggagtccggatcgaagctcccactggccgacttcatcgccgccgccgccgttcaaccctgtccgccggcgattcaacgaggctccttccccggctgggtgtccgccgatccagaactcgagctcccgtccatcgatctgcttcttccgatctgcacatctaccgtgtaattccgtatgttcatttgaacgcgtggactactaagcattgagcagatggatggccaagatgccaaagtgttgcaaacagatctcctcaaccttgtctcctcggttgataaagctggttccaaaattagggacttgatagaagatgccttcttgcacttgggtgatgagcactatctcatcaattgtctccttgctatcaaacaagaggcagagttgctggagcacgatggaattgagtccaaagcacgctctgacccggagatggagaggatggattttcaagtgaaacaaatggaggtcgagcacgtagatacacgttttacaaccccatcgccacccgaatcgtggtccgctagtgatgttgactctgtagaatccgacaggtctactaggtataacatttggaaccaggtttaaacttgcccagtagcagtgtggaactctgtttgcaaataaacaaccactatggttctggagtgacttattatgcactgtttgtgttagttcagggtctatttgatgccagctccatggcctgctgccttttaatggctgagaacaatgataacatgcagtttccccctcatggtcctccacacacatcagctcctcaaggaatgcccccctatgtggaatccacagtactggcagcctaatccctacgactttcctagtggatctaatatccaatttagcagcagccaccttacaattcccagtttatcacaacaacaaaatgaagtaggaggttttgcaaataggggcccatggaatcatttcgttggtatgatgaatcctagttatccttgcccacctcccccgcttgctgctggccaaatgcaaccacctagccattttgtcacactgcctaacaactcttcgaaccctatggacccaatatttttggagtccgaggcagagcacagcgcacaggaggttaacagccccagcaaagaaggtggtacacctggtaaagggaagaaaatgaaagaacaaaactttacgccagaagaggatttgttgctatgcacaacttggctagaaattagttgtgatccagtaattagcactggccagaggaaggaaggactttgggcaagaattgataaacggtataacgaaatgagaggtgagtatcctaagagagttatcagggctttaacaagtcgatgggacaaaattaaggctgattgtgggaagtatgcttcgttgtatgcaagagtcctcagggaaaatcaaagtggtttaactgattatgataagacttcaatggctaccacactgtttacaaccgaaaataagagagggttccccttcatgcattgttggactaaactcaagaacgaacccaaatggcaagctattgttcaaggcacttcactacgaggggcagcagggatgtcaccggttggcagtgccacaccaactgcaagtgtaaacgatttggatagcgattctctaggtttaactgggaaaaggccattaggccgagactccacaaaggcatcaaggaagaaggccatgtccacgtcgtcccagtccatgaagtatttgaccagaattcatgacctgcaaatggcccggttgaaacaaagtgaagacaaagtggagaagaaagaagcacattatgaggttttcaaggatctcgaatataagaagctgcaagttcaacaagaacaaattgaagtggagaaaacaaaactgaagtttcaagaacgcaaagagaagaacgatgagttgaaggaagcaatggctgtggatttggaggacatagccgaagatttgaggcctgctttcatagcaaagaggaaagcacttgtggactggtttgtcaacaatccaaactgagttgttcgtttagtgaaaattgtggaccacggttttcactagttgagtttctgttttagtaatgcgtgctgtaataatcacattttttgaagtgtgactttggactgcgttagtgtcttcatttcagttgaagaactcaagattatgttatgtttgtaaacttattctcgtcacttatggttatgaattgtcagtttgaacttgtccact

SEQ ID NO: 60688 - DNA, 2501 bp, Zea Mays
cacgctatctgtggcggcaacagtaccccctccaagcgttcaccggtgcacgctccctcctcctcaaccgcgcgtgtagcttctctctcacactacatggagagtgagtgccgggagacgctaccattggcaggcgccgctctccctctctccactcccgcgcgtgaagactccagaggtgccgagttgctcggtgcgactccttcgtcgccgtccacggaagcggaggccggcgaccaacctccccgcgcggcgaagggtacaggcggccggatccgttgggcctcacgcgaggagagccacgcgaacggattcgacgaccgaggagtccggatcgaagctcccactggccgacttcatcgccgccgccgccgttcaaccctgtccgccggcgattcaacgaggctccttccccggctgggtgtccgccgatccagaactcgagctcccgtccatcgatctgcttcttccgatctgcacatctaccgatggatggccaagatgccaaagtgttgcaaacagatctcctcaaccttgtctcctcggttgataaagctggttccaaaattagggacttgatagaagatgccttcttgcacttgggtgatgagcactatctcatcaattgtctccttgctatcaaacaagaggcagagttgctggagcacgatggaattgagtccaaagcacgctctgacccggagatggagaggatggattttcaagtgaaacaaatggaggtcgagcacgtagatacacgttttacaaccccatcgccacccgaatcgtggtccgctagtgatgttgactctgtagaatccgacaggtctactaggtataacatttggaaccaggtttaaacttgcccagtagcagtgtggaactctgtttgcaaataaacaaccactatggttctggagtgacttattatgcactgtttgtgttagttcagggtctatttgatgccagctccatggcctgctgccttttaatggctgagaacaatgataacatgcagtttccccctcatggtcctccacacacatcagctcctcaaggaatgcccccctatgtggaatccacagtactggcagcctaatccctacgactttcctagtggatctaatatccaatttagcagcagccaccttacaattcccagtttatcacaacaacaaaatgaagtaggaggttttgcaaataggggcccatggaatcatttcgttggtatgatgaatcctagttatccttgcccacctcccccgcttgctgctggccaaatgcaaccacctagccattttgtcacactgcctaacaactcttcgaaccctatggacccaatatttttggagtccgaggcagagcacagcgcacaggaggttaacagccccagcaaagaaggtggtacacctggtaaagggaagaaaatgaaagaacaaaactttacgccagaagaggatttgttgctatgcacaacttggctagaaattagttgtgatccagtaattagcactggccagaggaaggaaggactttgggcaagaattgataaacggtataacgaaatgagaggtgagtatcctaagagagttatcagggctttaacaagtcgatgggacaaaattaaggctgattgtgggaagtatgcttcgttgtatgcaagagtcctcagggaaaatcaaagtggtttaactgattatgataagacttcaatggctaccacactgtttacaaccgaaaataagagagggttccccttcatgcattgttggactaaactcaagaacgaacccaaatggcaagctattgttcaaggcacttcactacgaggggcagcagggatgtcaccggttggcagtgccacaccaactgcaagtgtaaacgatttggatagcgattctctaggtttaactgggaaaaggccattaggccgagactccacaaaggcatcaaggaagaaggccatgtccacgtcgtcccagtccatgaagtatttgaccagaattcatgacctgcaaatggcccggttgaaacaaagtgaagacaaagtggagaagaaagaagcacattatgaggttttcaaggatctcgaatataagaagctgcaagttcaacaagaacaaattgaagtggagaaaacaaaactgaagtttcaagaacgcaaagagaagaacgatgagttgaaggaagcaatggctgtggatttggaggacatagccgaagatttgaggcctgctttcatagcaaagaggaaagcacttgtggactggtttgtcaacaatccaaactgagttgttcgtttagtgaaaattgtggaccacggttttcactagttgagtttctgttttagtaatgcgtgctgtaataatcacattttttgaagtgtgactttggactgcgttagtgtcttcatttcagttgaagaactcaagattatgttatgtttgtaaacttattctcgtcacttatggttatgaattgtcagtttgaacttgtccact

SEQ ID NO: 60689 - DNA, 2845 bp, Zea Mays
gttcacgctccccgcactccacgctatctgtggcggcaacagtaccccctccaagcgttcaccggtgcacgctccctcctcctcaaccgcgcgtgtagcttctctctcacactacatggagagtgagtgccgggagacgctaccattggcaggcgccgctctccctctctccactcccgcgcgtgaagactccagaggtgccgagttgctcggtgcgactccttcgtcgccgtccacggaagcggaggccggcgaccaacctccccgcgcggcgaagggtacaggcggccggatccgttgggcctcacgcgaggagagccacgcgaacggattcgacgaccgaggagtccggatcgaagctcccactggccgacttcatcgccgccgccgccgttcaaccctgtccgccggcgattcaacgaggctccttccccggctgggtgtccgccgatccagaactcgagctcccgtccatcgatctgcttcttccgatctgcacatctaccgtgtaattccgtatgttcatttgaacgcgtggactactaagcattgaggttctacctccttttcattctctttccgatgcttgattcattgttctatctttggatatattatttactctacatacttcaagcgtgttgtttttgattctgccatggtactgcagagtcaggttttatagccttgaagtcttatttcataactatgcatatagtagttctttcacaacatacttgaaatggtagttggcgtcctattcaaaccttaatactttgcattgtgatatgtaactagcaaactagtcactatcctaaacatttaactacagatggatggccaagatgccaaagtgttgcaaacagatctcctcaaccttgtctcctcggttgataaagctggttccaaaattagggacttgatagaagatgccttcttgcacttgggtgatgagcactatctcatcaattgtctccttgctatcaaacaagaggcagagttgctggagcacgatggaattgagtccaaagcacgctctgacccggagatggagaggatggattttcaagtgaaacaaatggaggtcgagcacgtagatacacgttttacaaccccatcgccacccgaatcgtggtccgctagtgatgttgactctgtagaatccgacaggtctactaggtataacatttggaaccaggtttaaacttgcccagtagcagtgtggaactctgtttgcaaataaacaaccactatggttctggagtgacttattatgcactgtttgtgttagttcagggtctatttgatgccagctccatggcctgctgccttttaatggctgagaacaatgataacatgcagtttccccctcatggtcctccacacacatcagctcctcaaggaatgcccccctatgtggaatccacagtactggcagcctaatccctacgactttcctagtggatctaatatccaatttagcagcagccaccttacaattcccagtttatcacaacaacaaaatgaagtaggaggttttgcaaataggggcccatggaatcatttcgttggtatgatgaatcctagttatccttgcccacctcccccgcttgctgctggccaaatgcaaccacctagccattttgtcacactgcctaacaactcttcgaaccctatggacccaatatttttggagtccgaggcagagcacagcgcacaggaggttaacagccccagcaaagaaggtggtacacctggtaaagggaagaaaatgaaagaacaaaactttacgccagaagaggatttgttgctatgcacaacttggctagaaattagttgtgatccagtaattagcactggccagaggaaggaaggactttgggcaagaattgataaacggtataacgaaatgagaggtgagtatcctaagagagttatcagggctttaacaagtcgatgggacaaaattaaggctgattgtgggaagtatgcttcgttgtatgcaagagtcctcagggaaaatcaaagtggtttaactgattatgataagacttcaatggctaccacactgtttacaaccgaaaataagagagggttccccttcatgcattgttggactaaactcaagaacgaacccaaatggcaagctattgttcaaggcacttcactacgaggggcagcagggatgtcaccggttggcagtgccacaccaactgcaagtgtaaacgatttggatagcgattctctaggtttaactgggaaaaggccattaggccgagactccacaaaggcatcaaggaagaaggccatgtccacgtcgtcccagtccatgaagtatttgaccagaattcatgacctgcaaatggcccggttgaaacaaagtgaagacaaagtggagaagaaagaagcacattatgaggttttcaaggatctcgaatataagaagctgcaagttcaacaagaacaaattgaagtggagaaaacaaaactgaagtttcaagaacgcaaagagaagaacgatgagttgaaggaagcaatggctgtggatttggaggacatagccgaagatttgaggcctgctttcatagcaaagaggaaagcacttgtggactggtttgtcaacaatccaaactgagttgttcgtttagtgaaaattgtggaccacggttttcactagttgagtttctgttttagtaatgcgtgctgtaataatcacattttttgaagtgtgactttggactgcgttagtgtcttcatttcagttgaagaactcaagattatgttatgtttgtaaacttattctcgtcacttatggttatgaattgtcagtttgaacttgtccact

SEQ ID NO: 60690 - DNA, 2083 bp, Zea Mays
ctcagactgtgaacaacagttcacgctccccgcactccacgctatctgtggcggcaacagtaccccctccaagcgttcaccggtgcacgctccctcctcctcaaccgcgcgtgtagcttctctctcacactacatggagagtgagtgccgggagacgctaccattggcaggcgccgctctccctctctccactcccgcgcgtgaagactccagaggtgccgagttgctcggtgcgactccttcgtcgccgtccacggaagcggaggccggcgaccaacctccccgcgcggcgaagggtacaggcggccggatccgttgggcctcacgcgaggagagccacgcgaacggattcgacgaccgaggagtccggatcgaagctcccactggccgacttcatcgccgccgccgccgttcaaccctgtccgccggcgattcaacgaggctccttccccggctgggtgtccgccgatccagaactcgagctcccgtccatcgatctgcttcttccgatctgcacatctaccgtgtaattccgtatgttcatttgaacgcgtggactactaagcattgagaatggctgagaacaatgataacatgcagtttccccctcatggtcctccacacacatcagctcctcaaggaatgcccccctatgtggaatccacagtactggcagcctaatccctacgactttcctagtggatctaatatccaatttagcagcagccaccttacaattcccagtttatcacaacaacaaaatgaagtaggaggttttgcaaataggggcccatggaatcatttcgttggtatgatgaatcctagttatccttgcccacctcccccgcttgctgctggccaaatgcaaccacctagccattttgtcacactgcctaacaactcttcgaaccctatggacccaatatttttggagtccgaggcagagcacagcgcacaggaggttaacagccccagcaaagaaggtggtacacctggtaaagggaagaaaatgaaagaacaaaactttacgccagaagaggatttgttgctatgcacaacttggctagaaattagttgtgatccagtaattagcactggccagaggaaggaaggactttgggcaagaattgataaacggtataacgaaatgagaggtgagtatcctaagagagttatcagggctttaacaagtcgatgggacaaaattaaggctgattgtgggaagtatgcttcgttgtatgcaagagtcctcagggaaaatcaaagtggtttaactgattatgataagacttcaatggctaccacactgtttacaaccgaaaataagagagggttccccttcatgcattgttggactaaactcaagaacgaacccaaatggcaagctattgttcaaggcacttcactacgaggggcagcagggatgtcaccggttggcagtgccacaccaactgcaagtgtaaacgatttggatagcgattctctaggtttaactgggaaaaggccattaggccgagactccacaaaggcatcaaggaagaaggccatgtccacgtcgtcccagtccatgaagtatttgaccagaattcatgacctgcaaatggcccggttgaaacaaagtgaagacaaagtggagaagaaagaagcacattatgaggttttcaaggatctcgaatataagaagctgcaagttcaacaagaacaaattgaagtggagaaaacaaaactgaagtttcaagaacgcaaagagaagaacgatgagttgaaggaagcaatggctgtggatttggaggacatagccgaagatttgaggcctgctttcatagcaaagaggaaagcacttgtggactggtttgtcaacaatccaaactgagttgttcgtttagtgaaaattgtggaccacggttttcactagttgagtttctgttttagtaatgcgtgctgtaataatcacattttttgaagtgtgactttggactgcgttagtgtcttcatttcagttgaagaactcaagattatgttatgtttgtaaacttattctcgtcacttatggttatgaattgtcagtttgaacttgtccact

SEQ ID NO: 60691 - DNA, 1265 bp, Zea Mays
ggatagatttggcaggatcaaggtcgttgtcgtctccaggtccatcaaatgcgacaaggtcgagcgcacgcaattcagctccgaagtcatctcctttcaacagatccatttagtacctttttctgagttaaactacttcaaacattgctgaagactacaaccagttgttgtaattgaagcgggtcaagacatagcatttgcaaagatttagttcattctcatcactctgcaatattcgggttctctactatgtgtaatctcatatcaagattaatgagtatcgtgatcgtataattttgaatcctatcaacccatatggcaaggcaaagaaaaatgacagtggacatcattctagattttacaaaatcaaaggagcaaccagacatggctgtcatgatctaagatacttcaacgtgattggatcgaacccaaacatatgactaggagaagctccaaggccactttgtcaagggtctctgcaatgcacctactggtgcatgatttactggaggttgtgcgcatgaatgtgccacacattggtatgggggttggagttgaagcaggtgattttcaccaacattggtttgcgaactggagttgaagcaggttattcatttgatgaaagtgggagagcagtccaaggcaaatttgccatgttggagcagtcacaggagccaaggggctgcagtcacaggtcctgctagccaggatggagcaatcataggacctcctagcagtccaaggaaaatttgcgaggtggagtagttgcaacttttgaaacccacgtgataacatgctcaagcgttcgtatgataaaaaagatggcacataatcaaaagaagatctcatgttctgcgtttgtgaacctgtttgtattttttgaacttgttttgtgaacctctatttgtaaacctgtaaaatctgaggttgtgaatagatttgggtaacttcatacaagtggtggaggcctggtggtaatcctggatgcatataaagcgaggcatgcaatatccatagcactcgtttgacagaaggcaacaccatcaaccttgtcctccacctttaaactagcatgagcaccatccttcttcacatttatattcatgtcccctatacgttcctcaaatacgtttgaaccatgtgtaccactatgtgaaccaactgagttcgtagactgatcaatgagtcaccttattgtggacgcagctctaaaaaatgttgtatctacaaatagattgtgtaaacgaaaagctttctgatctatg

SEQ ID NO: 60692 - DNA, 1357 bp, Zea Mays
acaggatcaaggtcgttgtcgtctccaggtccatcaaatgcgacaaggtcgagcgcacgcaattcagctccgaagtcatctcctttcaacagaaagatgcaagtaacaccaagtcacttgcctttgatggttgatacatttcactgtatatcattgcacgacagatccatttagtacctttttctgagttaaactacttcaaacattgctgaagactacaaccagttgttgtaattgaagcgggtcaagacatagcatttgcaaagatttagttcattctcatcactctgcaatattcgggttctctactatgtgtaatctcatatcaagattaatgagtatcgtgatcgtataattttgaatcctatcaacccatatggcaaggcaaagaaaaatgacagtggacatcattctagattttacaaaatcaaaggagcaaccagacatggctgtcatgatctaagatacttcaacgtgattggatcgaacccaaacatatgactaggagaagctccaaggccactttgtcaagggtctctgcaatgcacctactggtgcatgatttactggaggttgtgcgcatgaatgtgccacacattggtatgggggttggagttgaagcaggagacatgattgttattcctatcatgtgcacactgcctcctcgctgtcatttgtcgtcactctcgtagtcctgataccggagcatggttgccaggggagagcagtccaaggcaaatttgccatgttggagcagtcacaggagccaaggggctgcagtcacaggtcctgctagccaggatggagcaatcataggacctcctagcagtccaaggaaaatttgcgaggtggagtagttgcaacttttgaaacccacgtgataacatgctcaagcgttcgtatgataaaaaagatggcacataatcaaaagaagatctcatgttctgcgtttgtgaacctgtttgtattttttgaacttgttttgtgaacctctatttgtaaacctgtaaaatctgaggttgtgaatagatttgggtaacttcatacaagtggtggaggcctggtggtaatcctggatgcatataaagcgaggcatgcaatatccatagcactcgtttgacagaaggcaacaccatcaaccttgtcctccacctttaaactagcatgagcaccatccttcttcacatttatattcatgtcccctatacgttcctcaaatacgtttgaaccatgtgtaccactatgtgaaccaactgagttcgtagactgatcaatgagtcaccttattgtggacgcagctctaaaaaatgttgtatctacaaatagattgtgtaaacgaaaagctttctgatctatg

SEQ ID NO: 60693 - DNA, 1571 bp, Zea Mays
agaatttccgggtgtgggtggacagactggtcacatcgccgatcggtacaagcaactggttggtgaggtttgataactgggagatggaaggtggcgttcggtactgctgccgcactactcttctgctgaataacaaggttccaaaagaactagaagtacagattggttgaacttcaaacaaatacaaagagctatgcatacaagtggtggaggcctggtggtaaattgtttatcaagatcgctagagcagttaaatttactcctattatcttctgggatagatttggcaggatcaaggtcgttgtcgtctccaggtccatcaaatgcgacaaggtcgagcgcacgcaattcagctccgaagtcatctcctttcaacagatccatttagtacctttttctgagttaaactacttcaaacattgctgaagactacaaccagttgttgtaattgaagcgggtcaagacatagcatttgcaaagatttagttcattctcatcactctgcaatattcgggttctctactatgtgtaatctcatatcaagattaatgagtatcgtgatcgtataattttgaatcctatcaacccatatggcaaggcaaagaaaaatgacagtggacatcattctagattttacaaaatcaaaggagcaaccagacatggctgtcatgatctaagatacttcaacgtgattggatcgaacccaaacatatgactaggagaagctccaaggccactttgtcaagggtctctgcaatgcacctactggtgcatgatttactggaggttgtgcgcatgaatgtgccacacattggtatgggggttggagttgaagcaggagacatgattgttattcctatcatgtgcacactgcctcctcgctgtcatttgtcgtcactctcgtagtcctgataccggagcatggttgccaggggagagcagtccaaggcaaatttgccatgttggagcagtcacaggagccaaggggctgcagtcacaggtcctgctagccaggatggagcaatcataggacctcctagcagtccaaggaaaatttgcgaggtggagtagttgcaacttttgaaacccacgtgataacatgctcaagcgttcgtatgataaaaaagatggcacataatcaaaagaagatctcatgttctgcgtttgtgaacctgtttgtattttttgaacttgttttgtgaacctctatttgtaaacctgtaaaatctgaggttgtgaatagatttgggtaacttcatacaagtggtggaggcctggtggtaatcctggatgcatataaagcgaggcatgcaatatccatagcactcgtttgacagaaggcaacaccatcaaccttgtcctccacctttaaactagcatgagcaccatccttcttcacatttatattcatgtcccctatacgttcctcaaatacgtttgaaccatgtgtaccactatgtgaaccaactgagttcgtagactgatcaatgagtcaccttattgtggacgcagctctaaaaaatgttgtatctacaaatagattgtgtaaacgaaaagctttctgatctatg

SEQ ID NO: 60694 - DNA, 1692 bp, Zea Mays
agaatttccgggtgtgggtggacagactggtcacatcgccgatcggtacaagcaactggttggtgaggtttgataactgggagatggaaggtggcgttcggtactgctgccgcactactcttctgctgaataacaaggttccaaaagaactagaagtacagattggttgaacttcaaacaaatacaaagagctatgcatacaagtggtggaggcctggtggatcaaggtcgttgtcgtctccaggtccatcaaatgcgacaaggtcgagcgcacgcaattcagctccgaagtcatctcctttcaacagaaagatgcaagtaacaccaagtcacttgcctttgatggttgatacatttcactgtatatcattgcacgacagatccatttagtacctttttctgagttaaactacttcaaacattgctgaagactacaaccagttgttgtaattgaagcgggtcaagacatagcatttgcaaagatttagttcattctcatcactctgcaatattcggttcatggcctgtcttattttttcccctacaagtcatctacgacagtttgccagtagcactaaatcttttaactgtggttctctactatgtgtaatctcatatcaagattaatgagtatcgtgatcgtataattttgaatcctatcaacccatatggcaaggcaaagaaaaatgacagtggacatcattctagattttacaaaatcaaaggagcaaccagacatggctgtcatgatctaagatacttcaacgtgattggatcgaacccaaacatatgactaggagaagctccaaggccactttgtcaagggtctctgcaatgcacctactggtgcatgatttactggaggttgtgcgcatgaatgtgccacacattggtatgggggttggagttgaagcaggtgattttcaccaacattggtttgcgaactggagttgaagcaggagacatgattgttattcctatcatgtgcacactgcctcctcgctgtcatttgtcgtcactctcgtagtcctgataccggagcatggttgccaggggagagcagtccaaggcaaatttgccatgttggagcagtcacaggagccaaggggctgcagtcacaggtcctgctagccaggatggagcaatcataggacctcctagcagtccaaggaaaatttgcgaggtggagtagttgcaacttttgaaacccacgtgataacatgctcaagcgttcgtatgataaaaaagatggcacataatcaaaagaagatctcatgttctgcgtttgtgaacctgtttgtattttttgaacttgttttgtgaacctctatttgtaaacctgtaaaatctgaggttgtgaatagatttgggtaacttcatacaagtggtggaggcctggtggtaatcctggatgcatataaagcgaggcatgcaatatccatagcactcgtttgacagaaggcaacaccatcaaccttgtcctccacctttaaactagcatgagcaccatccttcttcacatttatattcatgtcccctatacgttcctcaaatacgtttgaaccatgtgtaccactatgtgaaccaactgagttcgtagactgatcaatgagtcaccttattgtggacgcagctctaaaaaatgttgtatctacaaatagattgtgtaaacgaaaagctttctgatctatg

SEQ ID NO: 60695 - DNA, 1464 bp, Zea Mays
caagaatttccgggtgtgggtggacagactggtcacatcgccgatcggtacaagcaactggttggtgaggtttgataactgggagatggaaggtggcgttcggtactgctgccgcactactcttctgctgaataacaagcaggatcaaggtcgttgtcgtctccaggtccatcaaatgcgacaaggtcgagcgcacgcaattcagctccgaagtcatctcctttcaacagaaagatgcaagtaacaccaagtcacttgcctttgatggttgatacatttcactgtatatcattgcacgacagatccatttagtacctttttctgagttaaactacttcaaacattgctgaagactacaaccagttgttgtaattgaagcgggtcaagacatagcatttgcaaagatttagttcattctcatcactctgcaatattcgggttctctactatgtgtaatctcatatcaagattaatgagtatcgtgatcgtataattttgaatcctatcaacccatatggcaaggcaaagaaaaatgacagtggacatcattctagattttacaaaatcaaaggagcaaccagacatggctgtcatgatctaagatacttcaacgtgattggatcgaacccaaacatatgactaggagaagctccaaggccactttgtcaagggtctctgcaatgcacctactggtgcatgatttactggaggttgtgcgcatgaatgtgccacacattggtatgggggttggagttgaagcaggtgattttcaccaacattggtttgcgaactggagttgaagcaggttattcatttgatgaaagtgggagagcagtccaaggcaaatttgccatgttggagcagtcacaggagccaaggggctgcagtcacaggtcctgctagccaggatggagcaatcataggacctcctagcagtccaaggaaaatttgcgaggtggagtagttgcaacttttgaaacccacgtgataacatgctcaagcgttcgtatgataaaaaagatggcacataatcaaaagaagatctcatgttctgcgtttgtgaacctgtttgtattttttgaacttgttttgtgaacctctatttgtaaacctgtaaaatctgaggttgtgaatagatttgggtaacttcatacaagtggtggaggcctggtggtaatcctggatgcatataaagcgaggcatgcaatatccatagcactcgtttgacagaaggcaacaccatcaaccttgtcctccacctttaaactagcatgagcaccatccttcttcacatttatattcatgtcccctatacgttcctcaaatacgtttgaaccatgtgtaccactatgtgaaccaactgagttcgtagactgatcaatgagtcaccttattgtggacgcagctctaaaaaatgttgtatctacaaatagattgtgtaaacgaaaagctttctgatctatg

SEQ ID NO: 60696 - DNA, 1575 bp, Zea Mays
caagaatttccgggtgtgggtggacagactggtcacatcgccgatcggtacaagcaactggttggtgaggtttgataactgggagatggaaggtggcgttcggtactgctgccgcactactcttctgctgaataacaaggttccaaaagaactagaagtacagattggttgaacttcaaacaaatacaaagagctatgcatacaagtggtggaggcctggtggatcaaggtcgttgtcgtctccaggtccatcaaatgcgacaaggtcgagcgcacgcaattcagctccgaagtcatctcctttcaacagaaagatgcaagtaacaccaagtcacttgcctttgatggttgatacatttcactgtatatcattgcacgacagatccatttagtacctttttctgagttaaactacttcaaacattgctgaagactacaaccagttgttgtaattgaagcgggtcaagacatagcatttgcaaagatttagttcattctcatcactctgcaatattcgggttctctactatgtgtaatctcatatcaagattaatgagtatcgtgatcgtataattttgaatcctatcaacccatatggcaaggcaaagaaaaatgacagtggacatcattctagattttacaaaatcaaaggagcaaccagacatggctgtcatgatctaagatacttcaacgtgattggatcgaacccaaacatatgactaggagaagctccaaggccactttgtcaagggtctctgcaatgcacctactggtgcatgatttactggaggttgtgcgcatgaatgtgccacacattggtatgggggttggagttgaagcaggagacatgattgttattcctatcatgtgcacactgcctcctcgctgtcatttgtcgtcactctcgtagtcctgataccggagcatggttgccaggggagagcagtccaaggcaaatttgccatgttggagcagtcacaggagccaaggggctgcagtcacaggtcctgctagccaggatggagcaatcataggacctcctagcagtccaaggaaaatttgcgaggtggagtagttgcaacttttgaaacccacgtgataacatgctcaagcgttcgtatgataaaaaagatggcacataatcaaaagaagatctcatgttctgcgtttgtgaacctgtttgtattttttgaacttgttttgtgaacctctatttgtaaacctgtaaaatctgaggttgtgaatagatttgggtaacttcatacaagtggtggaggcctggtggtaatcctggatgcatataaagcgaggcatgcaatatccatagcactcgtttgacagaaggcaacaccatcaaccttgtcctccacctttaaactagcatgagcaccatccttcttcacatttatattcatgtcccctatacgttcctcaaatacgtttgaaccatgtgtaccactatgtgaaccaactgagttcgtagactgatcaatgagtcaccttattgtggacgcagctctaaaaaatgttgtatctacaaatagattgtgtaaacgaaaagctttctgatctatg

SEQ ID NO: 60697 - DNA, 1604 bp, Zea Mays
caagaatttccgggtgtgggtggacagactggtcacatcgccgatcggtacaagcaactggttggtgaggtttgataactgggagatggaaggtggcgttcggtactgctgccgcactactcttctgctgaataacaaggttccaaaagaactagaagtacagattggttgaacttcaaacaaatacaaagagctatgcatacaagtggtggaggcctggtggtaaattgtttatcaagatcgctagagcagatcaaggtcgttgtcgtctccaggtccatcaaatgcgacaaggtcgagcgcacgcaattcagctccgaagtcatctcctttcaacagaaagatgcaagtaacaccaagtcacttgcctttgatggttgatacatttcactgtatatcattgcacgacagatccatttagtacctttttctgagttaaactacttcaaacattgctgaagactacaaccagttgttgtaattgaagcgggtcaagacatagcatttgcaaagatttagttcattctcatcactctgcaatattcgggttctctactatgtgtaatctcatatcaagattaatgagtatcgtgatcgtataattttgaatcctatcaacccatatggcaaggcaaagaaaaatgacagtggacatcattctagattttacaaaatcaaaggagcaaccagacatggctgtcatgatctaagatacttcaacgtgattggatcgaacccaaacatatgactaggagaagctccaaggccactttgtcaagggtctctgcaatgcacctactggtgcatgatttactggaggttgtgcgcatgaatgtgccacacattggtatgggggttggagttgaagcaggagacatgattgttattcctatcatgtgcacactgcctcctcgctgtcatttgtcgtcactctcgtagtcctgataccggagcatggttgccaggggagagcagtccaaggcaaatttgccatgttggagcagtcacaggagccaaggggctgcagtcacaggtcctgctagccaggatggagcaatcataggacctcctagcagtccaaggaaaatttgcgaggtggagtagttgcaacttttgaaacccacgtgataacatgctcaagcgttcgtatgataaaaaagatggcacataatcaaaagaagatctcatgttctgcgtttgtgaacctgtttgtattttttgaacttgttttgtgaacctctatttgtaaacctgtaaaatctgaggttgtgaatagatttgggtaacttcatacaagtggtggaggcctggtggtaatcctggatgcatataaagcgaggcatgcaatatccatagcactcgtttgacagaaggcaacaccatcaaccttgtcctccacctttaaactagcatgagcaccatccttcttcacatttatattcatgtcccctatacgttcctcaaatacgtttgaaccatgtgtaccactatgtgaaccaactgagttcgtagactgatcaatgagtcaccttattgtggacgcagctctaaaaaatgttgtatctacaaatagattgtgtaaacgaaaagctttctgatctatg

SEQ ID NO: 60698 - DNA, 1693 bp, Zea Mays
acaagaatttccgggtgtgggtggacagactggtcacatcgccgatcggtacaagcaactggttggtgaggtttgataactgggagatggaaggtggcgttcggtactgctgccgcactactcttctgctgaataacaaggttccaaaagaactagaagtacagattggttgaacttcaaacaaatacaaagagctatgcatacaagtggtggaggcctggtggtaaattgtttatcaagatcgctagagcagttaaatttactcctattatcttctgggatagatttgggatcaaggtcgttgtcgtctccaggtccatcaaatgcgacaaggtcgagcgcacgcaattcagctccgaagtcatctcctttcaacagaaagatgcaagtaacaccaagtcacttgcctttgatggttgatacatttcactgtatatcattgcacgacagatccatttagtacctttttctgagttaaactacttcaaacattgctgaagactacaaccagcctacagttgttgtaattgaagcgggtcaagacatagcatttgcaaagatttagttcattctcatcactctgcaatattcgggttctctactatgtgtaatctcatatcaagattaatgagtatcgtgatcgtataattttgaatcctatcaacccatatggcaaggcaaagaaaaatgacagtggacatcattctagattttacaaaatcaaaggagcaaccagacatggctgtcatgatctaagatacttcaacgtgattggatcgaacccaaacatatgactaggagaagctccaaggccactttgtcaagggtctctgcaatgcacctactggtgcatgatttactggaggttgtgcgcatgaatgtgccacacattggtatgggggttggagttgaagcaggtgattttcaccaacattggtttgcgaactggagttgaagcaggagacatgattgttattcctatcatgtgcacactgcctcctcgctgtcatttgtcgtcactctcgtagtcctgataccggagcatggttgccaggggagagcagtccaaggcaaatttgccatgttggagcagtcacaggagccaaggggctgcagtcacaggtcctgctagccaggatggagcaatcataggacctcctagcagtccaaggaaaatttgcgaggtggagtagttgcaacttttgaaacccacgtgataacatgctcaagcgttcgtatgataaaaaagatggcacataatcaaaagaagatctcatgttctgcgtttgtgaacctgtttgtattttttgaacttgttttgtgaacctctatttgtaaacctgtaaaatctgaggttgtgaatagatttgggtaacttcatacaagtggtggaggcctggtggtaatcctggatgcatataaagcgaggcatgcaatatccatagcactcgtttgacagaaggcaacaccatcaaccttgtcctccacctttaaactagcatgagcaccatccttcttcacatttatattcatgtcccctatacgttcctcaaatacgtttgaaccatgtgtaccactatgtgaaccaactgagttcgtagactgatcaatgagtcaccttattgtggacgcagctctaaaaaatgttgtatctacaaatagattgtgtaaacgaaaagctttctgatctatg

SEQ ID NO: 60699 - DNA, 1769 bp, Zea Mays
ggcaacaagaatttccgggtgtgggtggacagactggtcacatcgccgatcggtacaagcaactggttggtgaggtttgataactgggagatggaaggtggcgttcggtactgctgccgcactactcttctgctgaataacaaggttccaaaagaactagaagtacagattggttgaacttcaaacaaatacaaagagctatgcatacaagtggtggaggcctggtggtaaattgtttatcaagatcgctagagcagttaaatttactcctattatcttctgggatagatttggcaggatcaaggtcgttgtcgtctccaggtccatcaaatgcgacaaggtcgagcgcacgcaattcagctccgaagtcatctcctttcaacagaaagatgcaagtaacaccaagtcacttgcctttgatggttgatacatttcactgtatatcattgcacgacagatccatttagtacctttttctgagttaaactacttcaaacattgctgaagactacaaccagttgttgtaattgaagcgggtcaagacatagcatttgcaaagatttagttcattctcatcactctgcaatattcggttcatggcctgtcttattttttcccctacaagtcatctacgacagtttgccagtagcactaaatcttttaactgtggttctctactatgtgtaatctcatatcaagattaatgagtatcgtgatcgtataattttgaatcctatcaacccatatggcaaggcaaagaaaaatgacagtggacatcattctagattttacaaaatcaaaggagcaaccagacatggctgtcatgatctaagatacttcaacgtgattggatcgaacccaaacatatgactaggagaagctccaaggccactttgtcaagggtctctgcaatgcacctactggtgcatgatttactggaggttgtgcgcatgaatgtgccacacattggtatgggggttggagttgaagcaggtgattttcaccaacattggtttgcgaactggagttgaagcaggagacatgattgttattcctatcatgtgcacactgcctcctcgctgtcatttgtcgtcactctcgtagtcctgataccggagcatggttgccaggggagagcagtccaaggcaaatttgccatgttggagcagtcacaggagccaaggggctgcagtcacaggtcctgctagccaggatggagcaatcataggacctcctagcagtccaaggaaaatttgcgaggtggagtagttgcaacttttgaaacccacgtgataacatgctcaagcgttcgtatgataaaaaagatggcacataatcaaaagaagatctcatgttctgcgtttgtgaacctgtttgtattttttgaacttgttttgtgaacctctatttgtaaacctgtaaaatctgaggttgtgaatagatttgggtaacttcatacaagtggtggaggcctggtggtaatcctggatgcatataaagcgaggcatgcaatatccatagcactcgtttgacagaaggcaacaccatcaaccttgtcctccacctttaaactagcatgagcaccatccttcttcacatttatattcatgtcccctatacgttcctcaaatacgtttgaaccatgtgtaccactatgtgaaccaactgagttcgtagactgatcaatgagtcaccttattgtggacgcagctctaaaaaatgttgtatctacaaatagattgtgtaaacgaaaagctttctgatctatg

SEQ ID NO: 60700 - DNA, 1596 bp, Zea Mays
gggcaacaagaatttccgggtgtgggtggacagactggtcacatcgccgatcggtacaagcaactggttggtgaggtttgataactgggagatggaaggtggcgttcggtactgctgccgcactactcttctgctgaataacaagagctatgcatacaagtggtggaggcctggtggtaaattgtttatcaagatcgctagagcagttaaatttactcctattatcttctgggatagatttgggatcaaggtcgttgtcgtctccaggtccatcaaatgcgacaaggtcgagcgcacgcaattcagctccgaagtcatctcctttcaacagaaagatgcaagtaacaccaagtcacttgcctttgatggttgatacatttcactgtatatcattgcacgacagatccatttagtacctttttctgagttaaactacttcaaacattgctgaagactacaaccagttgttgtaattgaagcgggtcaagacatagcatttgcaaagatttagttcattctcatcactctgcaatattcgggttctctactatgtgtaatctcatatcaagattaatgagtatcgtgatcgtataattttgaatcctatcaacccatatggcaaggcaaagaaaaatgacagtggacatcattctagattttacaaaatcaaaggagcaaccagacatggctgtcatgatctaagatacttcaacgtgattggatcgaacccaaacatatgactaggagaagctccaaggccactttgtcaagggtctctgcaatgcacctactggtgcatgatttactggaggttgtgcgcatgaatgtgccacacattggtatgggggttggagttgaagcaggagacatgattgttattcctatcatgtgcacactgcctcctcgctgtcatttgtcgtcactctcgtagtcctgataccggagcatggttgccaggggagagcagtccaaggcaaatttgccatgttggagcagtcacaggagccaaggggctgcagtcacaggtcctgctagccaggatggagcaatcataggacctcctagcagtccaaggaaaatttgcgaggtggagtagttgcaacttttgaaacccacgtgataacatgctcaagcgttcgtatgataaaaaagatggcacataatcaaaagaagatctcatgttctgcgtttgtgaacctgtttgtattttttgaacttgttttgtgaacctctatttgtaaacctgtaaaatctgaggttgtgaatagatttgggtaacttcatacaagtggtggaggcctggtggtaatcctggatgcatataaagcgaggcatgcaatatccatagcactcgtttgacagaaggcaacaccatcaaccttgtcctccacctttaaactagcatgagcaccatccttcttcacatttatattcatgtcccctatacgttcctcaaatacgtttgaaccatgtgtaccactatgtgaaccaactgagttcgtagactgatcaatgagtcaccttattgtggacgcagctctaaaaaatgttgtatctacaaatagattgtgtaaacgaaaagctttctgatctatg

SEQ ID NO: 60701 - DNA, 1501 bp, Zea Mays
gggcaacaagaatttccgggtgtgggtggacagactggtcacatcgccgatcggtacaagcaactggttggtgaggtttgataactgggagatggaaggtggcgttcggtactgctgccgcactactcttctgctgaataacaagcaggatcaaggtcgttgtcgtctccaggtccatcaaatgcgacaaggtcgagcgcacgcaattcagctccgaagtcatctcctttcaacagaaagatgcaagtaacaccaagtcacttgcctttgatggttgatacatttcactgtatatcattgcacgacagatccatttagtacctttttctgagttaaactacttcaaacattgctgaagactacaaccagttgttgtaattgaagcgggtcaagacatagcatttgcaaagatttagttcattctcatcactctgcaatattcgggttctctactatgtgtaatctcatatcaagattaatgagtatcgtgatcgtataattttgaatcctatcaacccatatggcaaggcaaagaaaaatgacagtggacatcattctagattttacaaaatcaaaggagcaaccagacatggctgtcatgatctaagatacttcaacgtgattggatcgaacccaaacatatgactaggagaagctccaaggccactttgtcaagggtctctgcaatgcacctactggtgcatgatttactggaggttgtgcgcatgaatgtgccacacattggtatgggggttggagttgaagcaggagacatgattgttattcctatcatgtgcacactgcctcctcgctgtcatttgtcgtcactctcgtagtcctgataccggagcatggttgccaggggagagcagtccaaggcaaatttgccatgttggagcagtcacaggagccaaggggctgcagtcacaggtcctgctagccaggatggagcaatcataggacctcctagcagtccaaggaaaatttgcgaggtggagtagttgcaacttttgaaacccacgtgataacatgctcaagcgttcgtatgataaaaaagatggcacataatcaaaagaagatctcatgttctgcgtttgtgaacctgtttgtattttttgaacttgttttgtgaacctctatttgtaaacctgtaaaatctgaggttgtgaatagatttgggtaacttcatacaagtggtggaggcctggtggtaatcctggatgcatataaagcgaggcatgcaatatccatagcactcgtttgacagaaggcaacaccatcaaccttgtcctccacctttaaactagcatgagcaccatccttcttcacatttatattcatgtcccctatacgttcctcaaatacgtttgaaccatgtgtaccactatgtgaaccaactgagttcgtagactgatcaatgagtcaccttattgtggacgcagctctaaaaaatgttgtatctacaaatagattgtgtaaacgaaaagctttctgatctatg

SEQ ID NO: 60702 - DNA, 1629 bp, Zea Mays
cagggcaacaagaatttccgggtgtgggtggacagactggtcacatcgccgatcggtacaagcaactggttggtgaggtttgataactgggagatggaaggtggcgttcggtactgctgccgcactactcttctgctgaataacaaggttccaaaagaactagaagtacagattggttgaacttcaaacaaatacaaagagctatgcatacaagtggtggaggcctggtggtaaattgtttatcaagatcgctagagcagttaaatttactcctattatcttctgggatagatttggcaggatcaaggtcgttgtcgtctccaggtccatcaaatgcgacaaggtcgagcgcacgcaattcagctccgaagtcatctcctttcaacagaaagatgcaagtaacaccaagtcacttgcctttgatggttgatacatttcactgtatatcattgcacgacagatccatttagtacctttttctgagttaaactacttcaaacattgctgaagactacaaccagcctacagttgttgtaattgaagcgggtcaagacatagcatttgcaaagatttagttcattctcatcactctgcaatattcgggttctctactatgtgtaatctcatatcaagattaatgagtatcgtgatcgtataattttgaatcctatcaacccatatggcaaggcaaagaaaaatgacagtggacatcattctagattttacaaaatcaaaggagcaaccagacatggctgtcatgatctaagatacttcaacgtgattggatcgaacccaaacatatgactaggagaagctccaaggccactttgtcaagggtctctgcaatgcacctactggtgcatgatttactggaggttgtgcgcatgaatgtgccacacattggtatgggggttggagttgaagcaggtgattttcaccaacattggtttgcgaactggagttgaagcaggttattcatttgatgaaagtgggagagcagtccaaggcaaatttgccatgttggagcagtcacaggagccaaggggctgcagtcacaggtcctgctagccaggatggagcaatcataggacctcctagcagtccaaggaaaatttgcgaggtggagtagttgcaacttttgaaacccacgtgataacatgctcaagcgttcgtatgataaaaaagatggcacataatcaaaagaagatctcatgttctgcgtttgtgaacctgtttgtattttttgaacttgttttgtgaacctctatttgtaaacctgtaaaatctgaggttgtgaatagatttgggtaacttcatacaagtggtggaggcctggtggtaatcctggatgcatataaagcgaggcatgcaatatccatagcactcgtttgacagaaggcaacaccatcaaccttgtcctccacctttaaactagcatgagcaccatccttcttcacatttatattcatgtcccctatacgttcctcaaatacgtttgaaccatgtgtaccactatgtgaaccaactgagttcgtagactgatcaatgagtcaccttattgtggacgcagctctaaaaaatgttgtatctacaaatagattgtgtaaacgaaaagctttctgatctatg

SEQ ID NO: 60703 - DNA, 1631 bp, Zea Mays
cagggcaacaagaatttccgggtgtgggtggacagactggtcacatcgccgatcggtacaagcaactggttggtgaggtttgataactgggagatggaaggtggcgttcggtactgctgccgcactactcttctgctgaataacaaggttccaaaagaactagaagtacagattggttgaacttcaaacaaatacaaagagctatgcatacaagtggtggaggcctggtggtaaattgtttatcaagatcgctagagcagttaaatttactcctattatcttctgggatagatttggcaggatcaaggtcgttgtcgtctccaggtccatcaaatgcgacaaggtcgagcgcacgcaattcagctccgaagtcatctcctttcaacagatccatttagtacctttttctgagttaaactacttcaaacattgctgaagactacaaccagcctacagttgttgtaattgaagcgggtcaagacatagcatttgcaaagatttagttcattctcatcactctgcaatattcgggttctctactatgtgtaatctcatatcaagattaatgagtatcgtgatcgtataattttgaatcctatcaacccatatggcaaggcaaagaaaaatgacagtggacatcattctagattttacaaaatcaaaggagcaaccagacatggctgtcatgatctaagatacttcaacgtgattggatcgaacccaaacatatgactaggagaagctccaaggccactttgtcaagggtctctgcaatgcacctactggtgcatgatttactggaggttgtgcgcatgaatgtgccacacattggtatgggggttggagttgaagcaggtgattttcaccaacattggtttgcgaactggagttgaagcaggagacatgattgttattcctatcatgtgcacactgcctcctcgctgtcatttgtcgtcactctcgtagtcctgataccggagcatggttgccaggggagagcagtccaaggcaaatttgccatgttggagcagtcacaggagccaaggggctgcagtcacaggtcctgctagccaggatggagcaatcataggacctcctagcagtccaaggaaaatttgcgaggtggagtagttgcaacttttgaaacccacgtgataacatgctcaagcgttcgtatgataaaaaagatggcacataatcaaaagaagatctcatgttctgcgtttgtgaacctgtttgtattttttgaacttgttttgtgaacctctatttgtaaacctgtaaaatctgaggttgtgaatagatttgggtaacttcatacaagtggtggaggcctggtggtaatcctggatgcatataaagcgaggcatgcaatatccatagcactcgtttgacagaaggcaacaccatcaaccttgtcctccacctttaaactagcatgagcaccatccttcttcacatttatattcatgtcccctatacgttcctcaaatacgtttgaaccatgtgtaccactatgtgaaccaactgagttcgtagactgatcaatgagtcaccttattgtggacgcagctctaaaaaatgttgtatctacaaatagattgtgtaaacgaaaagctttctgatctatg

SEQ ID NO: 60704 - DNA, 1522 bp, Zea Mays
acagggcaacaagaatttccgggtgtgggtggacagactggtcacatcgccgatcggtacaagcaactggttggtgaggtttgataactgggagatggaaggtggcgttcggtactgctgccgcactactcttctgctgaataacaaggttccaaaagaactagaagtacagattggttgaacttcaaacaaatacaaaggatcaaggtcgttgtcgtctccaggtccatcaaatgcgacaaggtcgagcgcacgcaattcagctccgaagtcatctcctttcaacagaaagatgcaagtaacaccaagtcacttgcctttgatggttgatacatttcactgtatatcattgcacgacagatccatttagtacctttttctgagttaaactacttcaaacattgctgaagactacaaccagttgttgtaattgaagcgggtcaagacatagcatttgcaaagatttagttcattctcatcactctgcaatattcgggttctctactatgtgtaatctcatatcaagattaatgagtatcgtgatcgtataattttgaatcctatcaacccatatggcaaggcaaagaaaaatgacagtggacatcattctagattttacaaaatcaaaggagcaaccagacatggctgtcatgatctaagatacttcaacgtgattggatcgaacccaaacatatgactaggagaagctccaaggccactttgtcaagggtctctgcaatgcacctactggtgcatgatttactggaggttgtgcgcatgaatgtgccacacattggtatgggggttggagttgaagcaggtgattttcaccaacattggtttgcgaactggagttgaagcaggttattcatttgatgaaagtgggagagcagtccaaggcaaatttgccatgttggagcagtcacaggagccaaggggctgcagtcacaggtcctgctagccaggatggagcaatcataggacctcctagcagtccaaggaaaatttgcgaggtggagtagttgcaacttttgaaacccacgtgataacatgctcaagcgttcgtatgataaaaaagatggcacataatcaaaagaagatctcatgttctgcgtttgtgaacctgtttgtattttttgaacttgttttgtgaacctctatttgtaaacctgtaaaatctgaggttgtgaatagatttgggtaacttcatacaagtggtggaggcctggtggtaatcctggatgcatataaagcgaggcatgcaatatccatagcactcgtttgacagaaggcaacaccatcaaccttgtcctccacctttaaactagcatgagcaccatccttcttcacatttatattcatgtcccctatacgttcctcaaatacgtttgaaccatgtgtaccactatgtgaaccaactgagttcgtagactgatcaatgagtcaccttattgtggacgcagctctaaaaaatgttgtatctacaaatagattgtgtaaacgaaaagctttctgatctatg

SEQ ID NO: 60705 - DNA, 1479 bp, Zea Mays
acagggcaacaagaatttccgggtgtgggtggacagactggtcacatcgccgatcggtacaagcaactggttggtgaggtttgataactgggagatggaaggtggcgttcggtactgctgccgcactactcttctgctgaataacaaggatcaaggtcgttgtcgtctccaggtccatcaaatgcgacaaggtcgagcgcacgcaattcagctccgaagtcatctcctttcaacagatccatttagtacctttttctgagttaaactacttcaaacattgctgaagactacaaccagcctacagttgttgtaattgaagcgggtcaagacatagcatttgcaaagatttagttcattctcatcactctgcaatattcgggttctctactatgtgtaatctcatatcaagattaatgagtatcgtgatcgtataattttgaatcctatcaacccatatggcaaggcaaagaaaaatgacagtggacatcattctagattttacaaaatcaaaggagcaaccagacatggctgtcatgatctaagatacttcaacgtgattggatcgaacccaaacatatgactaggagaagctccaaggccactttgtcaagggtctctgcaatgcacctactggtgcatgatttactggaggttgtgcgcatgaatgtgccacacattggtatgggggttggagttgaagcaggtgattttcaccaacattggtttgcgaactggagttgaagcaggagacatgattgttattcctatcatgtgcacactgcctcctcgctgtcatttgtcgtcactctcgtagtcctgataccggagcatggttgccaggggagagcagtccaaggcaaatttgccatgttggagcagtcacaggagccaaggggctgcagtcacaggtcctgctagccaggatggagcaatcataggacctcctagcagtccaaggaaaatttgcgaggtggagtagttgcaacttttgaaacccacgtgataacatgctcaagcgttcgtatgataaaaaagatggcacataatcaaaagaagatctcatgttctgcgtttgtgaacctgtttgtattttttgaacttgttttgtgaacctctatttgtaaacctgtaaaatctgaggttgtgaatagatttgggtaacttcatacaagtggtggaggcctggtggtaatcctggatgcatataaagcgaggcatgcaatatccatagcactcgtttgacagaaggcaacaccatcaaccttgtcctccacctttaaactagcatgagcaccatccttcttcacatttatattcatgtcccctatacgttcctcaaatacgtttgaaccatgtgtaccactatgtgaaccaactgagttcgtagactgatcaatgagtcaccttattgtggacgcagctctaaaaaatgttgtatctacaaatagattgtgtaaacgaaaagctttctgatctatg

SEQ ID NO: 60706 - DNA, 1730 bp, Zea Mays
acagggcaacaagaatttccgggtgtgggtggacagactggtcacatcgccgatcggtacaagcaactggttggtgaggtttgataactgggagatggaaggtggcgttcggtactgctgccgcactactcttctgctgaataacaaggttccaaaagaactagaagtacagattggttgaacttcaaacaaatacaaagagctatgcatacaagtggtggaggcctggtggtaaattgtttatcaagatcgctagagcagttaaatttactcctattatcttctgggatagatttggcaggatcaaggtcgttgtcgtctccaggtccatcaaatgcgacaaggtcgagcgcacgcaattcagctccgaagtcatctcctttcaacagaaagatgcaagtaacaccaagtcacttgcctttgatggttgatacatttcactgtatatcattgcacgacagatccatttagtacctttttctgagttaaactacttcaaacattgctgaagactacaaccagttgttgtaattgaagcgggtcaagacatagcatttgcaaagatttagttcattctcatcactctgcaatattcggttcatggcctgtcttattttttcccctacaagtcatctacgacagtttgccagtagcactaaatcttttaactgtggttctctactatgtgtaatctcatatcaagattaatgagtatcgtgatcgtataattttgaatcctatcaacccatatggcaaggcaaagaaaaatgacagtggacatcattctagattttacaaaatcaaaggagcaaccagacatggctgtcatgatctaagatacttcaacgtgattggatcgaacccaaacatatgactaggagaagctccaaggccactttgtcaagggtctctgcaatgcacctactggtgcatgatttactggaggttgtgcgcatgaatgtgccacacattggtatgggggttggagttgaagcaggagacatgattgttattcctatcatgtgcacactgcctcctcgctgtcatttgtcgtcactctcgtagtcctgataccggagcatggttgccaggggagagcagtccaaggcaaatttgccatgttggagcagtcacaggagccaaggggctgcagtcacaggtcctgctagccaggatggagcaatcataggacctcctagcagtccaaggaaaatttgcgaggtggagtagttgcaacttttgaaacccacgtgataacatgctcaagcgttcgtatgataaaaaagatggcacataatcaaaagaagatctcatgttctgcgtttgtgaacctgtttgtattttttgaacttgttttgtgaacctctatttgtaaacctgtaaaatctgaggttgtgaatagatttgggtaacttcatacaagtggtggaggcctggtggtaatcctggatgcatataaagcgaggcatgcaatatccatagcactcgtttgacagaaggcaacaccatcaaccttgtcctccacctttaaactagcatgagcaccatccttcttcacatttatattcatgtcccctatacgttcctcaaatacgtttgaaccatgtgtaccactatgtgaaccaactgagttcgtagactgatcaatgagtcaccttattgtggacgcagctctaaaaaatgttgtatctacaaatagattgtgtaaacgaaaagctttctgatctatg

SEQ ID NO: 60707 - DNA, 1654 bp, Zea Mays
acagggcaacaagaatttccgggtgtgggtggacagactggtcacatcgccgatcggtacaagcaactggttggtgaggtttgataactgggagatggaaggtggcgttcggtactgctgccgcactactcttctgctgaataacaaggttccaaaagaactagaagtacagattggttgaacttcaaacaaatacaaagagctatgcatacaagtggtggaggcctggtggtaaattgtttatcaagatcgctagagcagttaaatttactcctattatcttctgggatagatttggcaggatcaaggtcgttgtcgtctccaggtccatcaaatgcgacaaggtcgagcgcacgcaattcagctccgaagtcatctcctttcaacagaaagatgcaagtaacaccaagtcacttgcctttgatggttgatacatttcactgtatatcattgcacgacagatccatttagtacctttttctgagttaaactacttcaaacattgctgaagactacaaccagttgttgtaattgaagcgggtcaagacatagcatttgcaaagatttagttcattctcatcactctgcaatattcgggttctctactatgtgtaatctcatatcaagattaatgagtatcgtgatcgtataattttgaatcctatcaacccatatggcaaggcaaagaaaaatgacagtggacatcattctagattttacaaaatcaaaggagcaaccagacatggctgtcatgatctaagatacttcaacgtgattggatcgaacccaaacatatgactaggagaagctccaaggccactttgtcaagggtctctgcaatgcacctactggtgcatgatttactggaggttgtgcgcatgaatgtgccacacattggtatgggggttggagttgaagcaggagacatgattgttattcctatcatgtgcacactgcctcctcgctgtcatttgtcgtcactctcgtagtcctgataccggagcatggttgccaggggagagcagtccaaggcaaatttgccatgttggagcagtcacaggagccaaggggctgcagtcacaggtcctgctagccaggatggagcaatcataggacctcctagcagtccaaggaaaatttgcgaggtggagtagttgcaacttttgaaacccacgtgataacatgctcaagcgttcgtatgataaaaaagatggcacataatcaaaagaagatctcatgttctgcgtttgtgaacctgtttgtattttttgaacttgttttgtgaacctctatttgtaaacctgtaaaatctgaggttgtgaatagatttgggtaacttcatacaagtggtggaggcctggtggtaatcctggatgcatataaagcgaggcatgcaatatccatagcactcgtttgacagaaggcaacaccatcaaccttgtcctccacctttaaactagcatgagcaccatccttcttcacatttatattcatgtcccctatacgttcctcaaatacgtttgaaccatgtgtaccactatgtgaaccaactgagttcgtagactgatcaatgagtcaccttattgtggacgcagctctaaaaaatgttgtatctacaaatagattgtgtaaacgaaaagctttctgatctatg

SEQ ID NO: 60708 - DNA, 1623 bp, Zea Mays
acagggcaacaagaatttccgggtgtgggtggacagactggtcacatcgccgatcggtacaagcaactggttggtgaggtttgataactgggagatggaaggtggcgttcggtactgctgccgcactactcttctgctgaataacaaggttccaaaagaactagaagtacagattggttgaacttcaaacaaatacaaagagctatgcatacaagtggtggaggcctggtggtaaattgtttatcaagatcgctagagcagttaaatttactcctattatcttctgggatagatttggcaggatcaaggtcgttgtcgtctccaggtccatcaaatgcgacaaggtcgagcgcacgcaattcagctccgaagtcatctcctttcaacagaaagatgcaagtaacaccaagtcacttgcctttgatggttgatacatttcactgtatatcattgcacgacagatccatttagtacctttttctgagttaaactacttcaaacattgctgaagactacaaccagttgttgtaattgaagcgggtcaagacatagcatttgcaaagatttagttcattctcatcactctgcaatattcgggttctctactatgtgtaatctcatatcaagattaatgagtatcgtgatcgtataattttgaatcctatcaacccatatggcaaggcaaagaaaaatgacagtggacatcattctagattttacaaaatcaaaggagcaaccagacatggctgtcatgatctaagatacttcaacgtgattggatcgaacccaaacatatgactaggagaagctccaaggccactttgtcaagggtctctgcaatgcacctactggtgcatgatttactggaggttgtgcgcatgaatgtgccacacattggtatgggggttggagttgaagcaggtgattttcaccaacattggtttgcgaactggagttgaagcaggttattcatttgatgaaagtgggagagcagtccaaggcaaatttgccatgttggagcagtcacaggagccaaggggctgcagtcacaggtcctgctagccaggatggagcaatcataggacctcctagcagtccaaggaaaatttgcgaggtggagtagttgcaacttttgaaacccacgtgataacatgctcaagcgttcgtatgataaaaaagatggcacataatcaaaagaagatctcatgttctgcgtttgtgaacctgtttgtattttttgaacttgttttgtgaacctctatttgtaaacctgtaaaatctgaggttgtgaatagatttgggtaacttcatacaagtggtggaggcctggtggtaatcctggatgcatataaagcgaggcatgcaatatccatagcactcgtttgacagaaggcaacaccatcaaccttgtcctccacctttaaactagcatgagcaccatccttcttcacatttatattcatgtcccctatacgttcctcaaatacgtttgaaccatgtgtaccactatgtgaaccaactgagttcgtagactgatcaatgagtcaccttattgtggacgcagctctaaaaaatgttgtatctacaaatagattgtgtaaacgaaaagctttctgatctatg

SEQ ID NO: 60709 - DNA, 1661 bp, Zea Mays
caaacagggcaacaagaatttccgggtgtgggtggacagactggtcacatcgccgatcggtacaagcaactggttggtgaggtttgataactgggagatggaaggtggcgttcggtactgctgccgcactactcttctgctgaataacaaggttccaaaagaactagaagtacagattggttgaacttcaaacaaatacaaagagctatgcatacaagtggtggaggcctggtggtaaattgtttatcaagatcgctagagcagttaaatttactcctattatcttctgggatagatttgggatcaaggtcgttgtcgtctccaggtccatcaaatgcgacaaggtcgagcgcacgcaattcagctccgaagtcatctcctttcaacagaaagatgcaagtaacaccaagtcacttgcctttgatggttgatacatttcactgtatatcattgcacgacagatccatttagtacctttttctgagttaaactacttcaaacattgctgaagactacaaccagcctacagttgttgtaattgaagcgggtcaagacatagcatttgcaaagatttagttcattctcatcactctgcaatattcgggttctctactatgtgtaatctcatatcaagattaatgagtatcgtgatcgtataattttgaatcctatcaacccatatggcaaggcaaagaaaaatgacagtggacatcattctagattttacaaaatcaaaggagcaaccagacatggctgtcatgatctaagatacttcaacgtgattggatcgaacccaaacatatgactaggagaagctccaaggccactttgtcaagggtctctgcaatgcacctactggtgcatgatttactggaggttgtgcgcatgaatgtgccacacattggtatgggggttggagttgaagcaggagacatgattgttattcctatcatgtgcacactgcctcctcgctgtcatttgtcgtcactctcgtagtcctgataccggagcatggttgccaggggagagcagtccaaggcaaatttgccatgttggagcagtcacaggagccaaggggctgcagtcacaggtcctgctagccaggatggagcaatcataggacctcctagcagtccaaggaaaatttgcgaggtggagtagttgcaacttttgaaacccacgtgataacatgctcaagcgttcgtatgataaaaaagatggcacataatcaaaagaagatctcatgttctgcgtttgtgaacctgtttgtattttttgaacttgttttgtgaacctctatttgtaaacctgtaaaatctgaggttgtgaatagatttgggtaacttcatacaagtggtggaggcctggtggtaatcctggatgcatataaagcgaggcatgcaatatccatagcactcgtttgacagaaggcaacaccatcaaccttgtcctccacctttaaactagcatgagcaccatccttcttcacatttatattcatgtcccctatacgttcctcaaatacgtttgaaccatgtgtaccactatgtgaaccaactgagttcgtagactgatcaatgagtcaccttattgtggacgcagctctaaaaaatgttgtatctacaaatagattgtgtaaacgaaaagctttctgatctatg

SEQ ID NO: 60710 - DNA, 1700 bp, Zea Mays
caaacagggcaacaagaatttccgggtgtgggtggacagactggtcacatcgccgatcggtacaagcaactggttggtgaggtttgataactgggagatggaaggtggcgttcggtactgctgccgcactactcttctgctgaataacaaggttccaaaagaactagaagtacagattggttgaacttcaaacaaatacaaagagctatgcatacaagtggtggaggcctggtggtaaattgtttatcaagatcgctagagcagttaaatttactcctattatcttctgggatagatttggcaggatcaaggtcgttgtcgtctccaggtccatcaaatgcgacaaggtcgagcgcacgcaattcagctccgaagtcatctcctttcaacagaaagatgcaagtaacaccaagtcacttgcctttgatggttgatacatttcactgtatatcattgcacgacagatccatttagtacctttttctgagttaaactacttcaaacattgctgaagactacaaccagttgttgtaattgaagcgggtcaagacatagcatttgcaaagatttagttcattctcatcactctgcaatattcgggttctctactatgtgtaatctcatatcaagattaatgagtatcgtgatcgtataattttgaatcctatcaacccatatggcaaggcaaagaaaaatgacagtggacatcattctagattttacaaaatcaaaggagcaaccagacatggctgtcatgatctaagatacttcaacgtgattggatcgaacccaaacatatgactaggagaagctccaaggccactttgtcaagggtctctgcaatgcacctactggtgcatgatttactggaggttgtgcgcatgaatgtgccacacattggtatgggggttggagttgaagcaggtgattttcaccaacattggtttgcgaactggagttgaagcaggagacatgattgttattcctatcatgtgcacactgcctcctcgctgtcatttgtcgtcactctcgtagtcctgataccggagcatggttgccaggggagagcagtccaaggcaaatttgccatgttggagcagtcacaggagccaaggggctgcagtcacaggtcctgctagccaggatggagcaatcataggacctcctagcagtccaaggaaaatttgcgaggtggagtagttgcaacttttgaaacccacgtgataacatgctcaagcgttcgtatgataaaaaagatggcacataatcaaaagaagatctcatgttctgcgtttgtgaacctgtttgtattttttgaacttgttttgtgaacctctatttgtaaacctgtaaaatctgaggttgtgaatagatttgggtaacttcatacaagtggtggaggcctggtggtaatcctggatgcatataaagcgaggcatgcaatatccatagcactcgtttgacagaaggcaacaccatcaaccttgtcctccacctttaaactagcatgagcaccatccttcttcacatttatattcatgtcccctatacgttcctcaaatacgtttgaaccatgtgtaccactatgtgaaccaactgagttcgtagactgatcaatgagtcaccttattgtggacgcagctctaaaaaatgttgtatctacaaatagattgtgtaaacgaaaagctttctgatctatg

SEQ ID NO: 60711 - DNA, 1550 bp, Zea Mays
caaacagggcaacaagaatttccgggtgtgggtggacagactggtcacatcgccgatcggtacaagcaactggttggtgaggtttgataactgggagatggaaggtggcgttcggtactgctgccgcactactcttctgctgaataacaagcaggatcaaggtcgttgtcgtctccaggtccatcaaatgcgacaaggtcgagcgcacgcaattcagctccgaagtcatctcctttcaacagaaagatgcaagtaacaccaagtcacttgcctttgatggttgatacatttcactgtatatcattgcacgacagatccatttagtacctttttctgagttaaactacttcaaacattgctgaagactacaaccagttgttgtaattgaagcgggtcaagacatagcatttgcaaagatttagttcattctcatcactctgcaatattcgggttctctactatgtgtaatctcatatcaagattaatgagtatcgtgatcgtataattttgaatcctatcaacccatatggcaaggcaaagaaaaatgacagtggacatcattctagattttacaaaatcaaaggagcaaccagacatggctgtcatgatctaagatacttcaacgtgattggatcgaacccaaacatatgactaggagaagctccaaggccactttgtcaagggtctctgcaatgcacctactggtgcatgatttactggaggttgtgcgcatgaatgtgccacacattggtatgggggttggagttgaagcaggtgattttcaccaacattggtttgcgaactggagttgaagcaggagacatgattgttattcctatcatgtgcacactgcctcctcgctgtcatttgtcgtcactctcgtagtcctgataccggagcatggttgccaggggagagcagtccaaggcaaatttgccatgttggagcagtcacaggagccaaggggctgcagtcacaggtcctgctagccaggatggagcaatcataggacctcctagcagtccaaggaaaatttgcgaggtggagtagttgcaacttttgaaacccacgtgataacatgctcaagcgttcgtatgataaaaaagatggcacataatcaaaagaagatctcatgttctgcgtttgtgaacctgtttgtattttttgaacttgttttgtgaacctctatttgtaaacctgtaaaatctgaggttgtgaatagatttgggtaacttcatacaagtggtggaggcctggtggtaatcctggatgcatataaagcgaggcatgcaatatccatagcactcgtttgacagaaggcaacaccatcaaccttgtcctccacctttaaactagcatgagcaccatccttcttcacatttatattcatgtcccctatacgttcctcaaatacgtttgaaccatgtgtaccactatgtgaaccaactgagttcgtagactgatcaatgagtcaccttattgtggacgcagctctaaaaaatgttgtatctacaaatagattgtgtaaacgaaaagctttctgatctatg

SEQ ID NO: 60712 - DNA, 1697 bp, Zea Mays
caaacagggcaacaagaatttccgggtgtgggtggacagactggtcacatcgccgatcggtacaagcaactggttggtgaggtttgataactgggagatggaaggtggcgttcggtactgctgccgcactactcttctgctgaataacaaggttccaaaagaactagaagtacagattggttgaacttcaaacaaatacaaagagctatgcatacaagtggtggaggcctggtggtaaattgtttatcaagatcgctagagcagttaaatttactcctattatcttctgggatagatttgggatcaaggtcgttgtcgtctccaggtccatcaaatgcgacaaggtcgagcgcacgcaattcagctccgaagtcatctcctttcaacagaaagatgcaagtaacaccaagtcacttgcctttgatggttgatacatttcactgtatatcattgcacgacagatccatttagtacctttttctgagttaaactacttcaaacattgctgaagactacaaccagttgttgtaattgaagcgggtcaagacatagcatttgcaaagatttagttcattctcatcactctgcaatattcgggttctctactatgtgtaatctcatatcaagattaatgagtatcgtgatcgtataattttgaatcctatcaacccatatggcaaggcaaagaaaaatgacagtggacatcattctagattttacaaaatcaaaggagcaaccagacatggctgtcatgatctaagatacttcaacgtgattggatcgaacccaaacatatgactaggagaagctccaaggccactttgtcaagggtctctgcaatgcacctactggtgcatgatttactggaggttgtgcgcatgaatgtgccacacattggtatgggggttggagttgaagcaggtgattttcaccaacattggtttgcgaactggagttgaagcaggagacatgattgttattcctatcatgtgcacactgcctcctcgctgtcatttgtcgtcactctcgtagtcctgataccggagcatggttgccaggggagagcagtccaaggcaaatttgccatgttggagcagtcacaggagccaaggggctgcagtcacaggtcctgctagccaggatggagcaatcataggacctcctagcagtccaaggaaaatttgcgaggtggagtagttgcaacttttgaaacccacgtgataacatgctcaagcgttcgtatgataaaaaagatggcacataatcaaaagaagatctcatgttctgcgtttgtgaacctgtttgtattttttgaacttgttttgtgaacctctatttgtaaacctgtaaaatctgaggttgtgaatagatttgggtaacttcatacaagtggtggaggcctggtggtaatcctggatgcatataaagcgaggcatgcaatatccatagcactcgtttgacagaaggcaacaccatcaaccttgtcctccacctttaaactagcatgagcaccatccttcttcacatttatattcatgtcccctatacgttcctcaaatacgtttgaaccatgtgtaccactatgtgaaccaactgagttcgtagactgatcaatgagtcaccttattgtggacgcagctctaaaaaatgttgtatctacaaatagattgtgtaaacgaaaagctttctgatctatg

SEQ ID NO: 60713 - DNA, 1582 bp, Zea Mays
cgtggacaaacagggcaacaagaatttccgggtgtgggtggacagactggtcacatcgccgatcggtacaagcaactggttggtgaggtttgataactgggagatggaaggtggcgttcggtactgctgccgcactactcttctgctgaataacaaggttccaaaagaactagaagtacagattggttgaacttcaaacaaatacaaagagctatgcatacaagtggtggaggcctggtggatcaaggtcgttgtcgtctccaggtccatcaaatgcgacaaggtcgagcgcacgcaattcagctccgaagtcatctcctttcaacagaaagatgcaagtaacaccaagtcacttgcctttgatggttgatacatttcactgtatatcattgcacgacagatccatttagtacctttttctgagttaaactacttcaaacattgctgaagactacaaccagcctacagttgttgtaattgaagcgggtcaagacatagcatttgcaaagatttagttcattctcatcactctgcaatattcggttcatggcctgtcttattttttcccctacaagtcatctacgacagtttgccagtagcactaaatcttttaactgtggttctctactatgtgtaatctcatatcaagattaatgagtatcgtgatcgtataattttgaatcctatcaacccatatggcaaggcaaagaaaaatgacagtggacatcattctagattttacaaaatcaaaggagcaaccagacatggctgtcatgatctaagatacttcaacgtgattggatcgaacccaaacatatgactaggagaagctccaaggccactttgtcaagggtctctgcaatgcacctactggtgcatgatttactggaggttgtgcgcatgaatgtgccacacattggtatgggggttggagttgaagcaggggagagcagtccaaggcaaatttgccatgttggagcagtcacaggagccaaggggctgcagtcacaggtcctgctagccaggatggagcaatcataggacctcctagcagtccaaggaaaatttgcgaggtggagtagttgcaacttttgaaacccacgtgataacatgctcaagcgttcgtatgataaaaaagatggcacataatcaaaagaagatctcatgttctgcgtttgtgaacctgtttgtattttttgaacttgttttgtgaacctctatttgtaaacctgtaaaatctgaggttgtgaatagatttgggtaacttcatacaagtggtggaggcctggtggtaatcctggatgcatataaagcgaggcatgcaatatccatagcactcgtttgacagaaggcaacaccatcaaccttgtcctccacctttaaactagcatgagcaccatccttcttcacatttatattcatgtcccctatacgttcctcaaatacgtttgaaccatgtgtaccactatgtgaaccaactgagttcgtagactgatcaatgagtcaccttattgtggacgcagctctaaaaaatgttgtatctacaaatagattgtgtaaacgaaaagctttctgatctatg

SEQ ID NO: 60714 - DNA, 1576 bp, Zea Mays
cttgctacgtggacaaacagggcaacaagaatttccgggtgtgggtggacagactggtcacatcgccgatcggtacaagcaactggttggtgaggtttgataactgggagatggaaggtggcgttcggtactgctgccgcactactcttctgctgaataacaaggttccaaaagaactagaagtacagattggttgaacttcaaacaaatacaaagagctatgcatacaagtggtggaggcctggtggatcaaggtcgttgtcgtctccaggtccatcaaatgcgacaaggtcgagcgcacgcaattcagctccgaagtcatctcctttcaacagaaagatgcaagtaacaccaagtcacttgcctttgatggttgatacatttcactgtatatcattgcacgacagatccatttagtacctttttctgagttaaactacttcaaacattgctgaagactacaaccagcctacagttgttgtaattgaagcgggtcaagacatagcatttgcaaagatttagttcattctcatcactctgcaatattcgggttctctactatgtgtaatctcatatcaagattaatgagtatcgtgatcgtataattttgaatcctatcaacccatatggcaaggcaaagaaaaatgacagtggacatcattctagattttacaaaatcaaaggagcaaccagacatggctgtcatgatctaagatacttcaacgtgattggatcgaacccaaacatatgactaggagaagctccaaggccactttgtcaagggtctctgcaatgcacctactggtgcatgatttactggaggttgtgcgcatgaatgtgccacacattggtatgggggttggagttgaagcaggtgattttcaccaacattggtttgcgaactggagttgaagcaggttattcatttgatgaaagtgggagagcagtccaaggcaaatttgccatgttggagcagtcacaggagccaaggggctgcagtcacaggtcctgctagccaggatggagcaatcataggacctcctagcagtccaaggaaaatttgcgaggtggagtagttgcaacttttgaaacccacgtgataacatgctcaagcgttcgtatgataaaaaagatggcacataatcaaaagaagatctcatgttctgcgtttgtgaacctgtttgtattttttgaacttgttttgtgaacctctatttgtaaacctgtaaaatctgaggttgtgaatagatttgggtaacttcatacaagtggtggaggcctggtggtaatcctggatgcatataaagcgaggcatgcaatatccatagcactcgtttgacagaaggcaacaccatcaaccttgtcctccacctttaaactagcatgagcaccatccttcttcacatttatattcatgtcccctatacgttcctcaaatacgtttgaaccatgtgtaccactatgtgaaccaactgagttcgtagactgatcaatgagtcaccttattgtggacgcagctctaaaaaatgttgtatctacaaatagattgtgtaaacgaaaagctttctgatctatg

SEQ ID NO: 60715 - DNA, 3715 bp, Zea Mays
gtgatgttggagactttgatggagaatttatcgacgaagaattctaagtctaacgatgcgccggtcaacttcctgtggaagattgcccagttgtttatttccgctctactttgatgtgatacttgtttaagacactatgtctcagatgatgtaataaagttttatactctttttacgcctttattgcattgtcttttgatatattacacttgtgacgtcaacatatgtgtggaaatggatcctggcacacatatggtatgcgctcgattctaccccctggaatcgggtgtgacacccgcatactgagagatgtgattaatctttatcattggtttcacatgcattacacctgcatttattgttttatggtacaaagcacacatatttcagcacgggcatgcatcttttgttgagctagatagattgctactaaaatgatgaaaggaatgtgaaatgtttttcctctgaaaattctgaaatctggtttcaaacagactaagaccatgtaacaagatttcacttgatctataccactcagaggcaccactaatattttctcttaaagtgagaaaatgaattttgtgtttgctgaacttctctctggttgcttgtttatgtttttacttttcttgaggcagtcactaactgctcctttcttttatgattagagctaggataaaactgttgattgttacagccctgggcaaggattgatgcttgctagcttcaagattaggaccctaccacttgatgagaacagatagtgctatactgctatgtacatctacatttctccagttatacataatcagatcttgcttctagccaactgttgcaaatacattgatcccttaggggttgagatggaaactgccacaagggagggaggacgtgagtcagctgcacgtgccgacatacacatcacttcctgcctcgctgtccttgatcgagacaaaatcagaagagctgtatctatatgtactccataccttgacgtatgcaggggctagatccataccccggcctatctgccctgtgaggaatgtatacttctgcaagtttgaatactttgacaccttgtgaggagcactctttgaaggtggagaaggtgttgttccaagggaagccagactaccaaaatgttatggttttttagcttctcaatagccggcgacagtgcatacgacctgccccgcgctggggctgtgtctgccttctcctccttcgatgccatgacactgtaaagtgaagccttcgagctaggcgcggaggccagggagatgctatgcgcccacatctaccacgccgccttcatattgctcaagctcgcgctccgcaactcctgccccatctgccgccatgagatgcccaccgatgctgccctgcgggctgccgccagcgtcggcgttgccgaacgcgccgccggggaggaacaagcgtgggatgcgccccacgcgcgcgactttcacctgcctcccaatttgatccgtgagttcaccaggaccagaacttcttcgatgatttgttggaccatccctgctgatacaaacacaatcattttgtggcaggaaatcaccatattagagcttacaaccttcgcatcaactgaagagtttgacactcatgatccaaaggagaacactttgctactcccttacttgaggaaaaggtcaaaaatcattgagatagttgcagcgcgtgatatagtctttgctctatcacagttaggagtatgtgctgcttttagtagcggtacgttcgccgaggacaagacaaaaccggatgctggtttccctctttttgactcaccatgtcaacatggcaatttcaggacccaacgtctctgcgagagaccttgggttcccttatccgaaggcaggcaccgctaagcctacagacgtggtggtgaagttctacgtcctctacgagaagtggcggaggggcgagctcctgggttcttcgtcagttgcgcggtacttgaaaagcatcactcattcgaacggtacgattattcatccttctggatcggagcgttctcttcatgcgtctgttgacgctctaagttcttgctacgtggacaaacagggcaacaagaatttccgggtgtgggtggacagactggtcacatcgccgatcggtacaagcaactggttggtgaggtttgataactgggagatggaaggtggcgttcggtactgctgccgcactactcttctgctgaataacaaggttccaaaagaactagaagtacagattggttgaacttcaaacaaatacaaagagctatgcatacaagtggtggaggcctggtggatcaaggtcgttgtcgtctccaggtccatcaaatgcgacaaggtcgagcgcacgcaattcagctccgaagtcatctcctttcaacagaaagatgcaagtaacaccaagtcacttgcctttgatggttgatacatttcactgtatatcattgcacgacagatccatttagtacctttttctgagttaaactacttcaaacattgctgaagactacaaccagcctacagttgttgtaattgaagcgggtcaagacatagcatttgcaaagatttagttcattctcatcactctgcaatattcgggttctctactatgtgtaatctcatatcaagattaatgagtatcgtgatcgtataattttgaatcctatcaacccatatggcaaggcaaagaaaaatgacagtggacatcattctagattttacaaaatcaaaggagcaaccagacatggctgtcatgatctaagatacttcaacgtgattggatcgaacccaaacatatgactaggagaagctccaaggccactttgtcaagggtctctgcaatgcacctactggtgcatgatttactggaggttgtgcgcatgaatgtgccacacattggtatgggggttggagttgaagcaggtgattttcaccaacattggtttgcgaactggagttgaagcaggagacatgattgttattcctatcatgtgcacactgcctcctcgctgtcatttgtcgtcactctcgtagtcctgataccggagcatggttgccaggggagagcagtccaaggcaaatttgccatgttggagcagtcacaggagccaaggggctgcagtcacaggtcctgctagccaggatggagcaatcataggacctcctagcagtccaaggaaaatttgcgaggtggagtagttgcaacttttgaaacccacgtgataacatgctcaagcgttcgtatgataaaaaagatggcacataatcaaaagaagatctcatgttctgcgtttgtgaacctgtttgtattttttgaacttgttttgtgaacctctatttgtaaacctgtaaaatctgaggttgtgaatagatttgggtaacttcatacaagtggtggaggcctggtggtaatcctggatgcatataaagcgaggcatgcaatatccatagcactcgtttgacagaaggcaacaccatcaaccttgtcctccacctttaaactagcatgagcaccatccttcttcacatttatattcatgtcccctatacgttcctcaaatacgtttgaaccatgtgtaccactatgtgaaccaactgagttcgtagactgatcaatgagtcaccttattgtggacgcagctctaaaaaatgttgtatctacaaatagattgtgtaaacgaaaagctttctgatctatg

SEQ ID NO: 60716 - DNA, 4379 bp, Zea Mays
taatgatcaagtggtcgtgttgtacctatcctagccgtgtttgcaggcctctcaaattgaaccgattgcttcaagggtgccatacatgattgtgttaaccatgagagggattggcctggcactggttcattctacgggaacctcgacttcggtggagaatgtggtgtccctgtccaaactgtgttctacactccaactgaaaaccgtgcaaagttctggtacgcaacagattacgacatgtttagccttctgcattgctcacatggaagaggacttgagacccgggaccgagcagtacagattcatcgagcaatgccacattggcctcatgaagtttcacaatcacagtggtttttacaaggatttcagttcatggttgtacatagtttttttagttttttttttgaaaaatgaggcattttctttttaccggcggcggaggcgatggcaacaagcccttccctattcgaatctctgtgaccacagagcctacctcgctgagctcatcaccgagatcactggtgggatcaatgagctcgccgacgtagcacagttcttttgatgagggttgggcagaggctttaccttttgcgtcagacagtgctctctcacagcaattgtccttttgcctacctgtatcattctgtcatactatctgcaattcagctatgcacagaactatcaaaagcaagcaaagatgctctagagtacctgaggaaggctactttgtgctctataaggattgccaggaaagtgccagatttggcagagaacttcatgggcctggatgcatcattgttaaaggagaaacaccatgggtccttatatctgcaattcagctatgcacagaactatgcaaagcaagcaaagatgctctagagtacctgaggaagagctaggataaaactgttgattgttacagccctgggcaaggattgatgcttgctagcttcaagattaggaccctaccacttgatgagaacagatagtgctatactgctatgtacatctacatttctccagttatacataatcagatcttgcttctagccaactgttgcaaatacattgatcccttaggggttgagatggaaactgccacaagggagggaggacgtgagtcagctgcacgtgccgacatacacatcacttcctgcctcgctgtccttgatcgagacaaaatcagaagagctgtatctatatgtactccataccttgacgtatgcaggggctagatccataccccggcctatctgccctgtgaggaatgtatacttctgcaagtttgaatactttgacaccttgtgaggagcactctttgaaggtggagaaggtgttgttccaagggaagccagactaccaaaatgttatggttttttagcttctcaatagccggcgacagtgcatacgacctgccccgcgctggggctgtgtctgccttctcctccttcgatgccatgacactgtaaagtgaagccttcgagctaggcgcggaggccagggagatgctatgcgcccacatctaccacgccgccttcatattgctcaagctcgcgctccgcaactcctgccccatctgccgccatgagatgcccaccgatgctgccctgcgggctgccgccagcgtcggcgttgccgaacgcgccgccggggaggaacaagcgtgggatgcgccccacgcgcgcgactttcacctgcctcccaatttgatccgtgagttcaccaggaccagaacttcttcgatgatttgttggaccatccctgctgatacaaacacaatcattttgtggcaggaaatcaccatattagagcttacaaccttcgcatcaactgaagagtttgacactcatgatccaaaggagaacactttgctactcccttacttgaggaaaaggtcaaaaatcattgagatagttgcagcgcgtgatatagtctttgctctatcacagttaggagtatgtgctgcttttagtagcggtacgttcgccgaggacaagacaaaaccggatgctggtttccctctttttgactcaccatgtcaacatggcaatttcaggacccaacgtctctgcgagagaccttgggttcccttatccgaaggcaggcaccgctaagcctacagacgtggtggtgaagttctacgtcctctacgagaagtggcggaggggcgagctcctgggttcttcgtcagttgcgcggtacttgaaaagcatcactcattcgaacggtacgattattcatccttctggatcggagcgttctcttcatgcgtctgttgacgctctaagttcttgctacgtggacaaacagggcaacaagaatttccgggtgtgggtggacagactggtcacatcgccgatcggtacaagcaactggttggtgaggtttgataactgggagatggaaggtggcgttcggtactgctgccgcactactcttctgctgaataacaaggttccaaaagaactagaagtacagattggttgaacttcaaacaaatacaaagagctatgcatacaagtggtggaggcctggtggatcaaggtcgttgtcgtctccaggtccatcaaatgcgacaaggtcgagcgcacgcaattcagctccgaagtcatctcctttcaacagaaagatgcaagtaacaccaagtcacttgcctttgatggttgatacatttcactgtatatcattgcacgacagatccatttagtacctttttctgagttaaactacttcaaacattgctgaagactacaaccagcctacagttgttgtaattgaagcgggtcaagacatagcatttgcaaagatttagttcattctcatcactctgcaatattcgggtatctcacataaagtttttattgcagttctatttccttttctcatgctgtgcatctttcttatttttgttcaaacaatataatgataagttcatttacttattactgtgattgtttggagcagcacacatgttattataagtcaaattttaagtcaaattattctcgacacgtgattcggttcatggcctatagtaaaaaggatagtttacagtaataacatgtgtgctgctccaaacattatgaggatagtaagtcagttcatttttagtttagaattggctctctcttatttttggtcaaattctagaatgatcagatgctcgacaatacttattattgtgattgtttgctcattttcagttcatggcctgtcttattttttcccctacaagtcatctacgacagtttgccagtagcactaaatcttttaactgtggttctctactatgtgtaatctcatatcaagattaatgagtatcgtgatcgtataattttgaatcctatcaacccatatggcaaggcaaagaaaaatgacagtggacatcattctagattttacaaaatcaaaggagcaaccagacatggctgtcatgatctaagatacttcaacgtgattggatcgaacccaaacatatgactaggagaagctccaaggccactttgtcaagggtctctgcaatgcacctactggtgcatgatttactggaggttgtgcgcatgaatgtgccacacattggtatgggggttggagttgaagcaggtgattttcaccaacattggtttgcgaactggagttgaagcaggagacatgattgttattcctatcatgtgcacactgcctcctcgctgtcatttgtcgtcactctcgtagtcctgataccggagcatggttgccaggggagagcagtccaaggcaaatttgccatgttggagcagtcacaggagccaaggggctgcagtcacaggtcctgctagccaggatggagcaatcataggacctcctagcagtccaaggaaaatttgcgaggtggagtagttgcaacttttgaaacccacgtgataacatgctcaagcgttcgtatgataaaaaagatggcacataatcaaaagaagatctcatgttctgcgtttgtgaacctgtttgtattttttgaacttgttttgtgaacctctatttgtaaacctgtaaaatctgaggttgtgaatagatttgggtaacttcatacaagtggtggaggcctggtggtaatcctggatgcatataaagcgaggcatgcaatatccatagcactcgtttgacagaaggcaacaccatcaaccttgtcctccacctttaaactagcatgagcaccatccttcttcacatttatattcatgtcccctatacgttcctcaaatacgtttgaaccatgtgtaccactatgtgaaccaactgagttcgtagactgatcaatgagtcaccttattgtggacgcagctctaaaaaatgttgtatctacaaatagattgtgtaaacgaaaagctttctgatctatg

SEQ ID NO: 60717 - DNA, 4575 bp, Zea Mays
ctccctccccatgaaacccccttcccccaatctacccctctctgtgcccccgacatccacgctgcctcagcccgccgtccagcgccctctctgcgcctccctccccacaccgcctcagcccgccgttcgccacgctccccacgctgcctccccccgtcgcccctccctcccgcgcggaactccgccatgctccccacgtcgcctccccccatcgcccaccagccgtcgcccaccagcccacactatctcacgccatggatggtggcaacagtccccgcccccgtacctcacacgcatcaggctgggctggccgatcccgccgccgcaaacgccgcgcccagccccgatgtcagcgcggcccgcccgccaacgcactttcggcctccccccgcccctcccttcgcccgcccacccgcaacctccgcgccatccgcaacctccgcccgcttctcacgccaccgacccgacctccgcgccatccgcaaccgtcgtgcgtcttatcccttctctaccgcgcactccgtgtggaacaacctccgcgtaggaagcctcctcccttccccatccccattccccaccacgcgcttcggggacggcgagctccgggcgggagcgaccgccgggcgcttctgctgctggtgcggaggaggaggagcggcgagggtggttcggcgcaggctccacggcggcggtgcccgagccgagttcgactggctggcgctctactgcaacctcacacgcggcgatgggccggacggtaacaatggcaagctggtcctggaggagctgctgtcgtgcgccgccacccaattttgttttccccaaatcctgagctgtgaagagaagaagaagacaaggacgcggcgagtacgatgacgagcgccgcacagcaagtcagcgaggagcacgatgacgcgatgaggaccacgagctgccgaggaagtcaaggacgacgacggcgcagagacccgcgagttgagacatcttcttcgccggcgtgaaccgcaaggctgagacatcttcttcgccgggttcggccacgccgacaccaccgacccgatgtacctatcctagccgtgtttgcaggcctctcaaattgaaccgattgcttcaagggtgccatacatgattgtgttaaccatgagagggattggcctggcactggttcattctacgggaacctcgacttcggtggagaatgtggtgtccctgtccaaactgtgttctacactccaactgaaaaccgtgcaaagttctggtacgcaacagattacgacatgtttagccttctgcattgctcacatggaagaggacttgagacccgggaccgagcagtacagattcatcgagcaatgccacattggcctcatgaagtttcacaatcacagtggtttttacaaggatttcagttcatgggttgggcagaggctttaccttttgcgtcagacagtgctctctcacagcaattgtccttttgcctacctgtatcattctgtcatactatctgcaattcagctatgcacagaactatcaaaagcaagcaaagatgctctagagtacctgaggaaggctactttgtgctctataaggattgccaggaaagtgccagatttggcagagaacttcatgggcctggatgcatcattgttaaaggagaaacaccatgggtccttatatctgcaattcagctatgcacagaactatgcaaagcaagcaaagatgctctagagtacctgaggaaggtaagggcatctatttcttaccacaaggccccaacaaatataagtatagaactacagttgcaaatacattgatcccttaggggttgagatggaaactgccacaagggagggaggacgtgagtcagctgcacgtgccgacatacacatcacttcctgcctcgctgtccttgatcgagacaaaatcagaagagctgtatctatatgtactccataccttgacgtatgcaggggctagatccataccccggcctatctgccctgtgaggaatgtatacttctgcaagtttgaatactttgacaccttgtgaggagcactctttgaaggtggagaaggtgttgttccaagggaagccagactaccaaaatgttatggttttttagcttctcaatagccggcgacagtgcatacgacctgccccgcgctggggctgtgtctgccttctcctccttcgatgccatgacactgtaaagtgaagccttcgagctaggcgcggaggccagggagatgctatgcgcccacatctaccacgccgccttcatattgctcaagctcgcgctccgcaactcctgccccatctgccgccatgagatgcccaccgatgctgccctgcgggctgccgccagcgtcggcgttgccgaacgcgccgccggggaggaacaagcgtgggatgcgccccacgcgcgcgactttcacctgcctcccaatttgatccgtgagttcaccaggaccagaacttcttcgatgatttgttggaccatccctgctgatacaaacacaatcattttgtggcaggaaatcaccatattagagcttacaaccttcgcatcaactgtttgtgcagcaatgagtttatcttaagttatgtttttttggtaatatcggttgactgcacttaagttctaataaagcatctttgatgtcacttgtaggaagagtttgacactcatgatccaaaggagaacactttgctactcccttacttgaggaaaaggtcaaaaatcattgagatagttgcagcgcgtgatatagtctttgctctatcacagttaggagtatgtgctgcttttagtagcggtacgttcgccgaggacaagacaaaaccggatgctggtttccctctttttgactcaccatgtcaacatggcaatttcaggacccaacgtctctgcgagagaccttgggttcccttatccgaaggcaggcaccgctaagcctacagacgtggtggtgaagttctacgtcctctacgagaagtggcggaggggcgagctcctgggttcttcgtcagttgcgcggtacttgaaaagcatcactcattcgaacggtacgattattcatccttctggatcggagcgttctcttcatgcgtctgttgacgctctaagttcttgctacgtggacaaacagggcaacaagaatttccgggtgtgggtggacagactggtcacatcgccgatcggtacaagcaactggttggtgaggtttgataactgggagatggaaggtggcgttcggtactgctgccgcactactcttctgctgaataacaaggatcaaggtcgttgtcgtctccaggtccatcaaatgcgacaaggtcgagcgcacgcaattcagctccgaagtcatctcctttcaacagatccatttagtacctttttctgagttaaactacttcaaacattgctgaagactacaaccagttgttgtaattgaagcgggtcaagacatagcatttgcaaagatttagttcattctcatcactctgcaatattcgggttctctactatgtgtaatctcatatcaagattaatgagtatcgtgatcgtataattttgaatcctatcaacccatatggcaaggcaaagaaaaatgacagtggacatcattctagattttacaaaatcaaaggagcaaccagacatggctgtcatgatctaagatacttcaacgtgattggatcgaacccaaacatatgactaggagaagctccaaggccactttgtcaagggtctctgcaatgcacctactggtgcatgatttactggaggttgtgcgcatgaatgtgccacacattggtatgggggttggagttgaagcaggagacatgattgttattcctatcatgtgcacactgcctcctcgctgtcatttgtcgtcactctcgtagtcctgataccggagcatggttgccaggggagagcagtccaaggcaaatttgccatgttggagcagtcacaggagccaaggggctgcagtcacaggtcctgctagccaggatggagcaatcataggacctcctagcagtccaaggaaaatttgcgaggtggagtagttgcaacttttgaaacccacgtgataacatgctcaagcgttcgtatgataaaaaagatggcacataatcaaaagaagatctcatgttctgcgtttgtgaacctgtttgtattttttgaacttgttttgtgaacctctatttgtaaacctgtaaaatctgaggttgtgaatagatttgggtaacttcatacaagtggtggaggcctggtggtaatcctggatgcatataaagcgaggcatgcaatatccatagcactcgtttgacagaaggcaacaccatcaaccttgtcctccacctttaaactagcatgagcaccatccttcttcacatttatattcatgtcccctatacgttcctcaaatacgtttgaaccatgtgtaccactatgtgaaccaactgagttcgtagactgatcaatgagtcaccttattgtggacgcagctctaaaaaatgttgtatctacaaatagattgtgtaaacgaaaagctttctgatctatg

SEQ ID NO: 60718 - DNA, 4747 bp, Zea Mays
ctccctccccatgaaacccccttcccccaatctacccctctctgtgcccccgacatccacgctgcctcagcccgccgtccagcgccctctctgcgcctccctccccacaccgcctcagcccgccgttcgccacgctccccacgctgcctccccccgtcgcccctccctcccgcgcggaactccgccatgctccccacgtcgcctccccccatcgcccaccagccgtcgcccaccagcccacactatctcacgccatggatggtggcaacagtccccgcccccgtacctcacacgcatcaggctgggctggccgatcccgccgccgcaaacgccgcgcccagccccgatgtcagcgcggcccgcccgccaacgcactttcggcctccccccgcccctcccttcgcccgcccacccgcaacctccgcgccatccgcaacctccgcccgcttctcacgccaccgacccgacctccgcgccatccgcaaccgtcgtgcgtcttatcccttctctaccgcgcactccgtgtggaacaacctccgcgtaggaagcctcctcccttccccatccccattccccaccacgcgcttcggggacggcgagctccgggcgggagcgaccgccgggcgcttctgctgctggtgcggaggaggaggagcggcgagggtggttcggcgcaggctccacggcggcggtgcccgagccgagttcgactggctggcgctctactgcaacctcacacgcggcgatgggccggacggtaacaatggcaagctggtcctggaggagctgctgtcgtgcgccgccacccaattttgttttccccaaatcctgagctgtgaagagaagaagaagacaaggacgcggcgagtacgatgacgagcgccgcacagcaagtcagcgaggagcacgatgacgcgatgaggaccacgagctgccgaggaagtcaaggacgacgacggcgcagagacccgcgagttgagacatcttcttcgccggcgtgaaccgcaaggctgagacatcttcttcgccgggttcggccacgccgacaccaccgacccgatgtacctatcctagccgtgtttgcaggcctctcaaattgaaccgattgcttcaagggtgccatacatgattgtgttaaccatgagagggattggcctggcactggttcattctacgggaacctcgacttcggtggagaatgtggtgtccctgtccaaactgtgttctacactccaactgaaaaccgtgcaaagttctggtacgcaacagattacgacatgtttagccttctgcattgctcacatggaagaggacttgagacccgggaccgagcagtacagattcatcgagcaatgccacattggcctcatgaagtttcacaatcacagtggtttttacaaggatttcagttcatggttgtacatagtttttttagttttttttttgaaaaatgaggcattttctttttaccggcggcggaggcgatggcaacaagcccttccctattcgaatctctgtgaccacagagcctacctcgctgagctcatcaccgagatcactggtgggatcaatgagctcgccgacgtagcacagttcttttgatgagggttgggcagaggctttaccttttgcgtcagacagtgctctctcacagcaattgtccttttgcctacctgtatcattctgtcatactatctgcaattcagctatgcacagaactatcaaaagcaagcaaagatgctctagagtacctgaggaaggctactttgtgctctataaggattgccaggaaagtgccagatttggcagagaacttcatgggcctggatgcatcattgttaaaggagaaacaccatgggtccttatatctgcaattcagctatgcacagaactatgcaaagcaagcaaagatgctctagagtacctgaggaaggtaagggcatctatttcttaccacaaggccccaacaaatataagtatagaactacagttgcaaatacattgatcccttaggggttgagatggaaactgccacaagggagggaggacgtgagtcagctgcacgtgccgacatacacatcacttcctgcctcgctgtccttgatcgagacaaaatcagaagagctgtatctatatgtactccataccttgacgtatgcaggggctagatccataccccggcctatctgccctgtgaggaatgtatacttctgcaagtttgaatactttgacaccttgtgaggagcactctttgaaggtggagaaggtgttgttccaagggaagccagactaccaaaatgttatggttttttagcttctcaatagccggcgacagtgcatacgacctgccccgcgctggggctgtgtctgccttctcctccttcgatgccatgacactgtaaagtgaagccttcgagctaggcgcggaggccagggagatgctatgcgcccacatctaccacgccgccttcatattgctcaagctcgcgctccgcaactcctgccccatctgccgccatgagatgcccaccgatgctgccctgcgggctgccgccagcgtcggcgttgccgaacgcgccgccggggaggaacaagcgtgggatgcgccccacgcgcgcgactttcacctgcctcccaatttgatccgtgagttcaccaggaccagaacttcttcgatgatttgttggaccatccctgctgatacaaacacaatcattttgtggcaggaaatcaccatattagagcttacaaccttcgcatcaactgaagagtttgacactcatgatccaaaggagaacactttgctactcccttacttgaggaaaaggtcaaaaatcattgagatagttgcagcgcgtgatatagtctttgctctatcacagttaggagtatgtgctgcttttagtagcggtacgttcgccgaggacaagacaaaaccggatgctggtttccctctttttgactcaccatgtcaacatggcaatttcaggacccaacgtctctgcgagagaccttgggttcccttatccgaaggcaggcaccgctaagcctacagacgtggtggtgaagttctacgtcctctacgagaagtggcggaggggcgagctcctgggttcttcgtcagttgcgcggtacttgaaaagcatcactcattcgaacggtacgattattcatccttctggatcggagcgttctcttcatgcgtctgttgacgctctaagttcttgctacgtggacaaacagggcaacaagaatttccgggtgtgggtggacagactggtcacatcgccgatcggtacaagcaactggttggtgaggtttgataactgggagatggaaggtggcgttcggtactgctgccgcactactcttctgctgaataacaaggatcaaggtcgttgtcgtctccaggtccatcaaatgcgacaaggtcgagcgcacgcaattcagctccgaagtcatctcctttcaacagaaagatgcaagtaacaccaagtcacttgcctttgatggttgatacatttcactgtatatcattgcacgacagatccatttagtacctttttctgagttaaactacttcaaacattgctgaagactacaaccagcctacagttgttgtaattgaagcgggtcaagacatagcatttgcaaagatttagttcattctcatcactctgcaatattcgggttctctactatgtgtaatctcatatcaagattaatgagtatcgtgatcgtataattttgaatcctatcaacccatatggcaaggcaaagaaaaatgacagtggacatcattctagattttacaaaatcaaaggagcaaccagacatggctgtcatgatctaagatacttcaacgtgattggatcgaacccaaacatatgactaggagaagctccaaggccactttgtcaagggtctctgcaatgcacctactggtgcatgatttactggaggttgtgcgcatgaatgtgccacacattggtatgggggttggagttgaagcaggagacatgattgttattcctatcatgtgcacactgcctcctcgctgtcatttgtcgtcactctcgtagtcctgataccggagcatggttgccaggggagagcagtccaaggcaaatttgccatgttggagcagtcacaggagccaaggggctgcagtcacaggtcctgctagccaggatggagcaatcataggacctcctagcagtccaaggaaaatttgcgaggtggagtagttgcaacttttgaaacccacgtgataacatgctcaagcgttcgtatgataaaaaagatggcacataatcaaaagaagatctcatgttctgcgtttgtgaacctgtttgtattttttgaacttgttttgtgaacctctatttgtaaacctgtaaaatctgaggttgtgaatagatttgggtaacttcatacaagtggtggaggcctggtggtaatcctggatgcatataaagcgaggcatgcaatatccatagcactcgtttgacagaaggcaacaccatcaaccttgtcctccacctttaaactagcatgagcaccatccttcttcacatttatattcatgtcccctatacgttcctcaaatacgtttgaaccatgtgtaccactatgtgaaccaactgagttcgtagactgatcaatgagtcaccttattgtggacgcagctctaaaaaatgttgtatctacaaatagattgtgtaaacgaaaagctttctgatctatg

SEQ ID NO: 60719 - DNA, 5054 bp, Zea Mays
ctccctccccatgaaacccccttcccccaatctacccctctctgtgcccccgacatccacgctgcctcagcccgccgtccagcgccctctctgcgcctccctccccacaccgcctcagcccgccgttcgccacgctccccacgctgcctccccccgtcgcccctccctcccgcgcggaactccgccatgctccccacgtcgcctccccccatcgcccaccagccgtcgcccaccagcccacactatctcacgccatggatggtggcaacagtccccgcccccgtacctcacacgcatcaggctgggctggccgatcccgccgccgcaaacgccgcgcccagccccgatgtcagcgcggcccgcccgccaacgcactttcggcctccccccgcccctcccttcgcccgcccacccgcaacctccgcgccatccgcaacctccgcccgcttctcacgccaccgacccgacctccgcgccatccgcaaccgtcgtgcgtcttatcccttctctaccgcgcactccgtgtggaacaacctccgcgtaggaagcctcctcccttccccatccccattccccaccacgcgcttcggggacggcgagctccgggcgggagcgaccgccgggcgcttctgctgctggtgcggaggaggaggagcggcgagggtggttcggcgcaggctccacggcggcggtgcccgagccgagttcgactggctggcgctctactgcaacctcacacgcggcgatgggccggacggtaacaatggcaagctggtcctggaggagctgctgtcgtgcgccgccacccaattttgttttccccaaatcctgagctgtgaagagaagaagaagacaaggacgcggcgagtacgatgacgagcgccgcacagcaagtcagcgaggagcacgatgacgcgatgaggaccacgagctgccgaggaagtcaaggacgacgacggcgcagagacccgcgagttgagacatcttcttcgccggcgtgaaccgcaaggctgagacatcttcttcgccgggttcggccacgccgacaccaccgacccgatccgtgtttgcaggcctctcaaattgaaccgattgcttcaagggtgccatacatgattgtgttaaccatgagagggattggcctggcactggttcattctacgggaacctcgacttcggtggagaatgtggtgtccctgtccaaactgtgttctacactccaactgaaaaccgtgcaaagttctggtacgcaacagattacgacatgtttagccttctgcattgctcacatggaagaggacttgagacccgggaccgagcagtacagattcatcgagcaatgccacattggcctcatgaagtttcacaatcacagtggtttttacaaggatttcagttcatggttgtacatagtttttttagttttttttttgaaaaatgaggcattttctttttaccggcggcggaggcgatggcaacaagcccttccctattcgaatctctgtgaccacagagcctacctcgctgagctcatcaccgagatcactggtgggatcaatgagctcgccgacgtagcacagttcttttgatgagtggagatggtagcatggtgaaggataatgcctacgtgcgcagcaattttcatttttcttttagtttcttggagtcgtggaaatctcgctattcacaaggatttcatggcggcgttgttaatttgggggttgggcagaggctttaccttttgcgtcagacagtgctctctcacagcaattgtccttttgcctacctgtatcattctgtcatactatctgcaattcagctatgcacagaactatcaaaagcaagcaaagatgctctagagtacctgaggaaggctactttgtgctctataaggattgccaggaaagtgccagatttggcagagaacttcatgggcctggatgcatcattgttaaaggagaaacaccatgggtccttatatctgcaattcagctatgcacagaactatgcaaagcaagcaaagatgctctagagtacctgaggaagttgcaaatacattgatcccttaggggttgagatggaaactgccacaagggagggaggacgtgagtcagctgcacgtgccgacatacacatcacttcctgcctcgctgtccttgatcgagacaaaatcagaagagctgtatctatatgtactccataccttgacgtatgcaggggctagatccataccccggcctatctgccctgtgaggaatgtatacttctgcaagtttgaatactttgacaccttgtgaggagcactctttgaaggtggagaaggtgttgttccaagggaagccagactaccaaaatgttatggttttttagcttctcaatagccggcgacagtgcatacgacctgccccgcgctggggctgtgtctgccttctcctccttcgatgccatgacactgtaaagtgaagccttcgagctaggcgcggaggccagggagatgctatgcgcccacatctaccacgccgccttcatattgctcaagctcgcgctccgcaactcctgccccatctgccgccatgagatgcccaccgatgctgccctgcgggctgccgccagcgtcggcgttgccgaacgcgccgccggggaggaacaagcgtgggatgcgccccacgcgcgcgactttcacctgcctcccaatttgatccgtgagttcaccaggaccagaacttcttcgatgatttgttggaccatccctgctgatacaaacacaatcattttgtggcaggaaatcaccatattagagcttacaaccttcgcatcaactgtttgtgcagcaatgagtttatcttaagttatgtttttttggtaatatcggttgactgcacttaagttctaataaagcatctttgatgtcacttgtaggaagagtttgacactcatgatccaaaggagaacactttgctactcccttacttgaggaaaaggtcaaaaatcattgagatagttgcagcgcgtgatatagtctttgctctatcacagttaggagtatgtgctgcttttagtagcggtacgttcgccgaggacaagacaaaaccggatgctggtttccctctttttgactcaccatgtcaacatggcaatttcaggacccaacgtctctgcgagagaccttgggttcccttatccgaaggcaggcaccgctaagcctacagacgtggtggtgaagttctacgtcctctacgagaagtggcggaggggcgagctcctgggttcttcgtcagttgcgcggtacttgaaaagcatcactcattcgaacggtacgattattcatccttctggatcggagcgttctcttcatgcgtctgttgacgctctaagttcttgctacgtggacaaacagggcaacaagaatttccgggtgtgggtggacagactggtcacatcgccgatcggtacaagcaactggttggtgaggtttgataactgggagatggaaggtggcgttcggtactgctgccgcactactcttctgctgaataacaaggttccaaaagaactagaagtacagattggttgaacttcaaacaaatacaaagagctatgcatacaagtggtggaggcctggtggtaaattgtttatcaagatcgctagagcagttaaatttactcctattatcttctgggatagatttggcaggatcaaggtcgttgtcgtctccaggtccatcaaatgcgacaaggtcgagcgcacgcaattcagctccgaagtcatctcctttcaacagaaagatgcaagtaacaccaagtcacttgcctttgatggttgatacatttcactgtatatcattgcacgacagatccatttagtacctttttctgagttaaactacttcaaacattgctgaagactacaaccagcctacagttgttgtaattgaagcgggtcaagacatagcatttgcaaagatttagttcattctcatcactctgcaatattcgggttctctactatgtgtaatctcatatcaagattaatgagtatcgtgatcgtataattttgaatcctatcaacccatatggcaaggcaaagaaaaatgacagtggacatcattctagattttacaaaatcaaaggagcaaccagacatggctgtcatgatctaagatacttcaacgtgattggatcgaacccaaacatatgactaggagaagctccaaggccactttgtcaagggtctctgcaatgcacctactggtgcatgatttactggaggttgtgcgcatgaatgtgccacacattggtatgggggttggagttgaagcaggagacatgattgttattcctatcatgtgcacactgcctcctcgctgtcatttgtcgtcactctcgtagtcctgataccggagcatggttgccaggggagagcagtccaaggcaaatttgccatgttggagcagtcacaggagccaaggggctgcagtcacaggtcctgctagccaggatggagcaatcataggacctcctagcagtccaaggaaaatttgcgaggtggagtagttgcaacttttgaaacccacgtgataacatgctcaagcgttcgtatgataaaaaagatggcacataatcaaaagaagatctcatgttctgcgtttgtgaacctgtttgtattttttgaacttgttttgtgaacctctatttgtaaacctgtaaaatctgaggttgtgaatagatttgggtaacttcatacaagtggtggaggcctggtggtaatcctggatgcatataaagcgaggcatgcaatatccatagcactcgtttgacagaaggcaacaccatcaaccttgtcctccacctttaaactagcatgagcaccatccttcttcacatttatattcatgtcccctatacgttcctcaaatacgtttgaaccatgtgtaccactatgtgaaccaactgagttcgtagactgatcaatgagtcaccttattgtggacgcagctctaaaaaatgttgtatctacaaatagattgtgtaaacgaaaagctttctgatctatg

SEQ ID NO: 60720 - DNA, 4436 bp, Zea Mays
ctccctccccatgaaacccccttcccccaatctacccctctctgtgcccccgacatccacgctgcctcagcccgccgtccagcgccctctctgcgcctccctccccacaccgcctcagcccgccgttcgccacgctccccacgctgcctccccccgtcgcccctccctcccgcgcggaactccgccatgctccccacgtcgcctccccccatcgcccaccagccgtcgcccaccagcccacactatctcacgccatggatggtggcaacagtccccgcccccgtacctcacacgcatcaggctgggctggccgatcccgccgccgcaaacgccgcgcccagccccgatgtcagcgcggcccgcccgccaacgcactttcggcctccccccgcccctcccttcgcccgcccacccgcaacctccgcgccatccgcaacctccgcccgcttctcacgccaccgacccgacctccgcgccatccgcaaccgtcgtgcgtcttatcccttctctaccgcgcactccgtgtggaacaacctccgcgtaggaagcctcctcccttccccatccccattccccaccacgcgcttcggggacggcgagctccgggcgggagcgaccgccgggcgcttctgctgctggtgcggaggaggaggagcggcgagggtggttcggcgcaggctccacggcggcggtgcccgagccgagttcgactggctggcgctctactgcaacctcacacgcggcgatgggccggacggtaacaatggcaagctggtcctggaggagctgctgtcgtgcgccgccacccaattttgttttccccaaatcctgagctgtgaagagaagaagaagacaaggacgcggcgagtacgatgacgagcgccgcacagcaagtcagcgaggagcacgatgacgcgatgaggaccacgagctgccgaggaagtcaaggacgacgacggcgcagagacccgcgagttgagacatcttcttcgccggcgtgaaccgcaaggctgagacatcttcttcgccgggttcggccacgccgacaccaccgacccgatccgtgtttgcaggcctctcaaattgaaccgattgcttcaagggtgccatacatgattgtgttaaccatgagagggattggcctggcactggttcattctacgggaacctcgacttcggtggagaatgtggtgtccctgtccaaactgtgttctacactccaactgaaaaccgtgcaaagttctggtacgcaacagattacgacatgtttagccttctgcattgctcacatggaagaggacttgagacccgggaccgagcagtacagattcatcgagcaatgccacattggcctcatgaagtttcacaatcacagtggtttttacaaggatttcagttcatgggttgggcagaggctttaccttttgcgtcagacagtgctctctcacagcaattgtccttttgcctacctgtatcattctgtcatactatctgcaattcagctatgcacagaactatcaaaagcaagcaaagatgctctagagtacctgaggaaggctactttgtgctctataaggattgccaggaaagtgccagatttggcagagaacttcatgggcctggatgcatcattgttaaaggagaaacaccatgggtccttatatctgcaattcagctatgcacagaactatgcaaagcaagcaaagatgctctagagtacctgaggaagttgcaaatacattgatcccttaggggttgagatggaaactgccacaagggagggaggacgtgagtcagctgcacgtgccgacatacacatcacttcctgcctcgctgtccttgatcgagacaaaatcagaagagctgtatctatatgtactccataccttgacgtatgcaggggctagatccataccccggcctatctgccctgtgaggaatgtatacttctgcaagtttgaatactttgacaccttgtgaggagcactctttgaaggtggagaaggtgttgttccaagggaagccagactaccaaaatgttatggttttttagcttctcaatagccggcgacagtgcatacgacctgccccgcgctggggctgtgtctgccttctcctccttcgatgccatgacactgtaaagtgaagccttcgagctaggcgcggaggccagggagatgctatgcgcccacatctaccacgccgccttcatattgctcaagctcgcgctccgcaactcctgccccatctgccgccatgagatgcccaccgatgctgccctgcgggctgccgccagcgtcggcgttgccgaacgcgccgccggggaggaacaagcgtgggatgcgccccacgcgcgcgactttcacctgcctcccaatttgatccgtgagttcaccaggaccaggcttctatgcttacatattcagtgctgttcgctcgtgctgtatctgtggccgcgtgagcaggaaatcaccatattagagcttacaaccttcgcatcaactgaagagtttgacactcatgatccaaaggagaacactttgctactcccttacttgaggaaaaggtcaaaaatcattgagatagttgcagcgcgtgatatagtctttgctctatcacagttaggagtatgtgctgcttttagtagcggtacgttcgccgaggacaagacaaaaccggatgctggtttccctctttttgactcaccatgtcaacatggcaatttcaggacccaacgtctctgcgagagaccttgggttcccttatccgaaggcaggcaccgctaagcctacagacgtggtggtgaagttctacgtcctctacgagaagtggcggaggggcgagctcctgggttcttcgtcagttgcgcggtacttgaaaagcatcactggcaacaagaatttccgggtgtgggtggacagactggtcacatcgccgatcggtacaagcaactggttggtgaggtttgataactgggagatggaaggtggcgttcggtactgctgccgcactactcttctgctgaataacaaggatcaaggtcgttgtcgtctccaggtccatcaaatgcgacaaggtcgagcgcacgcaattcagctccgaagtcatctcctttcaacagaaagatgcaagtaacaccaagtcacttgcctttgatggttgatacatttcactgtatatcattgcacgacagatccatttagtacctttttctgagttaaactacttcaaacattgctgaagactacaaccagcctacagttgttgtaattgaagcgggtcaagacatagcatttgcaaagatttagttcattctcatcactctgcaatattcgggttctctactatgtgtaatctcatatcaagattaatgagtatcgtgatcgtataattttgaatcctatcaacccatatggcaaggcaaagaaaaatgacagtggacatcattctagattttacaaaatcaaaggagcaaccagacatggctgtcatgatctaagatacttcaacgtgattggatcgaacccaaacatatgactaggagaagctccaaggccactttgtcaagggtctctgcaatgcacctactggtgcatgatttactggaggttgtgcgcatgaatgtgccacacattggtatgggggttggagttgaagcaggtgattttcaccaacattggtttgcgaactggagttgaagcaggagacatgattgttattcctatcatgtgcacactgcctcctcgctgtcatttgtcgtcactctcgtagtcctgataccggagcatggttgccaggggagagcagtccaaggcaaatttgccatgttggagcagtcacaggagccaaggggctgcagtcacaggtcctgctagccaggatggagcaatcataggacctcctagcagtccaaggaaaatttgcgaggtggagtagttgcaacttttgaaacccacgtgataacatgctcaagcgttcgtatgataaaaaagatggcacataatcaaaagaagatctcatgttctgcgtttgtgaacctgtttgtattttttgaacttgttttgtgaacctctatttgtaaacctgtaaaatctgaggttgtgaatagatttgggtaacttcatacaagtggtggaggcctggtggtaatcctggatgcatataaagcgaggcatgcaatatccatagcactcgtttgacagaaggcaacaccatcaaccttgtcctccacctttaaactagcatgagcaccatccttcttcacatttatattcatgtcccctatacgttcctcaaatacgtttgaaccatgtgtaccactatgtgaaccaactgagttcgtagactgatcaatgagtcaccttattgtggacgcagctctaaaaaatgttgtatctacaaatagattgtgtaaacgaaaagctttctgatctatg

SEQ ID NO: 60721 - DNA, 4616 bp, Zea Mays
ctccctccccatgaaacccccttcccccaatctacccctctctgtgcccccgacatccacgctgcctcagcccgccgtccagcgccctctctgcgcctccctccccacaccgcctcagcccgccgttcgccacgctccccacgctgcctccccccgtcgcccctccctcccgcgcggaactccgccatgctccccacgtcgcctccccccatcgcccaccagccgtcgcccaccagcccacactatctcacgccatggatggtggcaacagtccccgcccccgtacctcacacgcatcaggctgggctggccgatcccgccgccgcaaacgccgcgcccagccccgatgtcagcgcggcccgcccgccaacgcactttcggcctccccccgcccctcccttcgcccgcccacccgcaacctccgcgccatccgcaacctccgcccgcttctcacgccaccgacccgacctccgcgccatccgcaaccgtcgtgcgtcttatcccttctctaccgcgcactccgtgtggaacaacctccgcgtaggaagcctcctcccttccccatccccattccccaccacgcgcttcggggacggcgagctccgggcgggagcgaccgccgggcgcttctgctgctggtgcggaggaggaggagcggcgagggtggttcggcgcaggctccacggcggcggtgcccgagccgagttcgactggctggcgctctactgcaacctcacacgcggcgatgggccggacggtaacaatggcaagctggtcctggaggagctgctgtcgtgcgccgccacccaattttgttttccccaaatcctgagctgtgaagagaagaagaagacaaggacgcggcgagtacgatgacgagcgccgcacagcaagtcagcgaggagcacgatgacgcgatgaggaccacgagctgccgaggaagtcaaggacgacgacggcgcagagacccgcgagttgagacatcttcttcgccggcgtgaaccgcaaggctgagacatcttcttcgccgggttcggccacgccgacaccaccgacccgatgtacctatcctagccgtgtttgcaggcctctcaaattgaaccgattgcttcaagggtgccatacatgattgtgttaaccatgagagggattggcctggcactggttcattctacgggaacctcgacttcggtggagaatgtggtgtccctgtccaaactgtgttctacactccaactgaaaaccgtgcaaagttctggtacgcaacagattacgacatgtttagccttctgcattgctcacatggaagaggacttgagacccgggaccgagcagtacagattcatcgagcaatgccacattggcctcatgaagtttcacaatcacagtggtttttacaaggatttcagttcatgggttgggcagaggctttaccttttgcgtcagacagtgctctctcacagcaattgtccttttgcctacctgtatcattctgtcatactatctgcaattcagctatgcacagaactatcaaaagcaagcaaagatgctctagagtacctgaggaaggctactttgtgctctataaggattgccaggaaagtgccagatttggcagagaacttcatgggcctggatgcatcattgttaaaggagaaacaccatgggtccttatatctgcaattcagctatgcacagaactatgcaaagcaagcaaagatgctctagagtacctgaggaaggtaagggcatctatttcttaccacaaggccccaacaaatataagtatagaactacagttgcaaatacattgatcccttaggggttgagatggaaactgccacaagggagggaggacgtgagtcagctgcacgtgccgacatacacatcacttcctgcctcgctgtccttgatcgagacaaaatcagaagagctgtatctatatgtactccataccttgacgtatgcaggggctagatccataccccggcctatctgccctgtgaggaatgtatacttctgcaagtttgaatactttgacaccttgtgaggagcactctttgaaggtggagaaggtgttgttccaagggaagccagactaccaaaatgttatggttttttagcttctcaatagccggcgacagtgcatacgacctgccccgcgctggggctgtgtctgccttctcctccttcgatgccatgacactgtaaagtgaagccttcgagctaggcgcggaggccagggagatgctatgcgcccacatctaccacgccgccttcatattgctcaagctcgcgctccgcaactcctgccccatctgccgccatgagatgcccaccgatgctgccctgcgggctgccgccagcgtcggcgttgccgaacgcgccgccggggaggaacaagcgtgggatgcgccccacgcgcgcgactttcacctgcctcccaatttgatccgtgagttcaccaggaccagaacttcttcgatgatttgttggaccatccctgctgatacaaacacaatcattttgtggcaggaaatcaccatattagagcttacaaccttcgcatcaactgtttgtgcagcaatgagtttatcttaagttatgtttttttggtaatatcggttgactgcacttaagttctaataaagcatctttgatgtcacttgtaggaagagtttgacactcatgatccaaaggagaacactttgctactcccttacttgaggaaaaggtcaaaaatcattgagatagttgcagcgcgtgatatagtctttgctctatcacagttaggagtatgtgctgcttttagtagcggtacgttcgccgaggacaagacaaaaccggatgctggtttccctctttttgactcaccatgtcaacatggcaatttcaggacccaacgtctctgcgagagaccttgggttcccttatccgaaggcaggcaccgctaagcctacagacgtggtggtgaagttctacgtcctctacgagaagtggcggaggggcgagctcctgggttcttcgtcagttgcgcggtacttgaaaagcatcactcattcgaacggtacgattattcatccttctggatcggagcgttctcttcatgcgtctgttgacgctctaagttcttgctacgtggacaaacagggcaacaagaatttccgggtgtgggtggacagactggtcacatcgccgatcggtacaagcaactggttggtgaggtttgataactgggagatggaaggtggcgttcggtactgctgccgcactactcttctgctgaataacaaggatcaaggtcgttgtcgtctccaggtccatcaaatgcgacaaggtcgagcgcacgcaattcagctccgaagtcatctcctttcaacagaaagatgcaagtaacaccaagtcacttgcctttgatggttgatacatttcactgtatatcattgcacgacagatccatttagtacctttttctgagttaaactacttcaaacattgctgaagactacaaccagttgttgtaattgaagcgggtcaagacatagcatttgcaaagatttagttcattctcatcactctgcaatattcgggttctctactatgtgtaatctcatatcaagattaatgagtatcgtgatcgtataattttgaatcctatcaacccatatggcaaggcaaagaaaaatgacagtggacatcattctagattttacaaaatcaaaggagcaaccagacatggctgtcatgatctaagatacttcaacgtgattggatcgaacccaaacatatgactaggagaagctccaaggccactttgtcaagggtctctgcaatgcacctactggtgcatgatttactggaggttgtgcgcatgaatgtgccacacattggtatgggggttggagttgaagcaggtgattttcaccaacattggtttgcgaactggagttgaagcaggttattcatttgatgaaagtgggagagcagtccaaggcaaatttgccatgttggagcagtcacaggagccaaggggctgcagtcacaggtcctgctagccaggatggagcaatcataggacctcctagcagtccaaggaaaatttgcgaggtggagtagttgcaacttttgaaacccacgtgataacatgctcaagcgttcgtatgataaaaaagatggcacataatcaaaagaagatctcatgttctgcgtttgtgaacctgtttgtattttttgaacttgttttgtgaacctctatttgtaaacctgtaaaatctgaggttgtgaatagatttgggtaacttcatacaagtggtggaggcctggtggtaatcctggatgcatataaagcgaggcatgcaatatccatagcactcgtttgacagaaggcaacaccatcaaccttgtcctccacctttaaactagcatgagcaccatccttcttcacatttatattcatgtcccctatacgttcctcaaatacgtttgaaccatgtgtaccactatgtgaaccaactgagttcgtagactgatcaatgagtcaccttattgtggacgcagctctaaaaaatgttgtatctacaaatagattgtgtaaacgaaaagctttctgatctatg

SEQ ID NO: 60722 - DNA, 5259 bp, Zea Mays
ctccctccccatgaaacccccttcccccaatctacccctctctgtgcccccgacatccacgctgcctcagcccgccgtccagcgccctctctgcgcctccctccccacaccgcctcagcccgccgttcgccacgctccccacgctgcctccccccgtcgcccctccctcccgcgcggaactccgccatgctccccacgtcgcctccccccatcgcccaccagccgtcgcccaccagcccacactatctcacgccatggatggtggcaacagtccccgcccccgtacctcacacgcatcaggctgggctggccgatcccgccgccgcaaacgccgcgcccagccccgatgtcagcgcggcccgcccgccaacgcactttcggcctccccccgcccctcccttcgcccgcccacccgcaacctccgcgccatccgcaacctccgcccgcttctcacgccaccgacccgacctccgcgccatccgcaaccgtcgtgcgtcttatcccttctctaccgcgcactccgtgtggaacaacctccgcgtaggaagcctcctcccttccccatccccattccccaccacgcgcttcggggacggcgagctccgggcgggagcgaccgccgggcgcttctgctgctggtgcggaggaggaggagcggcgagggtggttcggcgcaggctccacggcggcggtgcccgagccgagttcgactggctggcgctctactgcaacctcacacgcggcgatgggccggacggtaacaatggcaagctggtcctggaggagctgctgtcgtgcgccgccacccaattttgttttccccaaatcctgagctgtgaagagaagaagaagacaaggacgcggcgagtacgatgacgagcgccgcacagcaagtcagcgaggagcacgatgacgcgatgaggaccacgagctgccgaggaagtcaaggacgacgacggcgcagagacccgcgagttgagacatcttcttcgccggcgtgaaccgcaaggctgagacatcttcttcgccgggttcggccacgccgacaccaccgacccgatgtacctatcctagccgtgtttgcaggcctctcaaattgaaccgattgcttcaagggtgccatacatgattgtgttaaccatgagagggattggcctggcactggttcattctacgggaacctcgacttcggtggagaatgtggtgtccctgtccaaactgtgttctacactccaactgaaaaccgtgcaaagttctggtacgcaacagattacgacatgtttagccttctgcattgctcacatggaagaggacttgagacccgggaccgagcagtacagattcatcgagcaatgccacattggcctcatgaagtttcacaatcacagtggtttttacaaggatttcagttcatggttgtacatagtttttttagttttttttttgaaaaatgaggcattttctttttaccggcggcggaggcgatggcaacaagcccttccctattcgaatctctgtgaccacagagcctacctcgctgagctcatcaccgagatcactggtgggatcaatgagctcgccgacgtagcacagttcttttgatgagagtggttcaactctattttgcttggttcagtggagatggtagcatggtgaaggataatgcctacgtgcgcagcaattttcatttttcttttagtttcttggagtcgtggaaatctcgctattcacaaggatttcatggcggcgttgttaatttgggggttgggcagaggctttaccttttgcgtcagacagtgctctcctatgcacagaactatcaaaagcaagcaaagatgctctagagtacctgaggaaggctactttgtgctctataaggattgccaggaaagtgccagatttggcagagaacttcatgggcctggatgcatcattgttaaaggagaaacaccatgggtccttatatctgcaattcagctatgcacagaactatgcaaagcaagcaaagatgctctagagtacctgaggaaggtaagggcatctatttcttaccacaaggccccaacaaatataagtatagaactacagagctaggataaaactgttgattgttacagccctgggcaaggattgatgcttgctagcttcaagattaggaccctaccacttgatgagaacagatagtgctatactgctatgtacatctacatttctccagttatacataatcagatcttgcttctagccaactgttgcaaatacattgatcccttaggggttgagatggaaactgccacaagggagggaggacgtgagtcagctgcacgtgccgacatacacatcacttcctgcctcgctgtccttgatcgagacaaaatcagaagagctgtatctatatgtactccataccttgacgtatgcaggggctagatccataccccggcctatctgccctgtgaggaatgtatacttctgcaagtttgaatactttgacaccttgtgaggagcactctttgaaggtggagaaggtgttgttccaagggaagccagactaccaaaatgttatggttttttagcttctcaatagccggcgacagtgcatacgacctgccccgcgctggggctgtgtctgccttctcctccttcgatgccatgacactgtaaagtgaagccttcgagctaggcgcggaggccagggagatgctatgcgcccacatctaccacgccgccttcatattgctcaagctcgcgctccgcaactcctgccccatctgccgccatgagatgcccaccgatgctgccctgcgggctgccgccagcgtcggcgttgccgaacgcgccgccggggaggaacaagcgtgggatgcgccccacgcgcgcgactttcacctgcctcccaatttgatccgtgagttcaccaggaccagaacttcttcgatgatttgttggaccatccctgctgatacaaacacaatcattttgtggcaggaaatcaccatattagagcttacaaccttcgcatcaactgtttgtgcagcaatgagtttatcttaagttatgtttttttggtaatatcggttgactgcacttaagttctaataaagcatctttgatgtcacttgtaggaagagtttgacactcatgatccaaaggagaacactttgctactcccttacttgaggaaaaggtcaaaaatcattgagatagttgcagcgcgtgatatagtctttgctctatcacagttaggagtatgtgctgcttttagtagcggtacgttcgccgaggacaagacaaaaccggatgctggtttccctctttttgactcaccatgtcaacatggcaatttcaggacccaacgtctctgcgagagaccttgggttcccttatccgaaggcaggcaccgctaagcctacagacgtggtggtgaagttctacgtcctctacgagaagtggcggaggggcgagctcctgggttcttcgtcagttgcgcggtacttgaaaagcatcactcattcgaacggtacgattattcatccttctggatcggagcgttctcttcatgcgtctgttgacgctctaagttcttgctacgtggacaaacagggcaacaagaatttccgggtgtgggtggacagactggtcacatcgccgatcggtacaagcaactggttggtgaggtttgataactgggagatggaaggtggcgttcggtactgctgccgcactactcttctgctgaataacaaggttccaaaagaactagaagtacagattggttgaacttcaaacaaatacaaagagctatgcatacaagtggtggaggcctggtggtaaattgtttatcaagatcgctagagcagttaaatttactcctattatcttctgggatagatttgggatcaaggtcgttgtcgtctccaggtccatcaaatgcgacaaggtcgagcgcacgcaattcagctccgaagtcatctcctttcaacagaaagatgcaagtaacaccaagtcacttgcctttgatggttgatacatttcactgtatatcattgcacgacagatccatttagtacctttttctgagttaaactacttcaaacattgctgaagactacaaccagcctacagttgttgtaattgaagcgggtcaagacatagcatttgcaaagatttagttcattctcatcactctgcaatattcgggtgttctctactatgtgtaatctcatatcaagattaatgagtatcgtgatcgtataattttgaatcctatcaacccatatggcaaggcaaagaaaaatgacagtggacatcattctagattttacaaaatcaaaggagcaaccagacatggctgtcatgatctaagatacttcaacgtgattggatcgaacccaaacatatgactaggagaagctccaaggccactttgtcaagggtctctgcaatgcacctactggtgcatgatttactggaggttgtgcgcatgaatgtgccacacattggtatgggggttggagttgaagcaggagacatgattgttattcctatcatgtgcacactgcctcctcgctgtcatttgtcgtcactctcgtagtcctgataccggagcatggttgccaggggagagcagtccaaggcaaatttgccatgttggagcagtcacaggagccaaggggctgcagtcacaggtcctgctagccaggatggagcaatcataggacctcctagcagtccaaggaaaatttgcgaggtggagtagttgcaacttttgaaacccacgtgataacatgctcaagcgttcgtatgataaaaaagatggcacataatcaaaagaagatctcatgttctgcgtttgtgaacctgtttgtattttttgaacttgttttgtgaacctctatttgtaaacctgtaaaatctgaggttgtgaatagatttgggtaacttcatacaagtggtggaggcctggtggtaatcctggatgcatataaagcgaggcatgcaatatccatagcactcgtttgacagaaggcaacaccatcaaccttgtcctccacctttaaactagcatgagcaccatccttcttcacatttatattcatgtcccctatacgttcctcaaatacgtttgaaccatgtgtaccactatgtgaaccaactgagttcgtagactgatcaatgagtcaccttattgtggacgcagctctaaaaaatgttgtatctacaaatagattgtgtaaacgaaaagctttctgatctatg

SEQ ID NO: 60723 - DNA, 4956 bp, Zea Mays
ctccctccccatgaaacccccttcccccaatctacccctctctgtgcccccgacatccacgctgcctcagcccgccgtccagcgccctctctgcgcctccctccccacaccgcctcagcccgccgttcgccacgctccccacgctgcctccccccgtcgcccctccctcccgcgcggaactccgccatgctccccacgtcgcctccccccatcgcccaccagccgtcgcccaccagcccacactatctcacgccatggatggtggcaacagtccccgcccccgtacctcacacgcatcaggctgggctggccgatcccgccgccgcaaacgccgcgcccagccccgatgtcagcgcggcccgcccgccaacgcactttcggcctccccccgcccctcccttcgcccgcccacccgcaacctccgcgccatccgcaacctccgcccgcttctcacgccaccgacccgacctccgcgccatccgcaaccgtcgtgcgtcttatcccttctctaccgcgcactccgtgtggaacaacctccgcgtaggaagcctcctcccttccccatccccattccccaccacgcgcttcggggacggcgagctccgggcgggagcgaccgccgggcgcttctgctgctggtgcggaggaggaggagcggcgagggtggttcggcgcaggctccacggcggcggtgcccgagccgagttcgactggctggcgctctactgcaacctcacacgcggcgatgggccggacggtaacaatggcaagctggtcctggaggagctgctgtcgtgcgccgccacccaattttgttttccccaaatcctgagctgtgaagagaagaagaagacaaggacgcggcgagtacgatgacgagcgccgcacagcaagtcagcgaggagcacgatgacgcgatgaggaccacgagctgccgaggaagtcaaggacgacgacggcgcagagacccgcgagttgagacatcttcttcgccggcgtgaaccgcaaggctgagacatcttcttcgccgggttcggccacgccgacaccaccgacccgatgtacctatcctagccgtgtttgcaggcctctcaaattgaaccgattgcttcaagggtgccatacatgattgtgttaaccatgagagggattggcctggcactggttcattctacgggaacctcgacttcggtggagaatgtggtgtccctgtccaaactgtgttctacactccaactgaaaaccgtgcaaagttctggtacgcaacagattacgacatgtttagccttctgcattgctcacatggaagaggacttgagacccgggaccgagcagtacagattcatcgagcaatgccacattggcctcatgaagtttcacaatcacagtggtttttacaaggatttcagttcatggttgtacatagtttttttagttttttttttgaaaaatgaggcattttctttttaccggcggcggaggcgatggcaacaagcccttccctattcgaatctctgtgaccacagagcctacctcgctgagctcatcaccgagatcactggtgggatcaatgagctcgccgacgtagcacagttcttttgatgagagtggttcaactctattttgcttggttcagtggagatggtagcatggtgaaggataatgcctacgtgcgcagcaattttcatttttcttttagtttcttggagtcgtggaaatctcgctattcacaaggatttcatggcggcgttgttaatttgggggttgggcagaggctttaccttttgcgtcagacagtgctctctcacagcaattgtccttttgcctacctgtatcattctgtcatactatctgcaattcagctatgcacagaactatcaaaagcaagcaaagatgctctagagtacctgaggaaggctactttgtgctctataaggattgccaggaaagtgccagatttggcagagaacttcatgggcctggatgcatcattgttaaaggagaaacaccatgggtccttatatctgcaattcagctatgcacagaactatgcaaagcaagcaaagatgctctagagtacctgaggaagttgcaaatacattgatcccttaggggttgagatggaaactgccacaagggagggaggacgtgagtcagctgcacgtgccgacatacacatcacttcctgcctcgctgtccttgatcgagacaaaatcagaagagctgtatctatatgtactccataccttgacgtatgcaggggctagatccataccccggcctatctgccctgtgaggaatgtatacttctgcaagtttgaatactttgacaccttgtgaggagcactctttgaaggtggagaaggtgttgttccaagggaagccagactaccaaaatgttatggttttttagcttctcaatagccggcgacagtgcatacgacctgccccgcgctggggctgtgtctgccttctcctccttcgatgccatgacactgtaaagtgaagccttcgagctaggcgcggaggccagggagatgctatgcgcccacatctaccacgccgccttcatattgctcaagctcgcgctccgcaactcctgccccatctgccgccatgagatgcccaccgatgctgccctgcgggctgccgccagcgtcggcgttgccgaacgcgccgccggggaggaacaagcgtgggatgcgccccacgcgcgcgactttcacctgcctcccaatttgatccgtgagttcaccaggaccagcaacgatattggatttcaggcttctatgcttacatattcagtgctgttcgctcgtgctgtatctgtggccgcgtgagcaggaaatcaccatattagagcttacaaccttcgcatcaactgtttgtgcagcaatgagtttatcttaagttatgtttttttggtaatatcggttgactgcacttaagttctaataaagcatctttgatgtcacttgtaggaagagtttgacactcatgatccaaaggagaacactttgctactcccttacttgaggaaaaggtcaaaaatcattgagatagttgcagcgcgtgatatagtctttgctctatcacagttaggagtatgtgctgcttttagtagcggtacgttcgccgaggacaagacaaaaccggatgctggtttccctctttttgactcaccatgtcaacatggcaatttcaggacccaacgtctctgcgagagaccttgggttcccttatccgaaggcaggcaccgctaagcctacagacgtggtggtgaagttctacgtcctctacgagaagtggcggaggggcgagctcctgggttcttcgtcagttgcgcggtacttgaaaagcatcactcattcgaacggtacgattattcatccttctggatcggagcgttctcttcatgcgtctgttgacgctctaagttcttgctacgtggacaaacagggcaacaagaatttccgggtgtgggtggacagactggtcacatcgccgatcggtacaagcaactggttggtgaggtttgataactgggagatggaaggtggcgttcggtactgctgccgcactactcttctgctgaataacaaggatcaaggtcgttgtcgtctccaggtccatcaaatgcgacaaggtcgagcgcacgcaattcagctccgaagtcatctcctttcaacagaaagatgcaagtaacaccaagtcacttgcctttgatggttgatacatttcactgtatatcattgcacgacagatccatttagtacctttttctgagttaaactacttcaaacattgctgaagactacaaccagttgttgtaattgaagcgggtcaagacatagcatttgcaaagatttagttcattctcatcactctgcaatattcgggttctctactatgtgtaatctcatatcaagattaatgagtatcgtgatcgtataattttgaatcctatcaacccatatggcaaggcaaagaaaaatgacagtggacatcattctagattttacaaaatcaaaggagcaaccagacatggctgtcatgatctaagatacttcaacgtgattggatcgaacccaaacatatgactaggagaagctccaaggccactttgtcaagggtctctgcaatgcacctactggtgcatgatttactggaggttgtgcgcatgaatgtgccacacattggtatgggggttggagttgaagcaggagacatgattgttattcctatcatgtgcacactgcctcctcgctgtcatttgtcgtcactctcgtagtcctgataccggagcatggttgccaggggagagcagtccaaggcaaatttgccatgttggagcagtcacaggagccaaggggctgcagtcacaggtcctgctagccaggatggagcaatcataggacctcctagcagtccaaggaaaatttgcgaggtggagtagttgcaacttttgaaacccacgtgataacatgctcaagcgttcgtatgataaaaaagatggcacataatcaaaagaagatctcatgttctgcgtttgtgaacctgtttgtattttttgaacttgttttgtgaacctctatttgtaaacctgtaaaatctgaggttgtgaatagatttgggtaacttcatacaagtggtggaggcctggtggtaatcctggatgcatataaagcgaggcatgcaatatccatagcactcgtttgacagaaggcaacaccatcaaccttgtcctccacctttaaactagcatgagcaccatccttcttcacatttatattcatgtcccctatacgttcctcaaatacgtttgaaccatgtgtaccactatgtgaaccaactgagttcgtagactgatcaatgagtcaccttattgtggacgcagctctaaaaaatgttgtatctacaaatagattgtgtaaacgaaaagctttctgatctatg

SEQ ID NO: 60724 - DNA, 4768 bp, Zea Mays
ctccctccccatgaaacccccttcccccaatctacccctctctgtgcccccgacatccacgctgcctcagcccgccgtccagcgccctctctgcgcctccctccccacaccgcctcagcccgccgttcgccacgctccccacgctgcctccccccgtcgcccctccctcccgcgcggaactccgccatgctccccacgtcgcctccccccatcgcccaccagccgtcgcccaccagcccacactatctcacgccatggatggtggcaacagtccccgcccccgtacctcacacgcatcaggctgggctggccgatcccgccgccgcaaacgccgcgcccagccccgatgtcagcgcggcccgcccgccaacgcactttcggcctccccccgcccctcccttcgcccgcccacccgcaacctccgcgccatccgcaacctccgcccgcttctcacgccaccgacccgacctccgcgccatccgcaaccgtcgtgcgtcttatcccttctctaccgcgcactccgtgtggaacaacctccgcgtaggaagcctcctcccttccccatccccattccccaccacgcgcttcggggacggcgagctccgggcgggagcgaccgccgggcgcttctgctgctggtgcggaggaggaggagcggcgagggtggttcggcgcaggctccacggcggcggtgcccgagccgagttcgactggctggcgctctactgcaacctcacacgcggcgatgggccggacggtaacaatggcaagctggtcctggaggagctgctgtcgtgcgccgccacccaattttgttttccccaaatcctgagctgtgaagagaagaagaagacaaggacgcggcgagtacgatgacgagcgccgcacagcaagtcagcgaggagcacgatgacgcgatgaggaccacgagctgccgaggaagtcaaggacgacgacggcgcagagacccgcgagttgagacatcttcttcgccggcgtgaaccgcaaggctgagacatcttcttcgccgggttcggccacgccgacaccaccgacccgatgtacctatcctagccgtgtttgcaggcctctcaaattgaaccgattgcttcaagggtgccatacatgattgtgttaaccatgagagggattggcctggcactggttcattctacgggaacctcgacttcggtggagaatgtggtgtccctgtccaaactgtgttctacactccaactgaaaaccgtgcaaagttctggtacgcaacagattacgacatgtttagccttctgcattgctcacatggaagaggacttgagacccgggaccgagcagtacagattcatcgagcaatgccacattggcctcatgaagtttcacaatcacagtggtttttacaaggatttcagttcatgggttgggcagaggctttaccttttgcgtcagacagtgctctctcacagcaattgtccttttgcctacctgtatcattctgtcatactatctgcaattcagctatgcacagaactatcaaaagcaagcaaagatgctctagagtacctgaggaaggctactttgtgctctataaggattgccaggaaagtgccagatttggcagagaacttcatgggcctggatgcatcattgttaaaggagaaacaccatgggtccttatatctgcaattcagctatgcacagaactatgcaaagcaagcaaagatgctctagagtacctgaggaaggtaagggcatctatttcttaccacaaggccccaacaaatataagtatagaactacagttgcaaatacattgatcccttaggggttgagatggaaactgccacaagggagggaggacgtgagtcagctgcacgtgccgacatacacatcacttcctgcctcgctgtccttgatcgagacaaaatcagaagagctgtatctatatgtactccataccttgacgtatgcaggggctagatccataccccggcctatctgccctgtgaggaatgtatacttctgcaagtttgaatactttgacaccttgtgaggagcactctttgaaggtggagaaggtgttgttccaagggaagccagactaccaaaatgttatggttttttagcttctcaatagccggcgacagtgcatacgacctgccccgcgctggggctgtgtctgccttctcctccttcgatgccatgacactgtaaagtgaagccttcgagctaggcgcggaggccagggagatgctatgcgcccacatctaccacgccgccttcatattgctcaagctcgcgctccgcaactcctgccccatctgccgccatgagatgcccaccgatgctgccctgcgggctgccgccagcgtcggcgttgccgaacgcgccgccggggaggaacaagcgtgggatgcgccccacgcgcgcgactttcacctgcctcccaatttgatccgtgagttcaccaggaccagaacttcttcgatgatttgttggaccatccctgctgatacaaacacaatcattttgtggcaggaaatcaccatattagagcttacaaccttcgcatcaactgtttgtgcagcaatgagtttatcttaagttatgtttttttggtaatatcggttgactgcacttaagttctaataaagcatctttgatgtcacttgtaggaagagtttgacactcatgatccaaaggagaacactttgctactcccttacttgaggaaaaggtcaaaaatcattgagatagttgcagcgcgtgatatagtctttgctctatcacagttaggagtatgtgctgcttttagtagcggtacgttcgccgaggacaagacaaaaccggatgctggtttccctctttttgactcaccatgtcaacatggcaatttcaggacccaacgtctctgcgagagaccttgggttcccttatccgaaggcaggcaccgctaagcctacagacgtggtggtgaagttctacgtcctctacgagaagtggcggaggggcgagctcctgggttcttcgtcagttgcgcggtacttgaaaagcatcactcattcgaacggtacgattattcatccttctggatcggagcgttctcttcatgcgtctgttgacgctctaagttcttgctacgtggacaaacagggcaacaagaatttccgggtgtgggtggacagactggtcacatcgccgatcggtacaagcaactggttggtgaggtttgataactgggagatggaaggtggcgttcggtactgctgccgcactactcttctgctgaataacaaggttccaaaagaactagaagtacagattggttgaacttcaaacaaatacaaagagctatgcatacaagtggtggaggcctggtggtaaattgtttatcaagatcgctagagcagttaaatttactcctattatcttctgggatagatttgggatcaaggtcgttgtcgtctccaggtccatcaaatgcgacaaggtcgagcgcacgcaattcagctccgaagtcatctcctttcaacagatccatttagtacctttttctgagttaaactacttcaaacattgctgaagactacaaccagttgttgtaattgaagcgggtcaagacatagcatttgcaaagatttagttcattctcatcactctgcaatattcgggttctctactatgtgtaatctcatatcaagattaatgagtatcgtgatcgtataattttgaatcctatcaacccatatggcaaggcaaagaaaaatgacagtggacatcattctagattttacaaaatcaaaggagcaaccagacatggctgtcatgatctaagatacttcaacgtgattggatcgaacccaaacatatgactaggagaagctccaaggccactttgtcaagggtctctgcaatgcacctactggtgcatgatttactggaggttgtgcgcatgaatgtgccacacattggtatgggggttggagttgaagcaggtgattttcaccaacattggtttgcgaactggagttgaagcaggagacatgattgttattcctatcatgtgcacactgcctcctcgctgtcatttgtcgtcactctcgtagtcctgataccggagcatggttgccaggggagagcagtccaaggcaaatttgccatgttggagcagtcacaggagccaaggggctgcagtcacaggtcctgctagccaggatggagcaatcataggacctcctagcagtccaaggaaaatttgcgaggtggagtagttgcaacttttgaaacccacgtgataacatgctcaagcgttcgtatgataaaaaagatggcacataatcaaaagaagatctcatgttctgcgtttgtgaacctgtttgtattttttgaacttgttttgtgaacctctatttgtaaacctgtaaaatctgaggttgtgaatagatttgggtaacttcatacaagtggtggaggcctggtggtaatcctggatgcatataaagcgaggcatgcaatatccatagcactcgtttgacagaaggcaacaccatcaaccttgtcctccacctttaaactagcatgagcaccatccttcttcacatttatattcatgtcccctatacgttcctcaaatacgtttgaaccatgtgtaccactatgtgaaccaactgagttcgtagactgatcaatgagtcaccttattgtggacgcagctctaaaaaatgttgtatctacaaatagattgtgtaaacgaaaagctttctgatctatg

SEQ ID NO: 60725 - DNA, 5016 bp, Zea Mays
ctccctccccatgaaacccccttcccccaatctacccctctctgtgcccccgacatccacgctgcctcagcccgccgtccagcgccctctctgcgcctccctccccacaccgcctcagcccgccgttcgccacgctccccacgctgcctccccccgtcgcccctccctcccgcgcggaactccgccatgctccccacgtcgcctccccccatcgcccaccagccgtcgcccaccagcccacactatctcacgccatggatggtggcaacagtccccgcccccgtacctcacacgcatcaggctgggctggccgatcccgccgccgcaaacgccgcgcccagccccgatgtcagcgcggcccgcccgccaacgcactttcggcctccccccgcccctcccttcgcccgcccacccgcaacctccgcgccatccgcaacctccgcccgcttctcacgccaccgacccgacctccgcgccatccgcaaccgtcgtgcgtcttatcccttctctaccgcgcactccgtgtggaacaacctccgcgtaggaagcctcctcccttccccatccccattccccaccacgcgcttcggggacggcgagctccgggcgggagcgaccgccgggcgcttctgctgctggtgcggaggaggaggagcggcgagggtggttcggcgcaggctccacggcggcggtgcccgagccgagttcgactggctggcgctctactgcaacctcacacgcggcgatgggccggacggtaacaatggcaagctggtcctggaggagctgctgtcgtgcgccgccacccaattttgttttccccaaatcctgagctgtgaagagaagaagaagacaaggacgcggcgagtacgatgacgagcgccgcacagcaagtcagcgaggagcacgatgacgcgatgaggaccacgagctgccgaggaagtcaaggacgacgacggcgcagagacccgcgagttgagacatcttcttcgccggcgtgaaccgcaaggctgagacatcttcttcgccgggttcggccacgccgacaccaccgacccgatccgtgtttgcaggcctctcaaattgaaccgattgcttcaagggtgccatacatgattgtgttaaccatgagagggattggcctggcactggttcattctacgggaacctcgacttcggtggagaatgtggtgtccctgtccaaactgtgttctacactccaactgaaaaccgtgcaaagttctggtacgcaacagattacgacatgtttagccttctgcattgctcacatggaagaggacttgagacccgggaccgagcagtacagattcatcgagcaatgccacattggcctcatgaagtttcacaatcacagtggtttttacaaggatttcagttcatggttgtacatagtttttttagttttttttttgaaaaatgaggcattttctttttaccggcggcggaggcgatggcaacaagcccttccctattcgaatctctgtgaccacagagcctacctcgctgagctcatcaccgagatcactggtgggatcaatgagctcgccgacgtagcacagttcttttgatgagagtggttcaactctattttgcttggttcagtggagatggtagcatggtgaaggataatgcctacgtgcgcagcaattttcatttttcttttagtttcttggagtcgtggaaatctcgctattcacaaggatttcatggcggcgttgttaatttgggggttgggcagaggctttaccttttgcgtcagacagtgctctctcacagcaattgtccttttgcctacctgtatcattctgtcatactatctgcaattcagctatgcacagaactatcaaaagcaagcaaagatgctctagagtacctgaggaaggctactttgtgctctataaggattgccaggaaagtgccagatttggcagagaacttcatgggcctggatgcatcattgttaaaggagaaacaccatgggtccttatatctgcaattcagctatgcacagaactatgcaaagcaagcaaagatgctctagagtacctgaggaaggtaagggcatctatttcttaccacaaggccccaacaaatataagtatagaactacagttgcaaatacattgatcccttaggggttgagatggaaactgccacaagggagggaggacgtgagtcagctgcacgtgccgacatacacatcacttcctgcctcgctgtccttgatcgagacaaaatcagaagagctgtatctatatgtactccataccttgacgtatgcaggggctagatccataccccggcctatctgccctgtgaggaatgtatacttctgcaagtttgaatactttgacaccttgtgaggagcactctttgaaggtggagaaggtgttgttccaagggaagccagactaccaaaatgttatggttttttagcttctcaatagccggcgacagtgcatacgacctgccccgcgctggggctgtgtctgccttctcctccttcgatgccatgacactgtaaagtgaagccttcgagctaggcgcggaggccagggagatgctatgcgcccacatctaccacgccgccttcatattgctcaagctcgcgctccgcaactcctgccccatctgccgccatgagatgcccaccgatgctgccctgcgggctgccgccagcgtcggcgttgccgaacgcgccgccggggaggaacaagcgtgggatgcgccccacgcgcgcgactttcacctgcctcccaatttgatccgtgagttcaccaggaccagaacttcttcgatgatttgttggaccatccctgctgatacaaacacaatcattttgtggcaggaaatcaccatattagagcttacaaccttcgcatcaactgaagagtttgacactcatgatccaaaggagaacactttgctactcccttacttgaggaaaaggtcaaaaatcattgagatagttgcagcgcgtgatatagtctttgctctatcacagttaggagtatgtgctgcttttagtagcggtacgttcgccgaggacaagacaaaaccggatgctggtttccctctttttgactcaccatgtcaacatggcaatttcaggacccaacgtctctgcgagagaccttgggttcccttatccgaaggcaggcaccgctaagcctacagacgtggtggtgaagttctacgtcctctacgagaagtggcggaggggcgagctcctgggttcttcgtcagttgcgcggtacttgaaaagcatcactcattcgaacggtacgattattcatccttctggatcggagcgttctcttcatgcgtctgttgacgctctaagttcttgctacgtggacaaacagggcaacaagaatttccgggtgtgggtggacagactggtcacatcgccgatcggtacaagcaactggttggtgaggtttgataactgggagatggaaggtggcgttcggtactgctgccgcactactcttctgctgaataacaaggttccaaaagaactagaagtacagattggttgaacttcaaacaaatacaaagagctatgcatacaagtggtggaggcctggtggatcaaggtcgttgtcgtctccaggtccatcaaatgcgacaaggtcgagcgcacgcaattcagctccgaagtcatctcctttcaacagaaagatgcaagtaacaccaagtcacttgcctttgatggttgatacatttcactgtatatcattgcacgacagatccatttagtacctttttctgagttaaactacttcaaacattgctgaagactacaaccagcctacagttgttgtaattgaagcgggtcaagacatagcatttgcaaagatttagttcattctcatcactctgcaatattcgggttctctactatgtgtaatctcatatcaagattaatgagtatcgtgatcgtataattttgaatcctatcaacccatatggcaaggcaaagaaaaatgacagtggacatcattctagattttacaaaatcaaaggagcaaccagacatggctgtcatgatctaagatacttcaacgtgattggatcgaacccaaacatatgactaggagaagctccaaggccactttgtcaagggtctctgcaatgcacctactggtgcatgatttactggaggttgtgcgcatgaatgtgccacacattggtatgggggttggagttgaagcaggtgattttcaccaacattggtttgcgaactggagttgaagcaggagacatgattgttattcctatcatgtgcacactgcctcctcgctgtcatttgtcgtcactctcgtagtcctgataccggagcatggttgccaggggagagcagtccaaggcaaatttgccatgttggagcagtcacaggagccaaggggctgcagtcacaggtcctgctagccaggatggagcaatcataggacctcctagcagtccaaggaaaatttgcgaggtggagtagttgcaacttttgaaacccacgtgataacatgctcaagcgttcgtatgataaaaaagatggcacataatcaaaagaagatctcatgttctgcgtttgtgaacctgtttgtattttttgaacttgttttgtgaacctctatttgtaaacctgtaaaatctgaggttgtgaatagatttgggtaacttcatacaagtggtggaggcctggtggtaatcctggatgcatataaagcgaggcatgcaatatccatagcactcgtttgacagaaggcaacaccatcaaccttgtcctccacctttaaactagcatgagcaccatccttcttcacatttatattcatgtcccctatacgttcctcaaatacgtttgaaccatgtgtaccactatgtgaaccaactgagttcgtagactgatcaatgagtcaccttattgtggacgcagctctaaaaaatgttgtatctacaaatagattgtgtaaacgaaaagctttctgatctatg

SEQ ID NO: 60726 - DNA, 4901 bp, Zea Mays
ctccctccccatgaaacccccttcccccaatctacccctctctgtgcccccgacatccacgctgcctcagcccgccgtccagcgccctctctgcgcctccctccccacaccgcctcagcccgccgttcgccacgctccccacgctgcctccccccgtcgcccctccctcccgcgcggaactccgccatgctccccacgtcgcctccccccatcgcccaccagccgtcgcccaccagcccacactatctcacgccatggatggtggcaacagtccccgcccccgtacctcacacgcatcaggctgggctggccgatcccgccgccgcaaacgccgcgcccagccccgatgtcagcgcggcccgcccgccaacgcactttcggcctccccccgcccctcccttcgcccgcccacccgcaacctccgcgccatccgcaacctccgcccgcttctcacgccaccgacccgacctccgcgccatccgcaaccgtcgtgcgtcttatcccttctctaccgcgcactccgtgtggaacaacctccgcgtaggaagcctcctcccttccccatccccattccccaccacgcgcttcggggacggcgagctccgggcgggagcgaccgccgggcgcttctgctgctggtgcggaggaggaggagcggcgagggtggttcggcgcaggctccacggcggcggtgcccgagccgagttcgactggctggcgctctactgcaacctcacacgcggcgatgggccggacggtaacaatggcaagctggtcctggaggagctgctgtcgtgcgccgccacccaattttgttttccccaaatcctgagctgtgaagagaagaagaagacaaggacgcggcgagtacgatgacgagcgccgcacagcaagtcagcgaggagcacgatgacgcgatgaggaccacgagctgccgaggaagtcaaggacgacgacggcgcagagacccgcgagttgagacatcttcttcgccggcgtgaaccgcaaggctgagacatcttcttcgccgggttcggccacgccgacaccaccgacccgatccgtgtttgcaggcctctcaaattgaaccgattgcttcaagggtgccatacatgattgtgttaaccatgagagggattggcctggcactggttcattctacgggaacctcgacttcggtggagaatgtggtgtccctgtccaaactgtgttctacactccaactgaaaaccgtgcaaagttctggtacgcaacagattacgacatgtttagccttctgcattgctcacatggaagaggacttgagacccgggaccgagcagtacagattcatcgagcaatgccacattggcctcatgaagtttcacaatcacagtggtttttacaaggatttcagttcatggttgtacatagtttttttagttttttttttgaaaaatgaggcattttctttttaccggcggcggaggcgatggcaacaagcccttccctattcgaatctctgtgaccacagagcctacctcgctgagctcatcaccgagatcactggtgggatcaatgagctcgccgacgtagcacagttcttttgatgagagtggttcaactctattttgcttggttcagtggagatggtagcatggtgaaggataatgcctacgtgcgcagcaattttcatttttcttttagtttcttggagtcgtggaaatctcgctattcacaaggatttcatggcggcgttgttaatttgggggttgggcagaggctttaccttttgcgtcagacagtgctctcctatgcacagaactatcaaaagcaagcaaagatgctctagagtacctgaggaaggctactttgtgctctataaggattgccaggaaagtgccagatttggcagagaacttcatgggcctggatgcatcattgttaaaggagaaacaccatgggtccttatatctgcaattcagctatgcacagaactatgcaaagcaagcaaagatgctctagagtacctgaggaagttgcaaatacattgatcccttaggggttgagatggaaactgccacaagggagggaggacgtgagtcagctgcacgtgccgacatacacatcacttcctgcctcgctgtccttgatcgagacaaaatcagaagagctgtatctatatgtactccataccttgacgtatgcaggggctagatccataccccggcctatctgccctgtgaggaatgtatacttctgcaagtttgaatactttgacaccttgtgaggagcactctttgaaggtggagaaggtgttgttccaagggaagccagactaccaaaatgttatggttttttagcttctcaatagccggcgacagtgcatacgacctgccccgcgctggggctgtgtctgccttctcctccttcgatgccatgacactgtaaagtgaagccttcgagctaggcgcggaggccagggagatgctatgcgcccacatctaccacgccgccttcatattgctcaagctcgcgctccgcaactcctgccccatctgccgccatgagatgcccaccgatgctgccctgcgggctgccgccagcgtcggcgttgccgaacgcgccgccggggaggaacaagcgtgggatgcgccccacgcgcgcgactttcacctgcctcccaatttgatccgtgagttcaccaggaccagaacttcttcgatgatttgttggaccatccctgctgatacaaacacaatcattttgtggcaggaaatcaccatattagagcttacaaccttcgcatcaactgaagagtttgacactcatgatccaaaggagaacactttgctactcccttacttgaggaaaaggtcaaaaatcattgagatagttgcagcgcgtgatatagtctttgctctatcacagttaggagtatgtgctgcttttagtagcggtacgttcgccgaggacaagacaaaaccggatgctggtttccctctttttgactcaccatgtcaacatggcaatttcaggacccaacgtctctgcgagagaccttgggttcccttatccgaaggcaggcaccgctaagcctacagacgtggtggtgaagttctacgtcctctacgagaagtggcggaggggcgagctcctgggttcttcgtcagttgcgcggtacttgaaaagcatcactcattcgaacggtacgattattcatccttctggatcggagcgttctcttcatgcgtctgttgacgctctaagttcttgctacgtggacaaacagggcaacaagaatttccgggtgtgggtggacagactggtcacatcgccgatcggtacaagcaactggttggtgaggtttgataactgggagatggaaggtggcgttcggtactgctgccgcactactcttctgctgaataacaaggttccaaaagaactagaagtacagattggttgaacttcaaacaaatacaaagagctatgcatacaagtggtggaggcctggtggatcaaggtcgttgtcgtctccaggtccatcaaatgcgacaaggtcgagcgcacgcaattcagctccgaagtcatctcctttcaacagaaagatgcaagtaacaccaagtcacttgcctttgatggttgatacatttcactgtatatcattgcacgacagatccatttagtacctttttctgagttaaactacttcaaacattgctgaagactacaaccagcctacagttgttgtaattgaagcgggtcaagacatagcatttgcaaagatttagttcattctcatcactctgcaatattcgggttctctactatgtgtaatctcatatcaagattaatgagtatcgtgatcgtataattttgaatcctatcaacccatatggcaaggcaaagaaaaatgacagtggacatcattctagattttacaaaatcaaaggagcaaccagacatggctgtcatgatctaagatacttcaacgtgattggatcgaacccaaacatatgactaggagaagctccaaggccactttgtcaagggtctctgcaatgcacctactggtgcatgatttactggaggttgtgcgcatgaatgtgccacacattggtatgggggttggagttgaagcaggtgattttcaccaacattggtttgcgaactggagttgaagcaggagacatgattgttattcctatcatgtgcacactgcctcctcgctgtcatttgtcgtcactctcgtagtcctgataccggagcatggttgccaggggagagcagtccaaggcaaatttgccatgttggagcagtcacaggagccaaggggctgcagtcacaggtcctgctagccaggatggagcaatcataggacctcctagcagtccaaggaaaatttgcgaggtggagtagttgcaacttttgaaacccacgtgataacatgctcaagcgttcgtatgataaaaaagatggcacataatcaaaagaagatctcatgttctgcgtttgtgaacctgtttgtattttttgaacttgttttgtgaacctctatttgtaaacctgtaaaatctgaggttgtgaatagatttgggtaacttcatacaagtggtggaggcctggtggtaatcctggatgcatataaagcgaggcatgcaatatccatagcactcgtttgacagaaggcaacaccatcaaccttgtcctccacctttaaactagcatgagcaccatccttcttcacatttatattcatgtcccctatacgttcctcaaatacgtttgaaccatgtgtaccactatgtgaaccaactgagttcgtagactgatcaatgagtcaccttattgtggacgcagctctaaaaaatgttgtatctacaaatagattgtgtaaacgaaaagctttctgatctatg

SEQ ID NO: 60727 - DNA, 5070 bp, Zea Mays
ctccctccccatgaaacccccttcccccaatctacccctctctgtgcccccgacatccacgctgcctcagcccgccgtccagcgccctctctgcgcctccctccccacaccgcctcagcccgccgttcgccacgctccccacgctgcctccccccgtcgcccctccctcccgcgcggaactccgccatgctccccacgtcgcctccccccatcgcccaccagccgtcgcccaccagcccacactatctcacgccatggatggtggcaacagtccccgcccccgtacctcacacgcatcaggctgggctggccgatcccgccgccgcaaacgccgcgcccagccccgatgtcagcgcggcccgcccgccaacgcactttcggcctccccccgcccctcccttcgcccgcccacccgcaacctccgcgccatccgcaacctccgcccgcttctcacgccaccgacccgacctccgcgccatccgcaaccgtcgtgcgtcttatcccttctctaccgcgcactccgtgtggaacaacctccgcgtaggaagcctcctcccttccccatccccattccccaccacgcgcttcggggacggcgagctccgggcgggagcgaccgccgggcgcttctgctgctggtgcggaggaggaggagcggcgagggtggttcggcgcaggctccacggcggcggtgcccgagccgagttcgactggctggcgctctactgcaacctcacacgcggcgatgggccggacggtaacaatggcaagctggtcctggaggagctgctgtcgtgcgccgccacccaattttgttttccccaaatcctgagctgtgaagagaagaagaagacaaggacgcggcgagtacgatgacgagcgccgcacagcaagtcagcgaggagcacgatgacgcgatgaggaccacgagctgccgaggaagtcaaggacgacgacggcgcagagacccgcgagttgagacatcttcttcgccggcgtgaaccgcaaggctgagacatcttcttcgccgggttcggccacgccgacaccaccgacccgatgtacctatcctagccgtgtttgcaggcctctcaaattgaaccgattgcttcaagggtgccatacatgattgtgttaaccatgagagggattggcctggcactggttcattctacgggaacctcgacttcggtggagaatgtggtgtccctgtccaaactgtgttctacactccaactgaaaaccgtgcaaagttctggtacgcaacagattacgacatgtttagccttctgcattgctcacatggaagaggacttgagacccgggaccgagcagtacagattcatcgagcaatgccacattggcctcatgaagtttcacaatcacagtggtttttacaaggatttcagttcatggttgtacatagtttttttagttttttttttgaaaaatgaggcattttctttttaccggcggcggaggcgatggcaacaagcccttccctattcgaatctctgtgaccacagagcctacctcgctgagctcatcaccgagatcactggtgggatcaatgagctcgccgacgtagcacagttcttttgatgagagtggttcaactctattttgcttggttcagtggagatggtagcatggtgaaggataatgcctacgtgcgcagcaattttcatttttcttttagtttcttggagtcgtggaaatctcgctattcacaaggatttcatggcggcgttgttaatttgggggttgggcagaggctttaccttttgcgtcagacagtgctctctcacagcaattgtccttttgcctacctgtatcattctgtcatactatctgcaattcagctatgcacagaactatcaaaagcaagcaaagatgctctagagtacctgaggaaggctactttgtgctctataaggattgccaggaaagtgccagatttggcagagaacttcatgggcctggatgcatcattgttaaaggagaaacaccatgggtccttatatctgcaattcagctatgcacagaactatgcaaagcaagcaaagatgctctagagtacctgaggaagttgcaaatacattgatcccttaggggttgagatggaaactgccacaagggagggaggacgtgagtcagctgcacgtgccgacatacacatcacttcctgcctcgctgtccttgatcgagacaaaatcagaagagctgtatctatatgtactccataccttgacgtatgcaggggctagatccataccccggcctatctgccctgtgaggaatgtatacttctgcaagtttgaatactttgacaccttgtgaggagcactctttgaaggtggagaaggtgttgttccaagggaagccagactaccaaaatgttatggttttttagcttctcaatagccggcgacagtgcatacgacctgccccgcgctggggctgtgtctgccttctcctccttcgatgccatgacactgtaaagtgaagccttcgagctaggcgcggaggccagggagatgctatgcgcccacatctaccacgccgccttcatattgctcaagctcgcgctccgcaactcctgccccatctgccgccatgagatgcccaccgatgctgccctgcgggctgccgccagcgtcggcgttgccgaacgcgccgccggggaggaacaagcgtgggatgcgccccacgcgcgcgactttcacctgcctcccaatttgatccgtgagttcaccaggaccaggcttctatgcttacatattcagtgctgttcgctcgtgctgtatctgtggccgcgtgagcaggaaatcaccatattagagcttacaaccttcgcatcaactgtttgtgcagcaatgagtttatcttaagttatgtttttttggtaatatcggttgactgcacttaagttctaataaagcatctttgatgtcacttgtaggaagagtttgacactcatgatccaaaggagaacactttgctactcccttacttgaggaaaaggtcaaaaatcattgagatagttgcagcgcgtgatatagtctttgctctatcacagttaggagtatgtgctgcttttagtagcggtacgttcgccgaggacaagacaaaaccggatgctggtttccctctttttgactcaccatgtcaacatggcaatttcaggacccaacgtctctgcgagagaccttgggttcccttatccgaaggcaggcaccgctaagcctacagacgtggtggtgaagttctacgtcctctacgagaagtggcggaggggcgagctcctgggttcttcgtcagttgcgcggtacttgaaaagcatcactcattcgaacggtacgattattcatccttctggatcggagcgttctcttcatgcgtctgttgacgctctaagttcttgctacgtggacaaacagggcaacaagaatttccgggtgtgggtggacagactggtcacatcgccgatcggtacaagcaactggttggtgaggtttgataactgggagatggaaggtggcgttcggtactgctgccgcactactcttctgctgaataacaaggttccaaaagaactagaagtacagattggttgaacttcaaacaaatacaaagagctatgcatacaagtggtggaggcctggtggatcaaggtcgttgtcgtctccaggtccatcaaatgcgacaaggtcgagcgcacgcaattcagctccgaagtcatctcctttcaacagaaagatgcaagtaacaccaagtcacttgcctttgatggttgatacatttcactgtatatcattgcacgacagatccatttagtacctttttctgagttaaactacttcaaacattgctgaagactacaaccagcctacagttgttgtaattgaagcgggtcaagacatagcatttgcaaagatttagttcattctcatcactctgcaatattcgggttctctactatgtgtaatctcatatcaagattaatgagtatcgtgatcgtataattttgaatcctatcaacccatatggcaaggcaaagaaaaatgacagtggacatcattctagattttacaaaatcaaaggagcaaccagacatggctgtcatgatctaagatacttcaacgtgattggatcgaacccaaacatatgactaggagaagctccaaggccactttgtcaagggtctctgcaatgcacctactggtgcatgatttactggaggttgtgcgcatgaatgtgccacacattggtatgggggttggagttgaagcaggtgattttcaccaacattggtttgcgaactggagttgaagcaggagacatgattgttattcctatcatgtgcacactgcctcctcgctgtcatttgtcgtcactctcgtagtcctgataccggagcatggttgccaggggagagcagtccaaggcaaatttgccatgttggagcagtcacaggagccaaggggctgcagtcacaggtcctgctagccaggatggagcaatcataggacctcctagcagtccaaggaaaatttgcgaggtggagtagttgcaacttttgaaacccacgtgataacatgctcaagcgttcgtatgataaaaaagatggcacataatcaaaagaagatctcatgttctgcgtttgtgaacctgtttgtattttttgaacttgttttgtgaacctctatttgtaaacctgtaaaatctgaggttgtgaatagatttgggtaacttcatacaagtggtggaggcctggtggtaatcctggatgcatataaagcgaggcatgcaatatccatagcactcgtttgacagaaggcaacaccatcaaccttgtcctccacctttaaactagcatgagcaccatccttcttcacatttatattcatgtcccctatacgttcctcaaatacgtttgaaccatgtgtaccactatgtgaaccaactgagttcgtagactgatcaatgagtcaccttattgtggacgcagctctaaaaaatgttgtatctacaaatagattgtgtaaacgaaaagctttctgatctatg

SEQ ID NO: 60728 - DNA, 5123 bp, Zea Mays
ctccctccccatgaaacccccttcccccaatctacccctctctgtgcccccgacatccacgctgcctcagcccgccgtccagcgccctctctgcgcctccctccccacaccgcctcagcccgccgttcgccacgctccccacgctgcctccccccgtcgcccctccctcccgcgcggaactccgccatgctccccacgtcgcctccccccatcgcccaccagccgtcgcccaccagcccacactatctcacgccatggatggtggcaacagtccccgcccccgtacctcacacgcatcaggctgggctggccgatcccgccgccgcaaacgccgcgcccagccccgatgtcagcgcggcccgcccgccaacgcactttcggcctccccccgcccctcccttcgcccgcccacccgcaacctccgcgccatccgcaacctccgcccgcttctcacgccaccgacccgacctccgcgccatccgcaaccgtcgtgcgtcttatcccttctctaccgcgcactccgtgtggaacaacctccgcgtaggaagcctcctcccttccccatccccattccccaccacgcgcttcggggacggcgagctccgggcgggagcgaccgccgggcgcttctgctgctggtgcggaggaggaggagcggcgagggtggttcggcgcaggctccacggcggcggtgcccgagccgagttcgactggctggcgctctactgcaacctcacacgcggcgatgggccggacggtaacaatggcaagctggtcctggaggagctgctgtcgtgcgccgccacccaattttgttttccccaaatcctgagctgtgaagagaagaagaagacaaggacgcggcgagtacgatgacgagcgccgcacagcaagtcagcgaggagcacgatgacgcgatgaggaccacgagctgccgaggaagtcaaggacgacgacggcgcagagacccgcgagttgagacatcttcttcgccggcgtgaaccgcaaggctgagacatcttcttcgccgggttcggccacgccgacaccaccgacccgatccgtgtttgcaggcctctcaaattgaaccgattgcttcaagggtgccatacatgattgtgttaaccatgagagggattggcctggcactggttcattctacgggaacctcgacttcggtggagaatgtggtgtccctgtccaaactgtgttctacactccaactgaaaaccgtgcaaagttctggtacgcaacagattacgacatgtttagccttctgcattgctcacatggaagaggacttgagacccgggaccgagcagtacagattcatcgagcaatgccacattggcctcatgaagtttcacaatcacagtggtttttacaaggatttcagttcatggttgtacatagtttttttagttttttttttgaaaaatgaggcattttctttttaccggcggcggaggcgatggcaacaagcccttccctattcgaatctctgtgaccacagagcctacctcgctgagctcatcaccgagatcactggtgggatcaatgagctcgccgacgtagcacagttcttttgatgagagtggttcaactctattttgcttggttcagtggagatggtagcatggtgaaggataatgcctacgtgcgcagcaattttcatttttcttttagtttcttggagtcgtggaaatctcgctattcacaaggatttcatggcggcgttgttaatttgggggttgggcagaggctttaccttttgcgtcagacagtgctctctcacagcaattgtccttttgcctacctgtatcattctgtcatactatctgcaattcagctatgcacagaactatcaaaagcaagcaaagatgctctagagtacctgaggaaggctactttgtgctctataaggattgccaggaaagtgccagatttggcagagaacttcatgggcctggatgcatcattgttaaaggagaaacaccatgggtccttatatctgcaattcagctatgcacagaactatgcaaagcaagcaaagatgctctagagtacctgaggaagagctaggataaaactgttgattgttacagccctgggcaaggattgatgcttgctagcttcaagattaggaccctaccacttgatgagaacagatagtgctatactgctatgtacatctacatttctccagttatacataatcagatcttgcttctagccaactgttgcaaatacattgatcccttaggggttgagatggaaactgccacaagggagggaggacgtgagtcagctgcacgtgccgacatacacatcacttcctgcctcgctgtccttgatcgagacaaaatcagaagagctgtatctatatgtactccataccttgacgtatgcaggggctagatccataccccggcctatctgccctgtgaggaatgtatacttctgcaagtttgaatactttgacaccttgtgaggagcactctttgaaggtggagaaggtgttgttccaagggaagccagactaccaaaatgttatggttttttagcttctcaatagccggcgacagtgcatacgacctgccccgcgctggggctgtgtctgccttctcctccttcgatgccatgacactgtaaagtgaagccttcgagctaggcgcggaggccagggagatgctatgcgcccacatctaccacgccgccttcatattgctcaagctcgcgctccgcaactcctgccccatctgccgccatgagatgcccaccgatgctgccctgcgggctgccgccagcgtcggcgttgccgaacgcgccgccggggaggaacaagcgtgggatgcgccccacgcgcgcgactttcacctgcctcccaatttgatccgtgagttcaccaggaccagaacttcttcgatgatttgttggaccatccctgctgatacaaacacaatcattttgtggcaggaaatcaccatattagagcttacaaccttcgcatcaactgaagagtttgacactcatgatccaaaggagaacactttgctactcccttacttgaggaaaaggtcaaaaatcattgagatagttgcagcgcgtgatatagtctttgctctatcacagttaggagtatgtgctgcttttagtagcggtacgttcgccgaggacaagacaaaaccggatgctggtttccctctttttgactcaccatgtcaacatggcaatttcaggacccaacgtctctgcgagagaccttgggttcccttatccgaaggcaggcaccgctaagcctacagacgtggtggtgaagttctacgtcctctacgagaagtggcggaggggcgagctcctgggttcttcgtcagttgcgcggtacttgaaaagcatcactcattcgaacggtacgattattcatccttctggatcggagcgttctcttcatgcgtctgttgacgctctaagttcttgctacgtggacaaacagggcaacaagaatttccgggtgtgggtggacagactggtcacatcgccgatcggtacaagcaactggttggtgaggtttgataactgggagatggaaggtggcgttcggtactgctgccgcactactcttctgctgaataacaaggttccaaaagaactagaagtacagattggttgaacttcaaacaaatacaaagagctatgcatacaagtggtggaggcctggtggatcaaggtcgttgtcgtctccaggtccatcaaatgcgacaaggtcgagcgcacgcaattcagctccgaagtcatctcctttcaacagaaagatgcaagtaacaccaagtcacttgcctttgatggttgatacatttcactgtatatcattgcacgacagatccatttagtacctttttctgagttaaactacttcaaacattgctgaagactacaaccagcctacagttgttgtaattgaagcgggtcaagacatagcatttgcaaagatttagttcattctcatcactctgcaatattcgggttctctactatgtgtaatctcatatcaagattaatgagtatcgtgatcgtataattttgaatcctatcaacccatatggcaaggcaaagaaaaatgacagtggacatcattctagattttacaaaatcaaaggagcaaccagacatggctgtcatgatctaagatacttcaacgtgattggatcgaacccaaacatatgactaggagaagctccaaggccactttgtcaagggtctctgcaatgcacctactggtgcatgatttactggaggttgtgcgcatgaatgtgccacacattggtatgggggttggagttgaagcaggtgattttcaccaacattggtttgcgaactggagttgaagcaggagacatgattgttattcctatcatgtgcacactgcctcctcgctgtcatttgtcgtcactctcgtagtcctgataccggagcatggttgccaggggagagcagtccaaggcaaatttgccatgttggagcagtcacaggagccaaggggctgcagtcacaggtcctgctagccaggatggagcaatcataggacctcctagcagtccaaggaaaatttgcgaggtggagtagttgcaacttttgaaacccacgtgataacatgctcaagcgttcgtatgataaaaaagatggcacataatcaaaagaagatctcatgttctgcgtttgtgaacctgtttgtattttttgaacttgttttgtgaacctctatttgtaaacctgtaaaatctgaggttgtgaatagatttgggtaacttcatacaagtggtggaggcctggtggtaatcctggatgcatataaagcgaggcatgcaatatccatagcactcgtttgacagaaggcaacaccatcaaccttgtcctccacctttaaactagcatgagcaccatccttcttcacatttatattcatgtcccctatacgttcctcaaatacgtttgaaccatgtgtaccactatgtgaaccaactgagttcgtagactgatcaatgagtcaccttattgtggacgcagctctaaaaaatgttgtatctacaaatagattgtgtaaacgaaaagctttctgatctatg

SEQ ID NO: 60729 - DNA, 5136 bp, Zea Mays
ctccctccccatgaaacccccttcccccaatctacccctctctgtgcccccgacatccacgctgcctcagcccgccgtccagcgccctctctgcgcctccctccccacaccgcctcagcccgccgttcgccacgctccccacgctgcctccccccgtcgcccctccctcccgcgcggaactccgccatgctccccacgtcgcctccccccatcgcccaccagccgtcgcccaccagcccacactatctcacgccatggatggtggcaacagtccccgcccccgtacctcacacgcatcaggctgggctggccgatcccgccgccgcaaacgccgcgcccagccccgatgtcagcgcggcccgcccgccaacgcactttcggcctccccccgcccctcccttcgcccgcccacccgcaacctccgcgccatccgcaacctccgcccgcttctcacgccaccgacccgacctccgcgccatccgcaaccgtcgtgcgtcttatcccttctctaccgcgcactccgtgtggaacaacctccgcgtaggaagcctcctcccttccccatccccattccccaccacgcgcttcggggacggcgagctccgggcgggagcgaccgccgggcgcttctgctgctggtgcggaggaggaggagcggcgagggtggttcggcgcaggctccacggcggcggtgcccgagccgagttcgactggctggcgctctactgcaacctcacacgcggcgatgggccggacggtaacaatggcaagctggtcctggaggagctgctgtcgtgcgccgccacccaattttgttttccccaaatcctgagctgtgaagagaagaagaagacaaggacgcggcgagtacgatgacgagcgccgcacagcaagtcagcgaggagcacgatgacgcgatgaggaccacgagctgccgaggaagtcaaggacgacgacggcgcagagacccgcgagttgagacatcttcttcgccggcgtgaaccgcaaggctgagacatcttcttcgccgggttcggccacgccgacaccaccgacccgatgtacctatcctagccgtgtttgcaggcctctcaaattgaaccgattgcttcaagggtgccatacatgattgtgttaaccatgagagggattggcctggcactggttcattctacgggaacctcgacttcggtggagaatgtggtgtccctgtccaaactgtgttctacactccaactgaaaaccgtgcaaagttctggtacgcaacagattacgacatgtttagccttctgcattgctcacatggaagaggacttgagacccgggaccgagcagtacagattcatcgagcaatgccacattggcctcatgaagtttcacaatcacagtggtttttacaaggatttcagttcatggttgtacatagtttttttagttttttttttgaaaaatgaggcattttctttttaccggcggcggaggcgatggcaacaagcccttccctattcgaatctctgtgaccacagagcctacctcgctgagctcatcaccgagatcactggtgggatcaatgagctcgccgacgtagcacagttcttttgatgagagtggttcaactctattttgcttggttcagtggagatggtagcatggtgaaggataatgcctacgtgcgcagcaattttcatttttcttttagtttcttggagtcgtggaaatctcgctattcacaaggatttcatggcggcgttgttaatttgggggttgggcagaggctttaccttttgcgtcagacagtgctctctcacagcaattgtccttttgcctacctgtatcattctgtcatactatctgcaattcagctatgcacagaactatcaaaagcaagcaaagatgctctagagtacctgaggaaggctactttgtgctctataaggattgccaggaaagtgccagatttggcagagaacttcatgggcctggatgcatcattgttaaaggagaaacaccatgggtccttatatctgcaattcagctatgcacagaactatgcaaagcaagcaaagatgctctagagtacctgaggaagagctaggataaaactgttgattgttacagccctgggcaaggattgatgcttgctagcttcaagattaggaccctaccacttgatgagaacagatagtgctatactgctatgtacatctacatttctccagttatacataatcagatcttgcttctagccaactgttgcaaatacattgatcccttaggggttgagatggaaactgccacaagggagggaggacgtgagtcagctgcacgtgccgacatacacatcacttcctgcctcgctgtccttgatcgagacaaaatcagaagagctgtatctatatgtactccataccttgacgtatgcaggggctagatccataccccggcctatctgccctgtgaggaatgtatacttctgcaagtttgaatactttgacaccttgtgaggagcactctttgaaggtggagaaggtgttgttccaagggaagccagactaccaaaatgttatggttttttagcttctcaatagccggcgacagtgcatacgacctgccccgcgctggggctgtgtctgccttctcctccttcgatgccatgacactgtaaagtgaagccttcgagctaggcgcggaggccagggagatgctatgcgcccacatctaccacgccgccttcatattgctcaagctcgcgctccgcaactcctgccccatctgccgccatgagatgcccaccgatgctgccctgcgggctgccgccagcgtcggcgttgccgaacgcgccgccggggaggaacaagcgtgggatgcgccccacgcgcgcgactttcacctgcctcccaatttgatccgtgagttcaccaggaccagaacttcttcgatgatttgttggaccatccctgctgatacaaacacaatcattttgtggcaggaaatcaccatattagagcttacaaccttcgcatcaactgaagagtttgacactcatgatccaaaggagaacactttgctactcccttacttgaggaaaaggtcaaaaatcattgagatagttgcagcgcgtgatatagtctttgctctatcacagttaggagtatgtgctgcttttagtagcggtacgttcgccgaggacaagacaaaaccggatgctggtttccctctttttgactcaccatgtcaacatggcaatttcaggacccaacgtctctgcgagagaccttgggttcccttatccgaaggcaggcaccgctaagcctacagacgtggtggtgaagttctacgtcctctacgagaagtggcggaggggcgagctcctgggttcttcgtcagttgcgcggtacttgaaaagcatcactcattcgaacggtacgattattcatccttctggatcggagcgttctcttcatgcgtctgttgacgctctaagttcttgctacgtggacaaacagggcaacaagaatttccgggtgtgggtggacagactggtcacatcgccgatcggtacaagcaactggttggtgaggtttgataactgggagatggaaggtggcgttcggtactgctgccgcactactcttctgctgaataacaaggttccaaaagaactagaagtacagattggttgaacttcaaacaaatacaaagagctatgcatacaagtggtggaggcctggtggatcaaggtcgttgtcgtctccaggtccatcaaatgcgacaaggtcgagcgcacgcaattcagctccgaagtcatctcctttcaacagaaagatgcaagtaacaccaagtcacttgcctttgatggttgatacatttcactgtatatcattgcacgacagatccatttagtacctttttctgagttaaactacttcaaacattgctgaagactacaaccagcctacagttgttgtaattgaagcgggtcaagacatagcatttgcaaagatttagttcattctcatcactctgcaatattcgggttctctactatgtgtaatctcatatcaagattaatgagtatcgtgatcgtataattttgaatcctatcaacccatatggcaaggcaaagaaaaatgacagtggacatcattctagattttacaaaatcaaaggagcaaccagacatggctgtcatgatctaagatacttcaacgtgattggatcgaacccaaacatatgactaggagaagctccaaggccactttgtcaagggtctctgcaatgcacctactggtgcatgatttactggaggttgtgcgcatgaatgtgccacacattggtatgggggttggagttgaagcaggtgattttcaccaacattggtttgcgaactggagttgaagcaggagacatgattgttattcctatcatgtgcacactgcctcctcgctgtcatttgtcgtcactctcgtagtcctgataccggagcatggttgccaggggagagcagtccaaggcaaatttgccatgttggagcagtcacaggagccaaggggctgcagtcacaggtcctgctagccaggatggagcaatcataggacctcctagcagtccaaggaaaatttgcgaggtggagtagttgcaacttttgaaacccacgtgataacatgctcaagcgttcgtatgataaaaaagatggcacataatcaaaagaagatctcatgttctgcgtttgtgaacctgtttgtattttttgaacttgttttgtgaacctctatttgtaaacctgtaaaatctgaggttgtgaatagatttgggtaacttcatacaagtggtggaggcctggtggtaatcctggatgcatataaagcgaggcatgcaatatccatagcactcgtttgacagaaggcaacaccatcaaccttgtcctccacctttaaactagcatgagcaccatccttcttcacatttatattcatgtcccctatacgttcctcaaatacgtttgaaccatgtgtaccactatgtgaaccaactgagttcgtagactgatcaatgagtcaccttattgtggacgcagctctaaaaaatgttgtatctacaaatagattgtgtaaacgaaaagctttctgatctatg

SEQ ID NO: 60730 - DNA, 5125 bp, Zea Mays
ctccctccccatgaaacccccttcccccaatctacccctctctgtgcccccgacatccacgctgcctcagcccgccgtccagcgccctctctgcgcctccctccccacaccgcctcagcccgccgttcgccacgctccccacgctgcctccccccgtcgcccctccctcccgcgcggaactccgccatgctccccacgtcgcctccccccatcgcccaccagccgtcgcccaccagcccacactatctcacgccatggatggtggcaacagtccccgcccccgtacctcacacgcatcaggctgggctggccgatcccgccgccgcaaacgccgcgcccagccccgatgtcagcgcggcccgcccgccaacgcactttcggcctccccccgcccctcccttcgcccgcccacccgcaacctccgcgccatccgcaacctccgcccgcttctcacgccaccgacccgacctccgcgccatccgcaaccgtcgtgcgtcttatcccttctctaccgcgcactccgtgtggaacaacctccgcgtaggaagcctcctcccttccccatccccattccccaccacgcgcttcggggacggcgagctccgggcgggagcgaccgccgggcgcttctgctgctggtgcggaggaggaggagcggcgagggtggttcggcgcaggctccacggcggcggtgcccgagccgagttcgactggctggcgctctactgcaacctcacacgcggcgatgggccggacggtaacaatggcaagctggtcctggaggagctgctgtcgtgcgccgccacccaattttgttttccccaaatcctgagctgtgaagagaagaagaagacaaggacgcggcgagtacgatgacgagcgccgcacagcaagtcagcgaggagcacgatgacgcgatgaggaccacgagctgccgaggaagtcaaggacgacgacggcgcagagacccgcgagttgagacatcttcttcgccggcgtgaaccgcaaggctgagacatcttcttcgccgggttcggccacgccgacaccaccgacccgatgtacctatcctagccgtgtttgcaggcctctcaaattgaaccgattgcttcaagggtgccatacatgattgtgttaaccatgagagggattggcctggcactggttcattctacgggaacctcgacttcggtggagaatgtggtgtccctgtccaaactgtgttctacactccaactgaaaaccgtgcaaagttctggtacgcaacagattacgacatgtttagccttctgcattgctcacatggaagaggacttgagacccgggaccgagcagtacagattcatcgagcaatgccacattggcctcatgaagtttcacaatcacagtggtttttacaaggatttcagttcatggttgtacatagtttttttagttttttttttgaaaaatgaggcattttctttttaccggcggcggaggcgatggcaacaagcccttccctattcgaatctctgtgaccacagagcctacctcgctgagctcatcaccgagatcactggtgggatcaatgagctcgccgacgtagcacagttcttttgatgagtggagatggtagcatggtgaaggataatgcctacgtgcgcagcaattttcatttttcttttagtttcttggagtcgtggaaatctcgctattcacaaggatttcatggcggcgttgttaatttgggggttgggcagaggctttaccttttgcgtcagacagtgctctctcacagcaattgtccttttgcctacctgtatcattctgtcatactatctgcaattcagctatgcacagaactatcaaaagcaagcaaagatgctctagagtacctgaggaaggctactttgtgctctataaggattgccaggaaagtgccagatttggcagagaacttcatgggcctggatgcatcattgttaaaggagaaacaccatgggtccttatatctgcaattcagctatgcacagaactatgcaaagcaagcaaagatgctctagagtacctgaggaagagctaggataaaactgttgattgttacagccctgggcaaggattgatgcttgctagcttcaagattaggaccctaccacttgatgagaacagatagtgctatactgctatgtacatctacatttctccagttatacataatcagatcttgcttctagccaactgttgcaaatacattgatcccttaggggttgagatggaaactgccacaagggagggaggacgtgagtcagctgcacgtgccgacatacacatcacttcctgcctcgctgtccttgatcgagacaaaatcagaagagctgtatctatatgtactccataccttgacgtatgcaggggctagatccataccccggcctatctgccctgtgaggaatgtatacttctgcaagtttgaatactttgacaccttgtgaggagcactctttgaaggtggagaaggtgttgttccaagggaagccagactaccaaaatgttatggttttttagcttctcaatagccggcgacagtgcatacgacctgccccgcgctggggctgtgtctgccttctcctccttcgatgccatgacactgtaaagtgaagccttcgagctaggcgcggaggccagggagatgctatgcgcccacatctaccacgccgccttcatattgctcaagctcgcgctccgcaactcctgccccatctgccgccatgagatgcccaccgatgctgccctgcgggctgccgccagcgtcggcgttgccgaacgcgccgccggggaggaacaagcgtgggatgcgccccacgcgcgcgactttcacctgcctcccaatttgatccgtgagttcaccaggaccagcaacgatattggatttcaggcttctatgcttacatattcagtgctgttcgctcgtgctgtatctgtggccgcgtgagcaggaaatcaccatattagagcttacaaccttcgcatcaactgaagagtttgacactcatgatccaaaggagaacactttgctactcccttacttgaggaaaaggtcaaaaatcattgagatagttgcagcgcgtgatatagtctttgctctatcacagttaggagtatgtgctgcttttagtagcggtacgttcgccgaggacaagacaaaaccggatgctggtttccctctttttgactcaccatgtcaacatggcaatttcaggacccaacgtctctgcgagagaccttgggttcccttatccgaaggcaggcaccgctaagcctacagacgtggtggtgaagttctacgtcctctacgagaagtggcggaggggcgagctcctgggttcttcgtcagttgcgcggtacttgaaaagcatcactcattcgaacggtacgattattcatccttctggatcggagcgttctcttcatgcgtctgttgacgctctaagttcttgctacgtggacaaacagggcaacaagaatttccgggtgtgggtggacagactggtcacatcgccgatcggtacaagcaactggttggtgaggtttgataactgggagatggaaggtggcgttcggtactgctgccgcactactcttctgctgaataacaaggttccaaaagaactagaagtacagattggttgaacttcaaacaaatacaaagagctatgcatacaagtggtggaggcctggtggatcaaggtcgttgtcgtctccaggtccatcaaatgcgacaaggtcgagcgcacgcaattcagctccgaagtcatctcctttcaacagaaagatgcaagtaacaccaagtcacttgcctttgatggttgatacatttcactgtatatcattgcacgacagatccatttagtacctttttctgagttaaactacttcaaacattgctgaagactacaaccagcctacagttgttgtaattgaagcgggtcaagacatagcatttgcaaagatttagttcattctcatcactctgcaatattcgggttctctactatgtgtaatctcatatcaagattaatgagtatcgtgatcgtataattttgaatcctatcaacccatatggcaaggcaaagaaaaatgacagtggacatcattctagattttacaaaatcaaaggagcaaccagacatggctgtcatgatctaagatacttcaacgtgattggatcgaacccaaacatatgactaggagaagctccaaggccactttgtcaagggtctctgcaatgcacctactggtgcatgatttactggaggttgtgcgcatgaatgtgccacacattggtatgggggttggagttgaagcaggtgattttcaccaacattggtttgcgaactggagttgaagcaggagacatgattgttattcctatcatgtgcacactgcctcctcgctgtcatttgtcgtcactctcgtagtcctgataccggagcatggttgccaggggagagcagtccaaggcaaatttgccatgttggagcagtcacaggagccaaggggctgcagtcacaggtcctgctagccaggatggagcaatcataggacctcctagcagtccaaggaaaatttgcgaggtggagtagttgcaacttttgaaacccacgtgataacatgctcaagcgttcgtatgataaaaaagatggcacataatcaaaagaagatctcatgttctgcgtttgtgaacctgtttgtattttttgaacttgttttgtgaacctctatttgtaaacctgtaaaatctgaggttgtgaatagatttgggtaacttcatacaagtggtggaggcctggtggtaatcctggatgcatataaagcgaggcatgcaatatccatagcactcgtttgacagaaggcaacaccatcaaccttgtcctccacctttaaactagcatgagcaccatccttcttcacatttatattcatgtcccctatacgttcctcaaatacgtttgaaccatgtgtaccactatgtgaaccaactgagttcgtagactgatcaatgagtcaccttattgtggacgcagctctaaaaaatgttgtatctacaaatagattgtgtaaacgaaaagctttctgatctatg

SEQ ID NO: 60731 - DNA, 5044 bp, Zea Mays
ctccctccccatgaaacccccttcccccaatctacccctctctgtgcccccgacatccacgctgcctcagcccgccgtccagcgccctctctgcgcctccctccccacaccgcctcagcccgccgttcgccacgctccccacgctgcctccccccgtcgcccctccctcccgcgcggaactccgccatgctccccacgtcgcctccccccatcgcccaccagccgtcgcccaccagcccacactatctcacgccatggatggtggcaacagtccccgcccccgtacctcacacgcatcaggctgggctggccgatcccgccgccgcaaacgccgcgcccagccccgatgtcagcgcggcccgcccgccaacgcactttcggcctccccccgcccctcccttcgcccgcccacccgcaacctccgcgccatccgcaacctccgcccgcttctcacgccaccgacccgacctccgcgccatccgcaaccgtcgtgcgtcttatcccttctctaccgcgcactccgtgtggaacaacctccgcgtaggaagcctcctcccttccccatccccattccccaccacgcgcttcggggacggcgagctccgggcgggagcgaccgccgggcgcttctgctgctggtgcggaggaggaggagcggcgagggtggttcggcgcaggctccacggcggcggtgcccgagccgagttcgactggctggcgctctactgcaacctcacacgcggcgatgggccggacggtaacaatggcaagctggtcctggaggagctgctgtcgtgcgccgccacccaattttgttttccccaaatcctgagctgtgaagagaagaagaagacaaggacgcggcgagtacgatgacgagcgccgcacagcaagtcagcgaggagcacgatgacgcgatgaggaccacgagctgccgaggaagtcaaggacgacgacggcgcagagacccgcgagttgagacatcttcttcgccggcgtgaaccgcaaggctgagacatcttcttcgccgggttcggccacgccgacaccaccgacccgatccgtgtttgcaggcctctcaaattgaaccgattgcttcaagggtgccatacatgattgtgttaaccatgagagggattggcctggcactggttcattctacgggaacctcgacttcggtggagaatgtggtgtccctgtccaaactgtgttctacactccaactgaaaaccgtgcaaagttctggtacgcaacagattacgacatgtttagccttctgcattgctcacatggaagaggacttgagacccgggaccgagcagtacagattcatcgagcaatgccacattggcctcatgaagtttcacaatcacagtggtttttacaaggatttcagttcatggttgtacatagtttttttagttttttttttgaaaaatgaggcattttctttttaccggcggcggaggcgatggcaacaagcccttccctattcgaatctctgtgaccacagagcctacctcgctgagctcatcaccgagatcactggtgggatcaatgagctcgccgacgtagcacagttcttttgatgagagtggttcaactctattttgcttggttcagtggagatggtagcatggtgaaggataatgcctacgtgcgcagcaattttcatttttcttttagtttcttggagtcgtggaaatctcgctattcacaaggatttcatggcggcgttgttaatttgggggttgggcagaggctttaccttttgcgtcagacagtgctctctcacagcaattgtccttttgcctacctgtatcattctgtcatactatctgcaattcagctatgcacagaactatcaaaagcaagcaaagatgctctagagtacctgaggaaggctactttgtgctctataaggattgccaggaaagtgccagatttggcagagaacttcatgggcctggatgcatcattgttaaaggagaaacaccatgggtccttatatctgcaattcagctatgcacagaactatgcaaagcaagcaaagatgctctagagtacctgaggaagttgcaaatacattgatcccttaggggttgagatggaaactgccacaagggagggaggacgtgagtcagctgcacgtgccgacatacacatcacttcctgcctcgctgtccttgatcgagacaaaatcagaagagctgtatctatatgtactccataccttgacgtatgcaggggctagatccataccccggcctatctgccctgtgaggaatgtatacttctgcaagtttgaatactttgacaccttgtgaggagcactctttgaaggtggagaaggtgttgttccaagggaagccagactaccaaaatgttatggttttttagcttctcaatagccggcgacagtgcatacgacctgccccgcgctggggctgtgtctgccttctcctccttcgatgccatgacactgtaaagtgaagccttcgagctaggcgcggaggccagggagatgctatgcgcccacatctaccacgccgccttcatattgctcaagctcgcgctccgcaactcctgccccatctgccgccatgagatgcccaccgatgctgccctgcgggctgccgccagcgtcggcgttgccgaacgcgccgccggggaggaacaagcgtgggatgcgccccacgcgcgcgactttcacctgcctcccaatttgatccgtgagttcaccaggaccagaacttcttcgatgatttgttggaccatccctgctgatacaaacacaatcattttgtggcaggaaatcaccatattagagcttacaaccttcgcatcaactgtttgtgcagcaatgagtttatcttaagttatgtttttttggtaatatcggttgactgcacttaagttctaataaagcatctttgatgtcacttgtaggaagagtttgacactcatgatccaaaggagaacactttgctactcccttacttgaggaaaaggtcaaaaatcattgagatagttgcagcgcgtgatatagtctttgctctatcacagttaggagtatgtgctgcttttagtagcggtacgttcgccgaggacaagacaaaaccggatgctggtttccctctttttgactcaccatgtcaacatggcaatttcaggacccaacgtctctgcgagagaccttgggttcccttatccgaaggcaggcaccgctaagcctacagacgtggtggtgaagttctacgtcctctacgagaagtggcggaggggcgagctcctgggttcttcgtcagttgcgcggtacttgaaaagcatcactcattcgaacgggcaacaagaatttccgggtgtgggtggacagactggtcacatcgccgatcggtacaagcaactggttggtgaggtttgataactgggagatggaaggtggcgttcggtactgctgccgcactactcttctgctgaataacaaggttccaaaagaactagaagtacagattggttgaacttcaaacaaatacaaagagctatgcatacaagtggtggaggcctggtggtaaattgtttatcaagatcgctagagcagttaaatttactcctattatcttctgggatagatttggcaggatcaaggtcgttgtcgtctccaggtccatcaaatgcgacaaggtcgagcgcacgcaattcagctccgaagtcatctcctttcaacagaaagatgcaagtaacaccaagtcacttgcctttgatggttgatacatttcactgtatatcattgcacgacagatccatttagtacctttttctgagttaaactacttcaaacattgctgaagactacaaccagcctacagttgttgtaattgaagcgggtcaagacatagcatttgcaaagatttagttcattctcatcactctgcaatattcgggttctctactatgtgtaatctcatatcaagattaatgagtatcgtgatcgtataattttgaatcctatcaacccatatggcaaggcaaagaaaaatgacagtggacatcattctagattttacaaaatcaaaggagcaaccagacatggctgtcatgatctaagatacttcaacgtgattggatcgaacccaaacatatgactaggagaagctccaaggccactttgtcaagggtctctgcaatgcacctactggtgcatgatttactggaggttgtgcgcatgaatgtgccacacattggtatgggggttggagttgaagcaggtgattttcaccaacattggtttgcgaactggagttgaagcaggagacatgattgttattcctatcatgtgcacactgcctcctcgctgtcatttgtcgtcactctcgtagtcctgataccggagcatggttgccaggggagagcagtccaaggcaaatttgccatgttggagcagtcacaggagccaaggggctgcagtcacaggtcctgctagccaggatggagcaatcataggacctcctagcagtccaaggaaaatttgcgaggtggagtagttgcaacttttgaaacccacgtgataacatgctcaagcgttcgtatgataaaaaagatggcacataatcaaaagaagatctcatgttctgcgtttgtgaacctgtttgtattttttgaacttgttttgtgaacctctatttgtaaacctgtaaaatctgaggttgtgaatagatttgggtaacttcatacaagtggtggaggcctggtggtaatcctggatgcatataaagcgaggcatgcaatatccatagcactcgtttgacagaaggcaacaccatcaaccttgtcctccacctttaaactagcatgagcaccatccttcttcacatttatattcatgtcccctatacgttcctcaaatacgtttgaaccatgtgtaccactatgtgaaccaactgagttcgtagactgatcaatgagtcaccttattgtggacgcagctctaaaaaatgttgtatctacaaatagattgtgtaaacgaaaagctttctgatctatg

SEQ ID NO: 60732 - DNA, 5553 bp, Zea Mays
ctccctccccatgaaacccccttcccccaatctacccctctctgtgcccccgacatccacgctgcctcagcccgccgtccagcgccctctctgcgcctccctccccacaccgcctcagcccgccgttcgccacgctccccacgctgcctccccccgtcgcccctccctcccgcgcggaactccgccatgctccccacgtcgcctccccccatcgcccaccagccgtcgcccaccagcccacactatctcacgccatggatggtggcaacagtccccgcccccgtacctcacacgcatcaggctgggctggccgatcccgccgccgcaaacgccgcgcccagccccgatgtcagcgcggcccgcccgccaacgcactttcggcctccccccgcccctcccttcgcccgcccacccgcaacctccgcgccatccgcaacctccgcccgcttctcacgccaccgacccgacctccgcgccatccgcaaccgtcgtgcgtcttatcccttctctaccgcgcactccgtgtggaacaacctccgcgtaggaagcctcctcccttccccatccccattccccaccacgcgcttcggggacggcgagctccgggcgggagcgaccgccgggcgcttctgctgctggtgcggaggaggaggagcggcgagggtggttcggcgcaggctccacggcggcggtgcccgagccgagttcgactggctggcgctctactgcaacctcacacgcggcgatgggccggacggtaacaatggcaagctggtcctggaggagctgctgtcgtgcgccgccacccaattttgttttccccaaatcctgagctgtgaagagaagaagaagacaaggacgcggcgagtacgatgacgagcgccgcacagcaagtcagcgaggagcacgatgacgcgatgaggaccacgagctgccgaggaagtcaaggacgacgacggcgcagagacccgcgagttgagacatcttcttcgccggcgtgaaccgcaaggctgagacatcttcttcgccgggttcggccacgccgacaccaccgacccgatccgtgtttgcaggcctctcaaattgaaccgattgcttcaagggtgccatacatgattgtgttaaccatgagagggattggcctggcactggttcattctacgggaacctcgacttcggtggagaatgtggtgtccctgtccaaactgtgttctacactccaactgaaaaccgtgcaaagttctggtacgcaacagattacgacatgtttagccttctgcattgctcacatggaagaggacttgagacccgggaccgagcagtacagattcatcgagcaatgccacattggcctcatgaagtttcacaatcacagtggtttttacaaggatttcagttcatggttgtacatagtttttttagttttttttttgaaaaatgaggcattttctttttaccggcggcggaggcgatggcaacaagcccttccctattcgaatctctgtgaccacagagcctacctcgctgagctcatcaccgagatcactggtgggatcaatgagctcgccgacgtagcacagttcttttgatgagagtggttcaactctattttgcttggttcagtggagatggtagcatggtgaaggataatgcctacgtgcgcagcaattttcatttttcttttagtttcttggagtcgtggaaatctcgctattcacaaggatttcatggcggcgttgttaatttgggggttgggcagaggctttaccttttgcgtcagacagtgctctctcacagcaattgtccttttgcctacctgtatcattctgtcatactatctgcaattcagctatgcacagaactatcaaaagcaagcaaagatgctctagagtacctgaggaaggctactttgtgctctataaggattgccaggaaagtgccagatttggcagagaacttcatgggcctggatgcatcattgttaaaggagaaacaccatgggtccttatatctgcaattcagctatgcacagaactatgcaaagcaagcaaagatgctctagagtacctgaggaaggtaagggcatctatttcttaccacaaggccccaacaaatataagtatagaactacagttgcaaatacattgatcccttaggggttgagatggaaactgccacaagggagggaggacgtgagtcagctgcacgtgccgacatacacatcacttcctgcctcgctgtccttgatcgagacaaaatcagaagagctgtatctatatgtactccataccttgacgtatgcaggggctagatccataccccggcctatctgccctgtgaggaatgtatacttctgcaagtttgaatactttgacaccttgtgaggagcactctttgaaggtggagaaggtgttgttccaagggaagccagactaccaaaatgttatggttttttagcttctcaatagccggcgacagtgcatacgacctgccccgcgctggggctgtgtctgccttctcctccttcgatgccatgacactgtaaagtgaagccttcgagctaggcgcggaggccagggagatgctatgcgcccacatctaccacgccgccttcatattgctcaagctcgcgctccgcaactcctgccccatctgccgccatgagatgcccaccgatgctgccctgcgggctgccgccagcgtcggcgttgccgaacgcgccgccggggaggaacaagcgtgggatgcgccccacgcgcgcgactttcacctgcctcccaatttgatccgtgagttcaccaggaccagaacttcttcgatgatttgttggaccatccctgctgatacaaacacaatcattttgtggcaggaaatcaccatattagagcttacaaccttcgcatcaactgtttgtgcagcaatgagtttatcttaagttatgtttttttggtaatatcggttgactgcacttaagttctaataaagcatctttgatgtcacttgtaggaagagtttgacactcatgatccaaaggagaacactttgctactcccttacttgaggaaaaggtcaaaaatcattgagatagttgcagcgcgtgatatagtctttgctctatcacagttaggagtatgtgctgcttttagtagcggtacgttcgccgaggacaagacaaaaccggatgctggtttccctctttttgactcaccatgtcaacatggcaatttcaggacccaacgtctctgcgagagaccttgggttcccttatccgaaggcaggcaccgctaagcctacagacgtggtggtgaagttctacgtcctctacgagaagtggcggaggggcgagctcctgggttcttcgtcagttgcgcggtacttgaaaagcatcactcattcgaacggtacgattattcatccttctggatcggagcgttctcttcatgcgtctgttgacgctctaagttcttgctacgtggacaaacagggcaacaagaatttccgggtgtgggtggacagactggtcacatcgccgatcggtacaagcaactggttggtgaggtttgataactgggagatggaaggtggcgttcggtactgctgccgcactactcttctgctgaataacaaggttccaaaagaactagaagtacagattggttgaacttcaaacaaatacaaagagctatgcatacaagtggtggaggcctggtggatcaaggtcgttgtcgtctccaggtccatcaaatgcgacaaggtcgagcgcacgcaattcagctccgaagtcatctcctttcaacagaaagatgcaagtaacaccaagtcacttgcctttgatggttgatacatttcactgtatatcattgcacgacagatccatttagtacctttttctgagttaaactacttcaaacattgctgaagactacaaccagcctacagttgttgtaattgaagcgggtcaagacatagcatttgcaaagatttagttcattctcatcactctgcaatattcgggtatctcacataaagtttttattgcagttctatttccttttctcatgctgtgcatctttcttatttttgttcaaacaatataatgataagttcatttacttattactgtgattgtttggagcagcacacatgttattataagtcaaattttaagtcaaattattctcgacacgtgattcggttcatggcctatagtaaaaaggatagtttacagtaataacatgtgtgctgctccaaacattatgaggatagtaagtcagttcatttttagtttagaattggctctctcttatttttggtcaaattctagaatgatcagatgctcgacaatacttattattgtgattgtttgctcattttcagttcatggcctgtcttattttttcccctacaagtcatctacgacagtttgccagtagcactaaatcttttaactgtggttctctactatgtgtaatctcatatcaagattaatgagtatcgtgatcgtataattttgaatcctatcaacccatatggcaaggcaaagaaaaatgacagtggacatcattctagattttacaaaatcaaaggagcaaccagacatggctgtcatgatctaagatacttcaacgtgattggatcgaacccaaacatatgactaggagaagctccaaggccactttgtcaagggtctctgcaatgcacctactggtgcatgatttactggaggttgtgcgcatgaatgtgccacacattggtatgggggttggagttgaagcaggtgattttcaccaacattggtttgcgaactggagttgaagcaggagacatgattgttattcctatcatgtgcacactgcctcctcgctgtcatttgtcgtcactctcgtagtcctgataccggagcatggttgccaggggagagcagtccaaggcaaatttgccatgttggagcagtcacaggagccaaggggctgcagtcacaggtcctgctagccaggatggagcaatcataggacctcctagcagtccaaggaaaatttgcgaggtggagtagttgcaacttttgaaacccacgtgataacatgctcaagcgttcgtatgataaaaaagatggcacataatcaaaagaagatctcatgttctgcgtttgtgaacctgtttgtattttttgaacttgttttgtgaacctctatttgtaaacctgtaaaatctgaggttgtgaatagatttgggtaacttcatacaagtggtggaggcctggtggtaatcctggatgcatataaagcgaggcatgcaatatccatagcactcgtttgacagaaggcaacaccatcaaccttgtcctccacctttaaactagcatgagcaccatccttcttcacatttatattcatgtcccctatacgttcctcaaatacgtttgaaccatgtgtaccactatgtgaaccaactgagttcgtagactgatcaatgagtcaccttattgtggacgcagctctaaaaaatgttgtatctacaaatagattgtgtaaacgaaaagctttctgatctatg

SEQ ID NO: 60733 - DNA, 5193 bp, Zea Mays
ctccctccccatgaaacccccttcccccaatctacccctctctgtgcccccgacatccacgctgcctcagcccgccgtccagcgccctctctgcgcctccctccccacaccgcctcagcccgccgttcgccacgctccccacgctgcctccccccgtcgcccctccctcccgcgcggaactccgccatgctccccacgtcgcctccccccatcgcccaccagccgtcgcccaccagcccacactatctcacgccatggatggtggcaacagtccccgcccccgtacctcacacgcatcaggctgggctggccgatcccgccgccgcaaacgccgcgcccagccccgatgtcagcgcggcccgcccgccaacgcactttcggcctccccccgcccctcccttcgcccgcccacccgcaacctccgcgccatccgcaacctccgcccgcttctcacgccaccgacccgacctccgcgccatccgcaaccgtcgtgcgtcttatcccttctctaccgcgcactccgtgtggaacaacctccgcgtaggaagcctcctcccttccccatccccattccccaccacgcgcttcggggacggcgagctccgggcgggagcgaccgccgggcgcttctgctgctggtgcggaggaggaggagcggcgagggtggttcggcgcaggctccacggcggcggtgcccgagccgagttcgactggctggcgctctactgcaacctcacacgcggcgatgggccggacggtaacaatggcaagctggtcctggaggagctgctgtcgtgcgccgccacccaattttgttttccccaaatcctgagctgtgaagagaagaagaagacaaggacgcggcgagtacgatgacgagcgccgcacagcaagtcagcgaggagcacgatgacgcgatgaggaccacgagctgccgaggaagtcaaggacgacgacggcgcagagacccgcgagttgagacatcttcttcgccggcgtgaaccgcaaggctgagacatcttcttcgccgggttcggccacgccgacaccaccgacccgatgtacctatcctagccgtgtttgcaggcctctcaaattgaaccgattgcttcaagggtgccatacatgattgtgttaaccatgagagggattggcctggcactggttcattctacgggaacctcgacttcggtggagaatgtggtgtccctgtccaaactgtgttctacactccaactgaaaaccgtgcaaagttctggtacgcaacagattacgacatgtttagccttctgcattgctcacatggaagaggacttgagacccgggaccgagcagtacagattcatcgagcaatgccacattggcctcatgaagtttcacaatcacagtggtttttacaaggatttcagttcatggttgtacatagtttttttagttttttttttgaaaaatgaggcattttctttttaccggcggcggaggcgatggcaacaagcccttccctattcgaatctctgtgaccacagagcctacctcgctgagctcatcaccgagatcactggtgggatcaatgagctcgccgacgtagcacagttcttttgatgagagtggttcaactctattttgcttggttcagtggagatggtagcatggtgaaggataatgcctacgtgcgcagcaattttcatttttcttttagtttcttggagtcgtggaaatctcgctattcacaaggatttcatggcggcgttgttaatttgggggttgggcagaggctttaccttttgcgtcagacagtgctctctcacagcaattgtccttttgcctacctgtatcattctgtcatactatctgcaattcagctatgcacagaactatcaaaagcaagcaaagatgctctagagtacctgaggaaggctactttgtgctctataaggattgccaggaaagtgccagatttggcagagaacttcatgggcctggatgcatcattgttaaaggagaaacaccatgggtccttatatctgcaattcagctatgcacagaactatgcaaagcaagcaaagatgctctagagtacctgaggaaggtaagggcatctatttcttaccacaaggccccaacaaatataagtatagaactacagagctaggataaaactgttgattgttacagccctgggcaaggattgatgcttgctagcttcaagattaggaccctaccacttgatgagaacagatagtgctatactgctatgtacatctacatttctccagttatacataatcagatcttgcttctagccaactgttgcaaatacattgatcccttaggggttgagatggaaactgccacaagggagggaggacgtgagtcagctgcacgtgccgacatacacatcacttcctgcctcgctgtccttgatcgagacaaaatcagaagagctgtatctatatgtactccataccttgacgtatgcaggggctagatccataccccggcctatctgccctgtgaggaatgtatacttctgcaagtttgaatactttgacaccttgtgaggagcactctttgaaggtggagaaggtgttgttccaagggaagccagactaccaaaatgttatggttttttagcttctcaatagccggcgacagtgcatacgacctgccccgcgctggggctgtgtctgccttctcctccttcgatgccatgacactgtaaagtgaagccttcgagctaggcgcggaggccagggagatgctatgcgcccacatctaccacgccgccttcatattgctcaagctcgcgctccgcaactcctgccccatctgccgccatgagatgcccaccgatgctgccctgcgggctgccgccagcgtcggcgttgccgaacgcgccgccggggaggaacaagcgtgggatgcgccccacgcgcgcgactttcacctgcctcccaatttgatccgtgagttcaccaggaccagaacttcttcgatgatttgttggaccatccctgctgatacaaacacaatcattttgtggcaggaaatcaccatattagagcttacaaccttcgcatcaactgaagagtttgacactcatgatccaaaggagaacactttgctactcccttacttgaggaaaaggtcaaaaatcattgagatagttgcagcgcgtgatatagtctttgctctatcacagttaggagtatgtgctgcttttagtagcggtacgttcgccgaggacaagacaaaaccggatgctggtttccctctttttgactcaccatgtcaacatggcaatttcaggacccaacgtctctgcgagagaccttgggttcccttatccgaaggcaggcaccgctaagcctacagacgtggtggtgaagttctacgtcctctacgagaagtggcggaggggcgagctcctgggttcttcgtcagttgcgcggtacttgaaaagcatcactcattcgaacggtacgattattcatccttctggatcggagcgttctcttcatgcgtctgttgacgctctaagttcttgctacgtggacaaacagggcaacaagaatttccgggtgtgggtggacagactggtcacatcgccgatcggtacaagcaactggttggtgaggtttgataactgggagatggaaggtggcgttcggtactgctgccgcactactcttctgctgaataacaaggttccaaaagaactagaagtacagattggttgaacttcaaacaaatacaaagagctatgcatacaagtggtggaggcctggtggatcaaggtcgttgtcgtctccaggtccatcaaatgcgacaaggtcgagcgcacgcaattcagctccgaagtcatctcctttcaacagaaagatgcaagtaacaccaagtcacttgcctttgatggttgatacatttcactgtatatcattgcacgacagatccatttagtacctttttctgagttaaactacttcaaacattgctgaagactacaaccagcctacagttgttgtaattgaagcgggtcaagacatagcatttgcaaagatttagttcattctcatcactctgcaatattcgggttctctactatgtgtaatctcatatcaagattaatgagtatcgtgatcgtataattttgaatcctatcaacccatatggcaaggcaaagaaaaatgacagtggacatcattctagattttacaaaatcaaaggagcaaccagacatggctgtcatgatctaagatacttcaacgtgattggatcgaacccaaacatatgactaggagaagctccaaggccactttgtcaagggtctctgcaatgcacctactggtgcatgatttactggaggttgtgcgcatgaatgtgccacacattggtatgggggttggagttgaagcaggtgattttcaccaacattggtttgcgaactggagttgaagcaggagacatgattgttattcctatcatgtgcacactgcctcctcgctgtcatttgtcgtcactctcgtagtcctgataccggagcatggttgccaggggagagcagtccaaggcaaatttgccatgttggagcagtcacaggagccaaggggctgcagtcacaggtcctgctagccaggatggagcaatcataggacctcctagcagtccaaggaaaatttgcgaggtggagtagttgcaacttttgaaacccacgtgataacatgctcaagcgttcgtatgataaaaaagatggcacataatcaaaagaagatctcatgttctgcgtttgtgaacctgtttgtattttttgaacttgttttgtgaacctctatttgtaaacctgtaaaatctgaggttgtgaatagatttgggtaacttcatacaagtggtggaggcctggtggtaatcctggatgcatataaagcgaggcatgcaatatccatagcactcgtttgacagaaggcaacaccatcaaccttgtcctccacctttaaactagcatgagcaccatccttcttcacatttatattcatgtcccctatacgttcctcaaatacgtttgaaccatgtgtaccactatgtgaaccaactgagttcgtagactgatcaatgagtcaccttattgtggacgcagctctaaaaaatgttgtatctacaaatagattgtgtaaacgaaaagctttctgatctatg

SEQ ID NO: 60734 - DNA, 4690 bp, Zea Mays
ctccctccccatgaaacccccttcccccaatctacccctctctgtgcccccgacatccacgctgcctcagcccgccgtccagcgccctctctgcgcctccctccccacaccgcctcagcccgccgttcgccacgctccccacgctgcctccccccgtcgcccctccctcccgcgcggaactccgccatgctccccacgtcgcctccccccatcgcccaccagccgtcgcccaccagcccacactatctcacgccatggatggtggcaacagtccccgcccccgtacctcacacgcatcaggctgggctggccgatcccgccgccgcaaacgccgcgcccagccccgatgtcagcgcggcccgcccgccaacgcactttcggcctccccccgcccctcccttcgcccgcccacccgcaacctccgcgccatccgcaacctccgcccgcttctcacgccaccgacccgacctccgcgccatccgcaaccgtcgtgcgtcttatcccttctctaccgcgcactccgtgtggaacaacctccgcgtaggaagcctcctcccttccccatccccattccccaccacgcgcttcggggacggcgagctccgggcgggagcgaccgccgggcgcttctgctgctggtgcggaggaggaggagcggcgagggtggttcggcgcaggctccacggcggcggtgcccgagccgagttcgactggctggcgctctactgcaacctcacacgcggcgatgggccggacggtaacaatggcaagctggtcctggaggagctgctgtcgtgcgccgccacccaattttgttttccccaaatcctgagctgtgaagagaagaagaagacaaggacgcggcgagtacgatgacgagcgccgcacagcaagtcagcgaggagcacgatgacgcgatgaggaccacgagctgccgaggaagtcaaggacgacgacggcgcagagacccgcgagttgagacatcttcttcgccggcgtgaaccgcaaggctgagacatcttcttcgccgggttcggccacgccgacaccaccgacccgatgtacctatcctagccgtgtttgcaggcctctcaaattgaaccgattgcttcaagggtgccatacatgattgtgttaaccatgagagggattggcctggcactggttcattctacgggaacctcgacttcggtggagaatgtggtgtccctgtccaaactgtgttctacactccaactgaaaaccgtgcaaagttctggtacgcaacagattacgacatgtttagccttctgcattgctcacatggaagaggacttgagacccgggaccgagcagtacagattcatcgagcaatgccacattggcctcatgaagtttcacaatcacagtggtttttacaaggatttcagttcatgggttgggcagaggctttaccttttgcgtcagacagtgctctctcacagcaattgtccttttgcctacctgtatcattctgtcatactatctgcaattcagctatgcacagaactatcaaaagcaagcaaagatgctctagagtacctgaggaaggctactttgtgctctataaggattgccaggaaagtgccagatttggcagagaacttcatgggcctggatgcatcattgttaaaggagaaacaccatgggtccttatatctgcaattcagctatgcacagaactatgcaaagcaagcaaagatgctctagagtacctgaggaaggtaagggcatctatttcttaccacaaggccccaacaaatataagtatagaactacagttgcaaatacattgatcccttaggggttgagatggaaactgccacaagggagggaggacgtgagtcagctgcacgtgccgacatacacatcacttcctgcctcgctgtccttgatcgagacaaaatcagaagagctgtatctatatgtactccataccttgacgtatgcaggggctagatccataccccggcctatctgccctgtgaggaatgtatacttctgcaagtttgaatactttgacaccttgtgaggagcactctttgaaggtggagaaggtgttgttccaagggaagccagactaccaaaatgttatggttttttagcttctcaatagccggcgacagtgcatacgacctgccccgcgctggggctgtgtctgccttctcctccttcgatgccatgacactgtaaagtgaagccttcgagctaggcgcggaggccagggagatgctatgcgcccacatctaccacgccgccttcatattgctcaagctcgcgctccgcaactcctgccccatctgccgccatgagatgcccaccgatgctgccctgcgggctgccgccagcgtcggcgttgccgaacgcgccgccggggaggaacaagcgtgggatgcgccccacgcgcgcgactttcacctgcctcccaatttgatccgtgagttcaccaggaccagaacttcttcgatgatttgttggaccatccctgctgatacaaacacaatcattttgtggcaggaaatcaccatattagagcttacaaccttcgcatcaactgtttgtgcagcaatgagtttatcttaagttatgtttttttggtaatatcggttgactgcacttaagttctaataaagcatctttgatgtcacttgtaggaagagtttgacactcatgatccaaaggagaacactttgctactcccttacttgaggaaaaggtcaaaaatcattgagatagttgcagcgcgtgatatagtctttgctctatcacagttaggagtatgtgctgcttttagtagcggtacgttcgccgaggacaagacaaaaccggatgctggtttccctctttttgactcaccatgtcaacatggcaatttcaggacccaacgtctctgcgagagaccttgggttcccttatccgaaggcaggcaccgctaagcctacagacgtggtggtgaagttctacgtcctctacgagaagtggcggaggggcgagctcctgggttcttcgtcagttgcgcggtacttgaaaagcatcactcattcgaacggtacgattattcatccttctggatcggagcgttctcttcatgcgtctgttgacgctctaagttcttgctacgtggacaaacagggcaacaagaatttccgggtgtgggtggacagactggtcacatcgccgatcggtacaagcaactggttggtgaggtttgataactgggagatggaaggtggcgttcggtactgctgccgcactactcttctgctgaataacaaggatcaaggtcgttgtcgtctccaggtccatcaaatgcgacaaggtcgagcgcacgcaattcagctccgaagtcatctcctttcaacagaaagatgcaagtaacaccaagtcacttgcctttgatggttgatacatttcactgtatatcattgcacgacagatccatttagtacctttttctgagttaaactacttcaaacattgctgaagactacaaccagttgttgtaattgaagcgggtcaagacatagcatttgcaaagatttagttcattctcatcactctgcaatattcgggttctctactatgtgtaatctcatatcaagattaatgagtatcgtgatcgtataattttgaatcctatcaacccatatggcaaggcaaagaaaaatgacagtggacatcattctagattttacaaaatcaaaggagcaaccagacatggctgtcatgatctaagatacttcaacgtgattggatcgaacccaaacatatgactaggagaagctccaaggccactttgtcaagggtctctgcaatgcacctactggtgcatgatttactggaggttgtgcgcatgaatgtgccacacattggtatgggggttggagttgaagcaggtgattttcaccaacattggtttgcgaactggagttgaagcaggagacatgattgttattcctatcatgtgcacactgcctcctcgctgtcatttgtcgtcactctcgtagtcctgataccggagcatggttgccaggggagagcagtccaaggcaaatttgccatgttggagcagtcacaggagccaaggggctgcagtcacaggtcctgctagccaggatggagcaatcataggacctcctagcagtccaaggaaaatttgcgaggtggagtagttgcaacttttgaaacccacgtgataacatgctcaagcgttcgtatgataaaaaagatggcacataatcaaaagaagatctcatgttctgcgtttgtgaacctgtttgtattttttgaacttgttttgtgaacctctatttgtaaacctgtaaaatctgaggttgtgaatagatttgggtaacttcatacaagtggtggaggcctggtggtaatcctggatgcatataaagcgaggcatgcaatatccatagcactcgtttgacagaaggcaacaccatcaaccttgtcctccacctttaaactagcatgagcaccatccttcttcacatttatattcatgtcccctatacgttcctcaaatacgtttgaaccatgtgtaccactatgtgaaccaactgagttcgtagactgatcaatgagtcaccttattgtggacgcagctctaaaaaatgttgtatctacaaatagattgtgtaaacgaaaagctttctgatctatg

SEQ ID NO: 60735 - DNA, 5057 bp, Zea Mays
ctccctccccatgaaacccccttcccccaatctacccctctctgtgcccccgacatccacgctgcctcagcccgccgtccagcgccctctctgcgcctccctccccacaccgcctcagcccgccgttcgccacgctccccacgctgcctccccccgtcgcccctccctcccgcgcggaactccgccatgctccccacgtcgcctccccccatcgcccaccagccgtcgcccaccagcccacactatctcacgccatggatggtggcaacagtccccgcccccgtacctcacacgcatcaggctgggctggccgatcccgccgccgcaaacgccgcgcccagccccgatgtcagcgcggcccgcccgccaacgcactttcggcctccccccgcccctcccttcgcccgcccacccgcaacctccgcgccatccgcaacctccgcccgcttctcacgccaccgacccgacctccgcgccatccgcaaccgtcgtgcgtcttatcccttctctaccgcgcactccgtgtggaacaacctccgcgtaggaagcctcctcccttccccatccccattccccaccacgcgcttcggggacggcgagctccgggcgggagcgaccgccgggcgcttctgctgctggtgcggaggaggaggagcggcgagggtggttcggcgcaggctccacggcggcggtgcccgagccgagttcgactggctggcgctctactgcaacctcacacgcggcgatgggccggacggtaacaatggcaagctggtcctggaggagctgctgtcgtgcgccgccacccaattttgttttccccaaatcctgagctgtgaagagaagaagaagacaaggacgcggcgagtacgatgacgagcgccgcacagcaagtcagcgaggagcacgatgacgcgatgaggaccacgagctgccgaggaagtcaaggacgacgacggcgcagagacccgcgagttgagacatcttcttcgccggcgtgaaccgcaaggctgagacatcttcttcgccgggttcggccacgccgacaccaccgacccgatccgtgtttgcaggcctctcaaattgaaccgattgcttcaagggtgccatacatgattgtgttaaccatgagagggattggcctggcactggttcattctacgggaacctcgacttcggtggagaatgtggtgtccctgtccaaactgtgttctacactccaactgaaaaccgtgcaaagttctggtacgcaacagattacgacatgtttagccttctgcattgctcacatggaagaggacttgagacccgggaccgagcagtacagattcatcgagcaatgccacattggcctcatgaagtttcacaatcacagtggtttttacaaggatttcagttcatggttgtacatagtttttttagttttttttttgaaaaatgaggcattttctttttaccggcggcggaggcgatggcaacaagcccttccctattcgaatctctgtgaccacagagcctacctcgctgagctcatcaccgagatcactggtgggatcaatgagctcgccgacgtagcacagttcttttgatgagagtggttcaactctattttgcttggttcagtggagatggtagcatggtgaaggataatgcctacgtgcgcagcaattttcatttttcttttagtttcttggagtcgtggaaatctcgctattcacaaggatttcatggcggcgttgttaatttgggggttgggcagaggctttaccttttgcgtcagacagtgctctctcacagcaattgtccttttgcctacctgtatcattctgtcatactatctgcaattcagctatgcacagaactatcaaaagcaagcaaagatgctctagagtacctgaggaaggctactttgtgctctataaggattgccaggaaagtgccagatttggcagagaacttcatgggcctggatgcatcattgttaaaggagaaacaccatgggtccttatatctgcaattcagctatgcacagaactatgcaaagcaagcaaagatgctctagagtacctgaggaagttgcaaatacattgatcccttaggggttgagatggaaactgccacaagggagggaggacgtgagtcagctgcacgtgccgacatacacatcacttcctgcctcgctgtccttgatcgagacaaaatcagaagagctgtatctatatgtactccataccttgacgtatgcaggggctagatccataccccggcctatctgccctgtgaggaatgtatacttctgcaagtttgaatactttgacaccttgtgaggagcactctttgaaggtggagaaggtgttgttccaagggaagccagactaccaaaatgttatggttttttagcttctcaatagccggcgacagtgcatacgacctgccccgcgctggggctgtgtctgccttctcctccttcgatgccatgacactgtaaagtgaagccttcgagctaggcgcggaggccagggagatgctatgcgcccacatctaccacgccgccttcatattgctcaagctcgcgctccgcaactcctgccccatctgccgccatgagatgcccaccgatgctgccctgcgggctgccgccagcgtcggcgttgccgaacgcgccgccggggaggaacaagcgtgggatgcgccccacgcgcgcgactttcacctgcctcccaatttgatccgtgagttcaccaggaccaggcttctatgcttacatattcagtgctgttcgctcgtgctgtatctgtggccgcgtgagcaggaaatcaccatattagagcttacaaccttcgcatcaactgtttgtgcagcaatgagtttatcttaagttatgtttttttggtaatatcggttgactgcacttaagttctaataaagcatctttgatgtcacttgtaggaagagtttgacactcatgatccaaaggagaacactttgctactcccttacttgaggaaaaggtcaaaaatcattgagatagttgcagcgcgtgatatagtctttgctctatcacagttaggagtatgtgctgcttttagtagcggtacgttcgccgaggacaagacaaaaccggatgctggtttccctctttttgactcaccatgtcaacatggcaatttcaggacccaacgtctctgcgagagaccttgggttcccttatccgaaggcaggcaccgctaagcctacagacgtggtggtgaagttctacgtcctctacgagaagtggcggaggggcgagctcctgggttcttcgtcagttgcgcggtacttgaaaagcatcactcattcgaacggtacgattattcatccttctggatcggagcgttctcttcatgcgtctgttgacgctctaagttcttgctacgtggacaaacagggcaacaagaatttccgggtgtgggtggacagactggtcacatcgccgatcggtacaagcaactggttggtgaggtttgataactgggagatggaaggtggcgttcggtactgctgccgcactactcttctgctgaataacaaggttccaaaagaactagaagtacagattggttgaacttcaaacaaatacaaagagctatgcatacaagtggtggaggcctggtggatcaaggtcgttgtcgtctccaggtccatcaaatgcgacaaggtcgagcgcacgcaattcagctccgaagtcatctcctttcaacagaaagatgcaagtaacaccaagtcacttgcctttgatggttgatacatttcactgtatatcattgcacgacagatccatttagtacctttttctgagttaaactacttcaaacattgctgaagactacaaccagcctacagttgttgtaattgaagcgggtcaagacatagcatttgcaaagatttagttcattctcatcactctgcaatattcgggttctctactatgtgtaatctcatatcaagattaatgagtatcgtgatcgtataattttgaatcctatcaacccatatggcaaggcaaagaaaaatgacagtggacatcattctagattttacaaaatcaaaggagcaaccagacatggctgtcatgatctaagatacttcaacgtgattggatcgaacccaaacatatgactaggagaagctccaaggccactttgtcaagggtctctgcaatgcacctactggtgcatgatttactggaggttgtgcgcatgaatgtgccacacattggtatgggggttggagttgaagcaggtgattttcaccaacattggtttgcgaactggagttgaagcaggagacatgattgttattcctatcatgtgcacactgcctcctcgctgtcatttgtcgtcactctcgtagtcctgataccggagcatggttgccaggggagagcagtccaaggcaaatttgccatgttggagcagtcacaggagccaaggggctgcagtcacaggtcctgctagccaggatggagcaatcataggacctcctagcagtccaaggaaaatttgcgaggtggagtagttgcaacttttgaaacccacgtgataacatgctcaagcgttcgtatgataaaaaagatggcacataatcaaaagaagatctcatgttctgcgtttgtgaacctgtttgtattttttgaacttgttttgtgaacctctatttgtaaacctgtaaaatctgaggttgtgaatagatttgggtaacttcatacaagtggtggaggcctggtggtaatcctggatgcatataaagcgaggcatgcaatatccatagcactcgtttgacagaaggcaacaccatcaaccttgtcctccacctttaaactagcatgagcaccatccttcttcacatttatattcatgtcccctatacgttcctcaaatacgtttgaaccatgtgtaccactatgtgaaccaactgagttcgtagactgatcaatgagtcaccttattgtggacgcagctctaaaaaatgttgtatctacaaatagattgtgtaaacgaaaagctttctgatctatg

SEQ ID NO: 60736 - DNA, 4797 bp, Zea Mays
ctccctccccatgaaacccccttcccccaatctacccctctctgtgcccccgacatccacgctgcctcagcccgccgtccagcgccctctctgcgcctccctccccacaccgcctcagcccgccgttcgccacgctccccacgctgcctccccccgtcgcccctccctcccgcgcggaactccgccatgctccccacgtcgcctccccccatcgcccaccagccgtcgcccaccagcccacactatctcacgccatggatggtggcaacagtccccgcccccgtacctcacacgcatcaggctgggctggccgatcccgccgccgcaaacgccgcgcccagccccgatgtcagcgcggcccgcccgccaacgcactttcggcctccccccgcccctcccttcgcccgcccacccgcaacctccgcgccatccgcaacctccgcccgcttctcacgccaccgacccgacctccgcgccatccgcaaccgtcgtgcgtcttatcccttctctaccgcgcactccgtgtggaacaacctccgcgtaggaagcctcctcccttccccatccccattccccaccacgcgcttcggggacggcgagctccgggcgggagcgaccgccgggcgcttctgctgctggtgcggaggaggaggagcggcgagggtggttcggcgcaggctccacggcggcggtgcccgagccgagttcgactggctggcgctctactgcaacctcacacgcggcgatgggccggacggtaacaatggcaagctggtcctggaggagctgctgtcgtgcgccgccacccaattttgttttccccaaatcctgagctgtgaagagaagaagaagacaaggacgcggcgagtacgatgacgagcgccgcacagcaagtcagcgaggagcacgatgacgcgatgaggaccacgagctgccgaggaagtcaaggacgacgacggcgcagagacccgcgagttgagacatcttcttcgccggcgtgaaccgcaaggctgagacatcttcttcgccgggttcggccacgccgacaccaccgacccgatgtacctatcctagccgtgtttgcaggcctctcaaattgaaccgattgcttcaagggtgccatacatgattgtgttaaccatgagagggattggcctggcactggttcattctacgggaacctcgacttcggtggagaatgtggtgtccctgtccaaactgtgttctacactccaactgaaaaccgtgcaaagttctggtacgcaacagattacgacatgtttagccttctgcattgctcacatggaagaggacttgagacccgggaccgagcagtacagattcatcgagcaatgccacattggcctcatgaagtttcacaatcacagtggtttttacaaggatttcagttcatgggttgggcagaggctttaccttttgcgtcagacagtgctctctcacagcaattgtccttttgcctacctgtatcattctgtcatactatctgcaattcagctatgcacagaactatcaaaagcaagcaaagatgctctagagtacctgaggaaggctactttgtgctctataaggattgccaggaaagtgccagatttggcagagaacttcatgggcctggatgcatcattgttaaaggagaaacaccatgggtccttatatctgcaattcagctatgcacagaactatgcaaagcaagcaaagatgctctagagtacctgaggaaggtaagggcatctatttcttaccacaaggccccaacaaatataagtatagaactacagttgcaaatacattgatcccttaggggttgagatggaaactgccacaagggagggaggacgtgagtcagctgcacgtgccgacatacacatcacttcctgcctcgctgtccttgatcgagacaaaatcagaagagctgtatctatatgtactccataccttgacgtatgcaggggctagatccataccccggcctatctgccctgtgaggaatgtatacttctgcaagtttgaatactttgacaccttgtgaggagcactctttgaaggtggagaaggtgttgttccaagggaagccagactaccaaaatgttatggttttttagcttctcaatagccggcgacagtgcatacgacctgccccgcgctggggctgtgtctgccttctcctccttcgatgccatgacactgtaaagtgaagccttcgagctaggcgcggaggccagggagatgctatgcgcccacatctaccacgccgccttcatattgctcaagctcgcgctccgcaactcctgccccatctgccgccatgagatgcccaccgatgctgccctgcgggctgccgccagcgtcggcgttgccgaacgcgccgccggggaggaacaagcgtgggatgcgccccacgcgcgcgactttcacctgcctcccaatttgatccgtgagttcaccaggaccagaacttcttcgatgatttgttggaccatccctgctgatacaaacacaatcattttgtggcaggaaatcaccatattagagcttacaaccttcgcatcaactgtttgtgcagcaatgagtttatcttaagttatgtttttttggtaatatcggttgactgcacttaagttctaataaagcatctttgatgtcacttgtaggaagagtttgacactcatgatccaaaggagaacactttgctactcccttacttgaggaaaaggtcaaaaatcattgagatagttgcagcgcgtgatatagtctttgctctatcacagttaggagtatgtgctgcttttagtagcggtacgttcgccgaggacaagacaaaaccggatgctggtttccctctttttgactcaccatgtcaacatggcaatttcaggacccaacgtctctgcgagagaccttgggttcccttatccgaaggcaggcaccgctaagcctacagacgtggtggtgaagttctacgtcctctacgagaagtggcggaggggcgagctcctgggttcttcgtcagttgcgcggtacttgaaaagcatcactcattcgaacggtacgattattcatccttctggatcggagcgttctcttcatgcgtctgttgacgctctaagttcttgctacgtggacaaacagggcaacaagaatttccgggtgtgggtggacagactggtcacatcgccgatcggtacaagcaactggttggtgaggtttgataactgggagatggaaggtggcgttcggtactgctgccgcactactcttctgctgaataacaaggttccaaaagaactagaagtacagattggttgaacttcaaacaaatacaaagagctatgcatacaagtggtggaggcctggtggtaaattgtttatcaagatcgctagagcagttaaatttactcctattatcttctgggatagatttgggatcaaggtcgttgtcgtctccaggtccatcaaatgcgacaaggtcgagcgcacgcaattcagctccgaagtcatctcctttcaacagaaagatgcaagtaacaccaagtcacttgcctttgatggttgatacatttcactgtatatcattgcacgacagatccatttagtacctttttctgagttaaactacttcaaacattgctgaagactacaaccagttgttgtaattgaagcgggtcaagacatagcatttgcaaagatttagttcattctcatcactctgcaatattcgggttctctactatgtgtaatctcatatcaagattaatgagtatcgtgatcgtataattttgaatcctatcaacccatatggcaaggcaaagaaaaatgacagtggacatcattctagattttacaaaatcaaaggagcaaccagacatggctgtcatgatctaagatacttcaacgtgattggatcgaacccaaacatatgactaggagaagctccaaggccactttgtcaagggtctctgcaatgcacctactggtgcatgatttactggaggttgtgcgcatgaatgtgccacacattggtatgggggttggagttgaagcaggagacatgattgttattcctatcatgtgcacactgcctcctcgctgtcatttgtcgtcactctcgtagtcctgataccggagcatggttgccaggggagagcagtccaaggcaaatttgccatgttggagcagtcacaggagccaaggggctgcagtcacaggtcctgctagccaggatggagcaatcataggacctcctagcagtccaaggaaaatttgcgaggtggagtagttgcaacttttgaaacccacgtgataacatgctcaagcgttcgtatgataaaaaagatggcacataatcaaaagaagatctcatgttctgcgtttgtgaacctgtttgtattttttgaacttgttttgtgaacctctatttgtaaacctgtaaaatctgaggttgtgaatagatttgggtaacttcatacaagtggtggaggcctggtggtaatcctggatgcatataaagcgaggcatgcaatatccatagcactcgtttgacagaaggcaacaccatcaaccttgtcctccacctttaaactagcatgagcaccatccttcttcacatttatattcatgtcccctatacgttcctcaaatacgtttgaaccatgtgtaccactatgtgaaccaactgagttcgtagactgatcaatgagtcaccttattgtggacgcagctctaaaaaatgttgtatctacaaatagattgtgtaaacgaaaagctttctgatctatg

SEQ ID NO: 60737 - DNA, 203 bp, Zea Mays
cattgagatagttgcagcgcgtgatatagtctttgctctatcacagttaggagtatgtgctgcttttagtagcgagacaaatcagagaatatgctttttgaacggaagtctagatgaagttatccgcaatttattttacaacaagaataatgattcattcaaaactgtatcagtatatggttctgaaaacttcagtgctctgc

SEQ ID NO: 60738 - DNA, 1527 bp, Zea Mays
ctccctccccatgaaacccccttcccccaatctacccctctctgtgcccccgacatccacgctgcctcagcccgccgtccagcgccctctctgcgcctccctccccacaccgcctcagcccgccgttcgccacgctccccacgctgcctccccccgtcgcccctccctcccgcgcggaactccgccatgctccccacgtcgcctccccccatcgcccaccagccgtcgcccaccagcccacactatctcacgccatggatggtggcaacagtccccgcccccgtacctcacacgcatcaggctgggctggccgatcccgccgccgcaaacgccgcgcccagccccgatgtcagcgcggcccgcccgccaacgcactttcggcctccccccgcccctcccttcgcccgcccacccgcaacctccgcgccatccgcaacctccgcccgcttctcacgccaccgacccgacctccgcgccatccgcaaccgtcgtgcgtcttatcccttctctaccgcgcactccgtgtggaacaacctccgcgtaggaagcctcctcccttccccatccccattccccaccacgcgcttcggggacggcgagctccgggcgggagcgaccgccgggcgcttctgctgctggtgcggaggaggaggagcggcgagggtggttcggcgcaggctccacggcggcggtgcccgagccgagttcgactggctggcgctctactgcaacctcacacgcggcgatgggccggacggtaacaatggcaagctggtcctggaggagctgctgtcgtgcgccgccacccaattttgttttccccaaatcctgagctgtgaagagaagaagaagacaaggacgcggcgagtacgatgacgagcgccgcacagcaagtcagcgaggagcacgatgacgcgatgaggaccacgagctgccgaggaagtcaaggacgacgacggcgcagagacccgcgagttgagacatcttcttcgccggcgtgaaccgcaaggctgagacatcttcttcgccgggttcggccacgccgacaccaccgacccgatgtacctatcctagccgtgtttgcaggcctctcaaattgaaccgattgcttcaagggtgccatacatgattgtgttaaccatgagagggattggcctggcactggttcattctacgggaacctcgacttcggtggagaatgtggtgtccctgtccaaactgtgttctacactccaactgaaaaccgtgcaaagttctggtacgcaacagattacgacatgtttagccttctgcattgctcacatggaagaggacttgagacccgggaccgagcagtacagattcatcgagcaatgccacattggcctcatgaagtttcacaatcacagtggtttttacaaggatttcagttcatgggttgggcagaggctttaccttttgcgtcagacagtgctctcctatgcacagaactatcaaaagcaagcaaagatgctctagagtacctgaggaagaaactgattgtgtggt

SEQ ID NO: 60739 - DNA, 601 bp, Zea Mays
atgggccggacgaagaggagcttttgcagtgttaaccatgagagggattggcctggcactggttcattctacgggaacctcgacttcggtggagaatgtggtgtccctgtccaaactgtgttctacactccaactgaaaaccgtgcaaagttctggtacgcaacagattacgacatgtttagccttctgcattgctcacatggaagaggacttgagacccgggaccgagcagtacagattcatcgagcaatgccacattggcctcatgaagtttcacaatcacagtggtttttacaaggatttcagttcatgggttgggcagaggctttaccttttgcgtcagacagtgctctcctatgcacagaactatcaaaagcaagcaaagatgctctagagtacctgaggaaggctactttgtgctctataaggattgccaggaaagtgccagatttggcagagaacttcatgggcctggatgcatcattgttaaaggagaaacaccatgggtccttatatctgcaattcagctatgcacagaactatgcaaagcaagcaaagatgctctagagtacctgaggaagaaactgattgtgtggtagag

SEQ ID NO: 60740 - DNA, 1589 bp, Zea Mays
ctccctccccatgaaacccccttcccccaatctacccctctctgtgcccccgacatccacgctgcctcagcccgccgtccagcgccctctctgcgcctccctccccacaccgcctcagcccgccgttcgccacgctccccacgctgcctccccccgtcgcccctccctcccgcgcggaactccgccatgctccccacgtcgcctccccccatcgcccaccagccgtcgcccaccagcccacactatctcacgccatggatggtggcaacagtccccgcccccgtacctcacacgcatcaggctgggctggccgatcccgccgccgcaaacgccgcgcccagccccgatgtcagcgcggcccgcccgccaacgcactttcggcctccccccgcccctcccttcgcccgcccacccgcaacctccgcgccatccgcaacctccgcccgcttctcacgccaccgacccgacctccgcgccatccgcaaccgtcgtgcgtcttatcccttctctaccgcgcactccgtgtggaacaacctccgcgtaggaagcctcctcccttccccatccccattccccaccacgcgcttcggggacggcgagctccgggcgggagcgaccgccgggcgcttctgctgctggtgcggaggaggaggagcggcgagggtggttcggcgcaggctccacggcggcggtgcccgagccgagttcgactggctggcgctctactgcaacctcacacgcggcgatgggccggacggtaacaatggcaagctggtcctggaggagctgctgtcgtgcgccgccacccaattttgttttccccaaatcctgagctgtgaagagaagaagaagacaaggacgcggcgagtacgatgacgagcgccgcacagcaagtcagcgaggagcacgatgacgcgatgaggaccacgagctgccgaggaagtcaaggacgacgacggcgcagagacccgcgagttgagacatcttcttcgccggcgtgaaccgcaaggctgagacatcttcttcgccgggttcggccacgccgacaccaccgacccgatgtacctatcctagccgtgtttgcaggcctctcaaattgaaccgattgcttcaagggtgccatacatgattgtgttaaccatgagagggattggcctggcactggttcattctacgggaacctcgacttcggtggagaatgtggtgtccctgtccaaactgtgttctacactccaactgaaaaccgtgcaaagttctggtacgcaacagattacgacatgtttagccttctgcattgctcacatggaagaggacttgagacccgggaccgagcagtacagattcatcgagcaatgccacattggcctcatgaagtttcacaatcacagtggtttttacaaggatttcagttcatgggttgggcagaggctttaccttttgcgtcagacagtgctctctcacagcaattgtccttttgcctacctgtatcattctgtcatactatctgcaattcagctatgcacagaactatcaaaagcaagcaaagatgctctagagtacctgaggaagaaactgattgtgtggtagag

SEQ ID NO: 60741 - DNA, 2021 bp, Zea Mays
ctccctccccatgaaacccccttcccccaatctacccctctctgtgcccccgacatccacgctgcctcagcccgccgtccagcgccctctctgcgcctccctccccacaccgcctcagcccgccgttcgccacgctccccacgctgcctccccccgtcgcccctccctcccgcgcggaactccgccatgctccccacgtcgcctccccccatcgcccaccagccgtcgcccaccagcccacactatctcacgccatggatggtggcaacagtccccgcccccgtacctcacacgcatcaggctgggctggccgatcccgccgccgcaaacgccgcgcccagccccgatgtcagcgcggcccgcccgccaacgcactttcggcctccccccgcccctcccttcgcccgcccacccgcaacctccgcgccatccgcaacctccgcccgcttctcacgccaccgacccgacctccgcgccatccgcaaccgtcgtgcgtcttatcccttctctaccgcgcactccgtgtggaacaacctccgcgtaggaagcctcctcccttccccatccccattccccaccacgcgcttcggggacggcgagctccgggcgggagcgaccgccgggcgcttctgctgctggtgcggaggaggaggagcggcgagggtggttcggcgcaggctccacggcggcggtgcccgagccgagttcgactggctggcgctctactgcaacctcacacgcggcgatgggccggacggtaacaatggcaagctggtcctggaggagctgctgtcgtgcgccgccacccaattttgttttccccaaatcctgagctgtgaagagaagaagaagacaaggacgcggcgagtacgatgacgagcgccgcacagcaagtcagcgaggagcacgatgacgcgatgaggaccacgagctgccgaggaagtcaaggacgacgacggcgcagagacccgcgagttgagacatcttcttcgccggcgtgaaccgcaaggctgagacatcttcttcgccgggttcggccacgccgacaccaccgacccgatgtacctatcctagccgtgtttgcaggcctctcaaattgaaccgattgcttcaagggtgccatacatgattgtgttaaccatgagagggattggcctggcactggttcattctacgggaacctcgacttcggtggagaatgtggtgtccctgtccaaactgtgttctacactccaactgaaaaccgtgcaaagttctggtacgcaacagattacgacatgtttagccttctgcattgctcacatggaagaggacttgagacccgggaccgagcagtacagattcatcgagcaatgccacattggcctcatgaagtttcacaatcacagtggtttttacaaggatttcagttcatggttgtacatagtttttttagttttttttttgaaaaatgaggcattttctttttaccggcggcggaggcgatggcaacaagcccttccctattcgaatctctgtgaccacagagcctacctcgctgagctcatcaccgagatcactggtgggatcaatgagctcgccgacgtagcacagttcttttgatgagtggagatggtagcatggtgaaggataatgcctacgtgcgcagcaattttcatttttcttttagtttcttggagtcgtggaaatctcgctattcacaaggatttcatggcggcgttgttaatttgggggttgggcagaggctttaccttttgcgtcagacagtgctctcctatgcacagaactatcaaaagcaagcaaagatgctctagagtacctgaggaaggctactttgtgctctataaggattgccaggaaagtgccagatttggcagagaacttcatgggcctggatgcatcattgttaaaggagaaacaccatgggtccttatatctgcaattcagctatgcacagaactatgcaaagcaagcaaagatgctctagagtacctgaggaagaaactgattgtgtggtagag

SEQ ID NO: 60742 - DNA, 2070 bp, Zea Mays
ctccctccccatgaaacccccttcccccaatctacccctctctgtgcccccgacatccacgctgcctcagcccgccgtccagcgccctctctgcgcctccctccccacaccgcctcagcccgccgttcgccacgctccccacgctgcctccccccgtcgcccctccctcccgcgcggaactccgccatgctccccacgtcgcctccccccatcgcccaccagccgtcgcccaccagcccacactatctcacgccatggatggtggcaacagtccccgcccccgtacctcacacgcatcaggctgggctggccgatcccgccgccgcaaacgccgcgcccagccccgatgtcagcgcggcccgcccgccaacgcactttcggcctccccccgcccctcccttcgcccgcccacccgcaacctccgcgccatccgcaacctccgcccgcttctcacgccaccgacccgacctccgcgccatccgcaaccgtcgtgcgtcttatcccttctctaccgcgcactccgtgtggaacaacctccgcgtaggaagcctcctcccttccccatccccattccccaccacgcgcttcggggacggcgagctccgggcgggagcgaccgccgggcgcttctgctgctggtgcggaggaggaggagcggcgagggtggttcggcgcaggctccacggcggcggtgcccgagccgagttcgactggctggcgctctactgcaacctcacacgcggcgatgggccggacggtaacaatggcaagctggtcctggaggagctgctgtcgtgcgccgccacccaattttgttttccccaaatcctgagctgtgaagagaagaagaagacaaggacgcggcgagtacgatgacgagcgccgcacagcaagtcagcgaggagcacgatgacgcgatgaggaccacgagctgccgaggaagtcaaggacgacgacggcgcagagacccgcgagttgagacatcttcttcgccggcgtgaaccgcaaggctgagacatcttcttcgccgggttcggccacgccgacaccaccgacccgatgcctctcaaattgaaccgattgcttcaagggtgccatacatgattgtgttaaccatgagagggattggcctggcactggttcattctacgggaacctcgacttcggtggagaatgtggtgtccctgtccaaactgtgttctacactccaactgaaaaccgtgcaaagttctggtacgcaacagattacgacatgtttagccttctgcattgctcacatggaagaggacttgagacccgggaccgagcagtacagattcatcgagcaatgccacattggcctcatgaagtttcacaatcacagtggtttttacaaggatttcagttcatggttgtacatagtttttttagttttttttttgaaaaatgaggcattttctttttaccggcggcggaggcgatggcaacaagcccttccctattcgaatctctgtgaccacagagcctacctcgctgagctcatcaccgagatcactggtgggatcaatgagctcgccgacgtagcacagttcttttgatgagagtggttcaactctattttgcttggttcagtggagatggtagcatggtgaaggataatgcctacgtgcgcagcaattttcatttttcttttagtttcttggagtcgtggaaatctcgctattcacaaggatttcatggcggcgttgttaatttgggggttgggcagaggctttaccttttgcgtcagacagtgctctctcacagcaattgtccttttgcctacctgtatcattctgtcatactatctgcaattcagctatgcacagaactatcaaaagcaagcaaagatgctctagagtacctgaggaaggctactttgtgctctataaggattgccaggaaagtgccagatttggcagagaacttcatgggcctggatgcatcattgttaaaggagaaacaccatgggtccttatatctgcaattcagctatgcacagaactatgcaaagcaagcaaagatgctctagagtacctgaggaagaactgt

SEQ ID NO: 60743 - DNA, 529 bp, Zea Mays
aaaaagaggttgggtgggttcctcggattgcagcttttgtgagcgagacagcaagagagatgctgctggaaggaagcttgcgaattcgaaggacggtaaatgagttctttgcgcgcgcgaaaggatgggctcctgtgtccagaaggatcgtgggttgacaaaaagtctttggccctgtcttgcttattgatgtgtggttgcagtttggtagttctctgctggctcttggctgctggtttgtaatatatcgttatgttagctgatgaatggtcggcttttgatactttccatcgttaggtctttatctcgtgtgtgagtttcgctaagtcgaactcaataaaatcgctagtgacttcacagtctgtagtaaggctgtccagtagttgatcgtcggttaggcgtttgaggtctatggtaccttaagttcgccgcctggatgtaattgcactcgttttgttatgtttcctatttcttaatgaaataggggggttcttcccctttctgtcaaaaaaaaaaaaaaaaaaaactc

SEQ ID NO: 60744 - DNA, 908 bp, Zea Mays
cgcaccgctctgcactctgctcagccttcgccgccttccatcaccaggtcgccttgggctgttcacttccccgccgcttctcatatgctctgcttcacgtgaccacgcctacagcctttctccactctggctaggcgccattactagtttactactgagcctttggcttgtcccatcaactatcgttcgtcgagcgccggcagcaacttgcgcacaagcacaagcaccatcctactattgggctacacgcatgctgggcgggtggttgatgctcgaagggtgtttgatgaaatggcgcatggaacactggcgtcgaatgcatgattaccttttacctgctcatgtccactatccagagcggggacatcaccctagctcgcaagctgttcgatgcaatgtgaccaggaattcatgtcatggaacatagtgcgatatggatgcaacgtatgtgttccaacgaatgccagaatactgcctagtttcttggacatacttcacacataagagaatgcagcaatgatgaattcatcttcgtacttttattaaggcgcgggactagcgagggtcaagtgaggaggagcaaccccatcgccgccattccgccatcaacaagggcaatgaaccagttcgtgctgctgggacctgcgagtgggaagcaacagcaggttatgccaccaccaccatggagtgttgtcacaacttataatcgagtaattaagcggcatggctgcgaacacagaatagaaatctcgatattcaccacaagggcaacaatcaaagtttattggatccttgcatcgctgcctccatgggagcaaggggagaccaccggtggaagcacaccgattagttatagccagtttgcaacttttggagtggtcactgagtggtgaacaaatgagattgag

SEQ ID NO: 60745 - DNA, 1338 bp, Zea Mays
ggaggacccggtatggccaggtatggcccacgccataccttgggccagctcagaactagaagagcaccgcaccgctctgcactctgctcagccttcgccgccttccatcaccaggtcgccttgggctgttcacttccccgccgcttctcatatgctctgcttcacgtgaccacgcctacagcctttctccactctggctaggcgccattactagtttactactgagcctttggcttgtcccatcaactatcgttcgtcgagcgccggcagcaacttgcgcacaagcacaagcaccatcctactattgggctacacgcatgctgggcgggtggttgatgctcgaagggtgtttgatgaaatggcgcatggaacactggcgtcgaatgcatgattaccttttacctgctcatgtccactatccagagcggggacatcaccctagctcgcaagctgttcgatgcaatgtgaccaggaattcatgtcatggaacatagtgcgatatggatgcaacgtatgtgttccaacgaatgccagaatactgcctagtttcttggacatacttcacacataagagaatgcagcaatgatgaattcatcttcgtacttttattaaggcgcgggactagcgagggtcaagtgaggaggagcaaccccatcgccgccattccgccatcaacaagggcaatgaaccagttcgtgctgctgggacctgcgagtgggaagcaacagcagagtttattggatccttgcatcgctgcctccatgggagcaaggggagaccaccggtggaagcacaccgattagttatagccaggtgattggcagtttggcacacccttcctgtttatctactacttaaaacttgcttcatatattaagtctgagttactggatttgattaggcaaaatatttcttaacaaccagctagatagggactggaactattccagaatacattccaaaccatgacagtcagcctgtaaagatgtagcactcattactcacagttcagctaacaaaaaaaatggagaattctgacaaattcttgtgatttgtattttcaacggtatttctgtctttgaagcagtaaaaatacattatttaaaaaaatgcacaacaggagcatcatatagcacatgatactcagatacatacaaggattttttttaaaaaaaaaaatttaccttcctagatccaacgaggcgcctgcgttagtattggagccgcacttttggtttcattctcagaagtcacaacatgacaaggttctttctgtgattggagtctagtttgcaacttttggagtggtcactgagtggtgaacaaatgagattgag

SEQ ID NO: 60746 - DNA, 1130 bp, Zea Mays
gtatggcccacgccataccttgggccagctcagaactagaagagcaccgcaccgctctgcactctgctcagccttcgccgccttccatcaccaggtcgccttgggctgttcacttccccgccgcttctcatatgctctgcttcacgtgaccacgcctacagcctttctccactctggctaggcgccattactagtttactactgagcctttggcttgtcccatcaactatcgttcgtcgagcgccggcagcaacttgcgcacaagcacaagcaccatcctactattgggctacacgcatgctgggcgggtggttgatgctcgaagggtgtttgatgaaatggcgcatggaacactggcgtcgaatgcatgattaccttttacctgctcatgtccactatccagagcggggacatcaccctagctcgcaagctgttcgatgcaatgtgaccaggaattcatgtcatggaacatagtgcgatatggatgcaacgtatgtgttccaacgaatgccagaatactgcctagtttcttggacatacttcacacataagagaatgcagcaatgatgaattcatcttcgtacttttattaaggcgcgggactagcgagggtcaagtgaggaggagcaaccccatcgccgccattccgccatcaacaagggcaatgaaccagttcgtgctgctgggacctgcgagtgggaagcaacagcaggttatgccaccaccaccatggagtgttgtcacaacttataatcgagtaattaagcggcatggctgcgaacacagaatagaaatctcgatattcaccacaagggcaacaatcaagtattttgctctttacccttctgtctcgaaactaagtaatttttttattccttcttgaattgagtaggtaattttacttctggcaggttgtgccaatgaaaaaaatcatgcactatatgataattcaattaaagttgttataatcaagtcaaatgagatcggtaatcttataggcttgtttgatttgagaaaacatttattcagcctcaccttcacatgacatgaccaaatattattgtgtatttttttttggttgatatcatagccggtttgtaaccttgtcaaaattcagaactagggttctg

SEQ ID NO: 60747 - DNA, 1475 bp, Zea Mays
ctgcatgctgcccatgatcaggggcggaggacccggtatggccaggtatggcccacgccataccttgggccagctcagaactagaagagcaccgcaccgctctgcactctgctcagccttcgccgccttccatcaccaggtcgccttgggctgttcacttccccgccgcttctcatatgctctgcttcacgtgaccacgcctacagcctttctccactctggctaggcgccattactagtttactactgagcctttggcttgtcccatcaactatcgttcgtcgagcgccggcagcaacttgcgcacaagcacaagcaccatcctactattgggctacacgcatgctgggcgggtggttgatgctcgaagggtgtttgatgaaatggcgcatggaacactggcgtcgaatgcatgattaccttttacctgctcatgtccactatccagagcggggacatcaccctagctcgcaagctgttcgatgcaatgtgaccaggaattcatgtcatggaacatagtgcgatatggatgcaacgtatgtgttccaacgaatgccagaatactgcctagtttcttggacatacttcacacataagagaatgcagcaatgatgaattcatcttcgtacttttattaaggcgcgggactagcgagggtcaagtgaggaggagcaaccccatcgccgccattccgccatcaacaagggcaatgaaccagttcgtgctgctgggacctgcgagtgggaagcaacagcaggtaagattgctttgcttgagatccagtcgcccgacctgcacgttgggttgagctgccggttgacgtacgatattgggctgccagttagtcccatttgtttcagttattaatctattcacaactggcttactggcttgctcttgctctcgtcgctgcgtgatgctctgcttctgctcacactacgacactaattgattgcttcattacgagctcatgcttcactgcttgctttctttttaatggtgatgaatgctatgtatagcacatacagcttcatacaggtatactacatgtagcacatacagcttcatacagctatactacatatagcacatacacccttgtacgatggcatgaaggcaggactagactaccaactaggttcgattagttgtcccaccagtccccttacattagtattgactaggcgacttgataccgttatctgaggctcacctgggcccaacacaatgtcacttgcatgtgttaacttcacctcagccaccctgcgtgtgttaagttccattttcaacagagctatgcgcaataaggtctgcagctctgttaaagtttcattttcttgctcctttggattactgcatcaattctgaagaagcatgtgttcgatacaacacataacaatatacgacatggatattttgagtctaatactgcatttttttaatagtaccattaaagctacatttgtaagattaag

SEQ ID NO: 60748 - DNA, 387 bp, Zea Mays
cccgatgccgtgagtcgccatcgccgcggagaaaagcgcagagagagataaagatatccgccacacgggcatcctacctacatcgccgctcggggctcggcgtgcggtctgggcgattcgccggggcaccccgcgcttgggcgcagccatctcgagcgtggagcatggccggaattcaagggaagtgcacgggaacttgcatctcgtggcggatccgcgctgcaccatcgaccaagcctcgcattcatctccactgacgaagcgaggttacgacaaggaacctgaagatcaaattggagaagtacctggagtttgcaccaaaaaggttaagaacaggtgcatccagaagtggaggaagactctgatgaagatgagtttggagagatc

SEQ ID NO: 60749 - DNA, 1048 bp, Zea Mays
ccggccacttcaaggtgtgggagtccaagcaacattccaagtcatctagttgacatactcaagccctcccaaccacatatattcattgatctatcctatacacaagatttagaccactacaaccaacacaagtgccacaaaagagagagcaagcaaaagagagctactcatttgagtttagcactagtgccttgtgagattcatcgagaaatagtgtgtgcttcatctttgtgttcatttgcgcgtggagttttgactcccattcgaacttcctccaaagttttggaggcttgtaaaagctagcaagagacaccaaagattgtggtggtccttgtgggatcgagagtgatccttgagaagaagaagagctcaccgatccttgtgtgatcgggggagagagggaaagggttgaaaaagacccgtccttaagtggactcctcaacggggactaggccttcgagggccgaacctcggtaaaacaaatcacccgtgtccatcgtgtttattgcttgtgatttgtttgttttcctttgatctaagttttcttgctccatcatttgctaatatcatttggtgttgcttcaagttaaattctcatttagtgaagcaacacgttgcaagaaagaacttgtcctagtgctcttctcatctaaggcttcttgctttgttattctataacttactagttgtattgatttatcacttccgcattatttagcaatactcttttcaagcaagaacttagtttctattctccgatatttgtatatcttgttctaaccactaatcaagggatctagttgggggataaagttttaattttcaggtttcgcctatccaccccccctctaggcgactatcagctggccctcagggcatactacctgggaccaaagggggagaagctactcgttttcgattacatgcccaatggcagcctccactcattcttgcatgctagaaaattttcagcattcagtatcaaactctgaagcacgtttctcgacaatggggtctgacgacagatctaacaactgatgaattagac

SEQ ID NO: 60750 - DNA, 454 bp, Zea Mays
cctgctcatcgatcttattcatttggcctcaacgatcaggattagtttggcttccactccttgagccttctgctcaaagcaaccaccgctggctcagctcactccggtggcctccggccgcctctgcctccgaggattcgcttggggggagacgtattatgaggttcgcggggtggtacctgaagattgcggcggtggggcctccattggcgctgccatggagctcttcatgatccacacgggcttttatgagaaggtaactgtcctggggtcagaaaaacgagcttgggaaagcagtctagaggcccaagctatgagagaagctctcaatccatggcaaaagcatgatgaacaagaacaacagaagaaatagtcaagagttatgtgtcttaagtgtctgcgttcccatccgtatacccttgaatcaggtggctcatctagcagtcaaacgcag

SEQ ID NO: 60751 - DNA, 456 bp, Zea Mays
cctgctcatcgatcttattcatttggcctcaacgatcaggattagtttggcttccactccttgagccttctgctcaaagcaaccaccgctggctcagctcactccggtggcctccggccgcctctgcctccgaggattcgcttggggggagacgtattatgaggttcgcggggtggtacctgaagattgcggcggtggggcctccattggcgctgccatggagctcttcatgatccacacgggcttttatgagaaggtaactgtcctggggtcagaaaaacgagcttgggaaagcagtctagaggcccaagctatgagagaagctctcaatccatggcaaaagcatgatgaacaagaacaacagaagaaatagtcaagagttatgtgtcttaagtgtctgcgttcccatccgtatacccttgaatcagatggagaaggtttttaggattgggcgca

SEQ ID NO: 60752 - DNA, 2641 bp, Zea Mays
cctgctcatcgatcttattcatttggcctcaacgatcaggattagtttggcttccactccttgagccttctgctcaaagcaaccaccgctggctcagctcactccggtggcctccggccgcctctgcctccgaggattcgcttggggggagacgtattatgaggttcgcggggtggtacctgaagattgcggcggtggggcctccattggcgctgccatggagctcttcatgatccacacgggcttttatgagaaggtaactgtcctggggtcagaaaaacgagcttgggaaagcagtctagaggcccaagctatgagagaagctctcaatccatggcaaaagcatgatgaacaagaacaacagaagaaatagtcaagagttatgtgtcttaagtgtctgcgttcccatccgtatacccttgaatcagcttccagaacacgttgaagggctatcgaagacagttataaactgcttttttcatgggatgcaaaaaaaagaggggacattgtacactatcacactgggtttcacttgtttttatgatattttaacattagaacatcagattttgggtatagaaatgggtgaaagttgtctgcttctctgtacaataattgaatgctctatggattgctcatgtaatccttttcagttatgatatttttttaaacatcatttgttggaacaaaagggtgtacataacaacagtaaatatggaggagtttgcacatagctcgattcaatgagcatcaaaaattcccaatggattttatgcaacctggctccaattgttagtattaatgcccagtaaatggaataatactcgttctgtacaaacgtaccacctcctaagctgatagtttcctatcctcttgatgtctcctgtaatgtattcatttcacgtattgtatgtaacccatttcagctagaactaaccaaaattttgtacaagctagtttctctgttaactacttaactggaaacttggtgatggtgcttacaacttgaccagctagcggcagtagaataagctggttttgttcgtatgaatagaactatgcttgatgctaaccctagaattgtgatgcaagcccacacaaagaaggtggttgagtagcacttcacccccatgcacataatcatggtgtcaacaatgccagtccagttatccactactgtcatcttttggccatttccatcgtataccatggcagcaatctggccatagaggagtgagcccagcgggatattggtaattaggatgttgtgattcactccaatgctatttggtccaaagagctcggaggtcactgacattgctgcagcaaagatgaatcctgagcttagaccaactagtgttgttcctgctaccagggtgcttgcatcttgttggttccacataaggaaaaaggccattggcatggggaccaatgcagcagcaagccaccctgtgcgagcaagtggcaccttcctgtatacaaattttagttaggaagcatgtgatatgatgacatatatgtttgtatataaagcaaaacagatacctgtgaaggatgtcaggtagtgcagaaagaagacgaccgaagaaagagcaggatgagtaggcaataagtagcatggtgagctgtgactgctggtgcaatgactgcgcaatctgccccaagttgttgctgtataccaggccaacagtggctccacagaagtaggctgtgtagtagagccagaagtccacacaccaaatgagcttctttgcactatgttcttcaccgagtgccaccaggagcggctgatgtgggtcatcatggtttagtagcgatgcagggtcagggccatctgtatccacatatgaggaactggagcaggcagggatgatgagaggaagggcgaggagaaccatggcacctatgaggatgacccatgcagtagagccagttgcggtgaaagttccaaagaccacaacatatatgccagtgatgaatgcaaggatgtagaggccgaggaagacacgcctgttatgcctgggcgcactttggaggtggctgtcatttgtgtggcagaggaggatcactgggagtgcaagaatagagacaccaagagggaggattgcattgaggaggaggcagatagacagggctaaaggggagagggcgtttgcaaagagagtgtagaaggcagcgctgagcccgttgaagcttattgagagggagagggctagggagcggttgtttgcagagaagttgcggatgcagagaacaaagcagactgtgttgaaccagcagatgctgcaccctgctatcaagcagaccaagaacacctgcaagggccaacatatgaatcagaatttgatcaaataattaagttcgatataagttgcatgttgtctttatgtcttggcagtttaacctctattgtctctacatcttgacttaaatacctttgaggatagtgtttgcaatcagtttgtccagagtcgagacgacttgtgtaatatagtttgtttactgaaagctacaggatggatttgtatactgggagcccaagccccgtatggtatcgaatacattgtacgaccacagggcagtacatccttctttttttactttgaacatttagtataaacgcttttaaaatgtgattgaa

SEQ ID NO: 60753 - DNA, 1641 bp, Zea Mays
cctgctcatcgatcttattcatttggcctcaacgatcaggattagtttggcttccactccttgagccttctgctcaaagcaaccaccgctggctcagctcactccggtggcctccggccgcctctgcctccgaggattcgcttggggggagacgtattatgaggttcgcggggtggtacctgaagattgcggcggtggggcctccattggcgctgccatggagctcttcatgatccacacgggcttttatgagaaggtaactgtcctggggtcagaaaaacgagcttgggaaagcagtctagaggcccaagctatgagagaagctctcaatccatggcaaaagcatgatgaacaagaacaacagaagaaatagtcaagagttatgtgtcttaagtgtctgcgttcccatccgtatacccttgaatcagcaaaacagatacctgtgaaggatgtcaggtagtgcagaaagaagacgaccgaagaaagagcaggatgagtaggcaataagtagcatggtgagctgtgactgctggtgcaatgactgcgcaatctgccccaagttgttgctgtataccaggccaacagtggctccacagaagtaggctgtgtagtagagccagaagtccacacaccaaatgagcttctttgcactatgttcttcaccgagtgccaccaggtagcccttgctcactattgttccacaacaattgccctgcatctggagctccattggttttagcatcatcgcattggactccatttgatgattgtttctgattaggagcggctgatgtgggtcatcatggtttagtagcgatgcagggtcagggccatctgtatccacatatgaggaactggagcaggcagggatgatgagaggaagggcgaggagaaccatggcacctatgaggatgacccatgcagtagagccagttgcggtgaaagttccaaagaccacaacatatatgccagtgatgaatgcaaggatgtagaggccgaggaagacacgcctgttatgcctgggcgcactttggaggtggctgtcatttgtgtggcagaggaggatcactgggagtgcaagaatagagacaccaagagggaggattgcattgaggaggaggcagatagacagggctaaaggggagagggcgtttgcaaagagagtgtagaaggcagcgctgagcccgttgaagcttattgagagggagagggctagggagcggttgtttgcagagaagttgcggatgcagagaacaaagcagactgtgttgaaccagcagatgctgcaccctgctatcaagcagaccaagaacacctgcaagggccaacatatgaatcagaatttgatcaaataattaagttcgatataagttgcatgttgtctttatgtcttggcagtttaacctctattgtctctacatcttgacttaaatacctttgaggatagtgtttgcaatcagtttgtccagagtcgagacgacttgtgtaatatagtttgtttactgaaagctacaggatggatttgtatactgggagcccaagccccgtatggtatcgaatacattgtacgaccacagggcagtacatccttctttttttactttgaacatttagtataaacgcttttaaaatgtgattgaa

SEQ ID NO: 60754 - DNA, 603 bp, Zea Mays
aaaaaaaatagcggcggcgcaggccgcacagcctctccgcaatcgacgcccactttcctccgtagtcttcctcccacaaaaactgcgccacatcttcatcctcctcctcgtaacctcctccaatcgtgccggcggcgcagcaaggtagatcatctgagcctattcatcgcaacctcaagatcccccggggaagaaggggccatgagtcccacggcgtcgtgcagaagatatagaacctactcctacaggctattagaagctgaaggcaattacaatcatcaagaacaatcaaatgatgcaacggctaggactttctcaattacgatcaatgatggccagtattccaagtggaaggatgaacgatgatgctcctcaggaatttggatcgttgtatggtggtgatgatattgagggatctgtggatgagatgatcagtaagggaaatgaagaccagaggcacctacccaagctgtcaaatttgcatcagaaggtgggattgtacttaggcagcacatgccgatagttccacacaggacggagtacaagaaggaagagaacaccggtaaaatagaaaactacactggaaagattgtttaagaccag

SEQ ID NO: 60755 - DNA, 1456 bp, Zea Mays
tcgacgcccactttcctccgtagtcttcctcccacaaaaactgcgccacatcttcatcctcctcctcgtaacctcctccaatcgtgccggcggcgcagcaaggtagatcatctgagcctattcatcgcaacctcaagatcccccggggaagaaggggccatgagtcccacggcgtcgtgcagaagatatagaacctactcctacaggctattagaagctgaaggcaattacaatcatcaagaacaatcaaatgatgcaacggctaggactttctcaattacgatcaatgatggccagtattccaagtggaaggatgaacgatgatgctcctcaggaatttggatcgttgtatggtggtgatgatattgagggatctgtggatgagatgatcagtaagaactagtaccaagacaaagtagtatgtgtcgacaacttgaatcattaagcagaggattaggcattaaaattccaatacaaattcgtgaagggaaatgaagaccagaggcacctacccaagctgtcaaatttgcatcagaaggtgggattgtacttaggcagcacatgccgatagttccacacaggacggagtacaagaaggaagagaacaccggtaaaatagaaaactacactggaaagattgttcagtaagagcagcatgcattgatatgctaaagggtgggcaacgctagatgaggtataagctaaaaaagaaatacttcaatggggttccagcgaatcaagtgaggactacatcgcctatttcgttcatgatcgacgaccaatggaaacttctaatggaaatgtggtctacctcaaagcacaaggacacatgtatgaagaacaaagttagttgtgaacaagtaaagtttccacagggcacaggctctcaatcctacattgcaaaggcatattcaatggttgatatggaatcaatggcggcagcaccagttgaagatggacaccacgtaaagtcttcaatagaacaaaggtgcagcaacttgagtctcaattacaaattgagaggcaagaaaaagatggactacgagatgaagtccaaagcttgaaggctaagacacaggcatctgatgagaccattgctaagtgaagaagtccatagcagaaaatagtagcctccttcgtcagattttaagcataaattgtagccaagtgcctccttaaatatgcctaccaacttgatggtgtcaagatacatcacataccagatggaggattaaagttatatgagcctaagctacatgattattaggatttatgttattggagtccaaatttgttttttgttgaaatacttgtgctagatttttttggatggatgatatactttgaaattagataatttcggcattacaatttattttgtttaatgacatattgtatgcatgaagaatcaatcatgatcgcaaattgtatggatttataatatttcatgaaaaaa

SEQ ID NO: 60756 - DNA, 1405 bp, Zea Mays
aaaaaaaatagcggcggcgcaggccgcacagcctctccgcaatcgacgcccactttcctccgtagtcttcctcccacaaaaactgcgccacatcttcatcctcctcctcgtaacctcctccaatcgtgccggcggcgcagcaaggtagatcatctgagcctattcatcgcaacctcaagatcccccggggaagaaggggccatgagtcccacggcgtcgtgcagaagatatagaacctactcctacaggctattagaagctgaaggcaattacaatcatcaagaacaatcaaatgatgcaacggctaggactttctcaattacgatcaatgatggccagtattccaagtggaaggatgaacgatgatgctcctcaggaatttggatcgttgtatggtggtgatgatattgagggatctgtggatgagatgatcagtaagggaaatgaagaccagaggcacctacccaagctgtcaaatttgcatcagaaggtgggattgtacttaggcagcacatgccgatagttccacacaggacggagtacaagaaggaagagaacaccggtaaaatagaaaactacactggaaagattgtttaagagcagcatgcattgatatgctaaagggtgggcaacgctagatgaggtataagctaaaaaagaaatacttcaatggggttccagcgaatcaagtgaggactacatcgcctatttcgttcatgatcgacgaccaatggaaacttctaatggaaatgtggtctacctcaaagcacaaggacacatgtatgaagaacaaagttagttgtgaacaagtaaagtttccacagggcacaggctctcaatcctacattgcaaaggcatattcaatggttgatatggaatcaatggcggcagcaccagttgaagatggacaccacgtaaagtcttcaatagaacaaaggtgcagcaacttgagtctcaattacaaattgagaggcaagaaaaagatggactacgagatgaagtccaaagcttgaaggctaagacacaggcatctgatgagaccattgctaagtgaagaagtccatagcagaaaatagtagcctccttcgtcagattttaagcataaattgtagccaagtgcctccttaaatatgcctaccaacttgatggtgtcaagatacatcacataccagatggaggattaaagttatatgagcctaagctacatgattattaggatttatgttattggagtccaaatttgttttttgttgaaatacttgtgctagatttttttggatggatgatatactttgaaattagataatttcggcattacaatttattttgtttaatgacatattgtatgcatgaagaatcaatcatgatcgcaaattgtatggatttataatatttcatgaaaaaa

SEQ ID NO: 60757 - DNA, 1577 bp, Zea Mays
aaaaaaaatagcggcggcgcaggccgcacagcctctccgcaatcgacgcccactttcctccgtagtcttcctcccacaaaaactgcgccacatcttcatcctcctcctcgtaacctcctccaatcgtgccggcggcgcagcaaggtagatcatctgagcctattcatcgcaacctcaagatcccccggggaagaaggggccatgagtcccacggcgtcgtgcagaagatatagaacctactcctacaggctattagaagctgaaggcaattacaatcatcaagaacaatcaaatgatgcaacggctaggactttctcaattacgatcaatgatggccagtattccaagtggaaggatgaacgatgatgctcctcaggaatttggatcgttgtatggtggtgatgatattgagggatctgtggatgagatgatcagtaagggaaatgaagaccagaggcacctacccaagctgtcaaatttgcatcagaaggtgggattgtacttaggcagcacatgccgatagttccacacaggacggagtacaagaaggaagagaacaccggtaaaatagaaaactacactggaaagattgttcagtaagagcagcatgcattgatatgctaaagggtgggcaacgctagatgaggtataagctaaaaaagaaatacttcaatggggttccagcgaatcaagtgaggactacatcgcctatttcgttcatgatcgacgaccaatggaaacttctaatggaaatgtggtctacctcaaagcacaaggacacatgtatgaagaacaaagttagttgtgaacaagtaaagtttccacagggcacaggctctcaatcctacattgcaaaggcatattcaatggagatgcattgcagcaagaagaaaggatttagcgaaactgtctagaaagcttttgtaagaacttttttccctttcacctctacctctcaataggcaatgcactaggttgatgtctgtgtgctatgttgatatggaattgcaatacactaagttgatctctatatgctaggttgatatggaatcaatggcggcagcaccagttgaagatggacaccacgtaaagtcttcaatagaacaaaggtgcagcaacttgagtctcaattacaaattgagaggcaagaaaaagatggactacgagatgaagtccaaagcttgaaggctaagacacaggcatctgatgagaccattgctaagtgaagaagtccatagcagaaaatagtagcctccttcgtcagattttaagcataaattgtagccaagtgcctccttaaatatgcctaccaacttgatggtgtcaagatacatcacataccagatggaggattaaagttatatgagcctaagctacatgattattaggatttatgttattggagtccaaatttgttttttgttgaaatacttgtgctagatttttttggatggatgatatactttgaaattagataatttcggcattacaatttattttgtttaatgacatattgtatgcatgaagaatcaatcatgatcgcaaattgtatggatttataatatttcatgaaaaaa

SEQ ID NO: 60758 - DNA, 1424 bp, Zea Mays
aacaaaaaaaatagcggcggcgcaggccgcacagcctctccgcaatcgacgcccactttcctccgtagtcttcctcccacaaaaactgcgccacatcttcatcctcctcctcgtaacctcctccaatcgtgccggcggcgcagcaaggtagatcatctgagcctattcatcgcaacctcaagatcccccggggaagaaggggccatgagtcccacggcgtcgtgcagaagatatagaacctactcctacaggctattagaagctgaaggcaattacaatcatcaagaacaatcaaatgatgcaacggctaggactttctcaattacgatcaatgatggccagtattccaagtggaaggatgaacgatgatgctcctcaggaatttggatcgttgtatggtggtgatgatattgagggatctgtggatgagatgatcagtaagggaaatgaagaccagaggcacctacccaagctgtcaaatttgcatcagaaggtgggattgtacttaggcagcacatgccgatagttccacacaggacggagtacaagaaggaagagaacaccggtaaaatagaaaactacactggaaagattgttggacaattcaccatggacgccgataatgcagcagtaagagcagcatgcattgatatgctaaagggtgggcaacgctagatgaggtataagctaaaaaagaaatacttcaatggggttccagcgaatcaagtgaggactacatcgcctatttcgttcatgatcgacgaccaatggaaacttctaatggaaatgtggtctacctcaaagcacaaggacacatgtatgaagaacaaagttagttgtgaacaagtaaagtttccacagggcacaggctctcaatcctacattgcaaaggcatattcaatggttgatatggaatcaatggcggcagcaccagttgaagatggacaccaccaaaggtgcagcaacttgagtctcaattacaaattgagaggcaagaaaaagatggactacgagatgaagtccaaagcttgaaggctaagacacaggcatctgatgagaccattgctaagtgaagaagtccatagcagaaaatagtagcctccttcgtcagattttaagcataaattgtagccaagtgcctccttaaatatgcctaccaacttgatggtgtcaagatacatcacataccagatggaggattaaagttatatgagcctaagctacatgattattaggatttatgttattggagtccaaatttgttttttgttgaaatacttgtgctagatttttttggatggatgatatactttgaaattagataatttcggcattacaatttattttgtttaatgacatattgtatgcatgaagaatcaatcatgatcgcaaattgtatggatttataatatttcatgaaaaaa

SEQ ID NO: 60759 - DNA, 2142 bp, Zea Mays
aaaacaaaaaaaatagcggcggcgcaggccgcacagcctctccgcaatcgacgcccactttcctccgtagtcttcctcccacaaaaactgcgccacatcttcatcctcctcctcgtaacctcctccaatcgtgccggcggcgcagcaaggtagatcatctgagcctattcatcgcaacctcaagatcccccggggaagaaggggccatgagtcccacggcgtcgtgcagaagatatagaacctactcctacaggctattagaagctgaaggcaattacaatcatcaagaacaatcaaatgatgcaacggctaggactttctcaattacgatcaatgatggccagtattccaagtggaaggatgaacgatgatgctcctcaggaatttggatcgttgtatggtggtgatgatattgagggatctgtggatgagatgatcagtaagggaaatgaagaccagaggcacctacccaagctgtcaaatttgcatcagaaggtgggattgtacttaggcagcacatgccgatagttccacacaggacggagtacaagaaggaagagaacaccggtaaaatagaaaactacactggaaagattgttggacaattcaccatggacgccgataatgcagcagtaagagcagcatgcattgatatgctaaagggtgggcaacgctagatgaggtataagctaaaaaagaaatacttcaatggggttccagcgaatcaagtgaggactacatcgcctatttcgttcatgatcgacgaccaatggaaacttctaatggaaatgtggtctacctcaaagcacaaggacacatgtatgaagaacaaagttagttgtgaacaagtaaagtttccacagggcacaggctctcaatcctacattgcaaaggcatattcaatggtaagaaaattaccatgtcatatataaacttctttcgtatctgcacacttgttgaagtcaataagataaaaatgttacttacaattaaagatcatagttgtttattttcagaatgggcacttcttctaatacacactatccattcaaatatttttaatgctcctgctaactgttcatgtctaggcttgcaaataagtattgtgttgttacaaaaaaaatgtactatgctaatatccatgtactagctacaacatgaattcttttgaatgcttctgctacctgatatgtatttataagtactgctcttgattaaatatgttatagctacaccatatacttgattactcttataatggtaatgattataatacatacaattttacatctcagatattgtgtatgcttctacaagcagatcttcttgcatacatgtaattaagtctttgtatttaatatctaatacatgcagtgctttgttaattcatttgttgtacaactgttctagtaatcttatactgcatgcttcaccaaatcagatgtccaacctgtgctaaatgttccttgctgacaataataaattcacatcatgttagaagtaagataaatttaaagatatcaaacctagtgcaattgatcttttcaaggagatgcattgcagcaagaagaaaggatttagcgaaactgtctagaaagcttttgttgatatggaatcaatggcggcagcaccagttgaagatggacaccacgtaaagtcttcaatagaacaaaggtgcagcaacttgagtctcaattacaaattgagaggcaagaaaaagatggactacgagatgaagtccaaagcttgaaggctaagacacaggcatctgatgagaccattgctaagtgaagaagtccatagcagaaaatagtagcctccttcgtcagattttaagcataaattgtagccaagtgcctccttaaatatgcctaccaacttgatggtgtcaagatacatcacataccagatggaggattaaagttatatgagcctaagctacatgattattaggatttatgttattggagtccaaatttgttttttgttgaaatacttgtgctagatttttttggatggatgatatactttgaaattagataatttcggcattacaatttattttgtttaatgacatattgtatgcatgaagaatcaatcatgatcgcaaattgtatggatttataatatttcatgaaaaaa

SEQ ID NO: 60760 - DNA, 2223 bp, Zea Mays
aaaacaaaaaaaatagcggcggcgcaggccgcacagcctctccgcaatcgacgcccactttcctccgtagtcttcctcccacaaaaactgcgccacatcttcatcctcctcctcgtaacctcctccaatcgtgccggcggcgcagcaaggtagatcatctgagcctattcatcgcaacctcaagatcccccggggaagaaggggccatgagtcccacggcgtcgtgcagaagatatagaacctactcctacaggctattagaagctgaaggcaattacaatcatcaagaacaatcaaatgatgcaacggctaggactttctcaattacgatcaatgatggccagtattccaagtggaaggatgaacgatgatgctcctcaggaatttggatcgttgtatggtggtgatgatattgagggatctgtggatgagatgatcagtaagggaaatgaagaccagaggcacctacccaagctgtcaaatttgcatcagaaggtgggattgtacttaggcagcacatgccgatagttccacacaggacggagtacaagaaggaagagaacaccggtaaaatagaaaactacactggaaagattgtttaagagcagcatgcattgatatgctaaagggtgggcaacgctagatgaggtataagctaaaaaagaaatacttcaatggggttccagcgaatcaagtgaggactacatcgcctatttcgttcatgatcgacgaccaatggaaacttctaatggaaatgtggtctacctcaaagcacaaggacacatgtatgaagaacaaagttagttgtgaacaagtaaagtttccacagggcacaggctctcaatcctacattgcaaaggcatattcaatggtaagaaaattaccatgtcatatataaacttctttcgtatctgcacacttgttgaagtcaataagataaaaatgttacttacaattaaagatcatagttgtttattttcagaatgggcacttcttctaatacacactatccattcaaatatttttaatgctcctgctaactgttcatgtctaggcttgcaaataagtattgtgttgttacaaaaaaaatgtactatgctaatatccatgtactagctacaacatgaattcttttgaatgcttctgctacctgatatgtatttataagtactgctcttgattaaatatgttatagctacaccatatacttgattactcttataatggtaatgattataatacatacaattttacatctcagatattgtgtatgcttctacaagcagatcttcttgcatacatgtaattaagtctttgtatttaatatctaatacatgcagtgctttgttaattcatttgttgtacaactgttctagtaatcttatactgcatgcttcaccaaatcagatgtccaacctgtgctaaatgttccttgctgacaataataaattcacatcatgttagaagtaagataaatttaaagatatcaaacctagtgcaattgatcttttcaaggagatgcattgcagcaagaagaaaggatttagcgaaactgtctagaaagcttttgtaagaacttttttccctttcacctctacctctcaataggcaatgcactaggttgatgtctgtgtgctatgttgatatggaattgcaatacactaagttgatctctatatgctaggttgatatggaatcaatggcggcagcaccagttgaagatggacaccacgtaaagtcttcaatagaacaaaggtgcagcaacttgagtctcaattacaaattgagaggcaagaaaaagatggactacgagatgaagtccaaagcttgaaggctaagacacaggcatctgatgagaccattgctaagtgaagaagtccatagcagaaaatagtagcctccttcgtcagattttaagcataaattgtagccaagtgcctccttaaatatgcctaccaacttgatggtgtcaagatacatcacataccagatggaggattaaagttatatgagcctaagctacatgattattaggatttatgttattggagtccaaatttgttttttgttgaaatacttgtgctagatttttttggatggatgatatactttgaaattagataatttcggcattacaatttattttgtttaatgacatattgtatgcatgaagaatcaatcatgatcgcaaattgtatggatttataatatttcatgaaaaaa

SEQ ID NO: 60761 - DNA, 1412 bp, Zea Mays
caaaaacaaaaaaaatagcggcggcgcaggccgcacagcctctccgcaatcgacgcccactttcctccgtagtcttcctcccacaaaaactgcgccacatcttcatcctcctcctcgtaacctcctccaatcgtgccggcggcgcagcaaggtagatcatctgagcctattcatcgcaacctcaagatcccccggggaagaaggggccatgagtcccacggcgtcgtgcagatatagaacctactcctacaggctattagaagctgaaggcaattacaatcatcaagaacaatcaaatgatgcaacggctaggactttctcaattacgatcaatgatggccagtattccaagtggaaggatgaacgatgatgctcctcaggaatttggatcgttgtatggtggtgatgatattgagggatctgtggatgagatgatcagtaagggaaatgaagaccagaggcacctacccaagctgtcaaatttgcatcagaaggtgggattgtacttaggcagcacatgccgatagttccacacaggacggagtacaagaaggaagagaacaccggtaaaatagaaaactacactggaaagattgttcagtaagagcagcatgcattgatatgctaaagggtgggcaacgctagatgaggtataagctaaaaaagaaatacttcaatggggttccagcgaatcaagtgaggactacatcgcctatttcgttcatgatcgacgaccaatggaaacttctaatggaaatgtggtctacctcaaagcacaaggacacatgtatgaagaacaaagttagttgtgaacaagtaaagtttccacagggcacaggctctcaatcctacattgcaaaggcatattcaatggttgatatggaatcaatggcggcagcaccagttgaagatggacaccacgtaaagtcttcaatagaacaaaggtgcagcaacttgagtctcaattacaaattgagaggcaagaaaaagatggactacgagatgaagtccaaagcttgaaggctaagacacaggcatctgatgagaccattgctaagtgaagaagtccatagcagaaaatagtagcctccttcgtcagattttaagcataaattgtagccaagtgcctccttaaatatgcctaccaacttgatggtgtcaagatacatcacataccagatggaggattaaagttatatgagcctaagctacatgattattaggatttatgttattggagtccaaatttgttttttgttgaaatacttgtgctagatttttttggatggatgatatactttgaaattagataatttcggcattacaatttattttgtttaatgacatattgtatgcatgaagaatcaatcatgatcgcaaattgtatggatttataatatttcatgaaaaaa

SEQ ID NO: 60762 - DNA, 2228 bp, Zea Mays
caaaaacaaaaaaaatagcggcggcgcaggccgcacagcctctccgcaatcgacgcccactttcctccgtagtcttcctcccacaaaaactgcgccacatcttcatcctcctcctcgtaacctcctccaatcgtgccggcggcgcagcaaggtagatcatctgagcctattcatcgcaacctcaagatcccccggggaagaaggggccatgagtcccacggcgtcgtgcagaagatatagaacctactcctacaggctattagaagctgaaggcaattacaatcatcaagaacaatcaaatgatgcaacggctaggactttctcaattacgatcaatgatggccagtattccaagtggaaggatgaacgatgatgctcctcaggaatttggatcgttgtatggtggtgatgatattgagggatctgtggatgagatgatcagtaagggaaatgaagaccagaggcacctacccaagctgtcaaatttgcatcagaaggtgggattgtacttaggcagcacatgccgatagttccacacaggacggagtacaagaaggaagagaacaccggtaaaatagaaaactacactggaaagattgttcagtaagagcagcatgcattgatatgctaaagggtgggcaacgctagatgaggtataagctaaaaaagaaatacttcaatggggttccagcgaatcaagtgaggactacatcgcctatttcgttcatgatcgacgaccaatggaaacttctaatggaaatgtggtctacctcaaagcacaaggacacatgtatgaagaacaaagttagttgtgaacaagtaaagtttccacagggcacaggctctcaatcctacattgcaaaggcatattcaatggtaagaaaattaccatgtcatatataaacttctttcgtatctgcacacttgttgaagtcaataagataaaaatgttacttacaattaaagatcatagttgtttattttcagaatgggcacttcttctaatacacactatccattcaaatatttttaatgctcctgctaactgttcatgtctaggcttgcaaataagtattgtgttgttacaaaaaaaatgtactatgctaatatccatgtactagctacaacatgaattcttttgaatgcttctgctacctgatatgtatttataagtactgctcttgattaaatatgttatagctacaccatatacttgattactcttataatggtaatgattataatacatacaattttacatctcagatattgtgtatgcttctacaagcagatcttcttgcatacatgtaattaagtctttgtatttaatatctaatacatgcagtgctttgttaattcatttgttgtacaactgttctagtaatcttatactgcatgcttcaccaaatcagatgtccaacctgtgctaaatgttccttgctgacaataataaattcacatcatgttagaagtaagataaatttaaagatatcaaacctagtgcaattgatcttttcaaggagatgcattgcagcaagaagaaaggatttagcgaaactgtctagaaagcttttgtaagaacttttttccctttcacctctacctctcaataggcaatgcactaggttgatgtctgtgtgctatgttgatatggaattgcaatacactaagttgatctctatatgctaggttgatatggaatcaatggcggcagcaccagttgaagatggacaccacgtaaagtcttcaatagaacaaaggtgcagcaacttgagtctcaattacaaattgagaggcaagaaaaagatggactacgagatgaagtccaaagcttgaaggctaagacacaggcatctgatgagaccattgctaagtgaagaagtccatagcagaaaatagtagcctccttcgtcagattttaagcataaattgtagccaagtgcctccttaaatatgcctaccaacttgatggtgtcaagatacatcacataccagatggaggattaaagttatatgagcctaagctacatgattattaggatttatgttattggagtccaaatttgttttttgttgaaatacttgtgctagatttttttggatggatgatatactttgaaattagataatttcggcattacaatttattttgtttaatgacatattgtatgcatgaagaatcaatcatgatcgcaaattgtatggatttataatatttcatgaaaaaa

SEQ ID NO: 60763 - DNA, 1446 bp, Zea Mays
caaaaacaaaaaaaatagcggcggcgcaggccgcacagcctctccgcaatcgacgcccactttcctccgtagtcttcctcccacaaaaactgcgccacatcttcatcctcctcctcgtaacctcctccaatcgtgccggcggcgcagcaaggtagatcatctgagcctattcatcgcaacctcaagatcccccggggaagaaggggccatgagtcccacggcgtcgtgcagaagatatagaacctactcctacaggctattagaagctgaaggcaattacaatcatcaagaacaatcaaatgatgcaacggctaggactttctcaattacgatcaatgatggccagtattccaagtggaaggatgaacgatgatgctcctcaggaatttggatcgttgtatggtggtgatgatattgagggatctgtggatgagatgatcagtaagggaaatgaagaccagaggcacctacccaagctgtcaaatttgcatcagaaggtgggattgtacttaggcagcacatgccgatagttccacacaggacggagtacaagaaggaagagaacaccggtaaaatagaaaactacactggaaagattgttggacaattcaccatggacgccgataatgcagcagtaagagcagcatgcattgatatgctaaagggtgggcaacgctagatgaggtataagctaaaaaagaaatacttcaatggggttccagcgaatcaagtgaggactacatcgcctatttcgttcatgatcgacgaccaatggaaacttctaatggaaatgtggtctacctcaaagcacaaggacacatgtatgaagaacaaagttagttgtgaacaagtaaagtttccacagggcacaggctctcaatcctacattgcaaaggcatattcaatggttgatatggaatcaatggcggcagcaccagttgaagatggacaccacgtaaagtcttcaatagaacaaaggtgcagcaacttgagtctcaattacaaattgagaggcaagaaaaagatggactacgagatgaagtccaaagcttgaaggctaagacacaggcatctgatgagaccattgctaagtgaagaagtccatagcagaaaatagtagcctccttcgtcagattttaagcataaattgtagccaagtgcctccttaaatatgcctaccaacttgatggtgtcaagatacatcacataccagatggaggattaaagttatatgagcctaagctacatgattattaggatttatgttattggagtccaaatttgttttttgttgaaatacttgtgctagatttttttggatggatgatatactttgaaattagataatttcggcattacaatttattttgtttaatgacatattgtatgcatgaagaatcaatcatgatcgcaaattgtatggatttataatatttcatgaaaaaa

SEQ ID NO: 60764 - DNA, 1557 bp, Zea Mays
gttttatactaatttttaactctcgtggcaacgcacgggcatatacctagtatatgaatatgatccgtgagtaattaggaacaagtagaatatattagaatggttgggcgccatattcactgaaaataaaatcactgcacgccaaaaacaaaaaaaatagcggcggcgcaggccgcacagcctctccgcaatcgacgcccactttcctccgtagtcttcctcccacaaaaactgcgccacatcttcatcctcctcctcgtaacctcctccaatcgtgccggcggcgcagcaaggtagatcatctgagcctattcatcgcaacctcaagatcccccggggaagaaggggccatgagtcccacggcgtcgtgcagaagatatagaacctactcctacaggctattagaagctgaaggcaattacaatcatcaagaacaatcaaatgatgcaacggctaggactttctcaattacgatcaatgatggccagtattccaagtggaaggatgaacgatgatgctcctcaggaatttggatcgttgtatggtggtgatgatattgagggatctgtggatgagatgatcagtaagggaaatgaagaccagaggcacctacccaagctgtcaaatttgcatcagaaggtgggattgtacttaggcagcacatgccgatagttccacacaggacggagtacaagaaggaagagaacaccggtaaaatagaaaactacactggaaagattgttcagtaagagcagcatgcattgatatgctaaagggtgggcaacgctagatgaggtataagctaaaaaagaaatacttcaatggggttccagcgaatcaagtgaggactacatcgcctatttcgttcatgatcgacgaccaatggaaacttctaatggaaatgtggtctacctcaaagcacaaggacacatgtatgaagaacaaagttagttgtgaacaagtaaagtttccacagggcacaggctctcaatcctacattgcaaaggcatattcaatggttgatatggaatcaatggcggcagcaccagttgaagatggacaccacgtaaagtcttcaatagaacaaaggtgcagcaacttgagtctcaattacaaattgagaggcaagaaaaagatggactacgagatgaagtccaaagcttgaaggctaagacacaggcatctgatgagaccattgctaagtgaagaagtccatagcagaaaatagtagcctccttcgtcagattttaagcataaattgtagccaagtgcctccttaaatatgcctaccaacttgatggtgtcaagatacatcacataccagatggaggattaaagttatatgagcctaagctacatgattattaggatttatgttattggagtccaaatttgttttttgttgaaatacttgtgctagatttttttggatggatgatatactttgaaattagataatttcggcattacaatttattttgtttaatgacatattgtatgcatgaagaatcaatcatgatcgcaaattgtatggatttataatatttcatgaaaaaa

SEQ ID NO: 60765 - DNA, 1354 bp, Zea Mays
cacgtgttataaagttaattaaatgtttgggtacggaggtgaagccaaactagaggcatatattgtgcatgaataaggttgacctggtggaagacaaggacctcctgatagttgcaaaagaaatcgaagatcttcttgtaagatatagaacctactcctacaggctattagaagctgaaggcaattacaatcatcaagaacaatcaaatgatgcaacggctaggactttctcaattacgatcaatgatggccagtattccaagtggaaggatgaacgatgatgctcctcaggaatttggatcgttgtatggtggtgatgatattgagggatctgtggatgagatgatcagtaagggaaatgaagaccagaggcacctacccaagctgtcaaatttgcatcagaaggtgggattgtacttaggcagcacatgccgatagttccacacaggacggagtacaagaaggaagagaacaccggtaaaatagaaaactacactggaaagattgttggacaattcaccatggacgccgataatgcagcagtaagagcagcatgcattgatatgctaaagggtgggcaacgctagatgaggtataagctaaaaaagaaatacttcaatggggttccagcgaatcaagtgaggactacatcgcctatttcgttcatgatcgacgaccaatggaaacttctaatggaaatgtggtctacctcaaagcacaaggacacatgtatgaagaacaaagttagttgtgaacaagtaaagtttccacagggcacaggctctcaatcctacattgcaaaggcatattcaatggttgatatggaatcaatggcggcagcaccagttgaagatggacaccacgtaaagtcttcaatagaacaaaggtgcagcaacttgagtctcaattacaaattgagaggcaagaaaaagatggactacgagatgaagtccaaagcttgaaggctaagacacaggcatctgatgagaccattgctaagtgaagaagtccatagcagaaaatagtagcctccttcgtcagattttaagcataaattgtagccaagtgcctccttaaatatgcctaccaacttgatggtgtcaagatacatcacataccagatggaggattaaagttatatgagcctaagctacatgattattaggatttatgttattggagtccaaatttgttttttgttgaaatacttgtgctagatttttttggatggatgatatactttgaaattagataatttcggcattacaatttattttgtttaatgacatattgtatgcatgaagaatcaatcatgatcgcaaattgtatggatttataatatttcatgaaaaaa

SEQ ID NO: 60766 - DNA, 917 bp, Zea Mays
atcttttaagagcagcatgcattgatatgctaaagggtgggcaacgctagatgaggtataagctaaaaaagaaatacttcaatggggttccagcgaatcaagtgaggactacatcgcctatttcgttcatgatcgacgaccaatggaaacttctaatggaaatgtggtctacctcaaagcacaaggtatttgacatcaacctccagtttcctccatataaatacggatgtaccttttcaaatttataatctctctattgtgctgtcatactcattcaatgtataggacacatgtatgaagaacaaagttagttgtgaacaagtaaagtttccacagggcacaggctctcaatcctacattgcaaaggcatattcaatggttgatatggaatcaatggcggcagcaccagttgaagatggacaccacgtaaagtcttcaatagaacaaaggtgcagcaacttgagtctcaattacaaattgagaggcaagaaaaagatggactacgagatgaagtccaaagcttgaaggctaagacacaggcatctgatgagaccattgctaagtgaagaagtccatagcagaaaatagtagcctccttcgtcagattttaagcataaattgtagccaagtgcctccttaaatatgcctaccaacttgatggtgtcaagatacatcacataccagatggaggattaaagttatatgagcctaagctacatgattattaggatttatgttattggagtccaaatttgttttttgttgaaatacttgtgctagatttttttggatggatgatatactttgaaattagataatttcggcattacaatttattttgtttaatgacatattgtatgcatgaagaatcaatcatgatcgcaaattgtatggatttataatatttcatgaaaaaa

SEQ ID NO: 60767 - DNA, 1879 bp, Zea Mays
atgttggatatattcaaggaaatggtatctttgcgtgtatttgagaggatttttagtgaactcctatactgtgagcactggactacacattatgtttttttgcaggattacaagttcattctgtttttcagatgttctaagctctccatgattaggaaatatctattgtttctgtgcaccaaatccaagttgcagtttgagatgatgatgtgcttatgtgaagttaatgctgacaacaatactattggatgcaatatgggcatgtcggcgctacagaaagctgtagcagcggtagtccatgatgtcaacgctgagggctgggatcgaggattggagggcttgagaaggccgaggtccaaatggagctccaccagttccactgagattctgggcgcctccacggcgccggtaaacatagataagtggataaaacaacaagctatttggataaaaagcaggggacagagttagagttttgcttaagtcttctggatggcacactcctgtcgtaccacaaatcagaaccaatgcgtcaataggcctaattcacgtgttataaagttaattaaatgtttgggtacggaggtgaagccaaactagaggcatatattgtgcatgaataaggttgacctggtggaagacaaggacctcctgatagttgcaaaagaaatcgaagatcttcttgtgtatgaaagaagatatagaacctactcctacaggctattagaagctgaaggcaattacaatcatcaagaacaatcaaatgatgcaacggctaggactttctcaattacgatcaatgatggccagtattccaagtggaaggatgaacgatgatgctcctcaggaatttggatcgttgtatggtggtgatgatattgagggatctgtggatgagatgatcagtaagggaaatgaagaccagaggcacctacccaagctgtcaaatttgcatcagaaggtgggattgtacttaggcagcacatgccgatagttccacacaggacggagtacaagaaggaagagaacaccggtaaaatagaaaactacactggaaagattgttcagtaagagcagcatgcattgatatgctaaagggtgggcaacgctagatgaggtataagctaaaaaagaaatacttcaatggggttccagcgaatcaagtgaggactacatcgcctatttcgttcatgatcgacgaccaatggaaacttctaatggaaatgtggtctacctcaaagcacaaggacacatgtatgaagaacaaagttagttgtgaacaagtaaagtttccacagggcacaggctctcaatcctacattgcaaaggcatattcaatggttgatatggaatcaatggcggcagcaccagttgaagatggacaccacgtaaagtcttcaatagaacaaaggtgcagcaacttgagtctcaattacaaattgagaggcaagaaaaagatggactacgagatgaagtccaaagcttgaaggctaagacacaggcatctgatgagaccattgctaagtgaagaagtccatagcagaaaatagtagcctccttcgtcagattttaagcataaattgtagccaagtgcctccttaaatatgcctaccaacttgatggtgtcaagatacatcacataccagatggaggattaaagttatatgagcctaagctacatgattattaggatttatgttattggagtccaaatttgttttttgttgaaatacttgtgctagatttttttggatggatgatatactttgaaattagataatttcggcattacaatttattttgtttaatgacatattgtatgcatgaagaatcaatcatgatcgcaaattgtatggatttataatatttcatgaaaaaa

SEQ ID NO: 60768 - DNA, 1129 bp, Zea Mays
cgacgcccactttcctccgtagtcttcctcccacaaaaactgcgccacatcttcatcctcctcctcgtaacctcctccaatcgtgccggcggcgcagcaaggtagatcatctgagcctattcatcgcaacctcaagatcccccggggaagaaggggccatgagtcccacggcgtcgtgcagaacctactcctacaggctattagaagctgaaggcaattacaatcatcaagaacaatcaaatgatgcaacggctaggactttctcaattacgatcaatgatggccagtattccaagtggaaggatgaacgatgatgctcctcaggaatttggatcgttgtatggtggtgatgatattgagggatctgtggatgagatgatcagtaagggaaatgaagaccagaggcacctacccaagctgtcaaatttgcatcagaaggtgggattgtacttaggcagcacatgccgatagttccacacaggacggagtacaagaaggaagagaacaccggtaaaatagaaaactacactggaaagattgtttaagagcagcatgcattgatatgctaaagggtgggcaacgctagatgaggtataagctaaaaaagaaatacttcaatggggttccagcgaatcaagtgaggactacatcgcctatttcgttcatgatcgacgaccaatggaaacttctaatggaaatgtggtctacctcaaagcacaaggacacatgtatgaagaacaaagttagttgtgaacaagtaaagtttccacagggcacaggctctcaatcctacattgcaaaggcatattcaatggtaagaaaattaccatgtcatatataaacttctttcgtatctgcacacttgttgaagtcaataagataaaaatgttacttacaattaaagatcatagttgtttattttcagaatgggcacttcttctaatacacactatccattcaaatatttttaatgctcctgctaactgttcatgtctaggcttgcaaataagtattgtgttgttacaaaaaaaatgtactatgctaatatccatgtactagctacaacatgaattcttttgaatgcttctgctacctgatatgtatttataagtactgctcttgattaaat

SEQ ID NO: 60769 - DNA, 1181 bp, Zea Mays
aaaaacaaaaaaaatagcggcggcgcaggccgcacagcctctccgcaatcgacgcccactttcctccgtagtcttcctcccacaaaaactgcgccacatcttcatcctcctcctcgtaacctcctccaatcgtgccggcggcgcagcaaggtagatcatctgagcctattcatcgcaacctcaagatcccccggggaagaaggggccatgagtcccacggcgtcgtgcagaacctactcctacaggctattagaagctgaaggcaattacaatcatcaagaacaatcaaatgatgcaacggctaggactttctcaattacgatcaatgatggccagtattccaagtggaaggatgaacgatgatgctcctcaggaatttggatcgttgtatggtggtgatgatattgagggatctgtggatgagatgatcagtaagggaaatgaagaccagaggcacctacccaagctgtcaaatttgcatcagaaggtgggattgtacttaggcagcacatgccgatagttccacacaggacggagtacaagaaggaagagaacaccggtaaaatagaaaactacactggaaagattgttcagtaagagcagcatgcattgatatgctaaagggtgggcaacgctagatgaggtataagctaaaaaagaaatacttcaatggggttccagcgaatcaagtgaggactacatcgcctatttcgttcatgatcgacgaccaatggaaacttctaatggaaatgtggtctacctcaaagcacaaggacacatgtatgaagaacaaagttagttgtgaacaagtaaagtttccacagggcacaggctctcaatcctacattgcaaaggcatattcaatggtaagaaaattaccatgtcatatataaacttctttcgtatctgcacacttgttgaagtcaataagataaaaatgttacttacaattaaagatcatagttgtttattttcagaatgggcacttcttctaatacacactatccattcaaatatttttaatgctcctgctaactgttcatgtctaggcttgcaaataagtattgtgttgttacaaaaaaaatgtactatgctaatatccatgtactagctacaacatgaattcttttgaatgcttctgctacctgatatgtatttataagtactgctcttgattaaat

SEQ ID NO: 60770 - DNA, 1354 bp, Zea Mays
gtcgagttataaaacaaagtacaaaactgaaaccacgtagtgtatatattttaaaacgaatggtgatagaaatgaaattacttactactactaaacagcaaaaagctcatgtgtataaatataggcagcgcgagcaagcatcatcaggcgtagctcagcagagaagaaagagggagaacggagaagggggagcggacagacaggcaccgcgagcgcgccttgcaatccatgattccagaaccaattcaattaagcatggtggcgcaaccggcgggtggcggaggtgcggaggaggaggtggtggtggacggcggcggcggccggcatgggcggaggagcggcgacgaggaggcgtggcggcggtgggcggtgctggtggcgacggtgtggatccaggcggtgacggggaccaacttcgacttctcggcctactcgtcggcgctgaaatcgtcgctgggggtgtcccaggaggcgctcaactacctggcgacggcgtcggacctgggcaaggcggtgggctggtcgtcgggcctcgcgctgctccacatgccgctccacgccgtgctcgcggcctccgccgccatggggcttgccgcctacgccgtccagtactactgcctcatcgcggcggcgtcgtccatggccgccgccgtcccctaccctctgggatggcctatgaccctttaagaactcatctagagcgaagagcagctgagcagttggatatattcaaggaaatggtatctttgcgtgtatttgagaggatttttagtgaactcctatactgtgagcactggactacacattatgtttttttgcaggattacaagttcattctgtttttcagttggctatattgctgacagatagctggttgcacaattacctgttgataaggcgattgaactgtggggttttagcagggagtttgaagtcctatttggtgccaagctcctaaactgagaaggcacagtaggcacacaagtaactattgtttctatgctccaaacttagatgttctaagctctccatgattaggaaatatctattgtttctgtgcaccaaatccaagttgcagtttgagatgatgatgtgcttatgtgaagttaatgctgacaacaatactattggatgcaatatgggcatgtcggcgctacagaaagctgtagcagcggtagtccatgatgtcaacgctgagggctgggatcgaggattggagggcttgagaaggccgaggtccaaatggagctccaccagttccactgagattctgggcgcctccacggcgccggtaaacatagataagtggataaaacaacaagctatttggataaaaagcaggggacagagttag

SEQ ID NO: 60771 - DNA, 933 bp, Zea Mays
gttaggaatggaaatggtgatgctttggccatggttgcaaccagggagcaaaattagactgaaatttttgtgatggtcaccgaatcccaggcaggcatggagtgcgagccagaggagctccattgggcggcgtcggcatcgtggagggggagcagctggggctgaccagagaatcccatttatgtaggggtgcatgatctatttagtccttgctctcgggtgggaggttgcttcaattgtcagaaaaggggttataaagaacatgaggcgcaacattgtagatggaaacagttttgcatttctttgtgacaacatagatgagcttgagcactctgttcaggagaatttacctagagtctctgtagtcatgcctttgaagggctttggcgaacataatttgcaaaattggcgaactcagattacatcactttatggtgggccactggaattcttgtttatcgtcgagagcaaatatgatcctgcttatcatgttgtttcccgtttgatcacagagtacaagatataaatttcaagacaatctggaggcgaaggtggtcgttgctgggttgtcaacaacctgtagccagaaaattcacaatcaattgatgtggcattttaatggaagggtagcttatagtttgacaaacaacaatatcctgcatatacattatagggctgatgtaccttctttccataccaagtttagcgaacgtcgctacgagcaggccctcgaggttccactcatgtttggatctgttgcaatggaaaaggtttcttgccacatcgttcattggatatttaagagaaccggtagccatatctttctaactgacgatgatgaagggcagcctccactgctgcaggggatggttgaagatcatgacgatctctactttatttcttggaagataaagcctcaccaaatcatcatct

SEQ ID NO: 60772 - DNA, 358 bp, Zea Mays
ccgcgtattgggggtgcggtgagctgagtatgcgaagaaagggagggccgccgtgatccgtatcgctgagcacacaaagagaaacatgagagagaagagagaacggtgaagtccgtccgcaccgctgcctcgtcctcgggcgtgagctcgcgggactcgccgtcgcgtgtggttgtcttcgtcaacttgggctcggcgcatgaaccgtataggaattgggaaattgttcgccggactgggtgaattggtgcgatttctccgcggtccggtggtactcgtccccagactcgtcgatccaagtgcgaggtcacgtgtcatccgaagatcatcctggtacctggaatctcaagtcccaggc

SEQ ID NO: 60773 - DNA, 708 bp, Zea Mays
gcaagcgccatcggccacggatagcaggatttgagccgcccctcaccaagccacgtagagccatgcttgacgcctcgctctaggtcatacgacagtcgacggtggccctcgccaggccttgcggagccatgctagacgccccgctccaggccgcgaggagccacgctcgacgacccggctgctcgttgcatgccgcacggagctgatctcgccaccgcgctccatgccgcaaggcggcgccccacgccaggctgcgcggagccgcactcgacaccccgcaccgggccacacggcggcgccctcgctggatctctgcgctcctcgtcgccacctgcagagatggtttatggctggaacgttcctctccgatcgacttggaagtttttcaaacaagccaccattatcctttcaaagtcactgcaagcgggccaagcaagtactgtacaacttaatcagtgattcagtacatgttgtgtacctgtgtttccagccgtagctactggatctgactaactgacaagagtatggacgttctatttcccagtacagtgcttcgattttacattcgcctgacatttatatggttcgaatgtattcactttatagtccaatctcggcccacacaaatatcaataatcagcacaagataagtgctttgaaaatataactttgtttccataaatttgggaaatttcaaagaaaacaatc

SEQ ID NO: 60774 - DNA, 387 bp, Zea Mays
acacgagctcacgcagtgaaagcaaggcagcatgcatgtcgtcgttgaccacaaaagtgtttggagtgccccagccagggtggtacagggtttattacatcattaataatattcaagagttagtaaccgctctgacccaagagcatccggtggtgctgatgttctgggcggactggaaccagccaagcaaggccacgtactgggatctggccatcgctaaaaaggatgaggccgtattctgccagctggactttgataagtttaaagatgtcgtagagaagttcagagtgaaggctctgccgacgttcctcctgatcaaggagggcgaggagcagcgcagggtcgtcggtgccaagcacctttgctctccaccgagcggagcgagaa

SEQ ID NO: 60775 - DNA, 949 bp, Zea Mays
acacgagctcacgcagtgaaagcaaggcagcatgcatgtcgtcgttgaccacaaaaggtaacacgtactactatttgtgttgcttcgtcctacttttttatgccttggcatatgttggctatttctggaggcatgctggcaagattggggaaggagctagcgaggttgtttggggcggtgacgctagctcttgccgacatggattaatatttaacggcggcggtgtactcaatttctttctgtctgatgtctcacgcggtaatttttgtgctgcggtgtagtgtttggagtgccccagccagggtggtacagggtttattacatcattaataatattcaagagttagtaaccgctctgacccaagagcatccggtggtgctgatgttctgggcggactggaaccagccaagcaaggccacgtactgggatctggccatcgctaaaaaggatgaggccgtattctgccagctggactttgataagtttaaagatgtcgtagagaagttcagagtgaaggctctgccgacgttcctcctgatcaaggagggcgaggagcagcgcagggtcgtcggtgccaaggtcgaggagctcaacatggcattatcagatatcggataatctaggcagctatagcgctcacattctaacttcatcaaattattctaataaattaataagctggaaataagtcttaaaaatacaaatggctaattaatgcattttcgatttacaaagattgaaattcaagaaaaggtgtattaattatatcatatacaactactacacatgcatgcaagccatggttggattttgttacaaaatattgtgtacaaagtgatcaacccctatctgacagttttctcccaaaggacacaccccttgggagacactgcatccattgtatataagagatcctatttgcaataaagttgacaactgtcattccct

SEQ ID NO: 60776 - DNA, 1215 bp, Zea Mays
aaacgacgtgagtttgggattaccggcaggggcaagcatgtgtgcgtgtaaaagatttaggggatgactaagacatcccctgtgaccctgtgagtgattgtggaacgagagagacggatggagtgagcggcccaccgttgagggtggcaaccgactctagaggaggcaagcccttgccatgtaaggaccgagacgggttaacatcgctttgggaatttctgggcataccatacgccttgtgggtaccagttcggaaggtggtctcccgtaagcgacaccacgaactgtggcataaggcgataagtgttaggaacgacgctgatggtgcgccctgtccgcatccgatagactcctcccgagggccctggatgggggagttcacagttctgttgtgtgggagggagtacttcccacagatcttggctcagaaaagtaggtttggtgccgtgagcgggggatttactggatggtgttgtgtcgaggctcggccatgcctccgcttcgtatgggtacagttgtacaacctctgcaaagtgtaaatctatatgtatagtcgtgtccacggtcaaggacgatccaagggacttatttggtgatgtgtgtgtgtgtgtgtgtgtgtttggtgagttaagccaggaaccggtggtgtgagaccggacctcctgacttgtatctaatatactacagcagtattttagataatgtcgcatgcctgctagaaaaccaacagccacctaaactactagattccaccgctgactaaatgctcgggatgttaaggtggcctgcacgcttatcggcaggttcaggagaggacgagccggagtacgacttcgccaacgacgggtggtacgactaggttgcgggtctatgctcaaggatgcctatggaggaccgaagaccgcggctgctactctaagcttctggatgctagaagtactcgtgtgtgtgcgccggcctgcgagccagtgatatttaccccaagtgttaggggatgaaagcaaactatcatgcttaaattttggtatggatgtgatggcaactgggactatcatagttgtgtaaaaacccagttttgtcgtttcaagggtgctctttagtctctagggcccatgtcagctcgtccttttctctgtcatgggggaactccccttcgaagacttgtcgatggcctctagaagcctttctattgggtgctttattttgtcagtaaac

SEQ ID NO: 60777 - DNA, 1488 bp, Zea Mays
cttcgtccgttcagccggcgcaagattttcctgtgtcttagttgttctcatcctctccttagccgccgtacctcactgcgtgatatttttgccgccgcccctgttcgctttatatgcgcgctatgcgtgctcgtgcggcagattgctcggctgtttcgggcagatgctggggcactcgattccctagcgcccagacttccttcttctccctgaagctcgcctagctcggccgtcctccaagtttcgcccagcccagtcgttcctcctatgctcggcgccggatttctgctcgcccggctctgctccttcgcggcggcagcttggaccaggagctggacatcacgtggggcgacggcggggcaaggccctgggcaacgagcggctgctgacactgtcgctggaccggctggtgtcctgctccctcaagccgacagctttatctctgctcgccccggctcctcgcctcatccatggccgagcgccctctgccagctcatggagctccctctgctcctctgccgcgcgctgtcggagctccctgcgctcgcccatggacgcacgcttgctctgtcctgagtttccttgccgcgcgcagcagtgccctctccctgcgttgcacgctcctgcccagtttcctgtgccgcgaccttgtcgagttccatccttgcttcttgctcccggcttcttgtctcttccttggacacctgctctactgcgcaccaggatgcgatgagttcggctctgattcttttccagcggcgcgtagctccttccctagtgttgcgcccttttcttctgctcggacctcgccatggagattcctcgccgcaccgagcgccgtgaaaaccctgtgctcaccatgccgatttcccctgcggcagctttctcgacgtccatttccctgcacgctgtgtcctgctcgatttgccatgccacatcgcgtccctgcacccagcctttagctcaatacctatgctgcgccattggatgctggtcgaactagggacatgcttccttctctgtcatttgaacagcaacccctttgctcctcgccattgcgccgtcgttgcctactatgtcaggacacctcccctcgtgctcagacgctcatcagggaacccgtcgtcgacaactttggttctacgtcgccggatccgtgcttcagacagcaggttcaggagaggacgagccggagtacgacttcgccaacgacgggtggtacgactaggttgcgggtctatgctcaaggatgcctatggaggaccgaagaccgcggctgctactctaagcttctggatgctagaagtactcgtgtgtgtgcgccggcctgcgagccagtgatatttaccccaagtgttaggggatgaaagcaaactatcatgcttaaattttggtatggatgtgatggcaactgggactatcatagttgtgtaaaaacccagttttgtcgtttcaagggtgctctttagtctctagggcccatgtcag

SEQ ID NO: 60778 - DNA, 394 bp, Zea Mays
tccctgttgtttttcaggatataactttgtgctgctgtgatggtgttaagtgccggtgggctcggccttcttatataagttcaggagaggacgagccggagtacgacttcgccaacgacgggtggtacgactaggttgcgggtctatgctcaaggatgcctatggaggaccgaagaccgcggctgctactctaagcttctggatgctagaagtactcgtgtgtgtgcgccggcctgcgagccagtgatatttaccccaagtgttaggggatgaaagcaaactatcatgcttaaattttggtatggatgtgatggcaactgggactatcatagttgtgtaaaaacccagttttgtcgtttcaagggtgctctttagtctctagggcccatgtcag

SEQ ID NO: 60779 - DNA, 1479 bp, Zea Mays
gacaacctcaacccaccccctgagccatggatgaaccacgacttaccacctccaccacctagcccaaatcaccacgatctacccccaccaccaccaccacctaaccacaacccacataacttaccgccaccacctcccaatccaaatccacaaaacccatatccaccgcctgaaccaccagtacctactctagctcagctgatggccaaccagaaccagttcatggaagctatgggcacaccgcacactgctcatagctcaccaagccccacaccacggcgtcaatggctaccgtcgcgatccacacccagaaaccctcactcgcaagatcgaggggttcatcaagctgaggcctcccacctttgacttcactgaagacccactggaagcagaagtctagctaagagaaattgagaagaagctagacctcctgacatgcaccgatgaggaatgtgtggccctcgccactcaccagatgaccggcgctgcacgagcctggtgggacagcttctgtgaaacccatccagaccctgctagcatctcatgggatgagttcaccactgccttccgtgagttctgtgtcccctaaggagatcctggttcacaaggcagaagagtttcgcaagctcaagcaggggactcagcgcgttcaggaatacgcgagtgtgttcaccaagatgatgaggtatgctccagatgagaccagtacagacaagaagaagcagtattggttcaagcaagggctccatcgtgcgctcagaactcacctcgccacccatgactttccctcgctctgccacatggtgagcaaagcaatcgttgttgaaagggagaggttggactatgaggacagtgtggggtttaggaggaagcgcactggtcccccgaaccgcctagggccatctcagcgccctcagaccgggctacaccagtccagcagaggcacaccctgccccagcgctagtgtgcccagccccagctatgggaacaccagttaccagaacccgagctacccaaagccagcagcttcacatcaagcagttagtgtggcaaggccagcagccccggctccgtcctcaggaagctcgttcatcttcacttgcttcgcgtgcagaaacccaggccatcgtgcagcagactgccccagcaggaggcagccagtgtacctgcgtcctagacagtaccagactccggctaagtcaccagcaaccggaggcacccctcaagccagtcaggtgcgtgtacctccgccagcagcaagaggaaggctgaacaacctgaccaccgaggacgctgcagacgcctccgacgtcgcgctcggttaagaacaggtaccatcgaaggagaatcatgaagatgagttcggagagatctaggccgtcgtctcccagtcaactatgttggtgcggaggatcgtcattaacatgtggtgtatcttatttagttattttgtacagaactccgattatttaataaaga

SEQ ID NO: 60780 - DNA, 1543 bp, Zea Mays
agacaacctcaacccaccccctgagccatggatgaaccacgacttaccacctccaccacctagcccaaatcaccacgatctacccccaccaccaccaccacctaaccacaacccacataacttaccgccaccacctcccaatccaaatccacaaaacccatatccaccgcctgaaccaccagtacctactctagctcagctgatggccaaccagaaccagttcatggaagctatgggcacaccgcacactgctcatagctcaccaagccccacaccacggcgtcaatggctaccgtcgcgatccacacccagaaaccctcactcgcaagatcgaggggttcatcaagctgaggcctcccacctttgacttcactgaagacccactggaagcagaagtctagctaagagaaattgagaagaagctagacctcctgacatgcaccgatgaggaatgtgtggccctcgccactcaccagatgaccggcgctgcacgagcctggtgggacagcttctgtgaaacccatccagaccctgctagcatctcatgggatgagttcaccactgccttccgtgagttctgtgtcccctaaggagatcctggttcacaaggcagaagagtttcgcaagctcaagcaggggactcagcgcgttcaggaatacgcgagtgtgttcaccaagatgatgaggtatgctccagatgagaccagtacagacaagaagaagcagtattggttcaagcaagggctccatcgtgcgctcagaactcacctcgccacccatgactttccctcgctctgccacatggtgagcaaagcaatcgttgttgaaagggagaggttggactatgaggacagtgtggggtttaggaggaagcgcactggtcccccgaaccgcctagggccatctcagcgccctcagaccgggctacaccagtccagcagaggcacaccctgccccagcgctagtgtgcccagccccagctatgggaacaccagttaccagaacccgagctacccaaagccagcagcttcacatcaagcagttagtgtggcaaggccagcagccccggctccgtcctcaggaagctcgttcatcttcacttgcttcgcgtgcagaaacccaggccatcgtgcagcagactgccccagcaggaggcagccagtgtacctgcgtcctagacagtaccagactccggctaagtcaccagcaaccggaggcacccctcaagccagtcaggtgcgtgtacctccgccagcagcaagaggaaggctgaacaacctgaccaccgaggacgctgcagacgcctccgacgtcgcgctcgaagcgaggtcacgagagacctgaagaccaaattggagaagtacctggagttgcacccaaaaaggttaagaacaggtaccatcgaaggagaatcatgaagatgagttcggagagatctaggccgtcgtctcccagtcaactatgttggtgcggaggatcgtcattaacatgtggtgtatcttatttagttattttgtacagaactccgattatttaataaaga

SEQ ID NO: 60781 - DNA, 182 bp, Zea Mays
aaagcagtatccaagtcgcgaagcctctgaatcatcactacagatttaatatcatgccataacccttctaaaaatttcatggtgtaatacaagggaacgttaacggtctgataggcattcaattgatcaattaaatgagcaaactgatcgatgtaatctgacacagtttcggtttgtttaag

SEQ ID NO: 60782 - DNA, 994 bp, Zea Mays
cttctctattttagatttgagtgcgggagcatagcgatgtggtcgtacttgaaatggctgggccccgggaatgaggggaatgtggtgatcacagtctctagcaggtggtaacccatgtggaagggcgaagatgtgggaaaacctgcttaggagggactgtagctggaccggcaatggttggagaagtaactggtattgctctggcagatcctccaggttgcacagctcgaggacagaacattgggcactgtcattatggagtccgatcagtttgatagtggaaccctgatagggaatagtaagccacttcgctgcccaatgaaccaaaatggggctataagactccaaccagtccatacccactaccatatcataagatgagagggacaacaccttcagtgtagattaaaattgataatcattaagaaaccagactgcattgactagctctgaggtacatgtcaatcgagaaccatcagctacttgtactgacaacctgtgaggcactgttgtacatccatgaagctgagcagccactgacgcactgatgaatgtgtgagaactgctggaatccaacagaattaatacttcaatgccttgcacagacccgaggaacttgatagttttcggcgctaaggatccatccacagcagcttatgacaagaggatagagttcacttgtgcaggaggaacatcatgactgtcatcagagtcagaaagatccattaactgccacatttcttccaccagatgaagttgaacagtttctgcacatttatgtcctcgagagtactggagaccacacttatagcagaggccttgagctttacggtatgcatagaggttggcgatacgatcagcagtagcaggtttgggtatgtcgaaggacttcttgtcgtccggacgctgaggaggtggaagtcaaccgtcctagactggtgggggaggcagaggccttgagctttacggtatgcatagaggttggcgatacgat

SEQ ID NO: 60783 - DNA, 1036 bp, Zea Mays
aaacttttaataatatcacaacttgcttgattattagttatcctcattagcttgcaagaaattaataataattatatgcttcaaattttaaatacaaacttctggtgctgattcttttgctagcttaggccagtatgccctgtagccagctgtttactacagttcttttagcaataggcaaaatttcaactgctttttaactcacaatgtgttagttggacgttaatattttgtgtcatagtgtacaaagctgctttatgagccgcaatagcacatctaatatctactgtatgcaagataaaattttgtatcatagatatattagtgcagccgatgggtgaggagcggctgtagccctacaggaacccggcaaggacaggccaccgtcccaactcgccttgtcttacctcatcagtcatccctgccctcaccttctcaggcatctccagatacttggaggtatttgggctgataggattggtgatcaagatcattggccctaggctgtcgaccgtgcacacaaggtcatgcatgtattctgtgttgcacttctctgcgtcaaggagcagagcgtgcaacagcctatgatgcggaagatggtgcagatgctcaacgaacttcccaatccagctgcaggcaaggagatgaggttcccgacggcgacgatttttccactacacaatcggattcttcagcagcagatggatctattgaagcgtcgtgtgacgaagtcaccaaagagcagcagcaaacgagatctttgctatgtttccttctccttgctaaccactgatctcatcaagcttggtttttctcattgctatgtttccctctcctggtgatgttaagatatttggacatttctagcttattagggccttgtgtggaacatgtttgaacaattatctcatttaaacaatgtcaacatgtgtgatatatagaaaccgtagcaacgcacgggcacctaattagtagagttttaaattccaaaacttgtaaaatccataacttttgcatagagactccaacttgggtg

SEQ ID NO: 60784 - DNA, 2892 bp, Zea Mays
gtcctcttccacatcggtgtcagcggcgtctctgtcaaggacctccacctccgccgcgttgtccctcccgctgccggctccctcgacacctctccccgcccccatatcctgcgccagcgctgctcatcccgctagcacacgccactgtggatctagatccgacactggctgtgcgggattagtcggcgtgcgtgcttagcagcgtctgccgatggatggagaatggtggaatcgagaaggccggtgtcacccacaagatcgacatcagcgatggccccgtgctcccagtcccgtccgcctcgaatccattcgtttgcctgcacaggagaagaaccacgcgtcgttcgacttcatcttcatggacgccgacaaggacaactaccccgagcgactgctcaagctggtgaggccgggtggcctcatcggctacgacaacatgctgtggaacggctccatcgtgctcctggacgacgcgcccatgcgcaagtacatccgcttctaccgcgacttcgtgctcgccctcaacatggcgctcgccgccgacgagcgcgccgagatctgccagctccctcgttcatgtggtgctgtgtatcggaagaaaatgcgacatcaaacttcgccgccatcgacgcaagcttgggagatgcgacgggggaaggtgtggcggcgcgggggcttgcgacgagaggcgcgcgcgcggcgagctcggccgtggcactgggcttcagcggggaggcggagaagccccgcgaggagggcaagctgatgttgagttcggcggacgaggggcccggcgacgacgacgcagttgaagagccgactccacggacggtgcaattgcgggtacgtggtgcagcccctgtcaccgtccctattcttggaagtggaacggctagcagcccctatcgccgcctttgcctagctccacggctccgcccctgttcttcccatcctttcgaatgctagctgaaggtctattgaatctgggcatggttgattatcttattagtgctattgaactaattatagaaaaggccaaattcagagaatctaatgtttctgctataagaggatatctcaagatccgcaagtattatgatgcattagcagcttttggttgtctcctagagataaacaaccctcagtggatgtatcgttgatacagcatgcttgagaatgtatcgtgtaaaatgacggagtcgatgaaaagtttcgtggttgctagactggcttaaacttttgtagcagtggtgtactagatgtcaatctcattggtctgtatgaatgaagttagcagaatttgggatgctctcttgcttctggagagctgcttaccttcaatgtccaccgtgaatcctcttttgaggctcttgtatatcttgggtagctcgctaatgatcacaatattcttgctgcactttcatatgatgctacatttatcatcacttttaataatttgggagtcttttcagtatttttgtttttcacatactaaaacttttaataatatcacaacttgcttgattattagttatcctcattagcttgcaagaaattaataataattatatgcttcaaattttaaatacaaacttctggtgctgattcttttgctagcttaggccagtatgccctgtagccagctgtttactacagttcttttagcaataggcaaaatttcaactgctttttaactcacaatgtgttagttggacgttaatattttgtgtcatagtgtacaaagctgctttatgagccgcaatagcacatctaatatctactgtatgcaagataaaattttgtatcatagatatattagtgcagccgatgggtgaggagcggctgtagccctacaggaacccggcaaggacaggccaccgtcccaactcgccttgtcttacctcatcagtcatccctgccctcaccttctcaggcatctccagatacttggaggtatttgggctgataggattggtggtgctcttgcatggagttctttgctttcttctagaagccgtgataggagcatcctccaccatgatatccgtgctcaagaagattatgttagcaagcttaccgggcacaaatctgaggactatggcgcatcacagtgtatgtctgcaattgctggctcctatggctatattgctccagattgctatcttgtggatttacaggaatgcatatacccctaaggtcaatgagaagagcatgtctacacctttggtgtcgtgcttcttgagctggtcaccggaaagaagccagtaggtgagttttgggacggcgtcaacattgtccatcgggtcaagtcgatgacaaacacaaacaaggagcaggtgatcaagatcattggccctaggctgtcgaccgtgcacacaaggtcatgcatgtattctgtgttgcacttctctgcgtcaaggagcagagcgtgcaacagcctatgatgcggaagatggtgcagatgctcaacgaacttcccaatccagctgcaggcaaggagatgaggttcccgacggcgacgatttttccactacacaatcggattcttcagcagcagatggatctattgaagcgtcgtgtgacgaagtcaccaaagagcagcagcaaacgagatctttgctatgtttccttctccttgctaaccactgatctcatcaagcttggtttttctcattgctatgtttccctctcctggtgatgttaagatatttggacatttctagcttattagggccttgtgtggaacatgtttgaacaattatctcatttaaacaatgtcaacatgtgtgatatatagaaaccgtagcaacgcacgggcacctaattagtagagttttaaattccaaaacttgtaaaatccataacttttgcatagagactccaacttgggtg

SEQ ID NO: 60785 - DNA, 1808 bp, Zea Mays
gcgtcccctccggaccgtcctcttccacatcggtgtcagcggcgtctctgtcaaggacctccacctccgccgcgttgtccctcccgctgccggctccctcgacacctctccccgcccccatatcctgcgccagcgctgctcatcccgctagcacacgccactgtggatctagatccgacactggctgtgcgggattagtcggcgtgcgtgcttagcagcgtctgccgatggatggagaatggtggaatcgagaaggccggtgtcacccacaagatcgacatcagcgatggccccgtgctcccagtcccgtccgcctcgaatccattcgtttgcctgcacaggagaagaaccacgcgtcgttcgacttcatcttcatggacgccgacaaggacaactaccccgagcgactgctcaagctggtgaggccgggtggcctcatcggctacgacaacatgctgtggaacggctccatcgtgctcctggacgacgcgcccatgcgcaagtacatccgcttctaccgcgacttcgtgctcgccctcaacatggcgctcgccgccgacgagcgcgccgagatctgccagctccctcgttcatgtggtgctgtgtatcggaagaaaatgcgacatcaaacttcgccgccatcgacgcaagcttgggagatgcgacgggggaaggtgtggcggcgcgggggcttgcgacgagaggcgcgcgcgcggcgagctcggccgtggcactgggcttcagcggggaggcggagaagccccgcgaggagggcaagctgatgttgagttcggcggacgaggggcccggcgacgacgacgcagttgaagagccgactccacggacggtgcaattgcggatacttggaggtatttgggctgataggattggtggtgctcttgcatggagttctttgctttcttctagaagccgtgataggagcatcctccaccatgatatccgtgctcaagaagattatgttagcaagcttaccgggcacaaatctgaggactatggcgcatcacagtgtatgtctgcaattgctggctcctatggctatattgctccagattgctatcttgtggatttacaggaatgcatatacccctaaggtcaatgagaagagcatgtctacacctttggtgtcgtgcttcttgagctggtcaccggaaagaagccagtaggtgagttttgggacggcgtcaacattgtccatcgggtcaagtcgatgacaaacacaaacaaggagcaggtgatcaagatcattggccctaggctgtcgaccgtgcacacaaggtcatgcatgtattctgtgttgcacttctctgcgtcaaggagcagagcgtgcaacagcctatgatgcggaagatggtgcagatgctcaacgaacttcccaatccagctgcaggcaaggagatgaggttcccgacggcgacgatttttccactacacaatcggattcttcagcagcagatggatctattgaagcgtcgtgtgacgaagtcaccaaagagcagcagcaaacgagatctttgctatgtttccttctccttgctaaccactgatctcatcaagcttggtttttctcattgctatgtttccctctcctggtgatgttaagatatttggacatttctagcttattagggccttgtgtggaacatgtttgaacaattatctcatttaaacaatgtcaacatgtgtgatatatagaaaccgtagcaacgcacgggcacctaattagtagagttttaaattccaaaacttgtaaaatccataacttttgcatagagactccaacttgggtg

SEQ ID NO: 60786 - DNA, 2002 bp, Zea Mays
ctctgcgtcccctccggaccgtcctcttccacatcggtgtcagcggcgtctctgtcaaggacctccacctccgccgcgttgtccctcccgctgccggctccctcgacacctctccccgcccccatatcctgcgccagcgctgctcatcccgctagcacacgccactgtggatctagatccgacactggctgtgcgggattagtcggcgtgcgtgcttagcagcgtctgccgatggatggagaatggtggaatcgagaaggccggtgtcacccacaagatcgacatcagcgatggccccgtgctcccagtcccgtccgcctcgaatccattcgtttgcctgcacaggagaagaaccacgcgtcgttcgacttcatcttcatggacgccgacaaggacaactaccccgagcgactgctcaagctggtgaggccgggtggcctcatcggctacgacaacatgctgtggaacggctccatcgtgctcctggacgacgcgcccatgcgcaagtacatccgcttctaccgcgacttcgtgctcgccctcaacatggcgctcgccgccgacgagcgcgccgagatctgccagctccctcgttcatgtggtgctgtgtatcggaagaaaatgcgacatcaaacttcgccgccatcgacgcaagcttgggagatgcgacgggggaaggtgtggcggcgcgggggcttgcgacgagaggcgcgcgcgcggcgagctcggccgtggcactgggcttcagcggggaggcggagaagccccgcgaggagggcaagctgatgttgagttcggcggacgaggggcccggcgacgacgacgcagttgaagagccgactccacggacggtgcaattgcggataaaattttgtatcatagatatattagtgcagccgatgggtgaggagcggctgtagccctacaggaacccggcaaggacaggccaccgtcccaactcgccttgtcttacctcatcagtcatccctgccctcaccttctcaggcatctccagatacttggaggtatttgggctgataggattggtgatctaggatgcaagtcgttgtaaaagaataagaactatggaaagccatcgcatgcgtgtaggtgctcttgcatggagttctttgctttcttctagaagccgtgataggagcatcctccaccatgatatccgtgctcaagaagattatgttagcaagcttaccgggcacaaatctgaggactatggcgcatcacagtgtatgtctgcaattgctggctcctatggctatattgctccaggaatgcatatacccctaaggtcaatgagaagagcatgtctacacctttggtgtcgtgcttcttgagctggtcaccggaaagaagccagtaggtgagttttgggacggcgtcaacattgtccatcgggtcaagtcgatgacaaacacaaacaaggagcaggtgatcaagatcattggccctaggctgtcgaccgtgcacacaaggtcatgcatgtattctgtgttgcacttctctgcgtcaaggagcagagcgtgcaacagcctatgatgcggaagatggtgcagatgctcaacgaacttcccaatccagctgcaggcaaggagatgaggttcccgacggcgacgatttttccactacacaatcggattcttcagcagcagatggatctattgaagcgtcgtgtgacgaagtcaccaaagagcagcagcaaacgagatctttgctatgtttccttctccttgctaaccactgatctcatcaagcttggtttttctcattgctatgtttccctctcctggtgatgttaagatatttggacatttctagcttattagggccttgtgtggaacatgtttgaacaattatctcatttaaacaatgtcaacatgtgtgatatatagaaaccgtagcaacgcacgggcacctaattagtagagttttaaattccaaaacttgtaaaatccataacttttgcatagagactccaacttgggtg

SEQ ID NO: 60787 - DNA, 1789 bp, Zea Mays
ctctgcgtcccctccggaccgtcctcttccacatcggtgtcagcggcgtctctgtcaaggacctccacctccgccgcgttgtccctcccgctgccggctccctcgacacctctccccgcccccatatcctgcgccagcgctgctcatcccgctagcacacgccactgtggatctagatccgacactggctgtgcgggattagtcggcgtgcgtgcttagcagcgtctgccgatggatggagaatggtggaatcgagaaggccggtgtcacccacaagatcgacatcagcgatggccccgtgctcccagtcccgtccgcctcgaatccattcgtttgcctgcacaggagaagaaccacgcgtcgttcgacttcatcttcatggacgccgacaaggacaactaccccgagcgactgctcaagctggtgaggccgggtggcctcatcggctacgacaacatgctgtggaacggctccatcgtgctcctggacgacgcgcccatgcgcaagtacatccgcttctaccgcgacttcgtgctcgccctcaacatggcgctcgccgccgacgagcgcgccgagatctgccagctccctcgttcatgtggtgctgtgtatcggaagaaaatgcgacatcaaacttcgccgccatcgacgcaagcttgggagatgcgacgggggaaggtgtggcggcgcgggggcttgcgacgagaggcgcgcgcgcggcgagctcggccgtggcactgggcttcagcggggaggcggagaagccccgcgaggagggcaagctgatgttgagttcggcggacgaggggcccggcgacgacgacgcagttgaagagccgactccacggacggtgcaattgcggatacttggaggtatttgggctgataggattggtggtgctcttgcatggagttctttgctttcttctagaagccgtgataggagcatcctccaccatgatatccgtgctcaagaagattatgttagcaagcttaccgggcacaaatctgaggactatggcgcatcacagtgtatgtctgcaattgctggctcctatggctatattgctccaggaatgcatatacccctaaggtcaatgagaagagcatgtctacacctttggtgtcgtgcttcttgagctggtcaccggaaagaagccagtaggtgagttttgggacggcgtcaacattgtccatcgggtcaagtcgatgacaaacacaaacaaggagcaggtgatcaagatcattggccctaggctgtcgaccgtgcacacaaggtcatgcatgtattctgtgttgcacttctctgcgtcaaggagcagagcgtgcaacagcctatgatgcggaagatggtgcagatgctcaacgaacttcccaatccagctgcaggcaaggagatgaggttcccgacggcgacgatttttccactacacaatcggattcttcagcagcagatggatctattgaagcgtcgtgtgacgaagtcaccaaagagcagcagcaaacgagatctttgctatgtttccttctccttgctaaccactgatctcatcaagcttggtttttctcattgctatgtttccctctcctggtgatgttaagatatttggacatttctagcttattagggccttgtgtggaacatgtttgaacaattatctcatttaaacaatgtcaacatgtgtgatatatagaaaccgtagcaacgcacgggcacctaattagtagagttttaaattccaaaacttgtaaaatccataacttttgcatagagactccaacttgggtg

SEQ ID NO: 60788 - DNA, 1941 bp, Zea Mays
ctctgcgtcccctccggaccgtcctcttccacatcggtgtcagcggcgtctctgtcaaggacctccacctccgccgcgttgtccctcccgctgccggctccctcgacacctctccccgcccccatatcctgcgccagcgctgctcatcccgctagcacacgccactgtggatctagatccgacactggctgtgcgggattagtcggcgtgcgtgcttagcagcgtctgccgatggatggagaatggtggaatcgagaaggccggtgtcacccacaagatcgacatcagcgatggccccgtgctcccagtcccgtccgcctcgaatccattcgtttgcctgcacaggagaagaaccacgcgtcgttcgacttcatcttcatggacgccgacaaggacaactaccccgagcgactgctcaagctggtgaggccgggtggcctcatcggctacgacaacatgctgtggaacggctccatcgtgctcctggacgacgcgcccatgcgcaagtacatccgcttctaccgcgacttcgtgctcgccctcaacatggcgctcgccgccgacgagcgcgccgagatctgccagctccctcgttcatgtggtgctgtgtatcggaagaaaatgcgacatcaaacttcgccgccatcgacgcaagcttgggagatgcgacgggggaaggtgtggcggcgcgggggcttgcgacgagaggcgcgcgcgcggcgagctcggccgtggcactgggcttcagcggggaggcggagaagccccgcgaggagggcaagctgatgttgagttcggcggacgaggggcccggcgacgacgacgcagttgaagagccgactccacggacggtgcaattgcggataaaattttgtatcatagatatattagtgcagccgatgggtgaggagcggctgtagccctacaggaacccggcaaggacaggccaccgtcccaactcgccttgtcttacctcatcagtcatccctgccctcaccttctcaggcatctccagatacttggaggtatttgggctgataggattggtggtgctcttgcatggagttctttgctttcttctagaagccgtgataggagcatcctccaccatgatatccgtgctcaagaagattatgttagcaagcttaccgggcacaaatctgaggactatggcgcatcacagtgtatgtctgcaattgctggctcctatggctatattgctccaggaatgcatatacccctaaggtcaatgagaagagcatgtctacacctttggtgtcgtgcttcttgagctggtcaccggaaagaagccagtaggtgagttttgggacggcgtcaacattgtccatcgggtcaagtcgatgacaaacacaaacaaggagcaggtgatcaagatcattggccctaggctgtcgaccgtgcacacaaggtcatgcatgtattctgtgttgcacttctctgcgtcaaggagcagagcgtgcaacagcctatgatgcggaagatggtgcagatgctcaacgaacttcccaatccagctgcaggcaaggagatgaggttcccgacggcgacgatttttccactacacaatcggattcttcagcagcagatggatctattgaagcgtcgtgtgacgaagtcaccaaagagcagcagcaaacgagatctttgctatgtttccttctccttgctaaccactgatctcatcaagcttggtttttctcattgctatgtttccctctcctggtgatgttaagatatttggacatttctagcttattagggccttgtgtggaacatgtttgaacaattatctcatttaaacaatgtcaacatgtgtgatatatagaaaccgtagcaacgcacgggcacctaattagtagagttttaaattccaaaacttgtaaaatccataacttttgcatagagactccaacttgggtg

SEQ ID NO: 60789 - DNA, 1929 bp, Zea Mays
ctggtacctctgcgtcccctccggaccgtcctcttccacatcggtgtcagcggcgtctctgtcaaggacctccacctccgccgcgttgtccctcccgctgccggctccctcgacacctctccccgcccccatatcctgcgccagcgctgctcatcccgctagcacacgccactgtggatctagatccgacactggctgtgcgggattagtcggcgtgcgtgcttagcagcgtctgccgatggatggagaatggtggaatcgagaaggccggtgtcacccacaagatcgacatcagcgatggccccgtgctcccagtcccgtccgcctcgaatccattcgtttgcctgcacaggagaagaaccacgcgtcgttcgacttcatcttcatggacgccgacaaggacaactaccccgagcgactgctcaagctggtgaggccgggtggcctcatcggctacgacaacatgctgtggaacggctccatcgtgctcctggacgacgcgcccatgcgcaagtacatccgcttctaccgcgacttcgtgctcgccctcaacatggcgctcgccgccgacgagcgcgccgagatctgccagctccctcgttcatgtggtgctgtgtatcggaagaaaatgcgacatcaaacttcgccgccatcgacgcaagcttgggagatgcgacgggggaaggtgtggcggcgcgggggcttgcgacgagaggcgcgcgcgcggcgagctcggccgtggcactgggcttcagcggggaggcggagaagccccgcgaggagggcaagctgatgttgagttcggcggacgaggggcccggcgacgacgacgcagttgaagagccgactccacggacggtgcaattgcggatatattagtgcagccgatgggtgaggagcggctgtagccctacaggaacccggcaaggacaggccaccgtcccaactcgccttgtcttacctcatcagtcatccctgccctcaccttctcaggcatctccagatacttggaggtatttgggctgataggattggtggtgctcttgcatggagttctttgctttcttctagaagccgtgataggagcatcctccaccatgatatccgtgctcaagaagattatgttagcaagcttaccgggcacaaatctgaggactatggcgcatcacagtgtatgtctgcaattgctggctcctatggctatattgctccaggaatgcatatacccctaaggtcaatgagaagagcatgtctacacctttggtgtcgtgcttcttgagctggtcaccggaaagaagccagtaggtgagttttgggacggcgtcaacattgtccatcgggtcaagtcgatgacaaacacaaacaaggagcaggtgatcaagatcattggccctaggctgtcgaccgtgcacacaaggtcatgcatgtattctgtgttgcacttctctgcgtcaaggagcagagcgtgcaacagcctatgatgcggaagatggtgcagatgctcaacgaacttcccaatccagctgcaggcaaggagatgaggttcccgacggcgacgatttttccactacacaatcggattcttcagcagcagatggatctattgaagcgtcgtgtgacgaagtcaccaaagagcagcagcaaacgagatctttgctatgtttccttctccttgctaaccactgatctcatcaagcttggtttttctcattgctatgtttccctctcctggtgatgttaagatatttggacatttctagcttattagggccttgtgtggaacatgtttgaacaattatctcatttaaacaatgtcaacatgtgtgatatatagaaaccgtagcaacgcacgggcacctaattagtagagttttaaattccaaaacttgtaaaatccataacttttgcatagagactccaacttgggtg

SEQ ID NO: 60790 - DNA, 1884 bp, Zea Mays
gccgctggtacctctgcgtcccctccggaccgtcctcttccacatcggtgtcagcggcgtctctgtcaaggacctccacctccgccgcgttgtccctcccgctgccggctccctcgacacctctccccgcccccatatcctgcgccagcgctgctcatcccgctagcacacgccactgtggatctagatccgacactggctgtgcgggattagtcggcgtgcgtgcttagcagcgtctgccgatggatggagaatggtggaatcgagaaggccggtgtcacccacaagatcgacatcagcgatggccccgtgctcccagtcccgtccgcctcgaatccattcgtttgcctgcacaggagaagaaccacgcgtcgttcgacttcatcttcatggacgccgacaaggacaactaccccgagcgactgctcaagctggtgaggccgggtggcctcatcggctacgacaacatgctgtggaacggctccatcgtgctcctggacgacgcgcccatgcgcaagtacatccgcttctaccgcgacttcgtgctcgccctcaacatggcgctcgccgccgacgagcgcgccgagatctgccagctccctcgttcatgtggtgctgtgtatcggaagaaaatgcgacatcaaacttcgccgccatcgacgcaagcttgggagatgcgacgggggaaggtgtggcggcgcgggggcttgcgacgagaggcgcgcgcgcggcgagctcggccgtggcactgggcttcagcggggaggcggagaagccccgcgaggagggcaagctgatgttgagttcggcggacgaggggcccggcgacgacgacgcagttgaagagccgactccacggacggtgcaattgcggatacttggaggtatttgggctgataggattggtgatctaggatgcaagtcgttgtaaaagaataagaactatggaaagccatcgcatgcgtgtaggtgctcttgcatggagttctttgctttcttctagaagccgtgataggagcatcctccaccatgatatccgtgctcaagaagattatgttagcaagcttaccgggcacaaatctgaggactatggcgcatcacagtgtatgtctgcaattgctggctcctatggctatattgctccagattgctatcttgtggatttacaggaatgcatatacccctaaggtcaatgagaagagcatgtctacacctttggtgtcgtgcttcttgagctggtcaccggaaagaagccagtaggtgagttttgggacggcgtcaacattgtccatcgggtcaagtcgatgacaaacacaaacaaggagcaggtgatcaagatcattggccctaggctgtcgaccgtgcacacaaggtcatgcatgtattctgtgttgcacttctctgcgtcaaggagcagagcgtgcaacagcctatgatgcggaagatggtgcagatgctcaacgaacttcccaatccagctgcaggcaaggagatgaggttcccgacggcgacgatttttccactacacaatcggattcttcagcagcagatggatctattgaagcgtcgtgtgacgaagtcaccaaagagcagcagcaaacgagatctttgctatgtttccttctccttgctaaccactgatctcatcaagcttggtttttctcattgctatgtttccctctcctggtgatgttaagatatttggacatttctagcttattagggccttgtgtggaacatgtttgaacaattatctcatttaaacaatgtcaacatgtgtgatatatagaaaccgtagcaacgcacgggcacctaattagtagagttttaaattccaaaacttgtaaaatccataacttttgcatagagactccaacttgggtg

SEQ ID NO: 60791 - DNA, 2900 bp, Zea Mays
gccgctggtacctctgcgtcccctccggaccgtcctcttccacatcggtgtcagcggcgtctctgtcaaggacctccacctccgccgcgttgtccctcccgctgccggctccctcgacacctctccccgcccccatatcctgcgccagcgctgctcatcccgctagcacacgccactgtggatctagatccgacactggctgtgcgggattagtcggcgtgcgtgcttagcagcgtctgccgatggatggagaatggtggaatcgagaaggccggtgtcacccacaagatcgacatcagcgatggccccgtgctcccagtcccgtccgcctcgaatccattcgtttgcctgcacaggagaagaaccacgcgtcgttcgacttcatcttcatggacgccgacaaggacaactaccccgagcgactgctcaagctggtgaggccgggtggcctcatcggctacgacaacatgctgtggaacggctccatcgtgctcctggacgacgcgcccatgcgcaagtacatccgcttctaccgcgacttcgtgctcgccctcaacatggcgctcgccgccgacgagcgcgccgagatctgccagctccctcgttcatgtggtgctgtgtatcggaagaaaatgcgacatcaaacttcgccgccatcgacgcaagcttgggagatgcgacgggggaaggtgtggcggcgcgggggcttgcgacgagaggcgcgcgcgcggcgagctcggccgtggcactgggcttcagcggggaggcggagaagccccgcgaggagggcaagctgatgttgagttcggcggacgaggggcccggcgacgacgacgcagttgaagagccgactccacggacggtgcaattgcgggtacgtggtgcagcccctgtcaccgtccctattcttggaagtggaacggctagcagcccctatcgccgcctttgcctagctccacggctccgcccctgttcttcccatcctttcgaatgctagctgaaggtctattgaatctgggcatggttgattatcttattagtgctattgaactaattatagaaaaggccaaattcagagaatctaatgtttctgctataagaggatatctcaagatccgcaagtattatgatgcattagcagcttttggttgtctcctagagataaacaaccctcagtggatgtatcgttgatacagcatgcttgagaatgtatcgtgtaaaatgacggagtcgatgaaaagtttcgtggttgctagactggcttaaacttttgtagcagtggtgtactagatgtcaatctcattggtctgtatgaatgaagttagcagaatttgggatgctctcttgcttctggagagctgcttaccttcaatgtccaccgtgaatcctcttttgaggctcttgtatatcttgggtagctcgctaatgatcacaatattcttgctgcactttcatatgatgctacatttatcatcacttttaataatttgggagtcttttcagtatttttgtttttcacatactaaaacttttaataatatcacaacttgcttgattattagttatcctcattagcttgcaagaaattaataataattatatgcttcaaattttaaatacaaacttctggtgctgattcttttgctagcttaggccagtatgccctgtagccagctgtttactacagttcttttagcaataggcaaaatttcaactgctttttaactcacaatgtgttagttggacgttaatattttgtgtcatagtgtacaaagctgctttatgagccgcaatagcacatctaatatctactgtatgcaagataaaattttgtatcatagatatattagtgcagccgatgggtgaggagcggctgtagccctacaggaacccggcaaggacaggccaccgtcccaactcgccttgtcttacctcatcagtcatccctgccctcaccttctcaggcatctccagatacttggaggtatttgggctgataggattggtggtgctcttgcatggagttctttgctttcttctagaagccgtgataggagcatcctccaccatgatatccgtgctcaagaagattatgttagcaagcttaccgggcacaaatctgaggactatggcgcatcacagtgtatgtctgcaattgctggctcctatggctatattgctccaggaatgcatatacccctaaggtcaatgagaagagcatgtctacacctttggtgtcgtgcttcttgagctggtcaccggaaagaagccagtaggtgagttttgggacggcgtcaacattgtccatcgggtcaagtcgatgacaaacacaaacaaggagcaggtgatcaagatcattggccctaggctgtcgaccgtgcacacaaggtcatgcatgtattctgtgttgcacttctctgcgtcaaggagcagagcgtgcaacagcctatgatgcggaagatggtgcagatgctcaacgaacttcccaatccagctgcaggcaaggagatgaggttcccgacggcgacgatttttccactacacaatcggattcttcagcagcagatggatctattgaagcgtcgtgtgacgaagtcaccaaagagcagcagcaaacgagatctttgctatgtttccttctccttgctaaccactgatctcatcaagcttggtttttctcattgctatgtttccctctcctggtgatgttaagatatttggacatttctagcttattagggccttgtgtggaacatgtttgaacaattatctcatttaaacaatgtcaacatgtgtgatatatagaaaccgtagcaacgcacgggcacctaattagtagagttttaaattccaaaacttgtaaaatccataacttttgcatagagactccaacttgggtg

SEQ ID NO: 60792 - DNA, 1917 bp, Zea Mays
gccgctggtacctctgcgtcccctccggaccgtcctcttccacatcggtgtcagcggcgtctctgtcaaggacctccacctccgccgcgttgtccctcccgctgccggctccctcgacacctctccccgcccccatatcctgcgccagcgctgctcatcccgctagcacacgccactgtggatctagatccgacactggctgtgcgggattagtcggcgtgcgtgcttagcagcgtctgccgatggatggagaatggtggaatcgagaaggccggtgtcacccacaagatcgacatcagcgatggccccgtgctcccagtcccgtccgcctcgaatccattcgtttgcctgcacaggagaagaaccacgcgtcgttcgacttcatcttcatggacgccgacaaggacaactaccccgagcgactgctcaagctggtgaggccgggtggcctcatcggctacgacaacatgctgtggaacggctccatcgtgctcctggacgacgcgcccatgcgcaagtacatccgcttctaccgcgacttcgtgctcgccctcaacatggcgctcgccgccgacgagcgcgccgagatctgccagctccctcgttcatgtggtgctgtgtatcggaagaaaatgcgacatcaaacttcgccgccatcgacgcaagcttgggagatgcgacgggggaaggtgtggcggcgcgggggcttgcgacgagaggcgcgcgcgcggcgagctcggccgtggcactgggcttcagcggggaggcggagaagccccgcgaggagggcaagctgatgttgagttcggcggacgaggggcccggcgacgacgacgcagttgaagagccgactccacggacggtgcaattgcggatatattagtgcagccgatgggtgaggagcggctgtagccctacaggaacccggcaaggacaggccaccgtcccaactcgccttgtcttacctcatcagtcatccctgccctcaccttctcaggcatctccagatacttggaggtatttgggctgataggattggtgatctaggatgcaagtcgttgtaaaagaataagaactatggaaagccatcgcatgcgtgtaggtgctcttgcatggagttctttgctttcttctagaagccgtgataggagcatcctccaccatgatatccgtgctcaagaagattatgttagcaagcttaccgggcacaaatctgaggactatggcgcatcacagtgtatgtctgcaattgctggctcctatggctatattgctccaggaatgcatatacccctaaggtcaatgagaagagcatgtctacacctttggtgtcgtgcttcttgagctggtcaccggaaagaagccagtagatcattggccctaggctgtcgaccgtgcacacaaggtcatgcatgtattctgtgttgcacttctctgcgtcaaggagcagagcgtgcaacagcctatgatgcggaagatggtgcagatgctcaacgaacttcccaatccagctgcaggcaaggagatgaggttcccgacggcgacgatttttccactacacaatcggattcttcagcagcagatggatctattgaagcgtcgtgtgacgaagtcaccaaagagcagcagcaaacgagatctttgctatgtttccttctccttgctaaccactgatctcatcaagcttggtttttctcattgctatgtttccctctcctggtgatgttaagatatttggacatttctagcttattagggccttgtgtggaacatgtttgaacaattatctcatttaaacaatgtcaacatgtgtgatatatagaaaccgtagcaacgcacgggcacctaattagtagagttttaaattccaaaacttgtaaaatccataacttttgcatagagactccaacttgggtg

SEQ ID NO: 60793 - DNA, 1956 bp, Zea Mays
gccgctggtacctctgcgtcccctccggaccgtcctcttccacatcggtgtcagcggcgtctctgtcaaggacctccacctccgccgcgttgtccctcccgctgccggctccctcgacacctctccccgcccccatatcctgcgccagcgctgctcatcccgctagcacacgccactgtggatctagatccgacactggctgtgcgggattagtcggcgtgcgtgcttagcagcgtctgccgatggatggagaatggtggaatcgagaaggccggtgtcacccacaagatcgacatcagcgatggccccgtgctcccagtcccgtccgcctcgaatccattcgtttgcctgcacaggagaagaaccacgcgtcgttcgacttcatcttcatggacgccgacaaggacaactaccccgagcgactgctcaagctggtgaggccgggtggcctcatcggctacgacaacatgctgtggaacggctccatcgtgctcctggacgacgcgcccatgcgcaagtacatccgcttctaccgcgacttcgtgctcgccctcaacatggcgctcgccgccgacgagcgcgccgagatctgccagctccctcgttcatgtggtgctgtgtatcggaagaaaatgcgacatcaaacttcgccgccatcgacgcaagcttgggagatgcgacgggggaaggtgtggcggcgcgggggcttgcgacgagaggcgcgcgcgcggcgagctcggccgtggcactgggcttcagcggggaggcggagaagccccgcgaggagggcaagctgatgttgagttcggcggacgaggggcccggcgacgacgacgcagttgaagagccgactccacggacggtgcaattgcggatatattagtgcagccgatgggtgaggagcggctgtagccctacaggaacccggcaaggacaggccaccgtcccaactcgccttgtcttacctcatcagtcatccctgccctcaccttctcaggcatctccagatacttggaggtatttgggctgataggattggtggtgctcttgcatggagttctttgctttcttctagaagccgtgataggagcatcctccaccatgatatccgtgctcaagaagattatgttagcaagcttaccgggcacaaatctgaggactatggcgcatcacagtgtatgtctgcaattgctggctcctatggctatattgctccagattgctatcttgtggatttacaggaatgcatatacccctaaggtcaatgagaagagcatgtctacacctttggtgtcgtgcttcttgagctggtcaccggaaagaagccagtaggtgagttttgggacggcgtcaacattgtccatcgggtcaagtcgatgacaaacacaaacaaggagcaggtgatcaagatcattggccctaggctgtcgaccgtgcacacaaggtcatgcatgtattctgtgttgcacttctctgcgtcaaggagcagagcgtgcaacagcctatgatgcggaagatggtgcagatgctcaacgaacttcccaatccagctgcaggcaaggagatgaggttcccgacggcgacgatttttccactacacaatcggattcttcagcagcagatggatctattgaagcgtcgtgtgacgaagtcaccaaagagcagcagcaaacgagatctttgctatgtttccttctccttgctaaccactgatctcatcaagcttggtttttctcattgctatgtttccctctcctggtgatgttaagatatttggacatttctagcttattagggccttgtgtggaacatgtttgaacaattatctcatttaaacaatgtcaacatgtgtgatatatagaaaccgtagcaacgcacgggcacctaattagtagagttttaaattccaaaacttgtaaaatccataacttttgcatagagactccaacttgggtg

SEQ ID NO: 60794 - DNA, 2017 bp, Zea Mays
gccgctggtacctctgcgtcccctccggaccgtcctcttccacatcggtgtcagcggcgtctctgtcaaggacctccacctccgccgcgttgtccctcccgctgccggctccctcgacacctctccccgcccccatatcctgcgccagcgctgctcatcccgctagcacacgccactgtggatctagatccgacactggctgtgcgggattagtcggcgtgcgtgcttagcagcgtctgccgatggatggagaatggtggaatcgagaaggccggtgtcacccacaagatcgacatcagcgatggccccgtgctcccagtcccgtccgcctcgaatccattcgtttgcctgcacaggagaagaaccacgcgtcgttcgacttcatcttcatggacgccgacaaggacaactaccccgagcgactgctcaagctggtgaggccgggtggcctcatcggctacgacaacatgctgtggaacggctccatcgtgctcctggacgacgcgcccatgcgcaagtacatccgcttctaccgcgacttcgtgctcgccctcaacatggcgctcgccgccgacgagcgcgccgagatctgccagctccctcgttcatgtggtgctgtgtatcggaagaaaatgcgacatcaaacttcgccgccatcgacgcaagcttgggagatgcgacgggggaaggtgtggcggcgcgggggcttgcgacgagaggcgcgcgcgcggcgagctcggccgtggcactgggcttcagcggggaggcggagaagccccgcgaggagggcaagctgatgttgagttcggcggacgaggggcccggcgacgacgacgcagttgaagagccgactccacggacggtgcaattgcggatatattagtgcagccgatgggtgaggagcggctgtagccctacaggaacccggcaaggacaggccaccgtcccaactcgccttgtcttacctcatcagtcatccctgccctcaccttctcaggcatctccagatacttggaggtatttgggctgataggattggtgatctaggatgcaagtcgttgtaaaagaataagaactatggaaagccatcgcatgcgtgtaggtgctcttgcatggagttctttgctttcttctagaagccgtgataggagcatcctccaccatgatatccgtgctcaagaagattatgttagcaagcttaccgggcacaaatctgaggactatggcgcatcacagtgtatgtctgcaattgctggctcctatggctatattgctccagattgctatcttgtggatttacaggaatgcatatacccctaaggtcaatgagaagagcatgtctacacctttggtgtcgtgcttcttgagctggtcaccggaaagaagccagtaggtgagttttgggacggcgtcaacattgtccatcgggtcaagtcgatgacaaacacaaacaaggagcaggtgatcaagatcattggccctaggctgtcgaccgtgcacacaaggtcatgcatgtattctgtgttgcacttctctgcgtcaaggagcagagcgtgcaacagcctatgatgcggaagatggtgcagatgctcaacgaacttcccaatccagctgcaggcaaggagatgaggttcccgacggcgacgatttttccactacacaatcggattcttcagcagcagatggatctattgaagcgtcgtgtgacgaagtcaccaaagagcagcagcaaacgagatctttgctatgtttccttctccttgctaaccactgatctcatcaagcttggtttttctcattgctatgtttccctctcctggtgatgttaagatatttggacatttctagcttattagggccttgtgtggaacatgtttgaacaattatctcatttaaacaatgtcaacatgtgtgatatatagaaaccgtagcaacgcacgggcacctaattagtagagttttaaattccaaaacttgtaaaatccataacttttgcatagagactccaacttgggtg

SEQ ID NO: 60795 - DNA, 2984 bp, Zea Mays
gccgctggtacctctgcgtcccctccggaccgtcctcttccacatcggtgtcagcggcgtctctgtcaaggacctccacctccgccgcgttgtccctcccgctgccggctccctcgacacctctccccgcccccatatcctgcgccagcgctgctcatcccgctagcacacgccactgtggatctagatccgacactggctgtgcgggattagtcggcgtgcgtgcttagcagcgtctgccgatggatggagaatggtggaatcgagaaggccggtgtcacccacaagatcgacatcagcgatggccccgtgctcccagtcccgtccgcctcgaatccattcgtttgcctgcacaggagaagaaccacgcgtcgttcgacttcatcttcatggacgccgacaaggacaactaccccgagcgactgctcaagctggtgaggccgggtggcctcatcggctacgacaacatgctgtggaacggctccatcgtgctcctggacgacgcgcccatgcgcaagtacatccgcttctaccgcgacttcgtgctcgccctcaacatggcgctcgccgccgacgagcgcgccgagatctgccagctccctcgttcatgtggtgctgtgtatcggaagaaaatgcgacatcaaacttcgccgccatcgacgcaagcttgggagatgcgacgggggaaggtgtggcggcgcgggggcttgcgacgagaggcgcgcgcgcggcgagctcggccgtggcactgggcttcagcggggaggcggagaagccccgcgaggagggcaagctgatgttgagttcggcggacgaggggcccggcgacgacgacgcagttgaagagccgactccacggacggtgcaattgcgggtacgtggtgcagcccctgtcaccgtccctattcttggaagtggaacggctagcagcccctatcgccgcctttgcctagctccacggctccgcccctgttcttcccatcctttcgaatgctagctgaaggtctattgaatctgggcatggttgattatcttattagtgctattgaactaattatagaaaaggccaaattcagagaatctaatgtttctgctataagaggatatctcaagatccgcaagtattatgatgcattagcagcttttggttgtctcctagagataaacaaccctcagtggatgtatcgttgatacagcatgcttgagaatgtatcgtgtaaaatgacggagtcgatgaaaagtttcgtggttgctagactggcttaaacttttgtagcagtggtgtactagatgtcaatctcattggtctgtatgaatgaagttagcagaatttgggatgctctcttgcttctggagagctgcttaccttcaatgtccaccgtgaatcctcttttgaggctcttgtatatcttgggtagctcgctaatgatcacaatattcttgctgcactttcatatgatgctacatttatcatcacttttaataatttgggagtcttttcagtatttttgtttttcacatactaaaacttttaataatatcacaacttgcttgattattagttatcctcattagcttgcaagaaattaataataattatatgcttcaaattttaaatacaaacttctggtgctgattcttttgctagcttaggccagtatgccctgtagccagctgtttactacagttcttttagcaataggcaaaatttcaactgctttttaactcacaatgtgttagttggacgttaatattttgtgtcatagtgtacaaagctgctttatgagccgcaatagcacatctaatatctactgtatgcaagataaaattttgtatcatagatatattagtgcagccgatgggtgaggagcggctgtagccctacaggaacccggcaaggacaggccaccgtcccaactcgccttgtcttacctcatcagtcatccctgccctcaccttctcaggcatctccagatacttggaggtatttgggctgataggattggtgatctaggatgcaagtcgttgtaaaagaataagaactatggaaagccatcgcatgcgtgtaggtgctcttgcatggagttctttgctttcttctagaagccgtgataggagcatcctccaccatgatatccgtgctcaagaagattatgttagcaagcttaccgggcacaaatctgaggactatggcgcatcacagtgtatgtctgcaattgctggctcctatggctatattgctccagattgctatcttgtggatttacaggaatgcatatacccctaaggtcaatgagaagagcatgtctacacctttggtgtcgtgcttcttgagctggtcaccggaaagaagccagtaggtgagttttgggacggcgtcaacattgtccatcgggtcaagtcgatgacaaacacaaacaaggagcaggtgatcaagatcattggccctaggctgtcgaccgtgcacacaaggtcatgcatgtattctgtgttgcacttctctgcgtcaaggagcagagcgtgcaacagcctatgatgcggaagatggtgcagatgctcaacgaacttcccaatccagctgcaggcaaggagatgaggttcccgacggcgacgatttttccactacacaatcggattcttcagcagcagatggatctattgaagcgtcgtgtgacgaagtcaccaaagagcagcagcaaacgagatctttgctatgtttccttctccttgctaaccactgatctcatcaagcttggtttttctcattgctatgtttccctctcctggtgatgttaagatatttggacatttctagcttattagggccttgtgtggaacatgtttgaacaattatctcatttaaacaatgtcaacatgtgtgatatatagaaaccgtagcaacgcacgggcacctaattagtagagttttaaattccaaaacttgtaaaatccataacttttgcatagagactccaacttgggtg

SEQ ID NO: 60796 - DNA, 1861 bp, Zea Mays
gccgctggtacctctgcgtcccctccggaccgtcctcttccacatcggtgtcagcggcgtctctgtcaaggacctccacctccgccgcgttgtccctcccgctgccggctccctcgacacctctccccgcccccatatcctgcgccagcgctgctcatcccgctagcacacgccactgtggatctagatccgacactggctgtgcgggattagtcggcgtgcgtgcttagcagcgtctgccgatggatggagaatggtggaatcgagaaggccggtgtcacccacaagatcgacatcagcgatggccccgtgctcccagtcccgtccgcctcgaatccattcgtttgcctgcacaggagaagaaccacgcgtcgttcgacttcatcttcatggacgccgacaaggacaactaccccgagcgactgctcaagctggtgaggccgggtggcctcatcggctacgacaacatgctgtggaacggctccatcgtgctcctggacgacgcgcccatgcgcaagtacatccgcttctaccgcgacttcgtgctcgccctcaacatggcgctcgccgccgacgagcgcgccgagatctgccagctccctcgttcatgtggtgctgtgtatcggaagaaaatgcgacatcaaacttcgccgccatcgacgcaagcttgggagatgcgacgggggaaggtgtggcggcgcgggggcttgcgacgagaggcgcgcgcgcggcgagctcggccgtggcactgggcttcagcggggaggcggagaagccccgcgaggagggcaagctgatgttgagttcggcggacgaggggcccggcgacgacgacgcagttgaagagccgactccacggacggtgcaattgcggatacttggaggtatttgggctgataggattggtgatctaggatgcaagtcgttgtaaaagaataagaactatggaaagccatcgcatgcgtgtaggtgctcttgcatggagttctttgctttcttctagaagccgtgataggagcatcctccaccatgatatccgtgctcaagaagattatgttagcaagcttaccgggcacaaatctgaggactatggcgcatcacagtgtatgtctgcaattgctggctcctatggctatattgctccaggaatgcatatacccctaaggtcaatgagaagagcatgtctacacctttggtgtcgtgcttcttgagctggtcaccggaaagaagccagtaggtgagttttgggacggcgtcaacattgtccatcgggtcaagtcgatgacaaacacaaacaaggagcaggtgatcaagatcattggccctaggctgtcgaccgtgcacacaaggtcatgcatgtattctgtgttgcacttctctgcgtcaaggagcagagcgtgcaacagcctatgatgcggaagatggtgcagatgctcaacgaacttcccaatccagctgcaggcaaggagatgaggttcccgacggcgacgatttttccactacacaatcggattcttcagcagcagatggatctattgaagcgtcgtgtgacgaagtcaccaaagagcagcagcaaacgagatctttgctatgtttccttctccttgctaaccactgatctcatcaagcttggtttttctcattgctatgtttccctctcctggtgatgttaagatatttggacatttctagcttattagggccttgtgtggaacatgtttgaacaattatctcatttaaacaatgtcaacatgtgtgatatatagaaaccgtagcaacgcacgggcacctaattagtagagttttaaattccaaaacttgtaaaatccataacttttgcatagagactccaacttgggtg

SEQ ID NO: 60797 - DNA, 2961 bp, Zea Mays
gccgctggtacctctgcgtcccctccggaccgtcctcttccacatcggtgtcagcggcgtctctgtcaaggacctccacctccgccgcgttgtccctcccgctgccggctccctcgacacctctccccgcccccatatcctgcgccagcgctgctcatcccgctagcacacgccactgtggatctagatccgacactggctgtgcgggattagtcggcgtgcgtgcttagcagcgtctgccgatggatggagaatggtggaatcgagaaggccggtgtcacccacaagatcgacatcagcgatggccccgtgctcccagtcccgtccgcctcgaatccattcgtttgcctgcacaggagaagaaccacgcgtcgttcgacttcatcttcatggacgccgacaaggacaactaccccgagcgactgctcaagctggtgaggccgggtggcctcatcggctacgacaacatgctgtggaacggctccatcgtgctcctggacgacgcgcccatgcgcaagtacatccgcttctaccgcgacttcgtgctcgccctcaacatggcgctcgccgccgacgagcgcgccgagatctgccagctccctcgttcatgtggtgctgtgtatcggaagaaaatgcgacatcaaacttcgccgccatcgacgcaagcttgggagatgcgacgggggaaggtgtggcggcgcgggggcttgcgacgagaggcgcgcgcgcggcgagctcggccgtggcactgggcttcagcggggaggcggagaagccccgcgaggagggcaagctgatgttgagttcggcggacgaggggcccggcgacgacgacgcagttgaagagccgactccacggacggtgcaattgcgggtacgtggtgcagcccctgtcaccgtccctattcttggaagtggaacggctagcagcccctatcgccgcctttgcctagctccacggctccgcccctgttcttcccatcctttcgaatgctagctgaaggtctattgaatctgggcatggttgattatcttattagtgctattgaactaattatagaaaaggccaaattcagagaatctaatgtttctgctataagaggatatctcaagatccgcaagtattatgatgcattagcagcttttggttgtctcctagagataaacaaccctcagtggatgtatcgttgatacagcatgcttgagaatgtatcgtgtaaaatgacggagtcgatgaaaagtttcgtggttgctagactggcttaaacttttgtagcagtggtgtactagatgtcaatctcattggtctgtatgaatgaagttagcagaatttgggatgctctcttgcttctggagagctgcttaccttcaatgtccaccgtgaatcctcttttgaggctcttgtatatcttgggtagctcgctaatgatcacaatattcttgctgcactttcatatgatgctacatttatcatcacttttaataatttgggagtcttttcagtatttttgtttttcacatactaaaacttttaataatatcacaacttgcttgattattagttatcctcattagcttgcaagaaattaataataattatatgcttcaaattttaaatacaaacttctggtgctgattcttttgctagcttaggccagtatgccctgtagccagctgtttactacagttcttttagcaataggcaaaatttcaactgctttttaactcacaatgtgttagttggacgttaatattttgtgtcatagtgtacaaagctgctttatgagccgcaatagcacatctaatatctactgtatgcaagataaaattttgtatcatagatatattagtgcagccgatgggtgaggagcggctgtagccctacaggaacccggcaaggacaggccaccgtcccaactcgccttgtcttacctcatcagtcatccctgccctcaccttctcaggcatctccagatacttggaggtatttgggctgataggattggtgatctaggatgcaagtcgttgtaaaagaataagaactatggaaagccatcgcatgcgtgtaggtgctcttgcatggagttctttgctttcttctagaagccgtgataggagcatcctccaccatgatatccgtgctcaagaagattatgttagcaagcttaccgggcacaaatctgaggactatggcgcatcacagtgtatgtctgcaattgctggctcctatggctatattgctccaggaatgcatatacccctaaggtcaatgagaagagcatgtctacacctttggtgtcgtgcttcttgagctggtcaccggaaagaagccagtaggtgagttttgggacggcgtcaacattgtccatcgggtcaagtcgatgacaaacacaaacaaggagcaggtgatcaagatcattggccctaggctgtcgaccgtgcacacaaggtcatgcatgtattctgtgttgcacttctctgcgtcaaggagcagagcgtgcaacagcctatgatgcggaagatggtgcagatgctcaacgaacttcccaatccagctgcaggcaaggagatgaggttcccgacggcgacgatttttccactacacaatcggattcttcagcagcagatggatctattgaagcgtcgtgtgacgaagtcaccaaagagcagcagcaaacgagatctttgctatgtttccttctccttgctaaccactgatctcatcaagcttggtttttctcattgctatgtttccctctcctggtgatgttaagatatttggacatttctagcttattagggccttgtgtggaacatgtttgaacaattatctcatttaaacaatgtcaacatgtgtgatatatagaaaccgtagcaacgcacgggcacctaattagtagagttttaaattccaaaacttgtaaaatccataacttttgcatagagactccaacttgggtg

SEQ ID NO: 60798 - DNA, 1633 bp, Zea Mays
cgggcacaagcacaactcagctgaaacaaagaaaaaatttttgggtccgaccactggggcacgcgtcggctcacgaaaggttattcgggcgtgaagcacggagaggcgctcaaactcgagcggcttttaatactttagatgacatgccatccatgacgggctgaagagtgcaaggtgagaacaaaaggttgtttgtagagattagggggatgcagttatgcaatcaccaatttatatactcaagtttttgtctttttaatctatttagtaattcatttgagactatggatttatttctggattttttctgatattttaagggagtaacattatcttctattgattcttagtgtcctttcgtcagttccagtttcttaaaaaatgtagaaacaatatcgggttgacatgagtttgggttcttaattattcctcaatgccaaataaaccttgggtcctaactatcttgtgcttgtgtgtagcctgacagtcactggacatatcatctttgttctccaacagaaggagcgtcacaggcagcttctgatcaaataaaatctggatgaagttgtgaagcctggtgggtggatctgaacatgaaagattggaaaatggatggcctccatctctctctatatgcatttaaaaatggctgaaatacaataagtaccgaggaaattgtctgatactggagtgtagacttatgctgaaggaatgtttagaacaaacatgatggtgtcaacatgaagttgagatatatgaattaattatggaggattgagtgtctgtcagtccatgcaacatgcaaatagcgtatatctgctatctttttaggctcggagtcaacaacaggaagtgctctcattctatgcttcattttcagaacatgaagtggttttggaagctgtgcataaaaggaggtgcaggacttgtagccaatggaatgtaactggaagggaacaatgctgcttgtctcaaggcgcttgtccgtgacgccgtcggcgcccgactccgggggcgatgggaagagttgcgtttcattacacgggacaccaggacgggagggggaagaggaacaatctcatgatctcaccttttttcctcatctgacataattctctctcggcaggtgcaactgctgcatcagccacatcatttgattaatccatttttatgatcagattcccactggtggcggctctcctctctctgagaaaaccgaccctcttggtaccatttctgctgctccatggggatctgctttgattatgccaatttcctacacatatagccatgatgggctcactgatgcttcaaagattgcgatcttgaatgcaaactacatggcaaaacgtctagagaaacactacccagttctgttccgtggagtcaaccgaactattttccgttgaaaataccgtcaccacagtctgctatcttcagttttagtttcactttagtttacctttagtttcagttgcaggttatcttcagtttcagttttagtttctcttcaatttcattttacgtgtgtactcagtttcagtttaccggtgtactcagtttcagtttcagtttacctgtgtactctttgacgttgtttttccatttgtcttgtttcctctatgaatactag

SEQ ID NO: 60799 - DNA, 1215 bp, Zea Mays
cgcgttcattctctggaaaattcacaccgcttaccaggttctcagccttatctccatgtcgttcgtcaggcttctagccatttcctggtcccatacatctcttctatgtatcataccacacacacctccacggacatgctggcctcatcgccctgcccttctgctcgccggagctccacttccctgtttcagcctctcccatggacgcccccctcccttcctgcagcaagccatggcggcagtcctctccctcagtttcctctcatggctatggacatcggctgatccttccctcccatggcgcccattatttcctttccctactgtttcttggatactagatgctggagctgccttcccatggtgctgtcctcttttatggcgctcctctctgttccaaacaaccactcccttatcccctacaccagtcgttcaccatgtgctcaacaaaatgtcgcagcgtgctgcaccttgatttgtgcagtcccgattacgttgtcgtcaccctggtgagatcccgatgttccttctccgttcaattccgcatcggcgttggttcgctgctattaattgtgtgtatggttgtatttttgttgaggagcaaaatcccaagtgtttgggtagagaagaagaaaggaactccagtgcagcaaacaccccgtgttcgatgaaatgtttgaatcggaatcatcagcatatccgcagtttggtttaactatggtacgttaattgatcacgtgctatggaagacgactggaattaatctccaagtgatgctgatggacgaagctaaaatggatgaatcaaccaagtgccaggatagaagatgctcaccaagtggtcgtcaattaacaacactaacttagtgttatcccaggcaagccccggtgcatttgccacccccttgttgttataaagcttttatcacttatatgttgcattaggtgataggagttgtgtgaataaacagttgatgcattaccattccttggaatttgattactattccttgattcctgtttataaaagagaactaaagatgcttagccctgcttagataattaaaagttgttctttttaaaaagatgctgtgttacacgggatatgggaaattgttgtgaaaaagaaatggggatggtgaatccatatggccatgatggattcaacatctagaaaaagtacctctgtcaggtaccaaggattgggaaatggttg

SEQ ID NO: 60800 - DNA, 1034 bp, Zea Mays
cgcgttcattctctggaaaattcacaccgcttaccaggttctcagccttatctccatgtcgttcgtcaggcttctagccatttcctggtcccatacatctcttctatgtatcataccacacacacctccacggacatgctggcctcatcgccctgcccttctgctcgccggagctccacttccctgtttcagcctctcccatggacgcccccctcccttcctgcagcaagccatggcggcagtcctctccctcagtttcctctcatggctatggacatcggctgatccttccctcccatggcgcccattatttcctttccctactgtttcttggatactagatgctggagctgccttcccatggtgctgtcctcttttatggcgctcctctctgttccaaacaaccactcccttatcccctacaccagtcgttcaccatgtgctcaacaaaatgtcgcagcgtgctgcaccttgatttgtgcagtcccgattacgttgtcgtcaccctggagcaaaatcccaagtgtttgggtagagaagaagaaaggaactccagtgcagcaaacaccccgtgttcgatgaaatgtttgaatcggaatcatcagcatatccgcagtttggtttaactatggtacgttaattgatcacgtgctatggaagacgactggaattaatctccaagtgatactgatggacgaagctaaaatggatgaatcaaccaagtgccaggatagaagatgctcaccaagtggtcgtcaattaacaacactaacttagtgttatcccaggcaagccccggtgcatttgccacccccttgttgttataaagcttttatcacttatatgttgcattaggtgataggagttgtgtgaataaacagttgatgcattaccattccttggaatttgattactattccttgattcctgtttataaaagagaactaaagatgcttagccctgcttagataattaaaagttgttctttttaaaaagatgctgtgttacacgggatatgggaaattgttgtgaaa

SEQ ID NO: 60801 - DNA, 452 bp, Zea Mays
tttgttgtaagatataaatattataaaaaaattcagataaaaagtattacagaaaaggcatagtaatctattacattgttgtagagaatgcaaggaagcacaacacaaaacaggtgtttttcaaatcgcacacatgtgtcatcaattccaacaccactccatctcatttctaggatgcttgtagtaaaaatgcagatgaaaagtgacatgaaccctaggctggcaacattattcagcagcagcagatcaaacagtgaacataagcttcagacattccgcaatatacagaaataagtcgcttaaacacagaataagagcactttaatttgaactgatctttgagaaaaatgtgatagtttttgttagcaacttttatgtatattgatagtcacttgtgttccaaaagaagctgcttccttcagctgagtatccatgtggaagatgaggtccat

SEQ ID NO: 60802 - DNA, 1317 bp, Zea Mays
aaaaatccccaaatctctccactcccagccgctgcacctggcttcttcgccactctctcctctcctcgttcactctgccaggtggccggccgcccctgctcccatctcccacagccgccgccgccctcagctcctcagccacctcccatggcctcgtctccctgctgcagcgaagccgaccaccgtttcctgcagcctcgatagctcccccccccccccccccccccatgccgtccctgctcacctcaccttcgtcggccgtccttggacgccgtgctcggcgcccgagctccctacgccggccaccatccttcccatggcaggagctccgatcggcccctgctgaccttggcactcggcgtggctccaagcagcgccttctcccccaggaccggctcaccgtcagccgcgagctcctctccctcacgtcccctacagacaagcagtgtcgccggtgagcagcagccacagcaactccgcgctccgccggcttgcggttttgtcaagcccagtagacagcagcaaccccgatgtcttcacgtcgtgcgctccaccccgatttgcgcagcccctgcgcgacgtcgtccacccgatgttgacgctgtgccacgcgcaccaagcgttcgacgaaatgcccaaccaacggacagcacgcgggtctcgaacccgattcggctagggaaggagaagaaagcgaagtagaaaagaacccggatgtttcttaggttttcagaggattgtggttgtattggatgtgtgttgaaaatgcctcctcgcaaagagtgtatggtcccatgcatgcgatgtgtgatttttgttggtgaatgcgaaataagtttagtgtttcaaaacggttaattgatagtctctgttaaaaaagaaggaccacaaggcgccgaggaggcccccggcggcgagaagaagcaccaccacctcttcggctgatgacctggccggcgagagcaccggtccgtcaccgaccgaccgaccgccgcgccgcgccgcctgttttcgttgagtgcatgcctgcatgcatgtttgacgtacgattaacaataagtcccttccggacctctgcgagtgagactgagatgtggggccgcgcgcgtcgaggtgttcctgtacgcgcttgattttctctgcatgtataattgcgttgaataagcgagagccatgtgtgggtgtggctcctcccctcccaaagtcaagcccttatgtgtacctgtggttctttgtactggtatatggagatgatgtgttaatgtaacacgattttatttatcacctcatccaaattatttgttactttaccctcgt

SEQ ID NO: 60803 - DNA, 1049 bp, Zea Mays
aaaaatccccaaatctctccactcccagccgctgcacctggcttcttcgccactctctcctctcctcgttcactctgccaggtggccggccgcccctgctcccatctcccacagccgccgccgccctcagctcctcagccacctcccatggcctcgtctccctgctgcagcgaagccgaccaccgtttcctgcagcctcgatagctcccccccccccccccccccccatgccgtccctgctcacctcaccttcgtcggccgtccttggacgccgtgctcggcgcccgagctccctacgccggccaccatccttcccatggcaggagctccgatcggcccctgctgaccttggcactcggcgtggctccaagcagcgccttctcccccaggaccggctcaccgtcagccgcgagctcctctccctcacgtcccctacagacaagcagtgtcgccggtgagcagcagccacagcaactccgcgctccgccggcttgcggttttgtcaagcccagtagacagcagcaaccccgatgtcttcacgtcgtgcgctccaccccgatttgcgcagcccctgcgcgacgtcgtccacccgctagatgttgacgctgtgccacgcgcaccaagcgttcgacgaaatgcccaaccaacggacagcacgcgggtctcgaacccgattcggctaggtacgctagatgttgagcacgtggacgtgaaagacgtggccttggaactactcctcaagaaggtgtggtgaacttatcccgaagacggtggactaatcaagtggatgttcgtcaagcgggagtcatctaaccaaacactaacgtagtgttggattctaggtgaagatctaggcctactaaggatggtggataagcgccggtgggctcggccttctatatacttatctcatctatgcttctcctggaggattgtcatcgagctagcactatatttcaaaactatgttatatctatattgtttaaagctgtattactttgaaatcagatttttgtactcgctctcaacttattatttataaactcttt

SEQ ID NO: 60804 - DNA, 799 bp, Zea Mays
aaaaatccccaaatctctccactcccagccgctgcacctggcttcttcgccactctctcctctcctcgttcactctgccaggtggccggccgcccctgctcccatctcccacagccgccgccgccctcagctcctcagccacctcccatggcctcgtctccctgctgcagcgaagccgaccaccgtttcctgcagcctcgatagctcccccccccccccccccccccatgccgtccctgctcacctcaccttcgtcggccgtccttggacgccgtgctcggcgcccgagctccctacgccggccaccatccttcccatggcaggagctccgatcggcccctgctgaccttggcactcggcgtggctccaagcagcgccttctcccccaggaccggctcaccgtcagccgcgagctcctctccctcacgtcccctacagacaagcagtgtcgccggtgagcagcagccacagcaactccgcgctccgccggcttgcggttttgtcaagcccagtagacagcagcaaccccgatgtcttcacgtcgtgcgctccaccccgatttgcgcagcccctgcgcgacgtcgtccacccggtgaagatctaggcctactaaggatggtggataagcgccggtgggctcggccttctatatacttatctcatctatgcttctcctggaggattgtcatcgagctagcactatatttcaaaactatgttatatctatattgtttaaagctgtattactttgaaatcagatttttgtactcgctctcaacttattatttataaactcttt

SEQ ID NO: 60805 - DNA, 821 bp, Zea Mays
aaaaatccccaaatctctccactcccagccgctgcacctggcttcttcgccactctctcctctcctcgttcactctgccaggtggccggccgcccctgctcccatctcccacagccgccgccgccctcagctcctcagccacctcccatggcctcgtctccctgctgcagcgaagccgaccaccgtttcctgcagcctcgatagctcccccccccccccccccccccatgccgtccctgctcacctcaccttcgtcggccgtccttggacgccgtgctcggcgcccgagctccctacgccggccaccatccttcccatggcaggagctccgatcggcccctgctgaccttggcactcggcgtggctccaagcagcgccttctcccccaggaccggctcaccgtcagccgcgagctcctctccctcacgtcccctacagacaagcaggttcgaccgtcgcccaaccccctctccagcgcgcgcatggactcctccctgctcacgccggcctgtgcagtgtcgccggtgagcagcagccacagcaactccgcgctccgccggcttgcggttttgtcaagcccagtagacagcagcaaccccgatgtcttcacgtcgtgcgctccaccccgatttgcgcagcccctgcgcgacgtcgtccacccggtacgctagatgttgagcacgtggacgtgaaagacgtggccttggaactactcctcaagaaggtgtggtgaacttatcccgaagacggtggactaatcaagtggatgttcgtcaagcgggagtcatctaaccaaacactaacgtagtgttggattctag

SEQ ID NO: 60806 - DNA, 1758 bp, Zea Mays
aaaaatccccaaatctctccactcccagccgctgcacctggcttcttcgccactctctcctctcctcgttcactctgccaggtggccggccgcccctgctcccatctcccacagccgccgccgccctcagctcctcagccacctcccatggcctcgtctccctgctgcagcgaagccgaccaccgtttcctgcagcctcgatagctcccccccccccccccccccccatgccgtccctgctcacctcaccttcgtcggccgtccttggacgccgtgctcggcgcccgagctccctacgccggccaccatccttcccatggcaggagctccgatcggcccctgctgaccttggcactcggcgtggctccaagcagcgccttctcccccaggaccggctcaccgtcagccgcgagctcctctccctcacgtcccctacagacaagcagtgtcgccggtgagcagcagccacagcaactccgcgctccgccggcttgcggttttgtcaagcccagtagacagcagcaaccccgatgtcttcacgtcgtgcgctccaccccgatttgcgcagcccctgcgcgacgtcgtccacccggaacggggcacccgaaggtgaggcccgtgacccctttccggcccacttgccgagaaagtccgtgaggcagggcggatgagcaagccccgccaagcaagtctgcgaggcggggcgagcgaccaagtccccgccgagcaggtccgcgaggcggggcgagcgaccaagtcccgctaagcaggtccacgaggcggggcggacgagcaaacccccgccgagcaagtctgcgaggcggggcgaacgaccaagtccccgccaagcagaccaacaaggaaggagcccaggacgacgctgctggcctacgtcagcacgacaagacagatcatcaccaaaccacgaccggatcatgggagcagtgccgaagggcctctatcaaaacatgactcagggtacgttctcagacatgcccccactgaccggtgggaccagtcaaccccagtcgcagggacctcagcatcggggtctctacagtgacccgtactccagaaggggatagaacagtacgtcataccgagcatgtgcctacgcatgctggaagatgacgtagaggggatggcggaagatgaagctgtactgaagacatccctgaacctctctgcaagtctgctctgcgggacccgccaggtaccgctacatcagcatcagaatagctacaggagcccgtatggcaaacggacgagacgcggtgccataccaggggtacgacgacgcacgacccggccaacgatatcagaggagccgcgccacatcgaggcagcaggccgaactcctccctggatgaataccagtcctcactgtaaagtctacccttgggctataaaagggcaagacaattctcatcttctacacacaagcactcagctgtaacacgccctaagcattactacgcttagcactacactggctagggccccggcctgaaccagtataaccacccgtgtcttagctccctagctcgaatccctgtgattcaccattcggagtgagtccgcgcttgcatccccgccgaacacaaatctattgtccccctggtttccgaaaccacgacagttggcgcgccaggtagaggactttaagcgtgccaaagcgacttttttttactccgatggccggctattcagcgttcaccgggggtgagtctttcgctcccagaagcaagatcaccttcg

SEQ ID NO: 60807 - DNA, 1849 bp, Zea Mays
aaaaatccccaaatctctccactcccagccgctgcacctggcttcttcgccactctctcctctcctcgttcactctgccaggtggccggccgcccctgctcccatctcccacagccgccgccgccctcagctcctcagccacctcccatggcctcgtctccctgctgcagcgaagccgaccaccgtttcctgcagcctcgatagctcccccccccccccccccccccatgccgtccctgctcacctcaccttcgtcggccgtccttggacgccgtgctcggcgcccgagctccctacgccggccaccatccttcccatggcaggagctccgatcggcccctgctgaccttggcactcggcgtggctccaagcagcgccttctcccccaggaccggctcaccgtcagccgcgagctcctctccctcacgtcccctacagacaagcagtgtcgccggtgagcagcagccacagcaactccgcgctccgccggcttgcggttttgtcaagcccagtagacagcagcaaccccgatgtcttcacgtcgtgcgctccaccccgatttgcgcagcccctgcgcgacgtcgtccacccgctagatgttgacgctgtgccacgcgcaccaagcgttcgacgaaatgcccaaccaacggacagcacgcgggtctcgaacccgattcggctaggaacggggcacccgaaggtgaggcccgtgacccctttccggcccacttgccgagaaagtccgtgaggcagggcggatgagcaagccccgccaagcaagtctgcgaggcggggcgagcgaccaagtccccgccgagcaggtccgcgaggcggggcgagcgaccaagtcccgctaagcaggtccacgaggcggggcggacgagcaaacccccgccgagcaagtctgcgaggcggggcgaacgaccaagtccccgccaagcagaccaacaaggaaggagcccaggacgacgctgctggcctacgtcagcacgacaagacagatcatcaccaaaccacgaccggatcatgggagcagtgccgaagggcctctatcaaaacatgactcagggtacgttctcagacatgcccccactgaccggtgggaccagtcaaccccagtcgcagggacctcagcatcggggtctctacagtgacccgtactccagaaggggatagaacagtacgtcataccgagcatgtgcctacgcatgctggaagatgacgtagaggggatggcggaagatgaagctgtactgaagacatccctgaacctctctgcaagtctgctctgcgggacccgccaggtaccgctacatcagcatcagaatagctacaggagcccgtatggcaaacggacgagacgcggtgccataccaggggtacgacgacgcacgacccggccaacgatatcagaggagccgcgccacatcgaggcagcaggccgaactcctccctggatgaataccagtcctcactgtaaagtctacccttgggctataaaagggcaagacaattctcatcttctacacacaagcactcagctgtaacacgccctaagcattactacgcttagcactacactggctagggccccggcctgaaccagtataaccacccgtgtcttagctccctagctcgaatccctgtgattcaccattcggagtgagtccgcgcttgcatccccgccgaacacaaatctattgtccccctggtttccgaaaccacgacagttggcgcgccaggtagaggactttaagcgtgccaaagcgacttttttttactccgatggccggctattcagcgttcaccgggggtgagtctttcgctcccagaagcaagatcaccttcg

SEQ ID NO: 60808 - DNA, 1076 bp, Zea Mays
aaaaatccccaaatctctccactcccagccgctgcacctggcttcttcgccactctctcctctcctcgttcactctgccaggtggccggccgcccctgctcccatctcccacagccgccgccgccctcagctcctcagccacctcccatggcctcgtctccctgctgcagcgaagccgaccaccgtttcctgcagcctcgatagctcccccccccccccccccccccatgccgtccctgctcacctcaccttcgtcggccgtccttggacgccgtgctcggcgcccgagctccctacgccggccaccatccttcccatggcaggagctccgatcggcccctgctgaccttggcactcggcgtggctccaagcagcgccttctcccccaggaccggctcaccgtcagccgcgagctcctctccctcacgtcccctacagacaagcagtgtcgccggtgagcagcagccacagcaactccgcgctccgccggcttgcggttttgtcaagcccagtagacagcagcaaccccgatgtcttcacgtcgtgcgctccaccccgatttgcgcagcccctgcgcgacgtcgtccacccgatgttgacgctgtgccacgcgcaccaagcgttcgacgaaatgcccaaccaacggacagcacgcgggtctcgaacccgattcggctagggaaggagaagaaagcgaagtagaaaagaacccggatgtttcttaggttttcagaggattgtggttgtattggatgtgtgttgaaaatgcctcctcgcaaagagtgtatggtcccatgcatgcgatgtgtgatttttgttggtgaatgcgaaataagtttagtgtttcaaaacggttaattgatagtctctgttagtgctattgtgttgatttttgttgtgtggcgaattgatgcttcgttttaacaagtcactacattttatatctagcgggtgattaaatgccacatcggttagaggttctgtatgagtattatcgttgcctaaaatcatttgggagcgagtagtactgataggtatgtttccgtggaaatcgaagaatgatccgatgaactaag

SEQ ID NO: 60809 - DNA, 1175 bp, Zea Mays
aaaaatccccaaatctctccactcccagccgctgcacctggcttcttcgccactctctcctctcctcgttcactctgccaggtggccggccgcccctgctcccatctcccacagccgccgccgccctcagctcctcagccacctcccatggcctcgtctccctgctgcagcgaagccgaccaccgtttcctgcagcctcgatagctcccccccccccccccccccccatgccgtccctgctcacctcaccttcgtcggccgtccttggacgccgtgctcggcgcccgagctccctacgccggccaccatccttcccatggcaggagctccgatcggcccctgctgaccttggcactcggcgtggctccaagcagcgccttctcccccaggaccggctcaccgtcagccgcgagctcctctccctcacgtcccctacagacaagcagtgtcgccggtgagcagcagccacagcaactccgcgctccgccggcttgcggttttgtcaagcccagtagacagcagcaaccccgatgtcttcacgtcgtgcgctccaccccgatttgcgcagcccctgcgcgacgtcgtccacccgctagatgttgacgctgtgccacgcgcaccaagcgttcgacgaaatgcccaaccaacggacagcacgcgggtctcgaacccgattcggctaggttgttcgatttgtattttgtggtctactctaattacgctttggtcgatgtcgcatatatatgtgtgtgaatatgtttgtatggattcgagttagggaaggagaagaaagcgaagtagaaaagaacccggatgtttcttaggttttcagaggattgtggttgtattggatgtgtgttgaaaatgcctcctcgcaaagagtgtatggtcccatgcatgcgatgtgtgatttttgttggtgaatgcgaaataagtttagtgtttcaaaacggttaattgatagtctctgttagtgctattgtgttgatttttgttgtgtggcgaattgatgcttcgttttaacaagtcactacattttatatctagcgggtgattaaatgccacatcggttagaggttctgtatgagtattatcgttgcctaaaatcatttgggagcgagtagtactgataggtatgtttccgtggaaatcgaagaatgatccgatgaactaag

SEQ ID NO: 60810 - DNA, 3183 bp, Zea Mays
atcaatcaatcaatcacccccgcgcccacggccgccaaccacccctgcctctaccacgagcaccctgcaccgccaacgcggcagcatccaccgcgaagccctgggccacgcgacgagcctgccgccctacgccacacgaccggggcaggttgcgcaagacgctcatgctgctcttccagctcgacgactccaccggcagaggcgtcgcgcgtccgtccgaggggccccaatcggcggagttccagtccgtttccgaaggaggaggccgagggggcaagcggatctattttcccccctggcacgtctctctgtccaccgatctccgccgcctcactgctcgcatcgtcggcctcacccgccgcaggcagctcgcccagatcatggcggaggtggaagcagcgcggtgtcgtgtgcgtgggggcgggttgctcaacaccatcgtcatgaacgtggttctcgagccatgcgtgtgcggcggcgacgtcgatgtcgaccgagcgctctagctgttcgaggaaatgcgtgggcccatggggtgcggcgtcgacgatgtttcctacggcatcctgctgaagaggtcttcagaacatttgataagaagatgggaaagtaatgtcatgagatgcttatgtcaagaagaacatttgataagaagacaggaaagtaatgtcatgtgatgcttatttcaagaagataggaaagacgagacacctagggatttaagaaggtaccgtgcttcaaacctagattaggactcaagtttaatgactcctatagttcaacactactggtccacaacaacaagcttggctgatcaggcaagtgttaatggagtttcatggagaattttgtgggcattaaattacagaacacatcaacaattctaaactagggttcgaaggggattagtattcatgagaacatttaaattttctgttgcaaagcacgagcactctgctatatatttaaagcaccagtttcgtacgtcgtgcgtcaccgtaggtctcactacgtcaaaaacgctcaaaggggacgtgaccatctgtgacacttgttaaaaacacgtcactaatttttcacagtgacttcttttttaaaaaacgcgtcactaacaactgtgcacatgtgacatctattgtaaaaatacgtcactagcaaaatatggtaataactcagtgacatcttttattttacgtatctctactatgatctgtttagtgacatgtatatataaatgcgtcactggcttcatacgtcaaatctgtttagtgacgtgtatatataaacatgtcactgacttcagacgtcagatctgtttagtgacgtgtatttggtttcagatgttatatctgtttagtgacgtgtatttaaatacatgtcactaatatatatacattagtgacatgtatatataaacacgtcactggcttcaaacttcgcggcgcagttaaaattctacgttttcaaacgatctcaaatgaaaaaaccaccaaatgaaagttgtaggtcttaaaaagttatggaactttgtagttgataacattttgatttgaaatcatcttgtcgtagaaaaatacgtctgaagttttcaaatttgaaaatcaaattttgtaaatgacctcggatgatgaaactaccaaaataaaagttgtagatctcgaaaagttatgcaactttgttgttgacaagttttccatttgaattcatttagtgccccaaataatcaatctacactcggtttgttataatacgtggggaatgaaaacgtacatagatacaaataagttggtggcgtagtggtagataaagtcatgcattaggtgcaggtcgagggtttgaatctcacaagtcacacagagctgcttggttgggaataattttttttgcctgggtagttctgttagtgacacgtatttataaaaacacgtcactaaggtagttcggtcagtgatatgtatttataaaaacacgtcactaaagtagttcgatcagtgacacgtatttataaaaacgtgtcactaaagtggttctattagtgaggtctttttacgcgtcactaatcagattcaattagagacataaaatctgagacgtgttttacacgtgtcactaattaagctaaaaatgcgttactaaaggcatgtttttgacatagtgtctatttctcttccccgtttcttgtcaaacaatgagccgttacaccatagatatgccttgagaaaccacctaagcttaacataatagaaagtcacacgcagcgcagctcacacatattaccacctcgctagctgaagaaggacgagcgaccgagcgacctataaaaaaagaggtcgagctccttttcagctcatatctttctcgtccttttggctaagataaggtgtaatatttgttcttatcagtttaatatctgatatgtggaccatatgttcactctaatattaaatttattttttattttacgggtatcaaatataattgtgtcattgtaacgcacgggcattgtactagtgtgtgttaattgatcagtatataacaagctgttcgactgccacttaagctgcagctggctgcaactttatatgcttctaagtactgtagcgaaagtctagaaaagccgcagccgcagcggcttcgaacggtccttaagtcatttgcattgcaacatagactaagaaactctacttgataacctgtgtgtagcttaggccaaggcctaaacagcaaacacagtgagttgaacctcctgaaatcacacggattttgagccaggttgatttagctaaacagccattgcctctgcttgagctattcgctgcctgaatatctgagccatctcatcggcctgatttgagcaaaagaaaccatatgtcagttgcttacctaaagcaaccacgggctgcagaacgggtcccccgtggtgccgtccacgcacatggcggcgaggcccggcagcaggatctgcgccagcttgtgcatcgcctccgagtcgcagtatggggactgattcagcgggccctcgcctcgctccgtgccagggtccgccaccgggagctccatcgcgccttcgccgccttgtgattagcaacctgcatgcagaatttgatggctggcaacaaagaggaggggccggcggctaatccgattcgaacgtacctgaggaaggagaagaggaatcaaccg

SEQ ID NO: 60811 - DNA, 3222 bp, Zea Mays
ctcaacgctactcatcaatcatcaatcaatcaatcacccccgcgcccacggccgccaaccacccctgcctctaccacgagcaccctgcaccgccaacgcggcagcatccaccgcgaagccctgggccacgcgacgagcctgccgccctacgccacacgaccggggcaggttgcgcaagacgctcatgctgctcttccagctcgacgactccaccggcagaggcgtcgcgcgtccgtccgaggggccccaatcggcggagttccagtccgtttccgaaggaggaggccgagggggcaagcggatctattttcccccctggcacgtctctctgtccaccgatctccgccgcctcactgctcgcatcgtcggcctcacccgccgcaggcagctcgcccagatcatggcggaggtggaagcagcgcggtgtcgtgtgcgtgggggcgggttgctcaacaccatcgtcatgaacgtggttctcgagccatgcgtgtgcggcggcgacgtcgatgtcgaccgagcgctctagctgttcgaggaaatgcgtgggcccatggggtgcggcgtcgacgatgtttcctacggcatcctgctgaagggttgtttgactgtggcagaggtcttcagaacatttgataagaagatgggaaagtaatgtcatgagatgcttatgtcaagaagaacatttgataagaagacaggaaagtaatgtcatgtgatgcttatttcaagaagataggaaagacgagacacctagggatttaagaaggtaccgtgcttcaaacctagattaggactcaagtttaatgactcctatagttcaacactactggtccacaacaacaagcttggctgatcaggcaagtgttaatggagtttcatggagaattttgtgggcattaaattacagaacacatcaacaattctaaactagggttcgaaggggattagtattcatgagaacatttaaattttctgttgcaaagcacgagcactctgctatatatttaaagcaccagtttcgtacgtcgtgcgtcaccgtaggtctcactacgtcaaaaacgctcaaaggggacgtgaccatctgtgacacttgttaaaaacacgtcactaatttttcacagtgacttcttttttaaaaaacgcgtcactaacaactgtgcacatgtgacatctattgtaaaaatacgtcactagcaaaatatggtaataactcagtgacatcttttattttacgtatctctactatgatctgtttagtgacatgtatatataaatgcgtcactggcttcatacgtcaaatctgtttagtgacgtgtatatataaacatgtcactgacttcagacgtcagatctgtttagtgacgtgtatttggtttcagatgttatatctgtttagtgacgtgtatttaaatacatgtcactaatatatatacattagtgacatgtatatataaacacgtcactggcttcaaacttcgcggcgcagttaaaattctacgttttcaaacgatctcaaatgaaaaaaccaccaaatgaaagttgtaggtcttaaaaagttatggaactttgtagttgataacattttgatttgaaatcatcttgtcgtagaaaaatacgtctgaagttttcaaatttgaaaatcaaattttgtaaatgacctcggatgatgaaactaccaaaataaaagttgtagatctcgaaaagttatgcaactttgttgttgacaagttttccatttgaattcatttagtgccccaaataatcaatctacactcggtttgttataatacgtggggaatgaaaacgtacatagatacaaataagttggtggcgtagtggtagataaagtcatgcattaggtgcaggtcgagggtttgaatctcacaagtcacacagagctgcttggttgggaataattttttttgcctgggtagttctgttagtgacacgtatttataaaaacacgtcactaaggtagttcggtcagtgatatgtatttataaaaacacgtcactaaagtagttcgatcagtgacacgtatttataaaaacgtgtcactaaagtggttctattagtgaggtctttttacgcgtcactaatcagattcaattagagacataaaatctgagacgtgttttacacgtgtcactaattaagctaaaaatgcgttactaaaggcatgtttttgacatagtgtctatttctcttccccgtttcttgtcaaacaatgagccgttacaccatagatatgccttgagaaaccacctaagcttaacataatagaaagtcacacgcagcgcagctcacacatattaccacctcgctagctgaagaaggacgagcgaccgagcgacctataaaaaaagaggtcgagctccttttcagctcatatctttctcgtccttttggctaagataaggtgtaatatttgttcttatcagtttaatatctgatatgtggaccatatgttcactctaatattaaatttattttttattttacgggtatcaaatataattgtgtcattgtaacgcacgggcattgtactagtgtgtgttaattgatcagtatataacaagctgttcgactgccacttaagctgcagctggctgcaactttatatgcttctaagtactgtagcgaaagtctagaaaagccgcagccgcagcggcttcgaacggtccttaagtcatttgcattgcaacatagactaagaaactctacttgataacctgtgtgtagcttaggccaaggcctaaacagcaaacacagtgagttgaacctcctgaaatcacacggattttgagccaggttgatttagctaaacagccattgcctctgcttgagctattcgctgcctgaatatctgagccatctcatcggcctgatttgagcaaaagaaaccatatgtcagttgcttacctaaagcaaccacgggctgcagaacgggtcccccgtggtgccgtccacgcacatggcggcgaggcccggcagcaggatctgcgccagcttgtgcatcgcctccgagtcgcagtatggggactgattcagcgggccctcgcctcgctccgtgccagggtccgccaccgggagctccatcgcgccttcgccgccttgtgattagcaacctgcatgcagaatttgatggctggcaacaaagaggaggggccggcggctaatccgattcgaacgtacctgaggaaggagaagaggaatcaaccg

SEQ ID NO: 60812 - DNA, 4088 bp, Zea Mays
ctcttactaaaacacatccgacggtcattctttattagatcatccctcaacgctactcatcaatcatcaatcaatcaatcacccccgcgcccacggccgccaaccacccctgcctctaccacgagcaccctgcaccgccaacgcggcagcatccaccgcgaagccctgggccacgcgacgagcctgccgccctacgccacacgaccggggcaggttgcgcaagacgctcatgctgctcttccagctcgacgactccaccggcagaggcgtcgcgcgtccgtccgaggggccccaatcggcggagttccagtccgtttccgaaggaggaggccgagggggcaagcggatctattttcccccctggcacgtctctctgtccaccgatctccgccgcctcactgctcgcatcgtcggcctcacccgccgcaggcagctcgcccagatcatggcggaggtggaagcagcgcggtgtcgtgtgcgtgggggcgggttgctcaacaccatcgtcatgaacgtggttctcgagccatgcgtgtgcggcggcgacgtcgatgtcgaccgagcgctctagctgttcgaggaaatgcgtgggcccatggggtgcggcgtcgacgatgtttcctacggcatcctgctgaaggtctgcagtttctgttaatgctcacatccttaacgcaagcacaaaagttcatttggtcagttgtctgttctaagtggttgtgagtaatggtggaattgtggagataactgaagaagaacaatgtgattccgacaacataatctatcctaaaaatgtatgataaggatgcatatccactaaatctaatgaaaacagcattgatagaagggaaacaatatggatacttaattcttttactcatccttcactaattgtttgctgactgtataactgttggttggtatgatgccaatttgctgaactccccttgctttgttagtaaatggttcatgaaatctgtacaaatacaaacggatgcaaagtcttgatagaaaatctgtttctcaaacaaaggagcattattttagaggaggtcggtgtgaacgttagaggagtggactggatccgtgctggagtgcgaagcaaactgggggaggacaagtggtggagaaataaggcttagtactaataattaagtaacaatttgaaaaatacaagtgaagcatataaaattctctaaaataaaataacaatagagcttgaatggctacaaattatcactcagttggccatttacaatatgcatatcctacggctttcacggattaaagagtttggaagaaaaaatggaggtgaactagatcatcttaagggaggtaatgatctgtgactgcatattcagaacattttctatttccgtattgataatattcataattttattacatggcaaacaattttctatttccgtattgataatatttgatctgtgactgcattagggttgtttgactgtggcagaggtcttcagaacatttgataagaagatgggaaagtaatgtcatgagatgcttatgtcaagaagaacatttgataagaagacaggaaagtaatgtcatgtgatgcttatttcaagaagataggaaagacgagacacctagggatttaagaaggtaccgtgcttcaaacctagattaggactcaagtttaatgactcctatagttcaacactactggtccacaacaacaagcttggctgatcaggcaagtgttaatggagtttcatggagaattttgtgggcattaaattacagaacacatcaacaattctaaactagggttcgaaggggattagtattcatgagaacatttaaattttctgttgcaaagcacgagcactctgctatatatttaaagcaccagtttcgtacgtcgtgcgtcaccgtaggtctcactacgtcaaaaacgctcaaaggggacgtgaccatctgtgacacttgttaaaaacacgtcactaatttttcacagtgacttcttttttaaaaaacgcgtcactaacaactgtgcacatgtgacatctattgtaaaaatacgtcactagcaaaatatggtaataactcagtgacatcttttattttacgtatctctactatgatctgtttagtgacatgtatatataaatgcgtcactggcttcatacgtcaaatctgtttagtgacgtgtatatataaacatgtcactgacttcagacgtcagatctgtttagtgacgtgtatttggtttcagatgttatatctgtttagtgacgtgtatttaaatacatgtcactaatatatatacattagtgacatgtatatataaacacgtcactggcttcaaacttcgcggcgcagttaaaattctacgttttcaaacgatctcaaatgaaaaaaccaccaaatgaaagttgtaggtcttaaaaagttatggaactttgtagttgataacattttgatttgaaatcatcttgtcgtagaaaaatacgtctgaagttttcaaatttgaaaatcaaattttgtaaatgacctcggatgatgaaactaccaaaataaaagttgtagatctcgaaaagttatgcaactttgttgttgacaagttttccatttgaattcatttagtgccccaaataatcaatctacactcggtttgttataatacgtggggaatgaaaacgtacatagatacaaataagttggtggcgtagtggtagataaagtcatgcattaggtgcaggtcgagggtttgaatctcacaagtcacacagagctgcttggttgggaataattttttttgcctgggtagttctgttagtgacacgtatttataaaaacacgtcactaaggtagttcggtcagtgatatgtatttataaaaacacgtcactaaagtagttcgatcagtgacacgtatttataaaaacgtgtcactaaagtggttctattagtgaggtctttttacgcgtcactaatcagattcaattagagacataaaatctgagacgtgttttacacgtgtcactaattaagctaaaaatgcgttactaaaggcatgtttttgacatagtgtctatttctcttccccgtttcttgtcaaacaatgagccgttacaccatagatatgccttgagaaaccacctaagcttaacataatagaaagtcacacgcagcgcagctcacacatattaccacctcgctagctgaagaaggacgagcgaccgagcgacctataaaaaaagaggtcgagctccttttcagctcatatctttctcgtccttttggctaagataaggtgtaatatttgttcttatcagtttaatatctgatatgtggaccatatgttcactctaatattaaatttattttttattttacgggtatcaaatataattgtgtcattgtaacgcacgggcattgtactagtgtgtgttaattgatcagtatataacaagctgttcgactgccacttaagctgcagctggctgcaactttatatgcttctaagtactgtagcgaaagtctagaaaagccgcagccgcagcggcttcgaacggtccttaagtcatttgcattgcaacatagactaagaaactctacttgataacctgtgtgtagcttaggccaaggcctaaacagcaaacacagtgagttgaacctcctgaaatcacacggattttgagccaggttgatttagctaaacagccattgcctctgcttgagctattcgctgcctgaatatctgagccatctcatcggcctgatttgagcaaaagaaaccatatgtcagttgcttacctaaagcaaccacgggctgcagaacgggtcccccgtggtgccgtccacgcacatggcggcgaggcccggcagcaggatctgcgccagcttgtgcatcgcctccgagtcgcagtatggggactgattcagcgggccctcgcctcgctccgtgccagggtccgccaccgggagctccatcgcgccttcgccgccttgtgattagcaacctgcatgcagaatttgatggctggcaacaaagaggaggggccggcggctaatccgattcgaacgtacctgaggaaggagaagaggaatcaaccg

SEQ ID NO: 60813 - DNA, 1363 bp, Zea Mays
gtaatttactgctggttgaccgggccaaggaattcagtcgttcttgcctcaacttcgtgcgggcccgatccacaccacatctgcgcccgcggtcagctgcgtctccatgttacccttcattgcgttcgattgcgacttcgtgttttcgtccgccgccacagccagttcgtccctcctacgcagctatgacagcacgccagcctacgaaggctaggggtgggcgaggatggggtggacagaatcgtgcaccaccgacgcatattcttcagggacagcagcagcagtttcggcgtccccatcaggtacctgcgggtcgaggatctggtccaattcgtggggcgcctggttcatctggaatggagcctcaggttctgggagacagctgttgcagcatcatgcacagggttcgtttcccgggtctgattcttctgcgtctccagaagtggctgcacagcaagccggggatgacgttgtgaaggccaaaaagccgaaggcaccattctatttcagatatgttgaactgaagaatgtgatggatattgggtttactctaaaaaatcatggtggtgttaccttgaccataactgagtggcaggactccagagacatgacccctgcttatcatttagatgaattatggattcatatcactggtgtcccacatgcatggaggcattttctgtgtttttgggctttagggaatgtgattggtgccactttggaagtagacctgttgacttatagaaagaagggtgtcattagagttttggttgggatgatgaatcgggacaagctacctctggtcactgatttagtgtttggtacagccggctttgatatcactttcacccctgaggccgaggattttgtgcctacttcattaccttctgctggaaataatccacccagtcatgaagatggaggtcttggcaaggggaataatcaggaagatgcctatgatccagcatccaagaagctaaaaaatcagagaatacgggtggatgttcttggtgctacttcgccatcttctcctcgatcgtctacactcacgccaaaaacattagtaggcatgagcagctcgcgttcgagccttggattgcctgctccccattacaccgggcaacgtatatttggtcgaacaacatcgccagtccatcatgctgctctaaattttcagcaggagcctagtgtgactacgggtgatgtgcagatagcggaccctgatcttatcccccttgcatgcgcaatcgagcggacagggcttccccatccagaagctcagtgtgtggtgacggttgctgacctacagtttgttcaatcattgcttgatgcaggccagcgatccccgccttgcttggattag

SEQ ID NO: 60814 - DNA, 927 bp, Zea Mays
aaccatgtccgtggagccatctactctcccaaagtcgatatcaacattgcttgcgactacgtcagttttggaattacccgaatctatgctaggaaaaggagatgagcaagtgggtgataaagtcgggtcaactttgatcgttcctgaagttggaatgtctttcgaatccgagagaaaagcctacgacatgtaccatgactatgctagcaaggttggatttagtattagaaatagttggcaaaagaagcgaacagatggaactatatctcagaaatatatagtttgcagtagccaaagacatcgacaaaatactgagacatcaaaggacactacaaggacgggttgtgatgctcgcgtgttcagtttagtgccagcagagagggggtttggacagtgcaaaaagtagtacttgatcacaatcattatcttgctagtccaaacaagtcgcataaattgagatcccaacgacaaattatagaagcagacaggcagctaattggccagatacgggaagccggaatgaaaccagcccaggtgtatgagtttatgaaacagttttatggaggagccgacaaagtgccattctcaaggatggactgcaataatgagattggtcaggagcggaacaaatatttacaatccaatgatgtgcaaacattattggaatatttgaagaacaagcagacagaggatactacatttttttatgctattcaaatagacccgaacgatggccggatagctaatttattttgggccgatggtcagtctattttggattatgtatgctttggtgatgtcgtgtcgtttgacaccacgtttcagaccaataagtttgaaatgtcttttgctcctcttcttggaaccaaccatcacaagcagactgtcatttttggatgtgcgatgttatttaatgagactattgag

SEQ ID NO: 60815 - DNA, 1458 bp, Zea Mays
gcagctcaaagcacgaggttcgcctgagtcgagctcccaacctacaaaccctaaccgatctgattgaggggtgtagctagtgacaggaagaagcccgccagccgtcaccgcctctgcttcctctccgctgcccctgcttcttcgccggaggacgctccactgctacactgaccatcgctgcccgtgcgcagccttcaccaatgaaccagtgatggctggctccacctcctccgccacgcccaccaccgatgtttcaggaggatactccttgttgttattgttgttacactgagtggaagaataagatcgacctagccttcatcttagctgaggtggactgggtagtcacctccgtgtcccattgaacctgtggcaccggtgagggaggctaacgaggctgatgttacttggcagaccagagaaagggactttgctcccataaagatgtgatatgaccttgagcataaaaagtgggtcactgccaacaagaagtgtttggctgtgataaagaacacaattgtgcctacaatagtgggcttagtcccagagtgtgagcctgtcacagagtaccttgacaaaataaatagtcagttcactggctcttcaaaaacatatgctacccagttgataaagcagctgatgacagagaggtactctggaggtggcagtggcataagagagcacatactaaggatgagcaatatggcatcaagctaaaaccaatggatctggctctcaaggatgagtttcttatccatataatttttgcttccttggcaaaggaatttgatacttttgttgttaactataacatacagcccgagaagtgggacttagagaagctcatagctatgtgtgtgtaggagaaggagagaataaaggtttcacatggtggtaccatcaactatgtgaaagaaaacaagaaaaagaactttaatgctaactcctcctcaaagggaaaggctcctcagcatcagcaacagaaattcacagtggagaaagaccagtgtcttccctgcaagaagaaggaatactacaagaaagactatcccaagttcttgaaaatggtcatggcaaagaaatgtgagaatattatcatatttgtaaatgaattcctatatgtacgatattcaaaatctacttagtggattgactcaggagcaactgttcatgttgctaattctttacggggattccgttcaacgaggactacacaaagaagtgcaaatggagtccaagcagatgttgaagccgttggcgatctttctgtagagcttgctgatggtttcacgcttttacttagagatgttctttatgttccctctttacagagaaatttgattagtgtttcatacttggacaatgatggttatgattgccattttaaaaatagcaaatgtaagataatatttaataatgcatgtgttggtcttgctatcttacaaaacgagctttact

SEQ ID NO: 60816 - DNA, 427 bp, Zea Mays
cccctccctctcttcttccttgtcccttgcagcagccgccccccctccatctcctcctccccaaggtgcagccacttctcctctcttggatctccattgtgttggtgcaagcctctatttggagaattggtgggaggaagaagaaaggaggaaggaggaaaggaagaattcaaggtggtggggctccggatcgtacctagtaccatttcgaattcccggcaaaggtacctgattcatgttgggaatgggaaagtagcagcacgtccaccttcactctcataataacgctgcccagtcgcagccatgatttaattagaaacttcttgtcaaaggatgttttttatctagtagtgtgcactggttaattcagttcatgtcgttatggttatcttccctctgctagcagattaataatgtctagtttttt

SEQ ID NO: 60817 - DNA, 1040 bp, Zea Mays
agatgaatcggggctagagccctttttctcgtcactgcggcggcgccggccaacctgcttccgtcacgccctacctctccctccccacgccggccaatcttctactcatcgtggctctagctgctcctcttgccaccacactatcttccaccacagccacctacaatccactcccccatcagccaatccgctcgatccggagaccacaatggcgcctgggcttaaagctgcagcaaaatcaaccaaaccatcagaagtgccactaacagaatatgacaaattgagagccgagaatttgatgaggaataaccaaaagttgcaaagattcgatgttactaaactagcgtcaatactaaccatacttctgcaaagagcaaaggtgacactcgtgaaaaatctggatctttgtatgaggtctatgaaggtgaaggttctgaagatgaggaagtcaatcagtgtgcaacaagacaaagaaacaaattaaagagggtcttggcacatgtgcaacaagatgaacctacaagagtgactaggtagaatacaagggatttggctttaactttcagtccagaactgcaacaagtcaaaaccttaggcctctctactgccacatccacccctccacagggccagaacaactccagtgatcaagcttcttatgatgatgcaaaagtgccagacatggaggaaataactgagatgatgaatatgttgtcgtaatcattgtcctacatgggtggtgttctaatgtcatgttgcttatgtgttgcttatttctatacagttgtggtgcatatacctgaatgtgaatgtattgtctgtttatgtcatttttgcagttccatgattatagctacatcaaggtgcacttgaggcaaccatagatccaaatggaaaaaggaatagaagtattgtaacacccggattttaggggtccaaaacccgggcgctaacataaacaccaggtatgctgggaccaagtctcacacatatgatgtatagtggcacaggatcgaatgtcacatctttatatataacag

SEQ ID NO: 60818 - DNA, 838 bp, Zea Mays
attccgcctagatgaatcggggctagagccctttttctcgtcactgcggcggcgccggccaacctgcttccgtcacgccctacctctccctccccacgccggccaatcttctactcatcgtggctctagctgctcctcttgccaccacactatcttccaccacagccacctacaatccactcccccatcagccaatccgctcgatccggagaccacaatggcgcctgggcttaaagctgcagcaaaatcaaccaaaccatcagaagtgccactaacagaatatgacaaattgagagccgagaatttgatgaggaataaccaaaagttgcaaagattcgatgttactaaactagcgtcaatactaaccatacttctgcaaagagcaaaggtgacactcgtgaaaaatctggatctttgtatgaggtctatgaaggtgaaggttctgaagatgaggaagtcaatcagtgtgcaacaagacaaagaaacaaattaaagagggtcttggcacatgtgcaacaagatgaacctacaagagtgactaggtagaatacaagggatttggctttaactttcagtccagaactgcaacaagtcaaaaccttaggcctctctactgccacatccacccctccacagggccagaacaactccagtgatcaaggtgcacttgaggcaaccatagatccaaatggaaaaaggaatagaagtattgtaacacccggattttaggggtccaaaacccgggcgctaacataaacaccaggtatgctgggaccaagtctcacacatatgatgtatagtggcacaggatcgaatgtcacatctttatatataacag

SEQ ID NO: 60819 - DNA, 2530 bp, Zea Mays
aatatatgcctttcttcattgagtctcaactggtttatgcttcccacctttgcttgcccgagagactcaagcatcctgatctagattctttggtttttacagatgttgttctagtgcttcgggttgcatatatataaggctgatgcaatggacaaactccttcacttcttaacttgtcgatctaattgttatgttacttcttgcttcctcctcactacctgatactaccgcatcaaattaattccagtcttgttgagccaaccaaggtgggcggatcatctcctcctgtggctgttgttaactgccgtattcggaaagcaggtcaagatgaccccggagaaagtcagcgtaagcattgccatgagcccccctatacttctgatagactactcacgcgcaaaaccattaaatggggcagcagtggtgcgcgttgaagcaccctcatttatgaagaaccatgcccccattgacctagtcacacttatcaatattaaccaaagcatgagctggccagcagcatcgcaaacagagatgccatctaggttggatctactgaaaaatgccatgaagttcataataaggcagcttggtgatgatgaccgcgttgccattgtagcattcaacgatcaggtcatcaaagagtataccactggcattttagaaatatccggcagtggtcggatggctatcgaaaaaaaggtggatgggcttgtggctaagggtgacactgcttttaaaccaagcttggagcatgctgtgaagctcctggatgacagagcagataagaagcgtgcaggcttcatcgttctcatttcggatggtctagacggccagttcaaatggggagatgagagtatcacccccacggatcccatccgaggcctcctccgaaagtacccagtccacacctttggtttgggcaaggctcacgacccaagggcactgcactatatcgctaacatatcctacggaatctattcctccatcaccgacaacctcgagaacaagatcatagaggcatttgccgtctgcttagctgggttcaagaccgtagtagccgtcgacgtctgtgttgacatcaggtcaagcagtttgctgataacaaagatcgactctgggggttacatactccgggggagtaccggaggcatcttggttggcacactctatgctggggaggtgaaggacttcattgtctacttttcatatcataccgggagttggtcgagtggttaccatacaactttgaatgggattgctgctagtgtcacgtacaaggaagcgccgggcaggcagtcaactgccactgactcttgctcagtgtcactcccgattcacgtgaccgacaccgtgtatcctcctgaaaacccctgcccaccctaccccatggtcctgcagcagatggtccggttgaaggtgctagacttgcttataagcgtcctgaaagaattcctggtcctgaagggggaggctgctagtgccgtccacgggaaggaaggaggagatgacccggtcttgcaggccatcgcagcgagcttgctgcagaggaagtggaaagagttcaagcagtccgatgaatcctggaaagaagccccgaggaacttcgttaacctgggaggcatcgacgaggacatcagcgccatggtgggtatcctgaagcggggcttgggtgttggatgcatccactcatggctgtcgagctatcagatgcagcgcgcgacaattacaggcttgccaggatctcacatggttgcaaccggccaattccgcacgccagcgatgaacgcaatggtccaggaggcccataggcatttggccaaggaagcatctgcccaagatgcggggacgtcaattgtctgcaagcgcgccgttgagcttctagatggggtcaacaagcgattcgacctctggtgcaagctggaccatgacttgccgcgcactaaccaaccgtcatcgcaccaagaagaaggccatgagtcccgcgacatcaccgacgtcctgcatgggaacatcaaccgagcgaggcagcatgacatatacatggctgccgatcacgcgatcaagcaatggcggagcttcctcacatccgtggagaagacacatggccatgggccggacaagtaggcgcatgatgaggccaccggcagctaccacaaaccccagaacacagcgtgagtggtgttgtgtcgatgcagactcagacatactacaccatataaataaataaatttaatgagcgagaggccctgacaccagtgcctccgccgactccctccgatcctgagaataatatttgtgcgtactgtccctccgtcctcatggccattatattggtcatttgatttcccgtgtgttcactacttttgttctctaattactagtcctgatcagttccggacgactaagctgtaataatgtatcttttattttcttttttatattaatataaaagaccatatgtgtatgcgtcggtcaactctgttgtacggtgccatgcagtatggatgtgtttttggactataaatgcata

SEQ ID NO: 60820 - DNA, 713 bp, Zea Mays
gttacttcttgcttcctcctcactacctgatactaccgcatcaaattaattccaggtcctcaaaacaagaaactccaccgtaccagagctgtgcttcagataagatccaaagacccttacttggttccctgcattgattttcagtcttgttgagccaaccaaggtgggcggatcatctcctcctgtggctgttgttaactgccgtattcggaaagcaggtcaagatgaccccggagaaagtcagcgtaagcattgccatgagcccccctatacttctgatagactactcacgcgcaaaaccattaaatggggcagcagtggtgcgcgttgaagcaccctcatttatgaagaaccatgcccccattgacctagtcacacttatcaatattaaccaaagcatgagctggccagcagcatcgcaaacagagatgccatctaggttggatctactgaaaaatgccatgaagttcataataaggcagcttggtgatgatgaccgcgttgccattgtagcattcaacgatcaggtcatcaaagagtataccactggcattttagaaatatccggcagtggtcggatggctatcgaaaaaaaggtggatgggcttgtggctaagggtgacactgcttttaaaccaagcttggagcatgctgtgaagctgcctagtttacgttatgacctcaagttaagagcagccaaagcttggtacaag

SEQ ID NO: 60821 - DNA, 823 bp, Zea Mays
ctcaagcatcctgatctagattctttggtttttacagatgttgttctagtgcttcgggttgcatatatataaggctgatgcaatggacaaactccttcacttcttaacttgtcgatctaattgttatgttacttcttgcttcctcctcactacctgatactaccgcatcaaattaattccaggtcctcaaaacaagaaactccaccgtaccagagctgtgcttcagataagatccaaagacccttacttggttccctgcattgattttcagtcttgttgagccaaccaaggtgggcggatcatctcctcctgtggctgttgttaactgccgtattcggaaagcaggtcaagatgaccccggagaaagtcagcgtaagcattgccatgagcccccctatacttctgatagactactcacgcgcaaaaccattaaatggggcagcagtggtgcgcgttgaagcaccctcatttatgaagaaccatgcccccattgacctagtcacacttatcaatattaaccaaagcatgagctggccagcagcatcgcaaacagagatgccatctaggttggatctactgaaaaatgccatgaagttcataataaggcagcttggtgatgatgaccgcgttgccattgtagcattcaacgatcaggtcatcaaagagtataccactggcattttagaaatatccggcagtggtcggatggctatcgaaaaaaaggtggatgggcttgtggctaagggtgacactgcttttaaaccaagcttggagcatgctgtgaaggtcatgtatggtcacatctgctcccactacttctctt

SEQ ID NO: 60822 - DNA, 1045 bp, Zea Mays
tgcaaatcacaacttgttcttaatattcccctatcataggcttctagcgtggagtatgaaaatatgtgatatatattgtggtggtattgttttctgatgaaatgaatattattaccccataagtggacacaggccagttgaaccaatacgaacccgatcaactacatcgatgcatcaccaacccaagcatcccaatccaaacaacttgtaatttgaaactagagattgcgaactgaatttaaatcaaatacttcagtattggtctctagagaggaagctctgccaaccattactaataactgagaaggatttggcaatcgcttatctttgactcaataccttatgacctcggaaaggtttgaacccgtcagggactaaagatgccaaaggttgaagaagggtcacgagcaaagagggcatttactatcctttgcaatcttcaccgttggaaggattatgataactgcaatttcatttcttcttggatatgagctccacaagaggatgagacccctctcttcgccatatgtataggacctaccttcttgacatgacctatgcatccaaaagttctgagatgacccacttgtggtttactgccatgccatgcctcatatggagttttcccttgcacacttcttggcaatattatatatgaggaggtacctagaccatctaatcagattcgtacactaattgatgctattggctatgttattccttggctaattacacatgtgaagcaagctagaagctcatcttgtacccgcaacaagttgatacctgcagcacgtggacaaagctagatggcgtggacaaagctagatgggaagcctagtataattgcaaagtgaatcagttagattctagtagttactaaaatttttaagtgatatttgtatgatattgccactttggctttgcttctttgtgaacacaattggcagttactgaacatgtttgctatcgagttagttagcttcttgatattttgccaaggccaaaagcaatattattgagggtttataatttgattttttaacat

SEQ ID NO: 60823 - DNA, 754 bp, Zea Mays
tgcaaatcacaacttgttcttaatattcccctatcataggcttctagcgtggagtatgaaaatatgtgatatatattgtggtggtattgttttctgatgaaatgaatattattaccccataagtggacacaggccagttgaaccaatacgaacccgatcaactacatcgatgcatcaccaacccaagcatcccaatccaaacaacttgtaatttgaaactagagattgcgaactgaatttaaatcaaatacttcagtattggtctctagagaggaagctctgccaaccattactaataactgagaaggatttggcaatcgcttatctttgactcaataccttatgacctcggaaaggtttgaacccgtcagggactaaagatgccaaaggttgaagaagggtcacgagcaaagagggcatttactatcctttgcaatcttcaccgttggaagcaagctagaagctcatcttgtacccgcaacaagttgatacctgcagcacgtggacaaagctagatggcgtggacaaagctagatgggaagcctagtataattgcaaagtgaatcagttagattctagtagttactaaaatttttaagtgatatttgtatgatattgccactttggctttgcttctttgtgaacacaattggcagttactgaacatgtttgctatcgagttagttagcttcttgatattttgccaaggccaaaagcaatattattgagggtttataatttgattttttaacat

SEQ ID NO: 60824 - DNA, 760 bp, Zea Mays
tgcaaatcacaacttgttcttaatattcccctatcataggcttctagcgtggagtatgaaaatatgtgatatatattgtggtggtattgttttctgatgaaatgaatattattaccccataagtggacacaggccagttgaaccaatacgaacccgatcaactacatcgatgcatcaccaacccaagcatcccaatccaaacaacttgtaatttgaaactagagattgcgaactgaatttaaatcaaatacttcagtattggtctctagagaggaagctctgccaaccattactaataactgagaaggatttggcaatcgcttatctttgactcaataccttatgacctcggaaaggtttgaacccgtcagggactaaagatgccaaaggttgaagaagggtcacgagcaaagagggcatttactatcctttgcaatcttcaccgttggaaggtgaagcaagctagaagctcatcttgtacccgcaacaagttgatacctgcagcacgtggacaaagctagatggcgtggacaaagctagatgggaagcctagtataattgcaaagtgaatcagttagattctagtagttactaaaatttttaagtgatatttgtatgatattgccactttggctttgcttctttgtgaacacaattggcagttactgaacatgtttgctatcgagttagttagcttcttgatattttgccaaggccaaaagcaatattattgagggtttataatttgattttttaacat

SEQ ID NO: 60825 - DNA, 842 bp, Zea Mays
tgcaaatcacaacttgttcttaatattcccctatcataggcttctagcgtggagtatgaaaatatgtgatatatattgtggtggtattgttttctgatgaaatgaatattattaccccataagtggacacaggccagttgaaccaatacgaacccgatcaactacatcgatgcatcaccaacccaagcatcccaatccaaacaacttgtaatttgaaactagagattgcgaactgaatttaaatcaaatacttcagtattggtctctagagaggaagctctgccaaccattactaataactgagaaggatttggcaatcgcttatctttgactcaataccttatgacctcggaaaggtttgaacccgtcagggactaaagatgccaaaggttgaagaagggtcacgagcaaagagggcatttactatcctttgcaatcttcaccgttggaaggattatgataactgcaatttcatttcttcttggatatgagctccacaagaggatgagacccctctcttcgccatatgtataggtgaagcaagctagaagctcatcttgtacccgcaacaagttgatacctgcagcacgtggacaaagctagatggcgtggacaaagctagatgggaagcctagtataattgcaaagtgaatcagttagattctagtagttactaaaatttttaagtgatatttgtatgatattgccactttggctttgcttctttgtgaacacaattggcagttactgaacatgtttgctatcgagttagttagcttcttgatattttgccaaggccaaaagcaatattattgagggtttataatttgattttttaacat

SEQ ID NO: 60826 - DNA, 1634 bp, Zea Mays
cgcacaccagtcctgctcatggctccccgaaaccgtcgccccagcctccctcccctccccggctcccccgatttcagctgcccccgaactccgtcccctgttgtccctacctcgattctgccgccgcaaacgccgatgtgagtcgtccgatcccacccgcaaacgccgctccccgcctcgaggctcgccggaacggacgcctggataccgcggccgcaacccaccgccgcgcagggaggttgcgcccgcactaaaatggagcacagggaggctttgccccccacaactcggaggacgtgtgcaggccggagggcatgggggaactcgtgttgaggtctatgcatcaacatcttcttcaagaacccaaggttgttggggttcaatgtcggctggacaggggatggtgggggcggccaggtgatgtaagccaaatcgctttcggcctcctccagcagcgctgcgaagacgaggtgctcgaggtggcccagcgggaccacgaactggtgacggaacctgctcaacaaccacgcgcgcttgacctagcccccaccggagaccctcactgtggcctcctgagtcggatcacgcctcaccttgaactgcatcgacgcctcaacctgccggggcaaggtcacgtgccttgcggagagatatatgaggccttggaattgaggaatggtggatctgattattttgtcaagggtgttcttaagatattgctaaaggaggtgctcgcagggaggaggacctcaacgtggtgggcatactttgcagggtgcagagatactgtccaaggaaggaatcagtgctgagattgcgaactgaatttaaatcaaatacttcagtattggtctctagagaggaagctctgccaaccattactaataactgagaaggatttggcaatcgcttatctttgactcaataccttatgacctcggaaaggtttgaacccgtcagggactaaagatgccaaaggttgaagaagggtcacgagcaaagagggcatttactatcctttgcaatcttcaccgttggaaggattatgataactgcaatttcatttcttcttggatatgagctccacaagaggatgagacccctctcttcgccatatgtataggacctaccttcttgacatgacctatgcatccaaaagttctgagatgacccacttgtggtttactgccatgccatgcctcatatggagttttcccttgcacacttcttggcaatattatatatgaggaggtacctagaccatctaatcagattcgtacactaattgatgctattggctatgttattccttggctaattacacatgtgaagcaagctagaagctcatcttgtacccgcaacaagttgatacctgcagcacgtggacaaagctagatggcgtggacaaagctagatgggaagcctagtataattgcaaagtgaatcagttagattctagtagttactaaaatttttaagtgatatttgtatgatattgccactttggctttgcttctttgtgaacacaattggcagttactgaacatgtttgctatcgagttagttagcttcttgatattttgccaaggccaaaagcaatattattgagggtttataatttgattttttaacat

SEQ ID NO: 60827 - DNA, 838 bp, Zea Mays
cgcacaccagtcctgctcatggctccccgaaaccgtcgccccagcctccctcccctccccggctcccccgatttcagctgcccccgaactccgtcccctgttgtccctacctcgattctgccgccgcaaacgccgatgtgagtcgtccgatcccacccgcaaacgccgctccccgcctcgaggctcgccggaacggacgcctggataccgcggccgcaacccaccgccgcgcagggaggttgcgcccgcactaaaatggagcacagggaggctttgccccccacaactcggaggacgtgtgcaggccggagggcatgggggaactcgtgttgaggtctatgcatcaacatcttcttcaaggctataagaatgttggggggttgtacaactccatagcttggtgatcacggtggaggactacaacagctcccgcagaaggcctgccagcttgttcgccatggacctcaaccacaacaagctcgatctcttctactgactgctggtgtgcatcagcaccgtcaaccttcatgcatcccctagttcatgtaccggtactttggccgcggcagagtcgacatctgagatatatgaggccttggaattgaggaatggtggatctgattattttgtcaagggtgttcttaagatattgctaaaggaggtgctcgcagggaggaggacctcaacgtggtgggcatactttgcagggtgcagagatactgtccaaggaaggaatcagtgctgagattgcgaactgaatttaaatcaaatacttcagtattggtctctagagaggaagctctgccaaccattactaataactgagaagaattgttca

SEQ ID NO: 60828 - DNA, 755 bp, Zea Mays
cgcacaccagtcctgctcatggctccccgaaaccgtcgccccagcctccctcccctccccggctcccccgatttcagctgcccccgaactccgtcccctgttgtccctacctcgattctgccgccgcaaacgccgatgtgagtcgtccgatcccacccgcaaacgccgctccccgcctcgaggctcgccggaacggacgcctggataccgcggccgcaacccaccgccgcgcagggaggttgcgcccgcactaaaatggagcacagggaggctttgccccccacaactcggaggacgtgtgcaggccggagggcatgggggaactcgtgttgaggtctatgcatcaacatcttcttcaaggctataagaatgttggggggttgtacaactccatagcttggtgatcacggtggaggactacaacagctcccgcagaaggcctgccagcttgttcgccatggacctcaaccacaacaagctcgatctcttctactgactgctggtgtgcatcagcaccgtcaaccttcatgcatcccctagttcatgtaccggtactttggccgcggcagagtcgacatctgagatatatgaggccttggaattgaggaatggtggatctgattattttgtcaagggtgttcttaagtctgagggtattatactagctttatttgccatgcactcgtattcaccatagtcattcatgcatctaatattccaatggttatggttaactttatataatagaaaccaac

SEQ ID NO: 60829 - DNA, 1043 bp, Zea Mays
cgcacaccagtcctgctcatggctccccgaaaccgtcgccccagcctccctcccctccccggctcccccgatttcagctgcccccgaactccgtcccctgttgtccctacctcgattctgccgccgcaaacgccgatgtgagtcgtccgatcccacccgcaaacgccgctccccgcctcgaggctcgccggaacggacgcctggataccgcggccgcaacccaccgccgcgcagggaggttgcgcccgcactaaaatggagcacagggaggctttgccccccacaactcggaggacgtgtgcaggccggagggcatgggggaactcgtgttgaggtctatgcatcaacatcttcttcaagaacccaaggttgttggggttcaatgtcggctggacaggggatggtgggggcggccaggtgatgtaagccaaatcgctttcggcctcctccagcagcgctgcgaagacgaggtgctcgaggtggcccagcgggaccacgaactggtgacggaacctgctcaacaaccacgcgcgcttgacctagcccccaccggagaccctcactgtggcctcctgagtcggatcacgcctcaccttgaactgcatcgacgcctcaacctgccggggcaaggtcacgtgccttgcggaggctataagaatgttggggggttgtacaactccatagcttggtgatcacggtggaggactacaacagctcccgcagaaggcctgccagcttgttcgccatggacctcaaccacaacaagctcgatctcttctactgactgctggtgtgcatcagcaccgtcaaccttcatgcatcccctagttcatgtaccggtactttggccgcggcagagtcgacatctgagatatatgaggccttggaattgaggaatggtggatctgattattttgtcaagggtgttcttaagtctgagggtattatactagctttatttgccatgcactcgtattcaccatagtcattcatgcatctaatattccaatggttatggttaactttatataatagaaaccaac

SEQ ID NO: 60830 - DNA, 1013 bp, Zea Mays
cgcacaccagtcctgctcatggctccccgaaaccgtcgccccagcctccctcccctccccggctcccccgatttcagctgcccccgaactccgtcccctgttgtccctacctcgattctgccgccgcaaacgccgatgtgagtcgtccgatcccacccgcaaacgccgctccccgcctcgaggctcgccggaacggacgcctggataccgcggccgcaacccaccgccgcgcagggaggttgcgcccgcactaaaatggagcacagggaggctttgccccccacaactcggaggacgtgtgcaggccggagggcatgggggaactcgtgttgaggtctatgcatcaacatcttcttcaagtgcacaagcaccagcacaatggtaactcgtaagctcccataagtggcatgtcaaggtcctctctgagttctggtaaccgataagcgcccccatgaaccctaaccctaaactcccttctcctcctccatgcccctcgatcgaccgattgatggaccccatgcgtgccgggggtgttattgaccatgtcatagaacccaaggttgttggggttcaatgtcggctggacaggggatggtgggggcggccaggtgatgtaagccaaatcgctttcggcctcctccagcagcgctgcgaagacgaggtgctcgaggtggcccagcgggaccacgaactggtgacggaacctgctcaacaaccacgcgcgcttgacctagcccccaccggagaccctcactgtggcctcctgagtcggatcacgcctcaccttgaactgcatcgacgcctcaacctgccggggcaaggtcacgtgccttgcggagagatatatgaggccttggaattgaggaatggtggatctgattattttgtcaagggtgttcttaagtctgagggtattatactagctttatttgccatgcactcgtattcaccatagtcattcatgcatctaatattccaatggttatggttaactttatataatagaaaccaac

SEQ ID NO: 60831 - DNA, 2431 bp, Zea Mays
gaagaacatatattgtaatttctatttacataaccatgggtagtggatcttttgccaacaataatctcaaataagctactcttgaggagattatgagattattataatctggactttagattatataatctaaactcataatctaagtgtttatttatttgctggattatttgcgctgaattatataatctagagagattataatccgaaacaaacagggcatttgtccgaggctccaagctactagtcagtcgtgactcgtgcgtacgtacgtgtgccgacaaagtgatgaatcacccaaacaaccacaccacgaacatctgacatctcatcttgatccatccagctttgcctcgatccccggtccggccggccggtagccatgtccaccgcggaagaagccgctgctggtggtggcgacgactatgaccgcttgagcgagctgaaggcgttcgacgacagcaaggccggcgtcaagggcctcgtggacgctggcgtcacgaccatccctgccatcttccgcggccatctcctatcatcctctagcagtagcagcagtactagtcttagcattatcccggtcatcgacctctcggcggcggacgcagtcgcacgggaggaggtggtcgcccaggtgaaggctgcagccgagacggtggggttctgtccgagatgctggcgtcggtgaggcggttcaacgaggagccccacgaggtgaagcggccctactacacgcgggacgcccgtcgcaaggtgcggtccaactccaacttcgatctgttccagtcgccggcggccaactggcgcgacacggtcttctgcgaggcagcgctctcggaggccctggggctgggccccgggcagtatctctttggagaagatcgattggcagtcccatgttcagctgcctcctttgaagattgaaccatttcttgttgtctagatcgctcaacacataagaactagtgtattcagactgaaactgatccctcagagctgcactgaccaatgcgaaagtaacttgcactgaggcgtctaagttcaacaaactccagcaagatcttgcaaaagagcagttaagaaacagatgttctgaagaatcaaggtgcatgttcttccttgttacggggcatggtctgtgggtaaaactccgaagatccaatcagttgaacaaaggacaagctgctcgccttgtgttggatatgtcaaggtagaatcatcaacactaccaaaacactaccttggaatttggaaacatacattggcgaagaataaacaaggaaaaaaaaactcagattgaccattgacgcatttacaaggacacgttccagagtagataactaggcgtcactccagcaggataactcagtttccccgaaatttggatgacaaaaagttttggaacttacaaaattcgtccatggcatccagaggaggaagtgtgaagggaggaagaacgctttgtccagccttcggatccatcacacctgtcgcaggtgggagcgccagcgcaggttgctgcttgtttagcttctcaatgatgtaagagaaagtcccaaaggtcaggcagctctgaatcagagtttgtggtgcacctgaaacccagtacaaaaatgtgatattgatttcaacaattactgcaccaggacatcattctaataaataaaaacaagtcagcataacaaattaacttgaacagaatgcaaacagtcaacgtatgacacggacatcaacagaatacgagtaattggaatctaaacattgatacaccataatgcataagaaacaaaccacaatcaattatggagacatcctaaggacatcaaaatgcagaattgttaagaataataaccatccaactttctatccgtgacagtcagtcaggcactaaggacatcacataagtatgcatgtttctcataaaaggaacaagtctataaaaccttctaacttttcgagggtggtatactttacctcgtcacctttaaaactagttatttagccccctcaactttacaaaaccagacaaataacccctagacaattttagttagcggttttgatgacgtgacactaatttaagtgacatcagttttgtcttttttttaattgtcttctattagtgtccaaattttatataattttacacaaaaatctataattagctattatgtgttccgtaattttcctgtaattttagaaatatcagcttactaaataacaaaaactacataaaaaaagtttaatatttttgtcactgattcatttcttattttctgagactaaaatattaatagagctaaataatactattagtaaactattaaactttttgttaatttattaaacaagttaagtaactccgcctatgttgattggaagacttccttgagtcgtttcaacatagtcggtcccaagcccggtaaaggag

SEQ ID NO: 60832 - DNA, 547 bp, Zea Mays
cggaaacgtcgtccccgacccaggatgttggattatggctggaagaaataaatcttggtggctacaaacaagtatttcaagaaaatagtgtcaatggagaatatctagaaagcttgtccatgtttactactgagcagattctgcgctttattaggcggtgccatatgaaatggggagactttatcacactgtgcaaagagttgaggcgcattaaagtggcgtgccttaaaggggagcaagaagtccgcaggccatggtgggcgccggcatgcctctccgtagttttcgtgagggcagccaagcagaacaggaagtcccgtgttgtctcgttgaagctggaaccataatgcttgtcaagcacttcgaaccgtcgtgcgctagcctaaagtggagaagttttattcacttatctttgggttagttacttcatgtggaggacttgaagcttagaatgtttttatatatctcttatggaaaggcttcacccttccaattattgtaataagttatgcacttcgagtactatcaggacttgtaataaatacat

SEQ ID NO: 60833 - DNA, 685 bp, Zea Mays
acggaaacgtcgtccccgacccaggatgttggattatggctggaagaaataaatcttggtggctacaaacaagtatttcaagaaaatagtgtcaatggagaatatctagaaagcttgtccatgtttactactgagcagattctgcgctttattaggcggtgccatatgaaatggggagactttatcacactgtgcaaagagttgaggcgcattaaagtggcgtgccttaaaggggagcaagaagtccgcaggccatggtgggcgccggcatgcctctccgtagttttcgtgagggcagccaagcagaacaggaagtcccgtgttgtctcgttgaagctggaaccataatgcttgtcaagcacttcgaaccgtcgtgcgctagcctaaagtgaattcccagaagaagaagatgaaattcaagaagtggtttctgaagaggagtctgctttagtgcctgctcaacaagtaatgggagccatctaactggggtttaatagagggatttagacctccgtctctgcaacaaaggagaagttttattcacttatctttgggttagttacttcatgtggaggacttgaagcttagaatgtttttatatatctcttatggaaaggcttcacccttccaattattgtaataagttatgcacttcgagtactatcaggacttgtaataaatacat

SEQ ID NO: 60834 - DNA, 888 bp, Zea Mays
ggatggattccgtccaatcaaacccaaattcttctccctgtccattcggtgttatctctggcacttcgtggcgccttattgggtcgcgggtgcggtttgcgctctacaaattttgggtttggtttcgctgaaccctcatgacccaagcgaagtccactcctgggaggagggagatgggccgggcgcgatcgccggaaccgctcgatttcttcatatggactgtcgaggatgttggattatggctggaagaaataaatcttggtggctacaaacaagtatttcaagaaaatagtgtcaatggagaatatctagaaagcttgtccatgtttactactgagcagattctgcgctttattaggcggtgccatatgaaatggggagactttatcacactgtgcaaagagttgaggcgcattaaagtggcgtgccttaaaggggagcaagaagtccgcaggccatggtgggcgccggcatgcctctccgtagttttcgtgagggcagccaagcagaacaggaagtcccgtgttgtctcgttgaagctggaaccataatgcttgtcaagcacttcgaaccgtcgtgcgctagcctaaagtgaattcccagaagaagaagatgaaattcaagaagtggtttctgaagaggagtctgctttagtgcctgctcaacaagtaatgggagccatctaactggggtttaatagagggatttagacctccgtctctgcaacaaaggagaagttttattcacttatctttgggttagttacttcatgtggaggacttgaagcttagaatgtttttatatatctcttatggaaaggcttcacccttccaattattgtaataagttatgcacttcgagtactatcaggacttgtaataaatacat

SEQ ID NO: 60835 - DNA, 762 bp, Zea Mays
ctcactttcttggatggattccgtccaatcaaacccaaattcttctccctgtccattcggtgttatctctggcacttcgtggcgccttattgggtcgcgggtgcggtttgcgctctacaaattttgggtttggtttcgctgaaccctcatgacccaagcgaagtccactcctgggaggagggagatgggccgggcgcgatcgccggaaccgctcgatttcttcatatggactgtcgaggatgttggattatggctggaagaaataaatcttggtggctacaaacaagtatttcaagaaaatagtgtcaatggagaatatctagaaagcttgtccatgtttactactgagcagattctgcgctttattaggcggtgccatatgaaatggggagactttatcacactgtgcaaagagttgaggcgcattaaagtggcgtgccttaaaggggagcaagaagtccgcaggccatggtgggcgccggcatgcctctccgtagttttcgtgagggcagccaagcagaacaggaagtcccgtgttgtctcgttgaagctggaaccataatgcttgtcaagcacttcgaaccgtcgtgcgctagcctaaagtggagaagttttattcacttatctttgggttagttacttcatgtggaggacttgaagcttagaatgtttttatatatctcttatggaaaggcttcacccttccaattattgtaataagttatgcacttcgagtactatcaggacttgtaataaatacat

SEQ ID NO: 60836 - DNA, 996 bp, Zea Mays
gatatagagtggacaacacgcgcgcgaaaaaaaaaagccaccaacgcagctgcttctcggacacgcgcctcggagaggctcgcgtttgcgcaattgcgctgccagtgccaccggcccctgcccttccccagccgctggtcccacgcgcgtccagcccacgggcaccaccgccgcaccaggcttttagctctcgacgcgtcgccgccgaccacagcacggctagcgtgtcgattcctcccgctctcgtcgccggatccccccacccgacgcgcccacctctgagtccaatggtggcagagatccgttagggcgaggactggtcccagcttgggtcggatgttggattatggctggaagaaataaatcttggtggctacaaacaagtatttcaagaaaatagtgtcaatggagaatatctagaaagcttgtccatgtttactactgagcagattctgcgctttattaggcggtgccatatgaaatggggagactttatcacactgtgcaaagagttgaggcgcattaaagtggcgtgccttaaaggggagcaagaagtccgcaggccatggtgggcgccggcatgcctctccgtagttttcgtgagggcagccaagcagaacaggaagtcccgtgttgtctcgttgaagctggaaccataatgcttgtcaagcacttcgaaccgtcgtgcgctagcctaaagtgaattcccagaagaagaagatgaaattcaagaagtggtttctgaagaggagtctgctttagtgcctgctcaacaagtaatgggagccatctaactggggtttaatagagggatttagacctccgtctctgcaacaaaggagaagttttattcacttatctttgggttagttacttcatgtggaggacttgaagcttagaatgtttttatatatctcttatggaaaggcttcacccttccaattattgtaataagttatgcacttcgagtactatcaggacttgtaataaatacat

SEQ ID NO: 60837 - DNA, 1908 bp, Zea Mays
gatatagagtggacaacacgcgcgcgaaaaaaaaaagccaccaacgcagctgcttctcggacacgcgcctcggagaggctcgcgtttgcgcaattgcgctgccagtgccaccggcccctgcccttccccagccgctggtcccacgcgcgtccagcccacgggcaccaccgccgcaccaggcttttagctctcgacgcgtcgccgccgaccacagcacggctagcgtgtcgattcctcccgctctcgtcgccggatccccccacccgacgcgcccacctctgagtccaatggtggcagagatccgttagggcgaggactggtcccagcttgggtcgggtctccttctccagcttgtgagatcgacactggttgacactgattgtagcacttcgtggcgccttattgggtcgcgggtgcggtttgcgctctacaaattttgggtttggtttcgctgaaccctcatgacccaagcgaagtccactcctgggaggagggagatgggccgggcgcgatcgccggaaccgctcgatttcttcatatggactgtcgaggatgttggattatggctggaagaaataaatcttggtggctacaaacaagtatttcaagaaaatagtgtcaatggagaatatctagaaagcttgtccatgtttactactgagcagattctgcgctttattaggcggtgccatatgaaatggggagactttatcacactgtgcaaagagttgaggcgcattaaagtggcgtgccttaaaggggagcaagaagtccgcaggccatggtgggcgccggcatgcctctccgtagttttcgtgagggcagccaagcagaacaggaagtcccgtgttgtctcgttgaagctggaaccataatgcttgtcaagcacttcgaaccgtcgtgcgctagcctaaagtgcttgccactttgacatggcatacatacagagtattgtacttagctatttcccctgatggctagaccatagttactggtgctagtgatgaaacgctccggttttggaacgtgttcccctctccaaagtcccaggtacagaaaatcaatatgaaaatatgacctcgctgtgcaaacacacaaatatttaattcttcataaggaaaacattatagcataaacctggtatatgatttgcatgcaccggctccaaaactcaacccttctcccattcactatttcttcataataggtgaccattatatatcactgcatcggcaacttaattacagtggtattttgttgaggaagaatagtaacaattagtgacttgaaatttgaaaacagcaagtgtgtgttttaaagaggaataagtaagataacaatataaaatcgatgataaggtagattcataaatacgcataaaaacataatacaaacttgtacatgtatgaatctaaacacattttagaaattccccatatatttacggtggttaaggatttgtatgagaaattctaaattatctttacagtattcgtaacctgaatagaaggtacatagaagaaaaaaaatatgtcgattaaggaaggatatgccgatcataactattttaataaaagtattcacatttcataaagtaagtggttacatcattgtgaactaaacaggtatgcatagccagcaaattcaataggatatgagtgtcagtttttccttaattgggaaggcagtgtacctgttgtgaatagactttgcaggttttccaaatcagctatcgttcctagacattacactatcgttcgtggatagcacctggccctctgatcagtacctacaagctgcaacaaagtacagttaaatataaaataaaacataaattttcttctgcataacttattcaccagatcagagggccaagtgctagaacaagtataagttacaccagagtag

SEQ ID NO: 60838 - DNA, 2284 bp, Zea Mays
gaaatttgttcatattttagtttgcaagttattttatttatttaccagttactttcacttgtctaagttgtattggctgtagcagttagcatgcatgagtgttgatatgaacattttaaagatggaacaatcctttttagactaccagcaggcacaagaacttagctttggttctgaactttgttatttgcagcagcaagctcaagcagttatcttatgttctgaactttgttatgcacatgaaatttgttcatattttagtttgcaagttattttatttatttaccagttactttcacttgtctaagttgtattggctgtagcagttagcatgcatgagtgttgatatgaacagagtagttcaatactaggtatagtgactactttcagagagttcatagtatgtttcctttattgcaattccagggagatttgagtaatgcaagttcttcaaatttaagcattcatcagtattatgtatcaagatgttgtatattcacctctccggacttgtgtaaatgtttcttagtcctaatgcactaaggttccttttttgctcttttaaatctgcaaggtggtgtctgtttttattcaacaggaggtctacatggtggtgtctataggtctcgatgtcaagcctggttccactgttaagtgtgagcctggatatcgttttatgctgcacctttcccagaaacttgccattggaaccctctctgttgacaagaacccacccatacaatttgatctggttttcgataaagagtttgagctgtcgcacacatcaaaaactaccatcgtcttcttcattggctacaaggttgagcaaccattcaaggaagatggatatccttttttatttagcattgaattagttctatttcaagtagaagtgatcagaactttttttgtttccttgacctcttatttgccttcttccacaatggatcttgattctgaagatgaagacgaggagctgaatgttccagtagtcaaggaaaatggcaaagctggtgggaagatacagaaaagtcaagaaaaggcagttccttgaatttttcaaaaagaaagatatttttaataatgacctcggtggaccctatgcatttcttgagccgccttttgttcaaagaccccttctatataagatacatgcaaggagaaaaaagaggattcagataactgtatcactttctgcaagtacaaatacacaagcacagaatatctttccccttgatgtacttttagctagacctaccagtaatatttcgcttgagggcattctccgatatatcgagcgggatgatgcttggtggacgtgtacatactaatattaatcggtctcgaagcttccgatacactcagttctcacatgaacgagtcggatggacctccctagaaaccaaacacccctgaatcgcagtcatcatcagcgaacgacaatccgtgtgctgttgtgatgtagtagtactactgaagcacggaacgaaccgcacaggctagcccgcacggagcgaaccacacgggaaaagctgatgggaagaaatagaaaagtcaagaaaaggcagttcctgcagcttcaaaatctagtccggcttccaagaagagcaaggatgacgatgattctgatgaggacgagactgatgattctaacgaggacgagacagatgattctgatgagggtgagggtttgtctcctaaagaaggcgatgatgatgatttaagtgatgaagatgataccagtgacgatgaggaggaagacacttcaactcctaagaagcatgaggcaggcaagaagagagctgctgaaagttccatgctgaaaactcctctatctgataagaaagcaaaagttgccacaccgtcagctcagaagacaggtgtgccattgaacggactaagaaaactgtcgtcgaagattgtataggtgtgactctgttcaaggatagtcttgaggttctagaacagaagagtagtggtgtgcatcagtgtatctgtttacgggataatagtggttggttaggtgtgtgaagaaaaagtttagtgttatggtttgtatgtgatacatattaactatgccttggaatgttcatgtgttgtcctgattgcgtgtggtatctcttgttcagttcaagttgcgttttctacatggccatggggaccatctgccatcattttctttttgtgatttggtgaaaaaggaaaggatgtgcacctttgcaagcgggtatggagatgagctgcgctattttttttacaaaatgtctgctgggattgaactgtc

SEQ ID NO: 60839 - DNA, 1576 bp, Zea Mays
gaaatttgttcatattttagtttgcaagttattttatttatttaccagttactttcacttgtctaagttgtattggctgtagcagttagcatgcatgagtgttgatatgaacattttaaagatggaacaatcctttttagactaccagcaggcacaagaacttagctttggttctgaactttgttatttgcagcagcaagctcaagcagttatcttatgttctgaactttgttatgcacatgaaatttgttcatattttagtttgcaagttattttatttatttaccagttactttcacttgtctaagttgtattggctgtagcagttagcatgcatgagtgttgatatgaacagagtagttcaatactaggtatagtgactactttcagagagttcatagtatgtttcctttattgcaattccagggagatttgagtaatgcaagttcttcaaatttaagcattcatcagtattatgtatcaagatgttgtatattcacctctccggacttgtgtaaatgtttcttagtcctaatgcactaaggttccttttttgctcttttaaatctgcaaggtggtgtctgtttttattcaacaggaggtctacatggtggtgtctataggtctcgatgtcaagcctggttccactgttaagtgtgagcctggatatcgttttatgctgcacctttcccaggctgctcttggggaatcgaagaagagtgataatgcgctattgccttgatgtatgtcaaaattgatgatcagaaacttgccattggaaccctctctgttgacaagaacccacccatacaatttgatctggttttcgataaagagtttgagctgtcgcacacatcaaaaactaccatcgtcttcttcattggctacaaggttgagcaaccattcaaggaagatggaatggatcttgattctgaagatgaagacgaggagctgaatgttccagtagtcaaggaaaatggcaaagctggtgggaagatacagaaaagtcaagaaaaggcagttccttgaatttttcaaaaagaaagatatttttaataatgacctcggtggaccctatgcatttcttgagaaaagtcaagaaaaggcagttcctgcagcttcaaaatctagtccggcttccaagaagagcaaggatgacgatgattctgatgaggacgagactgatgattctaacgaggacgagacagatgattctgatgagggtgagggtttgtctcctaaagaaggcgatgatgatgatttaagtgatgaagatgataccagtgacgatgaggaggaagacacttcaactcctaagaagcatgaggcaggcaagaagagagctgctgaaagttccatgctgaaaactcctctatctgataagaaagcaaaagttgccacaccgtcagctcagaagacagttcaagttgcgttttctacatggccatggggaccatctgccatcattttctttttgtgatttggtgaaaaaggaaaggatgtgcacctttgcaagcgggtatggagatgagctgcgctattttttttacaaaatgtctgctgggattgaactgtc

SEQ ID NO: 60840 - DNA, 1783 bp, Zea Mays
gaaatttgttcatattttagtttgcaagttattttatttatttaccagttactttcacttgtctaagttgtattggctgtagcagttagcatgcatgagtgttgatatgaacattttaaagatggaacaatcctttttagactaccagcaggcacaagaacttagctttggttctgaactttgttatttgcagcagcaagctcaagcagttatcttatgttctgaactttgttatgcacatgaaatttgttcatattttagtttgcaagttattttatttatttaccagttactttcacttgtctaagttgtattggctgtagcagttagcatgcatgagtgttgatatgaacagagtagttcaatactaggtatagtgactactttcagagagttcatagtatgtttcctttattgcaattccagggagatttgagtaatgcaagttcttcaaatttaagcattcatcagtattatgtatcaagatgttgtatattcacctctccggacttgtgtaaatgtttcttagtcctaatgcactaaggttccttttttgctcttttaaatctgcaaggtggtgtctgtttttattcaacaggaggtctacatggtggtgtctataggtctcgatgtcaagcctggttccactgttaagtgtgagcctggatatcgttttatgctgcacctttcccagaaacttgccattggaaccctctctgttgacaagaacccacccatacaatttgatctggttttcgataaagagtttgagctgtcgcacacatcaaaaactaccatcgtcttcttcattggctacaaggttgagcaaccattcaaggaagatggatatccttttttatttagcattgaattagttctatttcaagtagaagtgatcagaactttttttgtttccttgacctcttatttgccttcttccacaatggatcttgattctgaagatgaagacgaggagctgaatgttccagtagtcaaggaaaatgatatttttaataatgacctcggtggaccctatgcatttcttgagaaaagtcaagaaaaggcagttcctgcagcttcaaaatctagtccggcttccaagaagagcaaggatgacgatgattctgatgaggacgagactgatgattctaacgaggacgagacagatgattctgatgagggtgagggtttgtctcctaaagaaggcgatgatgatgatttaagtgatgaagatgataccagtgacgatgaggaggaagacacttcaactcctaagaagcatgaggcaggcaagaagagagctgctgaaagttccatgctgaaaactcctctatctgataagaaagcaaaagttgccacaccgtcagctcagaagacaggtgtgccattgaacggactaagaaaactgtcgtcgaagattgtataggtgtgactctgttcaaggatagtcttgaggttctagaacagaagagtagtggtgtgcatcagtgtatctgtttacgggataatagtggttggttaggtgtgtgaagaaaaagtttagtgttatggtttgtatgtgatacatattaactatgccttggaatgttcatgtgttgtcctgattgcgtgtggtatctcttgttcagttcaagttgcgttttctacatggccatggggaccatctgccatcattttctttttgtgatttggtgaaaaaggaaaggatgtgcacctttgcaagcgggtatggagatgagctgcgctattttttttacaaaatgtctgctgggattgaactgtc

SEQ ID NO: 60841 - DNA, 2067 bp, Zea Mays
atgtggaagacgaccgggaagcgatctacttgggggacagctgatggagataggctagaacagcgtctcggcgcggacaaggtgaaggttctggagcaggcgttcatggaggaagcagataatgcgctgccacatccaatggaggatgcttacctcgaggcttgtcacacaaacaacatggaatggaaaatgtgcatatatggtgctgattgcagtgagattagcctcgtccaagttaggggatctgtaaattgtctcaaacgcaacgctattgaaatggagggatacattcgccctcttgacgtagaccaacattctgatggtgttgcagatgatcatcccaacgattccttattctctccaacataccatcatcacaaggaggtctacatggtggtgtctataggtctcgatgtcaagcctggttccactgttaagtgtgagcctggatatcgttttatgctgcacctttcccagaaacttgccattggaaccctctctgttgacaagaacccacccatacaatttgatctggttttcgataaagagtttgagctgtcgcacacatcaaaaactaccatcgtcttcttcattggctacaaggttgagcaaccattcaaggaagatggatatccttttttatttagcattgaattagttctatttcaagtagaagtgatcagaactttttttgtttccttgacctcttatttgccttcttccacaatggatcttgattctgaagatgaagacgaggagctgaatgttccagtagtcaaggaaaatggcaaagctggtgggaagatacagaaaagtcaagaaaaggcagttccttgaatttttcaaaaagaaagatatttttaataatgacctcggtggaccctatgcatttcttgagccgccttttgttcaaagaccccttctatataagatacatgcaaggagaaaaaagaggattcagataactgtatcactttctgcaagtacaaatacacaagcacagaatatctttccccttgatgtacttttagctagacctaccagtaatatttcgcttgagggcattctccgatatatcgagcgggatgatgcttggtggacgtgtacatactaatattaatcggtctcgaagcttccgatacactcagttctcacatgaacgagtcggatggacctccctagaaaccaaacacccctgaatcgcagtcatcatcagcgaacgacaatccgtgtgctgttgtgatgtagtagtactactgaagcacggaacgaaccgcacaggctagcccgcacggagcgaaccacacgggaaaagctgatgggaagaaatagaaaagtcaagaaaaggcagttcctgcagcttcaaaatctagtccggcttccaagaagagcaaggatgacgatgattctgatgaggacgagactgatgattctaacgaggacgagacagatgattctgatgagggtgagggtttgtctcctaaagaaggcgatgatgatgatttaagtgatgaagatgataccagtgacgatgaggaggaagacacttcaactcctaagaagcatgaggcaggcaagaagagagctgctgaaagttccatgctgaaaactcctctatctgataagaaagcaaaagttgccacaccgtcagctcagaagacaggtgtgccattgaacggactaagaaaactgtcgtcgaagattgtataggtgtgactctgttcaaggatagtcttgaggttctagaacagaagagtagtggtgtgcatcagtgtatctgtttacgggataatagtggttggttaggtgtgtgaagaaaaagtttagtgttatggtttgtatgtgatacatattaactatgccttggaatgttcatgtgttgtcctgattgcgtgtggtatctcttgttcagttcaagttgcgttttctacatggccatggggaccatctgccatcattttctttttgtgatttggtgaaaaaggaaaggatgtgcacctttgcaagcgggtatggagatgagctgcgctattttttttacaaaatgtctgctgggattgaactgtc

SEQ ID NO: 60842 - DNA, 1541 bp, Zea Mays
atgtggaagacgaccgggaagcgatctacttgggggacagctgatggagataggctagaacagcgtctcggcgcggacaaggtgaaggttctggagcaggcgttcatggaggaagcagataatgcgctgccacatccaatggaggatgcttacctcgaggcttgtcacacaaacaacatggaatggaaaatgtgcatatatggtgctgattgcagtgagattagcctcgtccaagttaggggatctgtaaattgtctcaaacgcaacgctattgaaatggagggatacattcgccctcttgacgtagaccaacattctgatggtgttgcagatgatcatcccaacgattccttattctctccaacataccatcatcacaaggaggtctacatggtggtgtctataggtctcgatgtcaagcctggttccactgttaagtgtgagcctggatatcgttttatgctgcacctttcccaggctgctcttggggaatcgaagaagagtgataatgcgctattgccttgatgtatgtcaaaattgatgatcagaaacttgccattggaaccctctctgttgacaagaacccacccatacaatttgatctggttttcgataaagagtttgagctgtcgcacacatcaaaaactaccatcgtcttcttcattggctacaaggttgagcaaccattcaaggaagatggaatggatcttgattctgaagatgaagacgaggagctgaatgttccagtagtcaaggaaaatgatatttttaataatgacctcggtggaccctatgcatttcttgagaaaagtcaagaaaaggcagttcctgcagcttcaaaatctagtccggcttccaagaagagcaaggatgacgatgattctgatgaggacgagactgatgattctaacgaggacgagacagatgattctgatgagggtgagggtttgtctcctaaagaaggcgatgatgatgatttaagtgatgaagatgataccagtgacgatgaggaggaagacacttcaactcctaagaagcatgaggcaggcaagaagagagctgctgaaagttccatgctgaaaactcctctatctgataagaaagcaaaagttgccacaccgtcagctcagaagacaggtgtgccattgaacggactaagaaaactgtcgtcgaagattgtataggtgtgactctgttcaaggatagtcttgaggttctagaacagaagagtagtggtgtgcatcagtgtatctgtttacgggataatagtggttggttaggtgtgtgaagaaaaagtttagtgttatggtttgtatgtgatacatattaactatgccttggaatgttcatgtgttgtcctgattgcgtgtggtatctcttgttcagttcaagttgcgttttctacatggccatggggaccatctgccatcattttctttttgtgatttggtgaaaaaggaaaggatgtgcacctttgcaagcgggtatggagatgagctgcgctattttttttacaaaatgtctgctgggattgaactgtc

SEQ ID NO: 60843 - DNA, 2518 bp, Zea Mays
cggttgagccagccacgcaaaaaaggggataaacgaatagacccaccgcatctcaacatcctctcctcgtcttctcccaacgccgccgcagcgttcttgtcgggctccggtcaggtgaagtatgctgatgaacttcagggactggatctcgtaccggctcggttcctcgctgctgtccgccaggccgttcgcgctttcccccggtgctgatgacggcgcctccgagggtgatgctcatggtacagcacacaatgactttgtagatactgttactgccaatacattttcttctaatgatatgcgggcgtcagaggtcacagccaactctggtagtggtgcaatttattctggtattgttcaacaagatgatgataataagaagtcagatccactgatgaaagtcgaggcgcttcaaatcaagtttctgcggttagtatacaggactggagtgtctcccagtgctgatgtagttgcacaggttctgtacagattgcagcttgcaaatttgattaaagccagtgaatcagatgcaaggagaacaaacctagctatcaacaaagctagggttatagcagcacagcaggaagcaccgggtgggcctgatctggatgtctcaatgcaaatccttcttctggggaagtctggtgtgggaaagagtgccacaataaattcaatttttgatgagaggaaggttgctactgatgctctggttcctgctactcataggataaagaaaattgaaggaacaattaaaggaataagagtcacagtcatcgacacacctggcctggtgtctcattaccatggccaaaggaggaacatgaagattctgaattctgtcaagcacttcattaagcgatccccacctgatatcatcttatactttgagcgtttggaccatattaacagcagatacagtgattacccactgctgaagcttatgactgacatattggggtctccaatgtggttcaatactgtccttgtaatgactcactgttcctcatctcctcctgaaggaccagatggttacccattggaatatgatacttatacgcgttactgcaagaatgtggtgcagcgtcacatccaggctgcagtttccaacacgcagttggataatccatttgtgctcatagacaatcatccaatgtgcagacgaaacaccaagggtgaaagggttttaccaaatgggcaggtatgggtatcagaactgctgctgctgtgtggggcaaccaagttgctgacagaagcaaattccttgcttaagtttcaagatagcttcctactgtcacaagcaaacaccaggctgccttcgctgcctcatcttctttcttcacttcttaagcctcactcttcatccagttcagatgccattgacagtcaattgacagaaatgtcagatgaggaggatgaatatgatcaactaccacccttccgcattctaaagaaatctgaatatgaaaatttgaccaatgaacagaagtctgcatatcttgacgaactggactaccgtgagactttgtacctaaagaaacagtggaaagaaggaatcagaaggaaaaagcttactgaagctcagagtgatgaagttggtgatgattatgatgagagtgcatccccagagattgtgcacatgtcagatatggacattccactaagttttgactctgattatcctgtgcatcgttaccgtcacattataactgatgatcagttgtttagaccagttttggatccacaaggatgggaccatgatattgggttcgatgccatcaattttgaagcatctcaagagttgaaaaagaatgtctctgcggcaattacaggacagatgagaaaggacaaggaagacatgtatatccattcagaatgttcagtaagttacaatgctcagagaggctgctccttgatggggggtatggatatgcagacggcaagcaaagatttggtctgtactgttcatggggatgccaagttccacaatctgccttggaacagtattggaggtggcatttctgttactaagtttggcaacaagtactttgctggggctaagttagaagactctgttaccattgggagacgagttaaactggtagccaacgccggtaggatgtctggctgtgggcaggtggcacatggaggtggtgtggagattacagcaagggggaaagattaccctgtgagggaagggagtgtcactgccgcggtctctgctttgtcatttgaaaaggaaaccgtaattggggccaaccttcagtcagacttccgagtgggccgtggatcaaaaatatcagtcagcgctaacctaaatagtagaaatttgggcaatctcagcgtcagaactagcacatcagaccacgctgagatagctttgataacagttgtctccttgatccagttcattcttaggagaagatcagcagcagataataaagatgagcaacagattggcaccaatttggatgactaaataacagtgttcttatggtggtaaggcgagcaagcaaatggg

SEQ ID NO: 60844 - DNA, 2950 bp, Zea Mays
taaacgaatagacccaccgcatctcaacatcctctcctcgtcttctcccaacgccgccgcagcgttcttgtcgggctccggtcaggtacgtcgagctcgggccagttgcgatgtccctgcttggttttattatacgggagattcggcagtccgctacgaggtgaagtatgctgatgaacttcagggactggatctcgtaccggctcggttcctcgctgctgtccgccaggccgttcgcgctttcccccggtgctgatgacggcgcctccgagggtgatgctcatggtacagcacacaatgactttgtagatactgttactgccaatacattttcttctaatgatatgcgggcgtcagaggtcacagccaactctggtagtggtgcaatttattctggtattgttcaacaagatgatgataataagaagtcagatccactgatgaaagtcgaggcgcttcaaatcaagtttctgcggttagtatacaggactggagtgtctcccagtgctgatgtagttgcacaggttctgtacagattgcagcttgcaaatttgattaaagccagtgaatcagatgcaaggagaacaaacctagctatcaacaaagctagggttatagcagcacagcaggaagcaccgggtgggcctgatctggatgtctcaatgcaaatccttcttctggggaagtctggtgtgggaaagagtgccacaataaattcaatttttgatgagaggaaggttgctactgatgctctggttcctgctactcataggataaagaaaattgaaggaacaattaaaggaataagagtcacagtcatcgacacacctggcctggtgtctcattaccatggccaaaggaggaacatgaagattctgaattctgtcaagcacttcattaagcgatccccacctgatatcatcttatactttgagcgtttggaccatattaacagcagatacagtgattacccactgctgaagcttatgactgacatattggggtctccaatgtggttcaatactgtccttgtaatgactcactgttcctcatctcctcctgaaggaccagatggttacccattggaatatgatacttatacgcgttactgcaagaatgtggtgcagcgtcacatccaggctgcagtttccaacacgcagttggataatccatttgtgctcatagacaatcatccaatgtgcagacgaaacaccaagggtgaaagggttttaccaaatgggcaggtatgggtatcagaactgctgctgctgtgtggggcaaccaagttgctgacagaagcaaattccttgcttaagtttcaagatagcttcctactgtcacaagcaaacaccaggctgccttcgctgcctcatcttctttcttcacttcttaagcctcactcttcatccagttcagatgccattgacagtcaattgacagaaatgtcagatgaggaggatgaatatgatcaactaccacccttccgcattctaaagaaatctgaatatgaaaatttgaccaatgaacagaagtctgcatatcttgacgaactggactaccgtgagactttgtacctaaagaaacagtggaaagaaggaatcagaaggaaaaagcttactgaagctcagagtgatgaagttggtgatgattatgatgagagtgcatccccagagattgtgcacatgtcagatatggacattccactaagttttgactctgattatcctgtgcatcgttaccgtcacattataactgatgatcagttgtttagaccagttttggatccacaaggatgggaccatgatattgggttcgatgccatcaattttgaagcatctcaagagttgaaaaagaatgtctctgcggcaattacaggacagatgagaaaggacaaggaagacatgtatatccattcagaatgttcagtaagttacaatgctcagagaggctgctccttgatggggggtatggatatgcagacggcaagcaaagatttggtctgtactgttcatggggatgccaagttccacaatctgccttggaacagtattggaggtggcatttctgttactaagtttggcaacaagtactttgctggggctaagttagaagactctgttaccattgggagacgagttaaactggtagccaacgccggtaggatgtctggctgtgggcaggtggcacatggaggtggtgtggagattacagcaagggggaaagattaccctgtgagggaagggagtgtcactgccgcggtctctgctttgtcatttgaaaaggaaaccgtaattggggccaaccttcagtcagacttccgagtgggccgtggatcaaaaatatcagtcagcgctaacctaaatagtagaaatttgggcaatctcagcgtcagaactagcacatcagaccacgctgagatagctttgataacagttgtctccttgatccagttcattcttaggagaagatcagcagcagataataaagatgagcaacagattggcaccaatttggatgactaaataacaggtacaaggaaaagacaatgattgcatgctttagatgctcatcgtcatcaggatttgctgcaattatgttaacctaaggcgcctgtcaatctagagttccaatttgtacagaattcttgtatatcaattatgagtataaataatgtatgaaggaggcattttccatgagaagagctccttctgcccataagcgatttttttaggttttaaggatgtaatcagacgccgttttgagttttaacatcacacaaagtttatttagtttattacttgcataggaatgtttatttacttaccaagcttctgttttccaattttaaaaggtctcagtgatgagatttcactgctcagagacggatacaacctttatctgtataaatgaggaaactataacatcacatggtttttgttttgcaatagaa

SEQ ID NO: 60845 - DNA, 2851 bp, Zea Mays
taaacgaatagacccaccgcatctcaacatcctctcctcgtcttctcccaacgccgccgcagcgttcttgtcgggctccggtcaggtgaagtatgctgatgaacttcagggactggatctcgtaccggctcggttcctcgctgctgtccgccaggccgttcgcgctttcccccggtgctgatgacggcgcctccgagggtgatgctcatgatactgttactgccaatacattttcttctaatgatatgcgggcgtcagaggtcacagccaactctggtagtggtgcaatttattctggtattgttcaacaagatgatgataataagaagtcagatccactgatgaaagtcgaggcgcttcaaatcaagtttctgcggttagtatacaggactggagtgtctcccagtgctgatgtagttgcacaggttctgtacagattgcagcttgcaaatttgattaaagccagtgaatcagatgcaaggagaacaaacctagctatcaacaaagctagggttatagcagcacagcaggaagcaccgggtgggcctgatctggatgtctcaatgcaaatccttcttctggggaagtctggtgtgggaaagagtgccacaataaattcaatttttgatgagaggaaggttgctactgatgctctggttcctgctactcataggataaagaaaattgaaggaacaattaaaggaataagagtcacagtcatcgacacacctggcctggtgtctcattaccatggccaaaggaggaacatgaagattctgaattctgtcaagcacttcattaagcgatccccacctgatatcatcttatactttgagcgtttggaccatattaacagcagatacagtgattacccactgctgaagcttatgactgacatattggggtctccaatgtggttcaatactgtccttgtaatgactcactgttcctcatctcctcctgaaggaccagatggttacccattggaatatgatacttatacgcgttactgcaagaatgtggtgcagcgtcacatccaggctgcagtttccaacacgcagttggataatccatttgtgctcatagacaatcatccaatgtgcagacgaaacaccaagggtgaaagggttttaccaaatgggcaggtatgggtatcagaactgctgctgctgtgtggggcaaccaagttgctgacagaagcaaattccttgcttaagtttcaagatagcttcctactgtcacaagcaaacaccaggctgccttcgctgcctcatcttctttcttcacttcttaagcctcactcttcatccagttcagatgccattgacagtcaattgacagaaatgtcagatgaggaggatgaatatgatcaactaccacccttccgcattctaaagaaatctgaatatgaaaatttgaccaatgaacagaagtctgcatatcttgacgaactggactaccgtgagactttgtacctaaagaaacagtggaaagaaggaatcagaaggaaaaagcttactgaagctcagagtgatgaagttggtgatgattatgatgagagtgcatccccagagattgtgcacatgtcagatatggacattccactaagttttgactctgattatcctgtgcatcgttaccgtcacattataactgatgatcagttgtttagaccagttttggatccacaaggatgggaccatgatattgggttcgatgccatcaattttgaagcatctcaagagttgaaaaagaatgtctctgcggcaattacaggacagatgagaaaggacaaggaagacatgtatatccattcagaatgttcagtaagttacaatgctcagagaggctgctccttgatggggggtatggatatgcagacggcaagcaaagatttggtctgtactgttcatggggatgccaagttccacaatctgccttggaacagtattggaggtggcatttctgttactaagtttggcaacaagtactttgctggggctaagttagaagactctgttaccattgggagacgagttaaactggtagccaacgccggtaggatgtctggctgtgggcaggtggcacatggaggtggtgtggagattacagcaagggggaaagattaccctgtgagggaagggagtgtcactgccgcggtctctgctttgtcatttgaaaaggaaaccgtaattggggccaaccttcagtcagacttccgagtgggccgtggatcaaaaatatcagtcagcgctaacctaaatagtagaaatttgggcaatctcagcgtcagaactagcacatcagaccacgctgagatagctttgataacagttgtctccttgatccagttcattcttaggagaagatcagcagcagataataaagatgagcaacagattggcaccaatttggatgactaaataacaggtacaaggaaaagacaatgattgcatgctttagatgctcatcgtcatcaggatttgctgcaattatgttaacctaaggcgcctgtcaatctagagttccaatttgtacagaattcttgtatatcaattatgagtataaataatgtatgaaggaggcattttccatgagaagagctccttctgcccataagcgatttttttaggttttaaggatgtaatcagacgccgttttgagttttaacatcacacaaagtttatttagtttattacttgcataggaatgtttatttacttaccaagcttctgttttccaattttaaaaggtctcagtgatgagatttcactgctcagagacggatacaacctttatctgtataaatgaggaaactataacatcacatggtttttgttttgcaatagaa

SEQ ID NO: 60846 - DNA, 1597 bp, Zea Mays
ctgacccactctcgtcgcacgcaacgcaagtagcaaagcaggacccatcctctcccatctctcggtctccccatcccaacccgccgccgccgccgccgcttctcccgtctccagcgcccacagcgccattgtatccgcggggcgagctgagtcaccaagctggtctagggcccatccatttggaaccctcgcgagaagcaaagcggacggagcgccagcgttcttagatcgattgctcgccaggctgttggcgaggagtcgtcaaccctcacggcagccatgtctgtggagctcatcctgtggcttttctccttcgtctccgtcatggtcctcatcggcctcaccgcataccagcttatctgtctgtcagatttggagtatgattatatcaacccatatgattcatcgtctcgcatcaacgctgtggtgctgatagaatactcactccaaggggccctgtgtgcttctttcctcttgacattgcattggttcccgtttctagtcatgacaccagtaacatactaccatgtcaaactgattaagtataatgccccctggcattggaactagttttgatctcatgaactagtgaacttattttggtgggatatctgagatgcttttctaaatttaatttttgccaggctttaatatctgaatgaatatgaactagttttttttattcaggtatttggctcggaaacatcttgtagatgtcactgaaatttttagacaattaagtgacgagaagaagtacaggatgatcaagcttgccttctacttctgcctatttattataactatttacaggcttgtaatgacagctgtgatgttgtttattgatgaggacataaatttggcagaaactaggagtatctagacttcgccaccaacttgtcatggggatggagcagagttgtagcttgaaccagggagaccacaactcaatgccttgacttagttgtgagaaacaagatcagtttgtgccctgtagctggaggagctaacctggtactccttttaccctaaatcgtaagttgttttagttttttctagatgcatagcttttacgatgtatcctccagatgcatagtaaaagttatatatttagaaaaaacagaacaacttataatttggaatggagtattcatttcatccatcagattgtgatgtacaatgaattcccatagtttggtccatcggtaccatgtttgtaaattgggcagtcaatgatgtgcatcactgcaggatgaacgcacgtttggtaattgttgtgcaattctttgtacttgtggacaagtgctgtattctacacattgtttgcatacagacgatgtgtggttggtgtcataatttaccactaaacctttggtaaactgagcctgtcataactgcgagaaaagattggtaaaaaaactaagttgggatagaatgctaataaagtccggcaccctgtggttatggcaacacctgcaaaaaaaggtgctatagaatgactaacatgtggttactgaagattacgaacctagatattgagttgaactaaaacacgccaaataaaaattttgaactaaaagacgacaaataagaaaacacg

SEQ ID NO: 60847 - DNA, 1430 bp, Zea Mays
ctgacccactctcgtcgcacgcaacgcaagtagcaaagcaggacccatcctctcccatctctcggtctccccatcccaacccgccgccgccgccgccgcttctcccgtctccagcgcccacagcgccattgtatccgcggggcgagctgagtcaccaagctggtctagggcccatccatttggaaccctcgcgagaagcaaagcggacggagcgccagcgttcttagatcgattgctcgccaggctgttggcgaggagtcgtcaaccctcacggcagccatgtctgtggagctcatcctgtggcttttctccttcgtctccgtcatggtcctcatcggcctcaccgcataccagatttggagtatgattatatcaacccatatgattcatcgtctcgcatcaacgctgtggtgctgatagaatactcactccaaggggccctgtgtgcttctttcctcttgacattgcattggttcccgtttctagtcatgacaccagtaacatactaccatgtcaaactgtatttggctcggaaacatcttgtagatgtcactgaaatttttagacaattaagtgacgagaagaagtacaggatgatcaagcttgccttctacttctgcctatttattataactatttacaggcttgtaatgacagctgtgatgttgtttattgatgaggacataaatttggcagaaactaggagtatctagacttcgccaccaacttgtcatggggatggagcagagttgtagcttgaaccagggagaccacaactcaatgccttgacttagttgtgagaaacaagatcagtttgtgccctgtagctggaggagctaacctggtactccttttaccctaaatcgtaagttgttttagttttttctagatgcatagcttttacgatgtatcctccagatgcatagtaaaagttatatatttagaaaaaacagaacaacttataatttggaatggagtattcatttcatccatcagattgtgatgtacaatgaattcccatagtttggtccatcggtaccatgtttgtaaattgggcagtcaatgatgtgcatcactgcaggatgaacgcacgtttggtaattgttgtgcaattctttgtacttgtggacaagtgctgtattctacacattgtttgcatacagacgatgtgtggttggtgtcataatttaccactaaacctttggtaaactgagcctgtcataactgcgagaaaagattggtaaaaaaactaagttgggatagaatgctaataaagtccggcaccctgtggttatggcaacacctgcaaaaaaaggtgctatagaatgactaacatgtggttactgaagattacgaacctagatattgagttgaactaaaacacgccaaataaaaattttgaactaaaagacgacaaataagaaaacacg

SEQ ID NO: 60848 - DNA, 2464 bp, Zea Mays
gcagcatacagcagtgtaccgtgtgacgctgtggatatctgacccactctcgtcgcacgcaacgcaagtagcaaagcaggacccatcctctcccatctctcggtctccccatcccaacccgccgccgccgccgccgcttctcccgtctccagcgcccacagcgccattgtatccgcggggcgagctgagtcaccaagctggtctagggcccatccatttggaaccctcgcgagaagcaaagcggacggagcgccagcgttcttagatcgattgctcgccaggctgttggcgaggagtcgtcaaccctcacggcagccatgtctgtggagctcatcctgtggcttttctccttcgtctccgtcatggtcctcatcggcctcaccgcataccagcttatctgtctgtcagatttggagtatgattatatcaacccatatgattcatcgtctcgcatcaacgctgtggtgctgatagaatactcactccaaggggccctgtgtgcttctttcctcttgacattgcattggttcccgtttctagtcatgacaccagtaacatactaccatgtcaaactgtatgtattacttgctttgggttgatgttaattctggcagaatactcatgatattcagcattggatatcatgctgttcatacttttggctgtattcacatctttaaataatatttaaaatgatctacaactctcaatggctcaatgaaacagctaagtaagaatatatatattttagaatttagagattgtgatgttatgcttctagagtgataatttgtagttatctgcttgttctgggccatggtgtattgtctggtcctggagcaattccttctctgaaaatgggagaatattgatcatggtattaacaaatgggagaaggtagtgcacctgttctagtattatacctgtccagattttgtaggcctcactaccaaaatttgttagctatttaacttttattattgctggaatatgacaactctgaatcatgctatgtgcactttatttgctgagatatatatattttttatttttactagtatgtgctagagaagaaccataagtaatatttttgttgtaattatttagtattcagcagttcagcatgaactgttgattccacatatagttggcttaacaatgattaatgaaagtggttcttagtttgttctggtagggtacagctataatttagctggactattctctgggtgacaactgattttagtccatcagatatgagcaagcacccaattttttattgttacatgtggaaagaaaatctcccttgaccctgttcttgaaattttacagtcatgacaatagtttctaagcactctgcttgagttttcagttgatttagagttcttttttccactgttgaggattaagtataatgccccctggcattggaactagttttgatctcatgaactagtgaacttattttggtgggatatctgagatgcttttctaaatttaatttttgccaggctttaatatctgaatgaatatgaactagttttttttattcaggtatttggctcggaaacatcttgtagatgtcactgaaatttttagacaattaagtgacgagaagaagtacaggatgatcaagcttgccttctacttctgcctatttattataactatttacaggcttgtaatgacagctgtgatgttgtttattgatgaggacataaatttggcagaaactaggagtatctagacttcgccaccaacttgtcatggggatggagcagagttgtagcttgaaccagggagaccacaactcaatgccttgacttagttgtgagaaacaagatcagtttgtgccctgtagctggaggagctaacctggtactccttttaccctaaatcgtaagttgttttagttttttctagatgcatagcttttacgatgtatcctccagatgcatagtaaaagttatatatttagaaaaaacagaacaacttataatttggaatggagtattcatttcatccatcagattgtgatgtacaatgaattcccatagtttggtccatcggtaccatgtttgtaaattgggcagtcaatgatgtgcatcactgcaggatgaacgcacgtttggtaattgttgtgcaattctttgtacttgtggacaagtgctgtattctacacattgtttgcatacagacgatgtgtggttggtgtcataatttaccactaaacctttggtaaactgagcctgtcataactgcgagaaaagattggtaaaaaaactaagttgggatagaatgctaataaagtccggcaccctgtggttatggcaacacctgcaaaaaaaggtgctatagaatgactaacatgtggttactgaagattacgaacctagatattgagttgaactaaaacacgccaaataaaaattttgaactaaaagacgacaaataagaaaacacg

SEQ ID NO: 60849 - DNA, 1724 bp, Zea Mays
cactcttcctccctcctgcctgcaagatcccgcgcttcgcagcgcagcgcgttccattccagcttccatctgccgcctcccggcccccatcatggcgccctcgtcgcctcaactcaaagaaccgtcgtccgcggtgaagcaggcgtcgacgggcccggcggcgctgcccgagcgcacaaagaggaagacgtcgccctcgctccccgaggcctcgggtgccacacagcagccggccaagcggaagccgccgccgttccagcgcgcgtggtcccccggcgacgaggtccggatcctgaaggccctcgccacttaccgccgtgaacatggcgggcgcctgccaacgccggttgagctcttcggcgcgctcgatggcagcctcgagaaggaaggcgtcggagcaaaggagctcgccatcaagcagcgcagcttcaagcgccgctacgaccgggacgtcatgaagaatgctccgcccgccgataaacacgaacgccgcctctacctcctctccaagcacgtatggggacgcgttccccctcccagaccaccggttgccaaggtcggaagtgctactcaagcgaagggcgccggcgcccaagcaagcaaggccgatgcccaagcccaagcccaagcaaagagcgccgaccaccagtccggcaaggaggcgctgaagcccaaggccaagactttggatgagatgcgcgagctgtatccttacctggttgatgaggccacgatccttgtcgaaccggcggtgctggagagagtgctcctcaacattggagacatcgacgcccaggtgttggacaagaagatcaggaaggcgaggaagcagctcgccgatgccatcacggaatcggcaaggattaacaacatggaagtgcctacaatatttctgtttacatccagcaagcttcaaccagaaaagttaagagtggaaaatgagaataatcttttggttgatcatttggagaaaatggatgatgtggatatttgtgctaaacaacgattggcaagagtggaacgtgaagtaaaggagttgagacagactgtaatagcttaccagtctcaggcaaagggtataatatgtgaatcagccaagggtggccttcaatcaattgtagctgaaaatcagactccagccaatatactacaaaagaagacagaagtaccaaatgacttgatccataaaaagaatgcggcggttacatcaaaatatcattgtgccgttccccacaatgttcctcccaataagccgaaaatgcaaggggtgatgttgccaccatctaaggcgtttcctggtatgcctaggaagattgacaaaagtccgactccacgcaaagcggttttcattttggtccaagctgcacatgatccagcacagcagtatgtatggctcggacggttctgggtctcataagactaccgcaccctgtagtgggtctatattttggtgaaatatctgcaaaaaggttatctagatgttgcagatgtcctgtcaaactgatgacattattagcaacgagtgtcctctggtgcacatgcactaagattgttgaactctggttgtagtcctagttaagcaatgaagctcacatctcatatgctgatataattgtggactaggattactatattctgttgtcaatcaaaaccaatacaagcaatcttaggagcagatctaaactggaattctcaaataaaggtgccaagggactcaggtttcg

SEQ ID NO: 60850 - DNA, 933 bp, Zea Mays
ctgctgcttcttcaaaaccttggaattcttgctgcggtcgatcctcttgacacactgactgcccatgacgccaccagcagcagcttcttcccctgcctttgaatagacatcattgagaaatggtgtttggccagattgctcctgcttcaccttctgccgcctatgtttcttccttaccgtcgcaccctctgtcatcaccttgttttccatctgcgtgatttgtgccacttttcttttcttgtgcctcttttctaccttcggcacagggtcctcaattaatggagctgccggcagtgcctcctgattctccctcttgcactccttatcctgcatcactgtcgctgctgtcatcgccgccgaggttggggtttcgggagcgactgggactgaggaagcagacatggattccagtattgccaaatgtcgggtagactccctcactgccatctcccttgtcatcttcttctcaggcttttctttcccttcgatccttgcctcttcttgtgaatctgaggttgattctgaggctgggcatggttgcttggtgtttgaggttgctgtccaggcagccttggaggtctcttttccagtgagtagagaagacccagatgatgggtggcctcgaggaggcagcctcgctgggcgatcagcgatattagcaggtttgtaggcgaattgggcaaagaatgcaccaaaaggtgaggaataattggggtcctgatcaatggaattgggattggccatgggagggaaaaaaccttggggcagtgtctgctgcgtcttcaaaacccgggagttcttgcttttgctcctcttgacacactgagtgaccatgacgccaacgccaccatcatcagtagcttcttcccctccttgtggatggacatcaattgaaaatggtggctcgccggattgctcctgccccgccttcag

SEQ ID NO: 60851 - DNA, 2209 bp, Zea Mays
gcatgtaatggtattcattgatttaaaatccaccgctttttaacttccattgcgataccattacacatggtaaaccaaacaccacattggttagtcccattgattgcactatcaccaaatcaattgatcatttgacttcttagagccacgcgcgctacacctccacacacacatgcatgcatattaattgaatacaatacgcatgcattgggagtttaagttttccatagattcaggactttaaagataggattcttgggcatgcaggatgcacacaaaatcagcacttttctttcttccttttggctagttaccttcaatttttgtctcaaaaccagcattgaaacataggctaccccaataactagataaataccccatatattatactacctcagtcctcgaatatttttgaactaaaacatgacagataaaaaaagaacggagcgaataacattattaagctgcaagcagaaacaccaaaagcgcttgccaccgcgttactgttttcccatgtcaacagctgacagcaacttcctgcaccttagcgacaaggtttcccagctccgtcactccagcctcctgcgatttctgcaacagacacacagcttcgaattacatatatagagaagaagtcgcttggcttctttctgtgtttctctagaaaaagaaaacaattggatttctactaggctgcattgacagacaaagtatgtcagcacagttcagtcaaatttactaccaacaaccaccgaattcatcctaacataaagcaacccaatggcatattggcatgtgatgcaacgccacggagtatttgcttgtaagttgccgacgcataataatgaaattcaaagagtgaaaatgctctcatctaggtccttcaatttttcatgtggttcgttcagagtgggaacttagagggtgtttgaacgcgctagagctaatagttacttggctataaaaaaactagtaaaattagctagctaacaaataaatagctaactattaactaatttactaaaaatagctaatagttgaaccattagctagggtgtttggatgtctccaattaattttagccactaactattagctctagtgcattcaaacaactccttagtacatgactgagctagagtgaacttagaatgacctacttgagaagtttaatggacctagatgagcctacatggaaagctgaagaactcactgtgcattttactcaaattcaaatattactatgatggttatacaagaatatgcaaaacaaacatagttcggttttcttgggaagtacttcagtgtacatataatatacaggataatgaccctgtaatatgcacaacaaaaacatttttgttttatttcataaaaaaacacttcaataataagtcattggagttcacgaatttataactagatcattaccattcattatcaagaatattagcatacaaactattagacagggacccaaccacctaatcctgtatcagcctagaaacccttgctgttctcacggacagagttgtcccaacaagaaaaatcaaaccttaatactaagttgattcaaatatagattgttctagagcaaacgagcgtaccacccccagatccaattattgaatggtggttttcccttttactttgattttttttggccattgcataggttctacgcccatgtaataaaaaaatagaagggaaaagagaggaatgacaaatagataaaaaattatccaagaacaccagtaataaaaattaaaactttcaggttaatccatcagtacagatcaaaggcacgttgtcaggctaagaggtccacagaactataggacagtacagcatacggcatattacaagggattctagtgaatttaactcctcgagacaccaatcacatgcctacctgccattaacgtatattgtcaatccaaccaccaaactcgaaatatggtaagcacaatatctacccactttaaaggggagtcaaatacttcatctaatttaccccataaaatgtcctagaatactaggataccttatactttgggacagaggtagtataggatcagcactaaattttactataacagtatattacctccacaattgacatcatacagacagaaataaaggcttatagcataaggtagctcaaaagtaatggagagcccattgcgggagactcatacctgaatcgagg

SEQ ID NO: 60852 - DNA, 1504 bp, Zea Mays
gaactactggtaattcttcgacctttcaatttcacaaaacttgcaactatttttatgctctgcatcctaccaaaagtatacattgtctttctactacttagacatgggtatgagcaagtctgttgcatttctattctttctactacttatacatgcactgcattatgtatttaacttttaagacgatcaagcaggtgcttggtaatcaaagcacttgtttttgatagagacatgcattcttttttccttaaattgattttaaagtaccgaataactaagggttgcttaagtaggagcaagtgaactagtaaaaatgtgaaattatttatgctgaactgctaactctgtattgtgatgacttgcaggctccttgatgccgtaagagaatgttactgaaatgccttctgcttcttcattagatttctgtttgattatttttcatacttttatttactaaccactttctgttttttaaatggatcaattaacatggtttttaaatggagcatctaacaacattcattagatttctgtttgattatttaattactcactctaatgtatgaaaaggcaaggtagaagatgctaccaaagtacagacgcttctgttcagtgccactctgccagattgggtgaataagctctctatgaggtttctgaaagttgacaggaaaacagttgatcttgtcggtaatgagaaactgaaggccagtgcatctgttaagcaccttgctcttccttgtaacaaggcagcaatggcacaagttattccagacattatccgatgttatagccaggatgtactaccccatagatggaggtcgaaccatcatcttcactgagacgaaggattctgcatcagagctttctggtaatactggtgttgctgtcatgctttatgagcccagatataagcacagtgatagcagactagaaagggagtctggggttaaatttgagcatatctctgcgccacaacccactgatgtaacacaatctactggcagtgaagctgcagacgccatttcgagtgtgtcagacagtgttattcctatcttcaggcagcaagtagagcagttgctaagctcttccagtctgtctgcagctgacttgcttgccaaagcacttgcgaaggcagttgtttgctataacattccggtgatcgtgtttcttcatcgttggggtcatatttgttcacattggtgttatcttcagtttgacgtcggcaacgtggtcatggtgactggtgggaggaacaccgggcgtgtaggagtgatcaagaactgggagaagcacaagggcatcttcgaggaaaacatagaatggaattcaaatttggtggtcgcaaaagtgtggagacttgaattcatataaagttaggcttaacattagtgcaaacagttgtattttagtttagatttagagtacacttatgtatgccttgtttgacaatgcttatttatgatatattaaatggtacttatttatattatattaattataa

SEQ ID NO: 60853 - DNA, 1429 bp, Zea Mays
cggaatatactgaaacaggaatcactgcttaaagtttccttgggcaaggattaacaacatggaaatgcctacaatatttctgtttacatccagcaagcttcaaccagaaaagttaagagtggaaaatgacaataatcttttggttgatcatttggagaaaatggatgatgtggatatttgtgctaaacaacgattggcaagagtggaacatgaagtaatggagttgagacagactgtaatagcttaccaggctcaggcaaagggtataatatgtgaatcagccaagagtggtcttcaatcaattgtagctgaaaatcagactccagccaatgtactacaaaagaagacagaagtaccaaatggcttgatccataaaaagaatgcggcggttacatcaaaatattattgtgccgttccccacaatgttcctcccaataagccgaaaatgcaaggggtgatgttgccaccatttaaggtgtttcctggtatgcctaggaagattgacaaaagtccaactccaagcaaagcggtcagcatcctctttttttgttatattatttctttttcgcatatctaaatttactaaacttacataattcatggtttacttttgtatagaaggaaatgaacattatggtgttttacacaattttacacatgttactgtgtacttgtaacttagtagtagttgaaaatgttaaagatatgtatatgcgtacttgtaacttagtagtagttgaaaatgttaaagatatgtatatgcatacatatctttacactcaccttacttgtacaccaagccatatgaccttgttcgccaagccatacaacctatataatgaatggtcacctcccacaatgggtgtgtggtgtagtcggtggcaaggagcatgatgctagagaccttgtattcattgacaaggcaaaactgcttgagcgtgagtatgttgcgtgtcatggcaaagttaggcagcatcgtgtagttggtgatgatgtaagcagcgttggagaagtgagggttgaggatttgaagattgcaccacttcgggcgggtgtcctagatccatagcctctgctcggtctagtacccttgttcctcgtgcccctgatggcaagccaaagggcaacgatgatcaatgctggaacaaaggaagggcaaatgtgaattttgatttcctagctccccttaccttttggttctagtggtatttctagcctatcggtcctactccacctttatgtttgcccttagatgttgagtgtggtgaatctctaattgggagtgaaataatcccttatgagccaaccctttgtgtagagtgatttcaatccctggattgaaactgccaaacattaactctaatttggagttaaagaatcccttatgagccaacactctgtgtagagtaatttcaaccctagatcgaac

SEQ ID NO: 60854 - DNA, 1107 bp, Zea Mays
gtgcaattccgcttgtggcaagataacagttgtatgacacatgaaaaatgtttgtacaagaatggtttcggaatatactgaaacaggaatcactgcttaaagtttccttgggcaaggattaacaacatggaaatgcctacaatatttctgtttacatccagcaagcttcaaccagaaaagttaagagtggaaaatgacaataatcttttggttgatcatttggagaaaatggatgatgtggatatttgtgctaaacaacgattggcaagagtggaacatgaagtaatggagttgagacagactgtaatagcttaccaggctcaggcaaagggtataatatgtgaatcagccaagagtggtcttcaatcaattgtagctgaaaatcagactccagccaatgtactacaaaagaagacagaagtaccaaatggcttgatccataaaaagaatgcggcggttacatcaaaatattattgtgccgttccccacaatgttcctcccaataagccgaaaatgcaaggggtgatgttgccaccatttaaggtgtttcctgtcggtggcaaggagcatgatgctagagaccttgtattcattgacaaggcaaaactgcttgagcgtgagtatgttgcgtgtcatggcaaagttaggcagcatcgtgtagttggtgatgatgtaagcagcgttggagaagtgagggttgaggatttgaagattgcaccacttcgggcgggtgtcctagatccatagcctctgctcggtctagtacccttgttcctcgtgcccctgatggcaagccaaagggcaacgatgatcaatgctggaacaaaggaagggcaaatgtgaattttgatttcctagctccccttaccttttggttctagtggtatttctagcctatcggtcctactccacctttatgtttgcccttagatgttgagtgtggtgaatctctaattgggagtgaaataatcccttatgagccaaccctttgtgtagagtgatttcaatccctggattgaaactgccaaacattaactctaatttggagttaaagaatcccttatgagccaacactctgtgtagagtaatttcaaccctagatcgaac

SEQ ID NO: 60855 - DNA, 1868 bp, Zea Mays
aatctcactcttcctccctcctgcctgaaaaaatcagatcccgcgcttcgcagcggagtgcgtgccaatccagcttccatctcccgcctcccccacgcccccggccccccatcatggcgtcctcgtcgcctcaactcaaggaaccgtcgtccgcggtgaagcgggcgtcgacgggcccgacggcgctgcccgagcgcaacaagaggaagacgtcgccctcgctccccgaggcctcgggtgccacacagcagccggccaagcggaagccgccgttgttccagcgcgcgtggtcccccggcgacgaggtccggatcctggaggccctcgccacgtaccgccgtgaacatggcggccgcctgccaacgccggttgagctattcggcgcgctcgatggcagcctcgagaaggaaggcgtcggagcaaaggagctcgccatcaagcagcgcagcctcaagcgccgctacgaccgggacgttatgaagaatgctccgcccgccgataaacacgaacgccgcctctacctcctctccaagcacgtatggggacgcgttccgccaaccagaccaccggttgccaaggtccgaagtgctactcaagcgaagtgcgccggcgcccaagcaagcaacgccgctgcccaagcccaagcgaagagcgccgaccgccagtccggcaaggaggcgctgaagcccaaggccaagactttggatgagatgcgcgagctgtatccttacctggttgatgaggccacgatccttgtcgaaccggcggtgctggagagagtgctcctcaacattgaagacatcgacgcccaggtgttggacaagaagatcaggaaggcgaggaagcagctcgccggtgccatcacggaatcggcaaggattaacaacatggaaatgcctacaatatttctgtttacatccagcaagcttcaaccagaaaagttaagagtggaaaatgacaataatcttttggttgatcatttggagaaaatggatgatgtggatatttgtgctaaacaacgattggcaagagtggaacatgaagtaatggagttgagacagactgtaatagcttaccaggctcaggcaaagggtataatatgtgaatcagccaagagtggtcttcaatcaattgtagctgaaaatcagactccagccaatgtactacaaaagaagacagaagtaccaaatggcttgatccataaaaagaatgcggcggttacatcaaaatattattgtgccgttccccacaatgttcctcccaataagccgaaaatgcaaggggtgatgttgccaccatttaaggtgtttcctgtcggtggcaaggagcatgatgctagagaccttgtattcattgacaaggcaaaactgcttgagcgtgagtatgttgcgtgtcatggcaaagttaggcagcatcgtgtagttggtgatgatgtaagcagcgttggagaagtgagggttgaggatttgaagattgcaccacttcgggcgggtgtcctagatccatagcctctgctcggtctagtacccttgttcctcgtgcccctgatggcaagccaaagggcaacgatgatcaatgctggaacaaaggaagggcaaatgtgaattttgatttcctagctccccttaccttttggttctagtggtatttctagcctatcggtcctactccacctttatgtttgcccttagatgttgagtgtggtgaatctctaattgggagtgaaataatcccttatgagccaaccctttgtgtagagtgatttcaatccctggattgaaactgccaaacattaactctaatttggagttaaagaatcccttatgagccaacactctgtgtagagtaatttcaaccctagatcgaac

SEQ ID NO: 60856 - DNA, 1430 bp, Zea Mays
tcagcatataagatgtgagcttcattgcttaacaaggattacaaccagagttcaacaatcttacagtggtactagtgcatcagaggacactcgttgctaataatgtcatcagtttgacaggacatctgcaacatctagataaccttttttgcagacatttcaccaaaatatagacccactactatatttacagggtgcggtagtcttatgagacccagaacagttcgagccatacatactgctgtgctggatcatggtgcagcttggaccaaaatgagatgcggcaagacatacccagcaagaaatgtagacgatgctgggcagaatcaacaaagcacgatctcgctgccacatatttttttttatgaaacacatagtagagctatgttacaaaggaaacctggtcgtcgcctttataacctaatcaacatatggccccttacaaatctgcatcaaacaacttatgtcaaaacaatgctttatgttctcagaacttggaacatgaaatcttccaaacaaagaggcacctaggcaatgacaaatccaagaactaaactaaactaactaaaataaatgggggtagagaaggatgggtgcaaagtgtgcaattaataatgtatcaaatactactgcacaaccacttctatgaaagcttcttgaaggtaaaagatcttgtgcatcaatcagtgcaaaacaatagctccagtctagtggtatgtagcatttcaataggtgcagaaatgcaaacatgaattagacagaatttaacggacacaaatgaactggaaactgcatcagctgggagctactagatatcatcatgctgcataaaacaaatatcattatcagcgcccggagatggtcatgcccccaatgttaacaagacatggtatgggaagctaccgctggactgtaaacccttaaaaatgtatatgtaggagtgcatggtgacaatgtactaagtagctcccttgggaaataaaatgagggtttaagatgattaatgtggttatgataaggcctgtctttactaagcacatattaaacaaaagaataaggctatgcatcatgttggactccctttgtttgtgcatcaaacttaaacttataattaaaacaaatttagcttcgaattcaaatttgagctcagaaaaatataggaacaaaaaaaggtggaaaaataataataaatataaaataaataatattattgcaagcagtagaaagtattattcatattataattttattggcggcaaattcaaaaccagaatttgaatttagtttgattcttggatttgggaatgaaccagaaattaaatcagaaaaagaagaatcacatgtgttgggtcgtcaagtaggatttcggcccatcccctgtgaccctgtgtgcgcgcgttgagcccattccagcgccgcgcgcaccgttc

SEQ ID NO: 60857 - DNA, 1582 bp, Zea Mays
ttcctggcatctccctgtcttcttgctccctctaccgagctccatccaggatagctcttccactgctccctcacgctagcagcagaccaccggcgcccttcttccacctccggtccgtagggacctcctctggtccgaacgcaagcaggtgcccttcctccactgcgcccctcctcccatcggcacaggagcttcccatggccggcgcacgcccctgctcgtgccttcacggccgtcggggcatcggctccgagctccctccctgctccatggccgctggcccctcgcccctgctcttcccccttggtcgcgcgcaggagctccctaggccgacctcggccaggtccatgtccatggcgtcgcctccctctgccctccctgtgctgtgcgctctactcgccagggccggagttctccatggtcgagctccttgtcctccaggccactgggttgcaggaggccgcacccttcttctccaagaccggcgcttgttttccccctgcgtcttcttccatgcacacctgcaggccgccggaccttgctccatctggatttcgcgccatatgctccttcaccaatgccatggagagatctgtcaacagagcaatgctaggcctcgccttggaccttgggttcgcaccagcgagctcacctgtaggttcagccatggctcctgcaatgtctagttcctccctcgcctagcaccacatcggctcgcctcacctcagcccgactgggcgccgacacccagcgagctccttcgcaagcagactatggcctaggatgctgagctcgcctagatcacttgctcctgtgtttcccctcatggcgtgccctgcttagtccagcatccaatcctctctgctgtggtcgagctcaccttcactagctcgcgaccactatccctgtgccgctggatgccattcctctctgttctgcccttgccatccgcgcccccagtgtctggactgcgctcgccgagctcctcctcacgtgctcctccaccggtccgtgcccctgcacttgcagcagcggccgtggatcccctctgcgtcacgccctcggcgtgctcgatgtaatgccaaagcagcagcagtgacgaccttcgttgtgtcacgctcgccaagtcgggcctcacatcgtcgatctgcgcagcgtctgcgcatcatcgtcgaaacacgcggtgagcttctcgctgtcccatgttcctggattttataaaatgactaaacaaataaattgtgtaatgattgtgtatgtcgtctaatcgcagcccttgtcgacgtcacgcctcgcgcatcgctcgtcggcaaagagcccaaactaatggcatgcatgcgcgacacgagtcggccaggttgttcgccttgaatgattcacgatttgttttatttacgtattcggtcgatgatgtgcctgcgtgtttatatgtgtgtgaaaatataattgtatgaatgaaagcgtgtagagaagaaaatgaaatagaaaagaactcgggtatttttattttgatagaaaaatatgagatgcgttgtttgatgcaaagactaagtttaaataaataaatgcagattatgccttg

SEQ ID NO: 60858 - DNA, 279 bp, Zea Mays
gcggtaaactccgtccaaggctaaatataggcgagagaccgatagcgaacaagtaccgcgagggaaagatgaaaaggaaagagagtcaaagagtgcttgaaattgccgggagggaagcggatgggggctggcgacgcgcatcggccgtatgcggaacggctcctgctggtctgccgatcggctcggggcgtggaccattgtcgcccgcgcaggcggccaaagccccgggggccctaggcgcccccggcagccgtcgtaggtgcggacggtatccgcgcg

SEQ ID NO: 60859 - DNA, 344 bp, Zea Mays
cgcgcttcagcgccatccattttcggggctagttgattcggcaggtgagttgttacacactccttagcggatttcgacttccatgaccaccgtcctgctatcttaatcgaccaacacgctttgtgggttctaggttagcgcgcagtttggcaccgtaacccggcttccggttcatcccgcatcgccagttctgcttaccaaaaatggcccacttggagctcccgattccgtggcacggctcactgaagcagccgcgccgtcctacctatttaaagtttgagaataggtcgagggcgttgcgcccccgatgcctctaatcattggctttacccgatagaactcgt

SEQ ID NO: 60860 - DNA, 123 bp, Zea Mays
atgggttctaggttagcgcgcagtttggcaccgtaacccggcttccggttcatcccgcatcgccagttctgcttaccaaaaatggcccacttggagctcccgattccgtggcacggctgaccg

SEQ ID NO: 60861 - DNA, 361 bp, Zea Mays
gtccacgccccgagccgatcggcggaccagcaggagccgttccgcatacggccggtgcgcgtcgccagcccccatctgcttccctcccggcaatttcaagcactctttgactctcttttcaaagtccttttcatctttccctcgcggtacttgttcgctatcggtctctcgcttgtatttagccttggacggagtttaccgcccgatttgggctgcattcccaaacaacccgactcgttgacggcgcctcgtggtgcgacagggtccgggccagacggggctctcaccctcccaggcgtccctttccagagaacttgggcccggtccgtcgctgaggacgcctctccagactacaattcgg

SEQ ID NO: 60862 - DNA, 105 bp, Zea Mays
ttctgcttaccaaaaatggcccacttggagctcccgattccgtggcacggctcaccgaagcagccgcgccgtcctacctatttaaagtttgagaatagatcgagg

SEQ ID NO: 60863 - DNA, 283 bp, Zea Mays
aaagaacatcatcgcatagtgctcgaataataacataaaagagtattaacttattacatcacgatgtcaaagacatccacatagtcatcaactcaacgggtaaatcaaagtgctaagcggaacgcagtaaagatagggccttcacaggcagctgactgggggtttccgccaacccacacctagaactcgtcgtagtcttggaactcctgagtaggcttcatcttctcctgagcagtggttgcaatgtggacaacctggtgttttgtggtaaagcaaggatgag

SEQ ID NO: 60864 - DNA, 3150 bp, Zea Mays
ctgatcaccatttagcgttggagggctgtttattacagcaacccgctattttgagagcaatataaaaagataaacaataatgtttatgtgcaaaatctgccttcttcatctgcaagccatgtttaattttgaaatggacctgaacaactattttacatgtttacatgttctagaattgctactgttcattgctgctataattacatatgatatttatctgagttatatgtttgttttattcggaattagaatatttaaatatgaaggaagcatgtcactcatttctctaattttacaacacaattaagctaaatatatttgtatgcgaaatatatttgtacactattgttgactatgtgagactatgtgagcgtggttgcagaaacaatagcacggggatctatagaattaattttcatctcccatcctatgaatttaagataggatcatatctaaactttgaaaagttgtagaatgtcacatttcaactaaataacctaattcattaagtagattccaattcctccaaaataaaaggatccaaacggctccttagaggaaactgtgattattcttcaaataaacagtacaaattaagttctgccacctgttaataagttgtatatatatatgttatgttgtgtgatctcaggtgagcaatggagcccgtggggttcctcagcagcagaataggttgctctcagtgcttgtggcacccaagattgcaggaatgagcaatgttgtggccctcaagctgatggatggtgcccttattggtagacgctatgaatcgagtgcagcagcagttgattctacggaccagctagctgagaagcacgagtaccaggctgaggtcaacaggctcatggatttgattgtgcacagcttgtatagtaacaaggaagttttccttcgagaactggtcagcaatgctagtgatgcacttgataagttgcgttatctgagtgtcacggaccctgagcttctgaaggatggtccccaacttgacattcgcattcaatcagacaaggataatggagtaataacaattactgattctgggattggtatgacgaaacaagagcttattgattctcttgggactattgcaagcagtggaactgccaagttccttaaagcattgaaggagagtcaagaagcgggcatggacaacaacttgattggccaatttggtgttggtttctattccacatttcttgtttcagagaaggttgttgtgtcaacaaagagcccaaaatctgacaaacaatatgtttgggaaggacaagcagattctggttcttataccattagagaggaaaaagacccagagaagctaattcctaggggaactcgccttactctctatcttaagcatgatgataagggctttgctcaccctgagaggattcaaaaacttttaaagaattattctcagtttgtttcctttcccatttacacatggcaagagaaaggcttcacaaaagaggtcgaggttgatgaggatccagcggaagccaaaaaaggggatgatgatatcaaaactgagcctaagaaaaagaccaaaaccgttgttgagaagtattgggattgggagctttcaaatgagacacaacctatttggcttcgaaaccctaaagaggtttcaactgaggagtacaatgaattttacaagaaaaccttcaatgagtacttgaatcctttggcctcctcacacttcactacagagggtgaggtagaatttaggtcaattctttatgttcctgctacaaggaaggatgatataactgataataggaagaccaagaatatcagactgtatgttaaacgtgtattcatatcggatgactttgatggagaattgttcccaagatatttgagctttgtgaagggtgttgttgactcaaatgaccttccgttgaatgtttctcgtgagattcttcaagaaagtcgaattgttcgtataatgagaaagaggctagtgcggaaagccttcgatatggtacttggcatttcttgcagtgaaaacagagatgattacgaaaggttctgggagaactatggaaaaattttaaagctgggtgccatggaagacaaagaaaatcacaagagaattgctcctttgttgcgcttcttctcttctcaaagcaacgatgaattaatcagcttggacgaatatgtggaaaacatgaaacctgagcagaaggatatttacttcattgctgcagacagcctgagcagtgccaaaaatacccctttcttagagagactaacagaaaaagagtatgaggttctacttttcgttgaccctatggatgaaatggctatccagaatctgagctcctacaaggataagaaatttgtggacattagcagggaagatttggacttaggtgatagcaatgaggaaagagaggagataaagcagcagttcagccaaacctgtgattggataaagaatcgcttgggtgacaaggttgcacgtgttgacatatctaatcgtctgaggtcatcgccatgtgttcttgttgcagcgaagtttggttggtcagccaatatggaaaggctaatgagagcacagactatgggtgatacaaccactttggatttcatgcggtcaaggaaggtttttgaaataaatccagaacatgagataatcaaggccttgaatgcggcatgcaggaataaccccgatgatcctgaagccctaaaggctctggatgttctctttgaaactgctatgatttcaagtggcttgtcgcctgacaaccccgccgagctcagcgggaagatctacgagatgataaccactgccatcgcaggcaagtggtcctcacagtcgcaggcgcaacctgacaacacaactctgcagcacgcggcacctgggaggtcggatgagccgcttgaaggtgaagtggtggagccagagcccgttgaggctgatcagcataagtaaggggaaccccctttcgctttctcgtgctagctttgaaccgttgtgcacgtggcggagaattttgagtatttgttttgacggcctttagctttatcatgagctgtgacggacctaatgtttagaatttagaagattagggataagtggcggttgaactacttgaactggttatgtgatcctaggatcacataaga

SEQ ID NO: 60865 - DNA, 3060 bp, Zea Mays
ctgatcaccatttagcgttggagggctgtttattacagcaacccgctattttgagagcaatataaaaagataaacaataatgtttatgtgcaaaatctgccttcttcatctgcaagccatgtttaattttgaaatggacctgaacaactattttacatgtttacatgttctagaattgctactgttcattgctgctataattacatatgatatttatctgagttatatgtttgttttattcggaattagaatatttaaatatgaaggaagcatgtcactcatttctctaattttacaacacaattaagctaaatatatttgtatgcgaaatatatttgtacactattgttgactatgtgagactatgtgagcgtggttgcagaaacaatagcacggggatctatagaattaattttcatctcccatcctatgaatttaagataggatcatatctaaactttgaaaagttgtagaatgtcacatttcaactaaataacctaattcattaagtagattccaattcctccaaaataaaaggatccaaacggctccttagaggaaactgtgattattcttcaaataaacagtacaaattaagttctgccacctgttaataagttgtatatatatatgttatgttgtgtgatctcaggtgagcaatggagcccgtggggttcctcagcagcagaataggttgctctcagtgcttgtggcacccaagattgcaggaatgagcaatgttgtggccctcaagctgatggatggtgcccttattggtagacgctatgaatcgagtgcagcagcagttgattctacggaccagctagctgagaagcacgagtaccaggctgaggtcaacaggctcatggatttgattgtgcacagcttgtatagtaacaaggaagttttccttcgagaactggtcagcaatgctagtgatgcacttgataagttgcgttatctgagtgtcacggaccctgagcttctgaaggatggtccccaacttgacattcgcattcaatcagacaaggataatggagtaataacaattactgattctgggattggtatgacgaaacaagagcttattgattctcttgggactattgcaagcagtggaactgccaagttccttaaagcattgaaggagagtcaagaagcgggcatggacaacaacttgattggccaatttggtgttggtttctattccacatttcttgtttcagagaaggttgttgtgtcaacaaagagcccaaaatctgacaaacaatatgtttgggaaggacaagcagattctggttcttataccattagagaggaaaaagacccagagaagctaattcctaggggaactcgccttactctctatcttaagatggggcatccattgatcattaaggtcgaggttgatgaggatccagcggaagccaaaaaaggggatgatgatatcaaaactgagcctaagaaaaagaccaaaaccgttgttgagaagtattgggattgggagctttcaaatgagacacaacctatttggcttcgaaaccctaaagaggtttcaactgaggagtacaatgaattttacaagaaaaccttcaatgagtacttgaatcctttggcctcctcacacttcactacagagggtgaggtagaatttaggtcaattctttatgttcctgctacaaggaaggatgatataactgataataggaagaccaagaatatcagactgtatgttaaacgtgtattcatatcggatgactttgatggagaattgttcccaagatatttgagctttgtgaagggtgttgttgactcaaatgaccttccgttgaatgtttctcgtgagattcttcaagaaagtcgaattgttcgtataatgagaaagaggctagtgcggaaagccttcgatatggtacttggcatttcttgcagtgaaaacagagatgattacgaaaggttctgggagaactatggaaaaattttaaagctgggtgccatggaagacaaagaaaatcacaagagaattgctcctttgttgcgcttcttctcttctcaaagcaacgatgaattaatcagcttggacgaatatgtggaaaacatgaaacctgagcagaaggatatttacttcattgctgcagacagcctgagcagtgccaaaaatacccctttcttagagagactaacagaaaaagagtatgaggttctacttttcgttgaccctatggatgaaatggctatccagaatctgagctcctacaaggataagaaatttgtggacattagcagggaagatttggacttaggtgatagcaatgaggaaagagaggagataaagcagcagttcagccaaacctgtgattggataaagaatcgcttgggtgacaaggttgcacgtgttgacatatctaatcgtctgaggtcatcgccatgtgttcttgttgcagcgaagtttggttggtcagccaatatggaaaggctaatgagagcacagactatgggtgatacaaccactttggatttcatgcggtcaaggaaggtttttgaaataaatccagaacatgagataatcaaggccttgaatgcggcatgcaggaataaccccgatgatcctgaagccctaaaggctctggatgttctctttgaaactgctatgatttcaagtggcttgtcgcctgacaaccccgccgagctcagcgggaagatctacgagatgataaccactgccatcgcaggcaagtggtcctcacagtcgcaggcgcaacctgacaacacaactctgcagcacgcggcacctgggaggtcggatgagccgcttgaaggtgaagtggtggagccagagcccgttgaggctgatcagcataagtaaggggaaccccctttcgctttctcgtgctagctttgaaccgttgtgcacgtggcggagaattttgagtatttgttttgacggcctttagctttatcatgagctgtgacggacctaatgtttagaatttagaagattagggataagtggcggttgaactacttgaactggttatgtgatcctaggatcacataaga

SEQ ID NO: 60866 - DNA, 2991 bp, Zea Mays
ctgatcaccatttagcgttggagggctgtttattacagcaacccgctattttgagagcaatataaaaagataaacaataatgtttatgtgcaaaatctgccttcttcatctgcaagccatgtttaattttgaaatggacctgaacaactattttacatgtttacatgttctagaattgctactgttcattgctgctataattacatatgatatttatctgagttatatgtttgttttattcggaattagaatatttaaatatgaaggaagcatgtcactcatttctctaattttacaacacaattaagctaaatatatttgtatgcgaaatatatttgtacactattgttgactatgtgagactatgtgagcgtggttgcagaaacaatagcacggggatctatagaattaattttcatctcccatcctatgaatttaagataggatcatatctaaactttgaaaagttgtagaatgtcacatttcaactaaataacctaattcattaagtagattccaattcctccaaaataaaaggatccaaacggctccttagaggaaactgtgattattcttcaaataaacagtacaaattaagttctgccacctgttaataagttgtatatatatatgttatgttgtgtgatctcaggtgagcaatggagcccgtggggttcctcagcagcagaataggttgctctcagtgcttgtggcacccaagattgcaggaatgagcaatgttgtggccctcaagctgatggatggtgcccttattggtagacgctatgaatcgagtgcagcagcagttgattctacggaccagctagctgagaagcacgagtaccaggctgagaggtcaacaggctcatggatttgattgtgcacagcttgtatagtaacaaggaagttttccttcgagaactggtcagcaatgctagtgatgcacttgataagttgcgttatctgagtgtcacggaccctgagcttctgaaggatggtccccaacttgacattcgcattcaatcagacaaggataatggagtaataacaattactgattctgggattggtatgacgaaacaagagcttattgattctcttgggactattgcaagcagtggaactgccaagttccttaaagcattgaaggagagtcaagaagcgggcatggacaacaacttgattggccaatttggtgttggtttctattccacatttcttgtttcagagaaggttgttgtgtcaacaaagagcccaaaatctgacaaacaatatgtttgggaaggacaagcagattctggttcttataccattagagaggaaaaagacccagagaagctaattcctaggggaactcgccttactctctatcttaagcatgatgataagggctttgctcaccctgagaggattcaaaaacttttaaagaattattctcagtttgtttcctttcccatttacacatggcaagagaaaggcttcacaaaagaggtcgaggttgatgaggatccagcggaagccaaaaaaggggatgatgatatcaaaactgagcctaagaaaaagaccaaaaccgttgttgagaagtattgggattgggagctttcaaatgagacacaacctatttggcttcgaaaccctaaagaggtttcaactgaggagtacaatgaattttacaagaaaaccttcaatgagtacttgaatcctttggcctcctcacacttcactacagagggtgaggtagaatttaggtcaattctttatgttcctgctacaaggaaggatgatataactgataataggaagaccaagaatatcagactgtatgttaaacgtgtattcatatcggatgactttgatggagaattgttcccaagatatttgagctttgtgaagggtgttgttgactcaaatgaccttccgttgaatgtttctcgtgagattcttcaagaaagtcgaattgttcgtataatgagaaagaggctagtgcggaaagccttcgatatggtacttggcatttcttgcagtgaaaacagagatgattacgaaaggttctgggagaactatggaaaaattttaaagctgggtgccatggaagacaaagaaaatcacaagagaattgctcctttgttgcgcttcttctcttctcaaagcaacgatgaattaatcagcttggacgaatatgtggaaaacatgaaacctgagcagaaggatatttacttcattgctgcagacagcctgagcagtgccaaaaatacccctttcttagagagactaacagaaaaagagtatgaggttctacttttcgttgaccctatggatgaaatggctatccagaatctgagctcctacaaggataagaaatttgtggacattagcagggaagatttggacttaggtgatagcaatgaggaaagagaggagataaagcagcagttcagccaaacctgtgattggataaagaatcgcttgggtgacaaggttgcacgtgttgacatatctaatcgtctgaggtcatcgccatgtgttcttgttgcagcgaagtttggttggtcagccaatatggaaaggctaatgagagcacagactatgggtgatacaaccactttggatttcatgcggtcaaggaaggtttttgaaataaatccagaacatgagataatcaaggccttgaatgcggcatgcaggaataaccccgatgatcctgaagccctaaaggctctggatgttctctttgaaactgctatgatttcaagtggcttgtcgcctgacaaccccgccgagctcagcgggaagatctacgagatgataaccactgccatcgcaggcaagtggtcctcacagtcgcaggcgcaacctgacaacacaactctgcagcacgcggcacctgggaggtcggatgagccgcttgaaggtgaagtggtggagccagagcccgttgaggctgatcagcataaggatgacatatcggcacgaattgtcctcataacttaa

SEQ ID NO: 60867 - DNA, 3014 bp, Zea Mays
ctgatcaccatttagcgttggagggctgtttattacagcaacccgctattttgagagcaatataaaaagataaacaataatgtttatgtgcaaaatctgccttcttcatctgcaagccatgtttaattttgaaatggacctgaacaactattttacatgtttacatgttctagaattgctactgttcattgctgctataattacatatgatatttatctgagttatatgtttgttttattcggaattagaatatttaaatatgaaggaagcatgtcactcatttctctaattttacaacacaattaagctaaatatatttgtatgcgaaatatatttgtacactattgttgactatgtgagactatgtgagcgtggttgcagaaacaatagcacggggatctatagaattaattttcatctcccatcctatgaatttaagataggatcatatctaaactttgaaaagttgtagaatgtcacatttcaactaaataacctaattcattaagtagattccaattcctccaaaataaaaggatccaaacggctccttagaggaaactgtgattattcttcaaataaacagtacaaattaagttctgccacctgttaataagttgtatatatatatgttatgttgtgtgatctcaggtgagcaatggagcccgtggggttcctcagcagcagaataggttgctctcagtgcttgtggcacccaagattgcaggaatgagcaatgttgtggccctcaagctgatggatggtgcccttattggtagacgctatgaatcgagtgcagcagcagttgattctacggaccagctagctgagaagcacgagtaccaggctgaggtcaacaggctcatggatttgattgtgcacagcttgtatagtaacaaggaagttttccttcgagaactggtcagcaatgctagtgatgcacttgataagttgcgttatctgagtgtcacggaccctgagcttctgaaggatggtccccaacttgacattcgcattcaatcagacaaggataatggagtaataacaattactgattctgggattggtatgacgaaacaagagcttattgattctcttgggactattgcaagcagtggaactgccaagttccttaaagcattgaaggagagtcaagaagcgggcatggacaacaacttgattggccaatttggtgttggtttctattccacatttcttgtttcagagaaggttgttgtgtcaacaaagagcccaaaatctgacaaacaatatgtttgggaaggacaagcagattctggttcttataccattagagaggaaaaagacccagagaagctaattcctaggggaactcgccttactctctatcttaagcatgatgataagggctttgctcaccctgagaggattcaaaaacttttaaagaattattctcagtttgtttcctttcccatttacacatggcaagagaaaggcttcacaaaagaggtcgaggttgatgaggatccagcggaagccaaaaaaggggatgatgatatcaaaactgagcctaagaaaaagaccaaaaccgttgttgagaagtattgggattgggagctttcaaatgagacacaacctatttggcttcgaaaccctaaagaggtttcaactgaggagtacaatgaattttacaagaaaaccttcaatgagtacttgaatcctttggcctcctcacacttcactacagagggtgaggtagaatttaggtcaattctttatgttcctgctacaaggaaggatgatataactgataataggaagaccaagaatatcagactgtatgttaaacgtgtattcatatcggatgactttgatggagaattgttcccaagatatttgagctttgtgaagggtgttgttgactcaaatgaccttccgttgaatgtttctcgtgagattcttcaagaaagtcgaattgttcgtataatgagaaagaggctagtgcggaaagccttcgatatggtacttggcatttcttgcagtgaaaacagagatgtatgcttccacatttccttgtggggattacgaaaggttctgggagaactatggaaaaattttaaagctgggtgccatggaagacaaagaaaatcacaagagaattgctcctttgttgcgcttcttctcttctcaaagcaacgatgaattaatcagcttggacgaatatgtggaaaacatgaaacctgagcagaaggatatttacttcattgctgcagacagcctgagcagtgccaaaaatacccctttcttagagagactaacagaaaaagagtatgaggttctacttttcgttgaccctatggatgaaatggctatccagaatctgagctcctacaaggataagaaatttgtggacattagcagggaagatttggacttaggtgatagcaatgaggaaagagaggagataaagcagcagttcagccaaacctgtgattggataaagaatcgcttgggtgacaaggttgcacgtgttgacatatctaatcgtctgaggtcatcgccatgtgttcttgttgcagcgaagtttggttggtcagccaatatggaaaggctaatgagagcacagactatgggtgatacaaccactttggatttcatgcggtcaaggaaggtttttgaaataaatccagaacatgagataatcaaggccttgaatgcggcatgcaggaataaccccgatgatcctgaagccctaaaggctctggatgttctctttgaaactgctatgatttcaagtggcttgtcgcctgacaaccccgccgagctcagcgggaagatctacgagatgataaccactgccatcgcaggcaagtggtcctcacagtcgcaggcgcaacctgacaacacaactctgcagcacgcggcacctgggaggtcggatgagccgcttgaaggtgaagtggtggagccagagcccgttgaggctgatcagcataaggatgacatatcggcacgaattgtcctcataacttaa

SEQ ID NO: 60868 - DNA, 2877 bp, Zea Mays
ctgatcaccatttagcgttggagggctgtttattacagcaacccgctattttgagagcaatataaaaagataaacaataatgtttatgtgcaaaatctgccttcttcatctgcaagccatgtttaattttgaaatggacctgaacaactattttacatgtttacatgttctagaattgctactgttcattgctgctataattacatatgatatttatctgagttatatgtttgttttattcggaattagaatatttaaatatgaaggaagcatgtcactcatttctctaattttacaacacaattaagctaaatatatttgtatgcgaaatatatttgtacactattgttgactatgtgagactatgtgagcgtggttgcagaaacaatagcacggggatctatagaattaattttcatctcccatcctatgaatttaagataggatcatatctaaactttgaaaagttgtagaatgtcacatttcaactaaataacctaattcattaagtagattccaattcctccaaaataaaaggatccaaacggctccttagaggaaactgtgattattcttcaaataaacagtacaaattaagttctgccacctgttaataagttgtatatatatatgttatgttgtgtgatctcaggtgagcaatggagcccgtggggttcctcagcagcagaataggttgctctcagtgcttgtggcacccaagattgcaggaatgagcaatgttgtggccctcaagctgatggatggtgcccttattggtagacgctatgaatcgagtgcagcagcagttgattctacggaccagctagctgagaagcacgagtaccaggctgaggtcaacaggctcatggatttgattgtgcacagcttgtatagtaacaaggaagttttccttcgagaactggtcagtgatgcacttgataagttgcgttatctgagtgtcacggaccctgagcttctgaaggatggtccccaacttgacattcgcattcaatcagacaaggataatggagtaataacaattactgattctgggattggtatgacgaaacaagagcttattgattctcttgggactattgcaagcagtggaactgccaagttccttaaagcattgaaggagagtcaagaagcgggcatggacaacaacttgattggccaatttggtgttggtttctattccacatttcttgtttcagagaaggttgttgtgtcaacaaagagcccaaaatctgacaaacaatatgtttgggaaggacaagcagattctggttcttataccattagagaggaaaaagacccagagaagctaattcctaggggaactcgccttactctctatcttaagcatgatgataagggctttgctcaccctgagaggattcaaaaacttttaaagaattattctcagtttgtttcctttcccatttacacatggcaagagaaaggcttcacaaaagaggtcgaggttgatgaggatccagcggaagccaaaaaaggggatgatgatatcaaaactgagcctaagaaaaagaccaaaaccgttgttgagaagtattgggattgggagctttcaaatgagacacaacctatttggcttcgaaaccctaaagaggtttcaactgaggagtacaatgaattttacaagaaaaccttcaatgagtacttgaatcctttggcctcctcacacttcactacagagggtgaggtagaatttaggtcaattctttatgttcctgctacaaggaaggatgatataactgataataggaagaccaagaatatcagactgtatgttaaacgtgtattcatatcggatgactttgatggagaattgttcccaagatatttgagctttgtgaagggtgttgttgactcaaatgaccttccgttgaatgtttctcgtgagattcttcaagaaagtcgaattgttcgtataatgagaaagaggctagtgcggaaagccttcgatatggtacttggcatttcttgcagtgaaaacagagatgattacgaaaggttctgggagaactatggaaaaattttaaagctgggtgccatggaagacaaagaaaatcacaagagaattgctcctttgttgcgcttcttctcttctcaaagcaacgatgaattaatcagcttggacgaatatgtggaaaacatgaaacctgagcagaaggatatttacttcattgctgcagacagcctgagcagtgccaaaaatacccctttcttagagagactaacagaaaaagagtatgaggtgatagcaatgaggaaagagaggagataaagcagcagttcagccaaacctgtgattggataaagaatcgcttgggtgacaaggttgcacgtgttgacatatctaatcgtctgaggtcatcgccatgtgttcttgttgcagcgaagtttggttggtcagccaatatggaaaggctaatgagagcacagactatgggtgatacaaccactttggatttcatgcggtcaaggaaggtttttgaaataaatccagaacatgagataatcaaggccttgaatgcggcatgcaggaataaccccgatgatcctgaagccctaaaggctctggatgttctctttgaaactgctatgatttcaagtggcttgtcgcctgacaaccccgccgagctcagcgggaagatctacgagatgataaccactgccatcgcaggcaagtggtcctcacagtcgcaggcgcaacctgacaacacaactctgcagcacgcggcacctgggaggtcggatgagccgcttgaaggtgaagtggtggagccagagcccgttgaggctgatcagcataaggatgacatatcggcacgaattgtcctcataacttaa

SEQ ID NO: 60869 - DNA, 3051 bp, Zea Mays
ttttctttcactattgtgcaagctgattatttaagttcattattgttccttaattcttgtgcacactgttttgatcttgatattcatgcttgatttctaggcttataatatttgttctaaaaccctgatttggtaagataggactgtcacgttagtcgatgatctctgatcaccatttagcgttggagggctgtttattacagcaacccgctattttgagagcaatataaaaagataaacaataatgtttatgtgcaaaatctgccttcttcatctgcaagccatgtttaattttgaaatggacctgaacaactattttacatgtttacatgttctagaattgctactgttcattgctgctataattacatatgatatttatctgagttatatgtttgttttattcggaattagaatatttaaatatgaaggaagcatgtcactcatttctctaattttacaacacaattaagctaaatatatttgtatgcgaaatatatttgtacactattgttgactatgtgagactatgtgagcgtggttgcagaaacaatagcacggggatctatagaattaattttcatctcccatcctatgaatttaagataggatcatatctaaactttgaaaagttgtagaatgtcacatttcaactaaataacctaattcattaagtagattccaattcctccaaaataaaaggatccaaacggctccttagaggaaactgtgattattcttcaaataaacagtacaaattaagttctgccacctgttaataagttgtatatatatatgttatgttgtgtgatctcaggtgagcaatggagcccgtggggttcctcagcagcagaataggttgctctcagtgcttgtggcacccaagattgcaggaatgagcaatgttgtggccctcaagctgatggatggtgcccttattggtagacgctatgaatcgagtgcagcagcagttgattctacggaccagctagctgagaagcacgagtaccaggctgaggtcaacaggctcatggatttgattgtgcacagcttgtatagtaacaaggaagttttccttcgagaactggtcagcaatgctagtgatgcacttgataagttgcgttatctgagtgtcacggaccctgagcttctgaaggatggtccccaacttgacattcgcattcaatcagacaaggataatggagtaataacaattactgattctgggattggtatgacgaaacaagagcttattgattctcttgggactattgcaagcagtggaactgccaagttccttaaagcattgaaggagagtcaagaagcgggcatggacaacaacttgattggccaatttggtgttggtttctattccacatttcttgtttcagagaaggttgttgtgtcaacaaagagcccaaaatctgacaaacaatatgtttgggaaggacaagcagattctggttcttataccattagagaggaaaaagacccagagaagctaattcctaggggaactcgccttactctctatcttaagcatgatgataagggctttgctcaccctgagaggattcaaaaacttttaaagaattattctcagtttgtttcctttcccatttacacatggcaagagaaaggcttcacaaaagaggtcgaggttgatgaggatccagcggaagccaaaaaaggggatgatgatatcaaaactgagcctaagaaaaagaccaaaaccgttgttgagaagtattgggattgggagctttcaaatgagacacaacctatttggcttcgaaaccctaaagaggtttcaactgaggagtacaatgaattttacaagaaaaccttcaatgagtacttgaatcctttggcctcctcacacttcactacagagggtgaggtagaatttaggtcaattctttatgttcctgctacaaggaaggatgatataactgataataggaagaccaagaatatcagactgtatgttaaacgtgtattcatatcggatgactttgatggagaattgttcccaagatatttgagctttgtgaagggtgttgttgactcaaatgaccttccgttgaatgtttctcgtgagattcttcaagaaagtcgaattgttcgtataatgagaaagaggctagtgcggaaagccttcgatatggtacttggcatttcttgcagtgaaaacagagatgattacgaaaggttctgggagaactatggaaaaattttaaagctgggtgccatggaagacaaagaaaatcacaagagaattgctcctttgttgcgcttcttctcttctcaaagcaacgatgaattaatcagcttggacgaatatgtggaaaacatgaaacctgagcagaaggatatttacttcattgctgcagacagcctgagcagtgccaaaaatacccctttcttagagagactaacagaaaaagagtatgaggtgatagcaatgaggaaagagaggagataaagcagcagttcagccaaacctgtgattggataaagaatcgcttgggtgacaaggttgcacgtgttgacatatctaatcgtctgaggtcatcgccatgtgttcttgttgcagcgaagtttggttggtcagccaatatggaaaggctaatgagagcacagactatgggtgatacaaccactttggatttcatgcggtcaaggaaggtttttgaaataaatccagaacatgagataatcaaggccttgaatgcggcatgcaggaataaccccgatgatcctgaagccctaaaggctctggatgttctctttgaaactgctatgatttcaagtggcttgtcgcctgacaaccccgccgagctcagcgggaagatctacgagatgataaccactgccatcgcaggcaagtggtcctcacagtcgcaggcgcaacctgacaacacaactctgcagcacgcggcacctgggaggtcggatgagccgcttgaaggtgaagtggtggagccagagcccgttgaggctgatcagcataaggatgacatatcggcacgaattgtcctcataacttaa

SEQ ID NO: 60870 - DNA, 3278 bp, Zea Mays
tgtgattgcacaatctgtgggcggatttgattgctcgatgatgatagcggtgtagtgagacgacgtgacagtctgggttttagtgtattgttattttcagcagtaatattatttatgcctagtattttctttcactattgtgcaagctgattatttaagttcattattgttccttaattcttgtgcacactgttttgatcttgatattcatgcttgatttctaggcttataatatttgttctaaaaccctgatttggtaagataggactgtcacgttagtcgatgatctctgatcaccatttagcgttggagggctgtttattacagcaacccgctattttgagagcaatataaaaagataaacaataatgtttatgtgcaaaatctgccttcttcatctgcaagccatgtttaattttgaaatggacctgaacaactattttacatgtttacatgttctagaattgctactgttcattgctgctataattacatatgatatttatctgagttatatgtttgttttattcggaattagaatatttaaatatgaaggaagcatgtcactcatttctctaattttacaacacaattaagctaaatatatttgtatgcgaaatatatttgtacactattgttgactatgtgagactatgtgagcgtggttgcagaaacaatagcacggggatctatagaattaattttcatctcccatcctatgaatttaagataggatcatatctaaactttgaaaagttgtagaatgtcacatttcaactaaataacctaattcattaagtagattccaattcctccaaaataaaaggatccaaacggctccttagaggaaactgtgattattcttcaaataaacagtacaaattaagttctgccacctgttaataagttgtatatatatatgttatgttgtgtgatctcaggtgagcaatggagcccgtggggttcctcagcagcagaataggttgctctcagtgcttgtggcacccaagattgcaggaatgagcaatgttgtggccctcaagctgatggatggtgcccttattggtagacgctatgaatcgagtgcagcagcagttgattctacggaccagctagctgagaagcacgagtaccaggctgaggtcaacaggctcatggatttgattgtgcacagcttgtatagtaacaaggaagttttccttcgagaactggtcagcaatgctagtgatgcacttgataagttgcgttatctgagtgtcacggaccctgagcttctgaaggatggtccccaacttgacattcgcattcaatcagacaaggataatggagtaataacaattactgattctgggattggtatgacgaaacaagagcttattgattctcttgggactattgcaagcagtggaactgccaagttccttaaagcattgaaggagagtcaagaagcgggcatggacaacaacttgattggccaatttggtgttggtttctattccacatttcttgtttcagagaaggttgttgtgtcaacaaagagcccaaaatctgacaaacaatatgtttgggaaggacaagcagattctggttcttataccattagagaggaaaaagacccagagaagctaattcctaggggaactcgccttactctctatcttaagcatgatgataagggctttgctcaccctgagaggattcaaaaacttttaaagaattattctcagtttgtttcctttcccatttacacatggcaagagaaaggcttcacaaaagaggtcgaggttgatgaggatccagcggaagccaaaaaaggggatgatgatatcaaaactgagcctaagaaaaagaccaaaaccgttgttgagaagtattgggattgggagctttcaaatgagacacaacctatttggcttcgaaaccctaaagaggtttcaactgaggagtacaatgaattttacaagaaaaccttcaatgagtacttgaatcctttggcctcctcacacttcactacagagggtgaggtagaatttaggtcaattctttatgttcctgctacaaggaaggatgatataactgataataggaagaccaagaatatcagactgtatgttaaacgtgtattcatatcggatgactttgatggagaattgttcccaagatatttgagctttgtgaagggtgttgttgactcaaatgaccttccgttgaatgtttctcgtgagattcttcaagaaagtcgaattgttcgtataatgagaaagaggctagtgcggaaagccttcgatatggtacttggcatttcttgcagtgaaaacagagatgattacgaaaggttctgggagaactatggaaaaattttaaagctgggtgccatggaagacaaagaaaatcacaagagaattgctcctttgttgcgcttcttctcttctcaaagcaacgatgaattaatcagcttggacgaatatgtggaaaacatgaaacctgagcagaaggatatttacttcattgctgcagacagcctgagcagtgccaaaaatacccctttcttagagagactaacagaaaaagagtatgaggttctacttttcgttgaccctatggatgaaatggctatccagaatctgagctcctacaaggataagaaatttgtggacattagcagggaagatttggacttaggtgatagcaatgaggaaagagaggagataaagcagcagttcagccaaacctgtgattggataaagaatcgcttgggtgacaaggttgcacgtgttgacatatctaatcgtctgaggtcatcgccatgtgttcttgttgcagcgaagtttggttggtcagccaatatggaaaggctaatgagagcacagactatgggtgatacaaccactttggatttcatgcggtcaaggaaggtttttgaaataaatccagaacatgagataatcaaggccttgaatgcggcatgcaggaataaccccgatgatcctgaagccctaaaggctctggatgttctctttgaaactgctatgatttcaagtggcttgtcgcctgacaaccccgccgagctcagcgggaagatctacgagatgataaccactgccatcgcaggcaagtggtcctcacagtcgcaggcgcaacctgacaacacaactctgcagcacgcggcacctgggaggtcggatgagccgcttgaaggtgaagtggtggagccagagcccgttgaggctgatcagcataaggatgacatatcggcacgaattgtcctcataacttaa

SEQ ID NO: 60871 - DNA, 1480 bp, Zea Mays
aaagaggctagtgcggaaagccttcgatatggattacgaaaggttctgggagaactatggaaaaattttaaagctgggtgccatggaagacaaagaaaatcacaagagaattgctcctttgttgcgcttcttctcttctcaaagcaacgatgaattaatcagcttggacgaatatgtggaaaacatgaaacctgagcagaaggatatttacttcattgctgcagacagcctgagcagtgccaaaaatacccctttcttagagagactaacagaaaaagagtatgaggttctacttttcgttgaccctatggatgaaatggctatccagaatctgagctcctacaaggataagaaatttgtggacattagcagggaagatttggacttaggtgatagcaatgaggaaagagaggagataaagcagcagttcagccaaacctgtgattggataaagaatcgcttgggtgacaaggttgcacgtgttgacatatctaatcgtctgaggtcatcgccatgtgttcttgttgcagcgaagtttggttggtcagccaatatggaaaggctaatgagagcacagactatgggtgatacaaccactttggatttcatgcggtcaaggaaggtttttgaaataaatccagaacatgagataatcaaggccttgaatgcggcatgcaggaataaccccgatgatcctgaagccctaaaggctctggatgttctctttgaaactgctatgatttcaagtggcttgtcgcctgacaaccccgccgagctcagcgggaagatctacgagatgataaccactgccatcgcaggcaagtggtcctcacagtcgcaggcgcaacctgacaacacaactctgcagcacgcggcacctgggaggtcggatgagccgcttgaaggtgaagtggtggagccagagcccgttgaggctgatcagcataagtaaggggaaccccctttcgctttctcgtgctagctttgaaccgttgtgcacgtggcggagaattttgagtatttgttttgacggcctttagctttatcatgagctgtgacggacctaatgtttagaatttagaagattagggataagtggcggttgaactacttgaactggttatgtgatcctaggatcgtctctggactcattgtagattaattataacagttagaagcgcaggtgaggtgtctatcacggacacccaaacgcatcagagttgctaaatttggagctgaggcctgcggtgaatgagatcgtctcttttgtctcgacttccacgactttctttgggctgaggtctgcggtgaatttggagctgaggtctgcggtgaatgctattttcagcggtcttacttatttcatctcttactaggtgagtgtccgtgcgttgcaacggaaccgtataataacataataacttatgtatatatgtgtgttatattgttatagttatattcccgtgcgttgcgacggaag

SEQ ID NO: 60872 - DNA, 3484 bp, Zea Mays
ctgatcaccatttagcgttggagggctgtttattacagcaacccgctattttgagagcaatataaaaagataaacaataatgtttatgtgcaaaatctgccttcttcatctgcaagccatgtttaattttgaaatggacctgaacaactattttacatgtttacatgttctagaattgctactgttcattgctgctataattacatatgatatttatctgagttatatgtttgttttattcggaattagaatatttaaatatgaaggaagcatgtcactcatttctctaattttacaacacaattaagctaaatatatttgtatgcgaaatatatttgtacactattgttgactatgtgagactatgtgagcgtggttgcagaaacaatagcacggggatctatagaattaattttcatctcccatcctatgaatttaagataggatcatatctaaactttgaaaagttgtagaatgtcacatttcaactaaataacctaattcattaagtagattccaattcctccaaaataaaaggatccaaacggctccttagaggaaactgtgattattcttcaaataaacagtacaaattaagttctgccacctgttaataagttgtatatatatatgttatgttgtgtgatctcaggtgagcaatggagcccgtggggttcctcagcagcagaataggttgctctcagtgcttgtggcacccaagattgcaggaatgagcaatgttgtggccctcaagctgatggatggtgcccttattggtagacgctatgaatcgagtgcagcagcagttgattctacggaccagctagctgagaagcacgagtaccaggctgaggtcaacaggctcatggatttgattgtgcacagcttgtatagtaacaaggaagttttccttcgagaactggtcagcaatgctagtgatgcacttgataagttgcgttatctgagtgtcacggaccctgagcttctgaaggatggtccccaacttgacattcgcattcaatcagacaaggataatggagtaataacaattactgattctgggattggtatgacgaaacaagagcttattgattctcttgggactattgcaagcagtggaactgccaagttccttaaagcattgaaggagagtcaagaagcgggcatggacaacaacttgattggccaatttggtgttggtttctattccacatttcttgtttcagagaaggttgttgtgtcaacaaagagcccaaaatctgacaaacaatatgtttgggaaggacaagcagattctggttcttataccattagagaggaaaaagacccagagaagctaattcctaggggaactcgccttactctctatcttaagcatgatgataagggctttgctcaccctgagaggattcaaaaacttttaaagaattattctcagtttgtttcctttcccatttacacatggcaagagaaaggcttcacaaaagaggtcgaggttgatgaggatccagcggaagccaaaaaaggggatgatgatatcaaaactgagcctaagaaaaagaccaaaaccgttgttgagaagtattgggattgggagctttcaaatgagacacaacctatttggcttcgaaaccctaaagaggtttcaactgaggagtacaatgaattttacaagaaaaccttcaatgagtacttgaatcctttggcctcctcacacttcactacagagggtgaggtagaatttaggtcaattctttatgttcctgctacaaggaaggatgatataactgataataggaagaccaagaatatcagactgtatgttaaacgtgtattcatatcggatgactttgatggagaattgttcccaagatatttgagctttgtgaagggtgttgttgactcaaatgaccttccgttgaatgtttctcgtgagattcttcaagaaagtcgaattgttcgtataatgagaaagaggctagtgcggaaagccttcgatatggtacttggcatttcttgcagtgaaaacagagatgattacgaaaggttctgggagaactatggaaaaattttaaagctgggtgccatggaagacaaagaaaatcacaagagaattgctcctttgttgcgcttcttctcttctcaaagcaacgatgaattaatcagcttggacgaatatgtggaaaacatgaaacctgagcagaaggatatttacttcattgctgcagacagcctgagcagtgccaaaaatacccctttcttagagagactaacagaaaaagagtatgaggttctacttttcgttgaccctatggatgaaatggctatccagaatctgagctcctacaaggataagaaatttgtggacattagcagggaagatttggacttaggtgatagcaatgaggaaagagaggagataaagcagcagttcagccaaacctgtgattggataaagaatcgcttgggtgacaaggttgcacgtgttgacatatctaatcgtctgaggtcatcgccatgtgttcttgttgcagcgaagtttggttggtcagccaatatggaaaggctaatgagagcacagactatgggtgatacaaccactttggatttcatgcggtcaaggaaggtttttgaaataaatccagaacatgagataatcaaggccttgaatgcggcatgcaggaataaccccgatgatcctgaagccctaaaggctctggatgttctctttgaaactgctatgatttcaagtggcttgtcgcctgacaaccccgccgagctcagcgggaagatctacgagatgataaccactgccatcgcaggcaagtggtcctcacagtcgcaggcgcaacctgacaacacaactctgcagcacgcggcacctgggaggtcggatgagccgcttgaaggtgaagtggtggagccagagcccgttgaggctgatcagcataagtaaggggaaccccctttcgctttctcgtgctagctttgaaccgttgtgcacgtggcggagaattttgagtatttgttttgacggcctttagctttatcatgagctgtgacggacctaatgtttagaatttagaagattagggataagtggcggttgaactacttgaactggttatgtgatcctaggatcgtctctggactcattgtagattaattataacagttagaagcgcaggtgaggtgtctatcacggacacccaaacgcatcagagttgctaaatttggagctgaggcctgcggtgaatgagatcgtctcttttgtctcgacttccacgactttctttgggctgaggtctgcggtgaatttggagctgaggtctgcggtgaatgctattttcagcggtcttacttatttcatctcttactaggtgagtgtccgtgcgttgcaacggaaccgtataataacataataacttatgtatatatgtgtgttatattgttatagttatattcccgtgcgttgcgacggaag

SEQ ID NO: 60873 - DNA, 3381 bp, Zea Mays
ctgatcaccatttagcgttggagggctgtttattacagcaacccgctattttgagagcaatataaaaagataaacaataatgtttatgtgcaaaatctgccttcttcatctgcaagccatgtttaattttgaaatggacctgaacaactattttacatgtttacatgttctagaattgctactgttcattgctgctataattacatatgatatttatctgagttatatgtttgttttattcggaattagaatatttaaatatgaaggaagcatgtcactcatttctctaattttacaacacaattaagctaaatatatttgtatgcgaaatatatttgtacactattgttgactatgtgagactatgtgagcgtggttgcagaaacaatagcacggggatctatagaattaattttcatctcccatcctatgaatttaagataggatcatatctaaactttgaaaagttgtagaatgtcacatttcaactaaataacctaattcattaagtagattccaattcctccaaaataaaaggatccaaacggctccttagaggaaactgtgattattcttcaaataaacagtacaaattaagttctgccacctgttaataagttgtatatatatatgttatgttgtgtgatctcaggtgagcaatggagcccgtggggttcctcagcagcagaataggttgctctcagtgcttgtggcacccaagattgcaggaatgagcaatgttgtggccctcaagctgatggatggtgcccttattggtagacgctatgaatcgagtgcagcagcagttgattctacggaccagctagctgagaagcacgagtaccaggctgaggtcaacaggctcatggatttgattgtgcacagcttgtatagtaacaaggaagttttccttcgagaactggtcagcaatgctagtgatgcacttgataagttgcgttatctgagtgtcacggaccctgagcttctgaaggatggtccccaacttgacattcgcattcaatcagacaaggataatggagtaataacaattactgattctgggattggtatgacgaaacaagagcttattgattctcttgggactattgcaagcagtggaactgccaagttccttaaagcattgaaggagagtcaagaagcgggcatggacaacaacttgattggccaatttggtgttggtttctattccacatttcttgtttcagagaaggttgttgtgtcaacaaagagcccaaaatctgacaaacaatatgtttgggaaggacaagcagattctggttcttataccattagagaggaaaaagacccagagaagctaattcctaggggaactcgccttactctctatcttaagcatgatgataagggctttgctcaccctgagaggattcaaaaacttttaaagaattattctcagtttgtttcctttcccatttacacatggcaagagaaaggcttcacaaaagaggtcgaggttgatgaggatccagcggaagccaaaaaaggggatgatgatatcaaaactgagcctaagaaaaagaccaaaaccgttgttgagaagtattgggattgggagctttcaaatgagacacaacctatttggcttcgaaaccctaaagaggtttcaactgaggagtacaatgaattttacaagaaaaccttcaatgagtacttgaatcctttggcctcctcacacttcactacagagggtgaggtagaatttaggtcaattctttatgttcctgctacaaggaaggatgatataactgataataggaagaccaagaatatcagactgtatgttaaacgtgtattcatatcggatgactttgatggagaattgttcccaagatatttgagctttgtgaagggtgttgttgactcaaatgaccttccgttgaatgtttctcgtgagattcttcaagaaagtcgaattgttcgtataatgagaaagaggctagtgcggaaagccttcgatatggtacttggcatttcttgcagtgaaaacagagatgattacgaaaggttctgggagaactatggaaaaattttaaagctgggtgccatggaagacaaagaaaatcacaagagaattgctcctttgttgcgcttcttctcttctcaaagcaacgatgaattaatcagcttggacgaatatgtggaaaacatgaaacctgagcagaaggatatttacttcattgctgcagacagcctgagcagtgccaaaaatacccctttcttagagagactaacagaaaaagagtatgaggtgatagcaatgaggaaagagaggagataaagcagcagttcagccaaacctgtgattggataaagaatcgcttgggtgacaaggttgcacgtgttgacatatctaatcgtctgaggtcatcgccatgtgttcttgttgcagcgaagtttggttggtcagccaatatggaaaggctaatgagagcacagactatgggtgatacaaccactttggatttcatgcggtcaaggaaggtttttgaaataaatccagaacatgagataatcaaggccttgaatgcggcatgcaggaataaccccgatgatcctgaagccctaaaggctctggatgttctctttgaaactgctatgatttcaagtggcttgtcgcctgacaaccccgccgagctcagcgggaagatctacgagatgataaccactgccatcgcaggcaagtggtcctcacagtcgcaggcgcaacctgacaacacaactctgcagcacgcggcacctgggaggtcggatgagccgcttgaaggtgaagtggtggagccagagcccgttgaggctgatcagcataagtaaggggaaccccctttcgctttctcgtgctagctttgaaccgttgtgcacgtggcggagaattttgagtatttgttttgacggcctttagctttatcatgagctgtgacggacctaatgtttagaatttagaagattagggataagtggcggttgaactacttgaactggttatgtgatcctaggatcgtctctggactcattgtagattaattataacagttagaagcgcaggtgaggtgtctatcacggacacccaaacgcatcagagttgctaaatttggagctgaggcctgcggtgaatgagatcgtctcttttgtctcgacttccacgactttctttgggctgaggtctgcggtgaatttggagctgaggtctgcggtgaatgctattttcagcggtcttacttatttcatctcttactaggtgagtgtccgtgcgttgcaacggaaccgtataataacataataacttatgtatatatgtgtgttatattgttatagttatattcccgtgcgttgcgacggaag

SEQ ID NO: 60874 - DNA, 1812 bp, Zea Mays
agggatctcttatttgccagcaagctttatttttgaattcatgtatttttcttggtacttaatctgctgaaaaataatttatttttttcatatcttctctggaatgatgttctgtcttacttgtctctgaagcatactctatattcaggacgctttgctccagttggatgtttaagggaagttccagtgagggggatcgaagggcacgaaggatacattagattaattgagggaaagggagatttattagtccacaaaataatatgtacgaggagatttattagtccacagaataatatgtaccaggactgcaagatcgttgaaggccagttatacacaaagaggttgaatgaaaaacagatcacatcgctgctaaaggttcaagtaggtaatactccagagtacataactgacaggaagttaggtaaaggtggttttggtcaggtctatgttggtcgaagggtttctggtggagctgcccgcactggtcctgatgcatatgaggacgcattgaaattagagcatcgaaacagtaaaggatgcaattatggccctccatatgagtggcaggtttataacactctcaatggttgctatggcataccatcggtccactacaagggtcgtcagggcgactactatatacttgtgagttcacttcttattactctatttctttgcagctcaacagtttttattcacttatatttttaggtaatggatatgcttggtcccagcctttgggacgtgtggaattcaatggggcaggcgtaagtatcttccattcttttttatgatatcttttgtcactcatcagcttttagactaaatggtccaactatcgtaaacaggatgacttcaaggtgtgtacattccttttgctcttctaccattcttactatatattgtttatcttggctattgtataatgaatagttggattgttgacaactgtttttttctaatatgttctgattattgttgagtggcctggagacaatttgtgatcctgaagttaagacaacacagatgggagctggccattgttgaatacatttacttttatctgtagtgtttcacattattataacatagtctgatcagcatccttgacataagccacaagtattatgttgtttagttgtgatgtctgatatagacctctacatatgcatctgcaatttgcctttcatgccttttatactgatcaagcactcttgggcaatggggctggggttaccatggtgtttctgtgtaccttaacggtgtttggtgttggcacatgttgcacacacccaggcaaggaccatttcatgaagtcagaggctgggcaaaatggcaatgccaaacaaagctcatctgccaatatctacaactgaagttaccccagcagtctactttctgtttggctataccaatggctgctttatacaaaagttgctagatgctatcttatataaacgttggtttatgtaagttgttttttcctacaagtccacaatataccatggtctgcaacctaacaggctaatagtgatacatgaaaagcagtactgaaaagcagtgtatttctacatcgttaagaaagcaaagcaaaactaaacacactatgaactaatacataaacatagattagcaacaactcgggaaaaaaattgtaccagcaggaaccgctagcacataagaacattgtatatctaggttcgaacaggcaagaacatggttatgcataatcatgaactgctagagaagctagtgaaatttatacctctgaacaggggcaaatgaggagtaggctcctgcttggtcgtt

SEQ ID NO: 60875 - DNA, 1385 bp, Zea Mays
cgagcacgccggaagcggtcgaaactcgaaagggacaaagcagcgagcggcgccgggttccccctcccttcctcgcccctgatctacgccgatcgaaggccgggcggcgatgcttccatcagcgtcgaggacgtccgctgctgctccctgtggctgcggttttgcagcataagaaatatagctacacacagctcaatgcttgtcaggatcgatggcagatagggagcatcgaacagtatttgtcacagtggggacgacatgctttgatgctcttgtcatggcggtagattctccagaagtgaagaaggctttattgcaaaaaggttatagtaatcttcttattcagatgggccgaggaacatatgttccattgaaggtctcaggagatgctacccttcaagttgatcatttcacattttcaccaagcatcgctgacaatatgagaacagcttccctagttatcagccatgcaggttcaggaagcatatttgagactctgcgactcggcaaaccactaatcgttgttgtaaatgaagatttgatggacaatcaccagagtgaattagcagaagaattggctgaaaggaagcatctcttctgtgcacgcccacaaacattgggagagaccatccgggcaatggacctagagacactggttccttatgagccaggggatgccaaaccagtcgtcaccctgatcaacagatttcttggctttccagttgattgacgaatctattcggttgttcttcaatccatgtggattagatggtattgcgtcggtttaattccatagcaagtcaaaatacatcctaaacccactcaatccactccaatccatatggaatcatgtctaaacgaacaaggtctactcctagaccttgttcggttatttcaattccatgtggattggagtatattggaatggattgtgatgaattttgatttgctataggtttaaaccgactcaataacactcaatccacatggatcaacagtaaaacaaacaagcccttaatgagtctagttgatataaaatggattaactgacatggaaatagcagaccgttctctttgcaattttcatccattaaggcgttagctttattgcagtggccataagtcctcaacctataaggatgtttatattttcatcaaattatttaaggagtcaattcttctggtggtatgcttttgttcgttgacatgtgaagacggtttaatctcaacatgtactattggttctgttttctttgaaacagctcatggaggtatggtatccatgtgtttgtaggagtaaaaatgcatgaatgtatgcgagtgttttaagtagactatctataaattcctaacattttaagacagcagaacagtcagtttggttc

SEQ ID NO: 60876 - DNA, 1428 bp, Zea Mays
cgagcacgccggaagcggtcgaaactcgaaagggacaaagcagcgagcggcgccgggttccccctcccttcctcgcccctgatctacgccgatcgaaggccgggcggcgatgcttccttgcctgcacctctcggtccaacacacagattagatcagcgtcgaggacgtccgctgctgctccctgtggctgcggttttgcagcataagaaatatagctacacacagctcaatgcttgtcaggatcgatggcagatagggagcatcgaacagtatttgtcacagtggggacgacatgctttgatgctcttgtcatggcggtagattctccagaagtgaagaaggctttattgcaaaaaggttatagtaatcttcttattcagatgggccgaggaacatatgttccattgaaggtctcaggagatgctacccttcaagttgatcatttcacattttcaccaagcatcgctgacaatatgagaacagcttccctagttatcagccatgcagcactggcaggttcaggaagcatatttgagactctgcgactcggcaaaccactaatcgttgttgtaaatgaagatttgatggacaatcaccagagtgaattagcagaagaattggctgaaaggaagcatctcttctgtgcacgcccacaaacattgggagagaccatccgggcaatggacctagagacactggttccttatgagccaggggatgccaaaccagtcgtcaccctgatcaacagatttcttggctttccagttgattgacgaatctattcggttgttcttcaatccatgtggattagatggtattgcgtcggtttaattccatagcaagtcaaaatacatcctaaacccactcaatccactccaatccatatggaatcatgtctaaacgaacaaggtctactcctagaccttgttcggttatttcaattccatgtggattggagtatattggaatggattgtgatgaattttgatttgctataggtttaaaccgactcaataacactcaatccacatggatcaacagtaaaacaaacaagcccttaatgagtctagttgatataaaatggattaactgacatggaaatagcagaccgttctctttgcaattttcatccattaaggcgttagctttattgcagtggccataagtcctcaacctataaggatgtttatattttcatcaaattatttaaggagtcaattcttctggtggtatgcttttgttcgttgacatgtgaagacggtttaatctcaacatgtactattggttctgttttctttgaaacagctcatggaggtatggtatccatgtgtttgtaggagtaaaaatgcatgaatgtatgcgagtgttttaagtagactatctataaattcctaacattttaagacagcagaacagtcagtttggttc

SEQ ID NO: 60877 - DNA, 1413 bp, Zea Mays
cgagcacgccggaagcggtcgaaactcgaaagggacaaagcagcgagcggcgccgggttccccctcccttcctcgcccctgatctacgccgatcgaaggccgggcggcgatgcttccttgcctgcacctctcggtccaacacacagattagatcagcgtcgaggacgtccgctgctgctccctgtggctgcggttttgcagcataagaaatatagctacacacagctcaatgcttgtcaggatcgatggcagatagggagcatcgaacagtatttgtcacagtggggacgacatgctttgatgctcttgtcatggcggtagattctccagaagtgaagaaggctttattgcaaaaaggttatagtaatcttcttattcagatgggccgaggaacatatgttccattgaaggtctcaggagatgctacccttcaagttgatcatttcacattttcaccaagcatcgctgacaatatgagaacagcttccctagttatcagccatgcaggaagcatatttgagactctgcgactcggcaaaccactaatcgttgttgtaaatgaagatttgatggacaatcaccagagtgaattagcagaagaattggctgaaaggaagcatctcttctgtgcacgcccacaaacattgggagagaccatccgggcaatggacctagagacactggttccttatgagccaggggatgccaaaccagtcgtcaccctgatcaacagatttcttggctttccagttgattgacgaatctattcggttgttcttcaatccatgtggattagatggtattgcgtcggtttaattccatagcaagtcaaaatacatcctaaacccactcaatccactccaatccatatggaatcatgtctaaacgaacaaggtctactcctagaccttgttcggttatttcaattccatgtggattggagtatattggaatggattgtgatgaattttgatttgctataggtttaaaccgactcaataacactcaatccacatggatcaacagtaaaacaaacaagcccttaatgagtctagttgatataaaatggattaactgacatggaaatagcagaccgttctctttgcaattttcatccattaaggcgttagctttattgcagtggccataagtcctcaacctataaggatgtttatattttcatcaaattatttaaggagtcaattcttctggtggtatgcttttgttcgttgacatgtgaagacggtttaatctcaacatgtactattggttctgttttctttgaaacagctcatggaggtatggtatccatgtgtttgtaggagtaaaaatgcatgaatgtatgcgagtgttttaagtagactatctataaattcctaacattttaagacagcagaacagtcagtttggttc

SEQ ID NO: 60878 - DNA, 1370 bp, Zea Mays
ctcctcgatacatccgagcacgccggaagcggtcgaaactcgaaagggacaaagcagcgagcggcgccgggttccccctcccttcctcgcccctgatctacgccgatcgaaggccgggcggcgatgcttccttgcctgcacctctcggtccaacacacagattagatcagcgtcgaggacgtccgctgctgctccctgtggctgcggttttgcagcataagaaatatagctacacacagctcaatgcttgtcaggatcgatggcagatagggagcatcgaacagtatttgtcacagtggggacgacatgctttgatgctcttgtcatggcggtagattctccagaagtgaagaaggctttattgcaaaaaggttatagtaatcttcttattcagatgggccgaggaacatatgttccattgaaggtctcaggagatgctacccttcaagttgatcatttcacattttcaccaagcatcgctgacaatatgagaacagcttccctagttatcagccatgcagatttgatggacaatcaccagagtgaattagcagaagaattggctgaaaggaagcatctcttctgtgcacgcccacaaacattgggagagaccatccgggcaatggacctagagacactggttccttatgagccaggggatgccaaaccagtcgtcaccctgatcaacagatttcttggctttccagttgattgacgaatctattcggttgttcttcaatccatgtggattagatggtattgcgtcggtttaattccatagcaagtcaaaatacatcctaaacccactcaatccactccaatccatatggaatcatgtctaaacgaacaaggtctactcctagaccttgttcggttatttcaattccatgtggattggagtatattggaatggattgtgatgaattttgatttgctataggtttaaaccgactcaataacactcaatccacatggatcaacagtaaaacaaacaagcccttaatgagtctagttgatataaaatggattaactgacatggaaatagcagaccgttctctttgcaattttcatccattaaggcgttagctttattgcagtggccataagtcctcaacctataaggatgtttatattttcatcaaattatttaaggagtcaattcttctggtggtatgcttttgttcgttgacatgtgaagacggtttaatctcaacatgtactattggttctgttttctttgaaacagctcatggaggtatggtatccatgtgtttgtaggagtaaaaatgcatgaatgtatgcgagtgttttaagtagactatctataaattcctaacattttaagacagcagaacagtcagtttggttc

SEQ ID NO: 60879 - DNA, 655 bp, Zea Mays
atcatggtggtatggcggcattcgtgcaggaccgacccccacctccacctcgtatgctctctctctctctctctccttcccatggctgatgcctgacacggtgacacccccaacattctccctcactagctagctgtgtcctgcctacctagcggtatcaatacccggctgcagctcaccaccaccaccaaccaaccaacccacagttcccatataggcagccatcggctacacagcctcgcctccgtaagcagagtgtgtcgttggaagagagacgacggcggccatggcgacctccttccaggggacgaccaccaagtgcaccgcctgcgacaagacggtgtaccttgtggacaagctcaccgccgacaaccgcatctaccacaaggcctgcttccgctgccaccactgcaagggcaccctcaagctcgccaactacaactccttcgagggagtgctctactgcaggcctcacttcgaccagctgttcaagaggacagggagcttggacaagagcttcgaaggaactccgaaggttgtcaagccagaaagaaacgttgggaatgagaatgctactaaagtctcaagcgcctttgctggcaccagagagaaatgtgttggatgcagcaagacagtctatccaactgagaggcat

SEQ ID NO: 60880 - DNA, 1415 bp, Zea Mays
tttgggtttgggtttgcggcaacgcccgtgcgcgcatcgacctctgattccttcgcatatccccaaagcaagctcgagtgaagaaactcacgaaatctgaagccagctgagagaggcggatggggcagtgcccgtgtttcgggtccgcgaaggcggcggagcaggagcggcgggcggaggcggaccggcgcgagtcgcaggatgctcgcgccaaggccgccgaggccgcgcagaggagacagcaggactatgagaaatcggcagctggaagggcagccaaagcacaaatgaaagcaatgaaggaatcaaaggcatcaaaccaaggtggagagccggttcttaagtggcagatgggatcatgagtttcgtttctgttgatttgcatccctccgcttgtaagtatgaacaatcatactcatctgcttcatttgcatgctgtctctggtagactggtatcttatgtgaacctgtctgaggcaaaattgtgtatctaagcatgtgttttcgttcttcttaatttacttgtattgggcatgctgaaatggagtattaaaaggcaagtacttgatatacagaatatacaaaaggcaaagttatcatgtgtgttcgaatttcagatcatttatagctgaattcatggcttaatctaaggatgatggaatattagtgcctctgttattcgtttactttctctctcatgattaacagattgaaaatttcctagtagccaaatacggtttgtttgatgttcgcatagagctgccggatatcttagcttattagctaactagtcttttattctctgctctatattttaaatgtggtgttaaaccttgtctcactcgcatactcttcctaccaatcttgcagacttttgatggccgacagaaaattgattgcgactaatttctgataggatgcactgtgattgtgtgattatgccagtgaagtgtacatccggtttaccatctgctatgctgtacatgctatcccatagactgcccaacttcccagttaaaagtcacaagtttgtgtttgtaagtgaacaaaatatatattttatgaacacatgtagtctcgtagcatttgcatggaggcttttaccccacttcatagtatttttcaaagccatgtttcatagtgcgactacagtactgaattctgctgcagccttctttttttcccttcacatcatcaagcatccccatggagattctcatatgtaccatgttctgttagctgatagcttatcaagctttggtatatgaaatgctgaacactcgttgcactttacatggattgttttaatttgagtgttactccatagttcctgagaattcatggaccaagtttgtgtcattgaacgttcacgtggatatcaaatcgtctccattttgcttggcccctgaggtatg

SEQ ID NO: 60881 - DNA, 1228 bp, Zea Mays
actcagtgctcaccgaactccatctatctcttccccacgaacgcttgcggcggcggcggaattaggaggcgatggggcactccaacgtctggaactcgcaccccaagaactacgggcccggatcccgcgtctggcagtgcttccgcagcaatgccaaggacattggcttcatcaaggtatgcaatataagcttcaaactcctgtgtgaatgatgcttagcatcattaatgctttatgattttgtattggatatttagtctgaaaagttgctatcaaaaaacacgacaagaaaaaagtgaaagaccgataaatccattagttaatatttgtgaaatagctccatttagacactattctgcttttagttagcctccatcgtaaacatggaaaaggctccaagattctatgatgtaaagtgtctgatacttatctgttgttttatcatctttaattctttaatgaattagttactgccagcttttaggcgacatcttgcagtttagggcattcctatgtatttagactgtttctttggcactttgttccctttcttgcaagtgcagctgtggtattttgttgaaacatgccctacactttgctggtagtctttttttattcaaagaatgaattgtggttacatgtttttcatgttgacatgaaaacattaatgtatggctatggcacataaagtgcctacaattattttgctgcccatggcaatatttttgaaatttctccaatttggttgacttactattgctctttaaccaatgcaatgcctatatttttgttgcagtaccgctgaaatcaggtgggaatggaccatgtggtagaggcgaggctgtagttttatttccagtaatttagatgttttgttcagaagtctgctagtaaagactgctacgtttatgatgaagaacttagccatgttggtcatattgatcatgagttacctatgttgagcttaaactatcttgtgtccaaccatcgctgggtagtatgattactgtaatgtagggtggttaaggtcgcaaactaatacttatattgcatgtgtcgaagatccattccaattgtacttctagcgcactatttgtgaaatgttgctgggcctgtacggcattgacattaggtatcacaccaaaggattaatctgttccattgaacaatcctgccctgcattgttatccgatggatgctgaataggagtcggtcttctagacattcg

SEQ ID NO: 60882 - DNA, 719 bp, Zea Mays
actcagtgctcaccgaactccatctatctcttccccacgaacgcttgcggcggcggcggaattaggaggcgatggggcactccaacgtctggaactcgcaccccaagaactacgggcccggatcccgcgtctgtggtatgctccttattgtggcgttgtacttagcggaacttgttcactttgacagccgtgtctgtgcgaaccctcatggactgatcaggaagtacgggctgatgtgctgcaggcagtgcttccgcagcaatgccaaggacattggcttcatcaagtaccgctgaaatcaggtgggaatggaccatgtggtagaggcgaggctgtagttttatttccagtaatttagatgttttgttcagaagtctgctagtaaagactgctacgtttatgatgaagaacttagccatgttggtcatattgatcatgagttacctatgttgagcttaaactatcttgtgtccaaccatcgctgggtagtatgattactgtaatgtagggtggttaaggtcgcaaactaatacttatattgcatgtgtcgaagatccattccaattgtacttctagcgcactatttgtgaaatgttgctgggcctgtacggcattgacattaggtatcacaccaaaggattaatctgttccattgaacaatcctgccctgcattgttatccgatggatgctgaataggagtcggtcttctagacattcg

SEQ ID NO: 60883 - DNA, 990 bp, Zea Mays
aacaaatgtgcaacttgggcgcaattctaaaatggcttgaacatctaggtacgagtcacatgagaaacaccaaactgaaagatcactgcaaaacataatatacacaatactaagtaatcaatcatatggtttgcacaagctgcacaatctgacaaagaatcaattaaagcatggctagaaacataagagaaaattttcagtacacatcgacaagttcagcaactccgtagaagaataatatagtataatctaagatagtatggggttttgttacacactctttagccgtgggtgcttagatgtgttggttttgtggacatctatggttttcagtttgcctgttactcaaactactttgtaatgtagtagtgttttggtaatgaaatttggattttccattgtggaaaaaaaaagagcagccgcatttttttgtgtatttttgcgtaataatttttgtgaactagtcaccgtacagagtttaaaaattcatgtttgtgataaaaaatgcagatgtagcaacttcagaaatttgtttttatgttctttctagtaacaaggattaattatttcactgttcaatggctcaacagcaagtgaatcgattgatcatgcattcaatgagtgatcgcttgaaacaatgaatcctagcaccacaaaaggctgcatttgaattgcaatggcttttcaaaagcatagagatagaagccacagaccattgaggttagtggtccagtggtcactggtctgatcagcagcccacctgttgagccaatgtagtcatgcaggtgatactgagataatattatttctcacaagaaatcatatatgtagggatacacactagagaatttattctgacttagtggtaggtaaaggctgagatcatgcatagtcatgaagctgggatgatacaatgttatgtggaattaaggaatactatttattttcaacaaaaataacaattaatcaaagcaagctcaaccaaattac

SEQ ID NO: 60884 - DNA, 445 bp, Zea Mays
cccccctccactgtacttcttccccgcgcgcaaccatcgttgcaatttccccaggaccgaccagttagccatccaccttccggactcctcggccaccactcatgtccatatttagcgcccctgggacccgtccgcaccatcctgaaccttggaaaccctggccacgtcgcaaaccagagagggagaggaagtgtggtgccgctgcggaggaacttttcaccgagccgccatccgcgccgtgtgtggagtccggagccatctacagaccgaggggaaaggcctccacaacatagtcggcgggattggcccctacatcaccgggaattcctcactgaagtcttggttggcgctcaagccgcaccacatcgtcgccaggagactcgacgccataaccgtcggagaagaacatgtggtccaggaggagccatacaatgaggagtacgag

SEQ ID NO: 60885 - DNA, 259 bp, Zea Mays
attactgtcatccaaagtcagagggccatctatcttagcaagcggtcagtggatctgtagctctgatctgtaccggcaaaacctagatccagcagtcaatcctgaccagattcagaattgaagttggatcatgtgttggcttcatatgcaggcctttctctagattgtgcaatgtgattggatggcgagttatgtggagcggttggtaacagtaacatgtgttggcctggtccccgccacaccctccctcagatttctg

SEQ ID NO: 60886 - DNA, 1023 bp, Zea Mays
cctcggtgactgacgcgtggccctcacctccgctttcccctcctcccaaataaaacccgaccgcagccgccggtcgtccaggaacgccgccgccgccatggccactgccggagccttccacgccggcggcttcctcctcctcccggtccgacgaagtctccgcgggcccagcccctcaccatggtcccacttccgcacccacttcatctcctccaagccgccgccctccacccctctcccgccgcccgtgccgccagctcgcctgtcccccgtgggttctgccttcgggcctcctagcagaaagaccggcgcggttggagccggggctggcgcgggtgtcgtcgggtggtaccttggcctcttggacgcgcggcccgtgctgaccaagagcgtcaccgccgctgtcatcttcaccgccgcggacgtctcctcccagatgctcacacttggtcctgaggattcacttgattttcttaggaccatgcgtatggctagttatgggtttctgatctcaggacctagcctccatctttggttcaattttatctcaaaattgttccccaaaaaagatgtagtgaacacattgaagaagatgtttatagggcaagcagtctatggaccaattattaactcagttttcttctcatacaatgcaggattacaaggcgagactgttgctgagattattgcaagattgaagagggatctagttcccaccatcaaaagcgggcttttatactggccaacttgtgatttcattactttcaagtttgttccagttcatttacagccgctagtgagcaattcattctcatttctgtggaccatctacataacatatatggccagcttaaagaaagcagatgtggaggtggccccgagtacctaggtgttgtcgagtgactcaacatggctgttatctgtcgattcttcgtacaaggcagacttcatgagtacgtgaatggataccaccgtgatcttaatggaaaaaaaaagtaacagatacagatctgtagcaacgta

SEQ ID NO: 60887 - DNA, 1199 bp, Zea Mays
cctcggtgactgacgcgtggccctcacctccgctttcccctcctcccaaataaaacccgaccgcagccgccggtcgtccaggaacgccgccgccgccatggccactgccggagccttccacgccggcggcttcctcctcctcccggtccgacgaagtctccgcgggcccagcccctcaccatggtcccacttccgcacccacttcatctcctccaagccgccgccctccacccctctcccgccgcccgtgccgccagctcgcctgtcccccgtgggttctgccttcgggcctcctagcagaaagaccggcgcggttggagccggggctggcgcgggtgtcgtcgggtggtaccttggcctcttggacgcgcggcccgtgctgaccaagagcgtcaccgccgctgtcatcttcaccgccgcggacgtctcctcccagatgctcacacttggtcctgaggattcacttgattttcttaggaccatgcgtatggctagttatgggtttctgatctcaggacctagcctccatctttggttcaattttatctcaaaattgttccccaaaaaagatgtagtgaacacattgaagaagatgtttatagggcaagcagtctatggaccaattattaactcagttttcttctcatacaatgcaggattacaaggcgagactgttgctgagattattgcaagattgaagagggatctagttcccaccatcaaaagcgggcttttatactggccaacttgtgatttcattactttcaagtttgttccagttcatttacagccgctagtgagcaattcattctcatttctgtggaccatctacataacatatatggccagcttaaagaaagcagatgtggaggtggccccgagtacctaggtgttgtcgagtgactcaacatggctgttatctgtcgattcttcgtacaaggcagacttcatggcatagtgtccacagggattctacttgcttatgtttttggctgaagaccattttgtttggatgatcgaattatactaggttcattgggtgggtcttctacgacgtctttcttacggtcttttgatcctatggctaagaagtacatttacttcaactaaattttctgtatctagttatggagatgcaagtgaacctgttctttgccacaaacaataacagacacaatctatctcatccttttcttctc

SEQ ID NO: 60888 - DNA, 3096 bp, Zea Mays
aaagcccgtcagccggtgtgtagacccaatacggcccggccgatttgtcgctgacgtcacctcatcttcaccaccggagtccggagtaatgcgcaggccacagggtcgggttcgctttttcttggcttcttctctcgtccatccacagggggaaggagcaggagggagggagccatggttgtcagcacattcactggccccgggattgggatcgggttcggtgtcggctgcgggttcggcgtcgggtgggggttcggaggaatgcctcttaacacgttcggcttgggtattggtgggggctgcggagttggtcttggactaggatggggctttggaaatgcttttggttgtcagtatcgatcttcaagagtccagttccagggcattgaatttcagaagaaggctggaggagatgaatcacaaaaagttgtttcacccgagcttgctgaaaagtctcatccttatggctagtattcctgctaccacaaaatccacagagactgagttctgtgtgctgagttgcagtttaattacatacatgtgagttctttgttagtaatgttatgctacacttatggtcatttctgttgtaaccagaagttgttaatggatggaattttcaattaggaagaaatgacgctaatatttgccctacatgctattcatttacttttcatggttgaaggcccgtcactatcatttattgctgtgctttatgttgtaaagctaccatatcttgacttggtctgaaatttgaaatggcagaaaattattgaaaataagttttctgaaaccatcagtattatgatctttcatgtttgcttctcctgtaacagtatgagaactaaagctttgattagtttcttttctcaggacaagcttaaaaacaaaacaaaataactgctgctataaagttacagtttagggaaggtcttttaagttgaaccaccagaaggttaagaaaaagtacaaaacaaaggcggacgttgtttctgatctgttggtgggtgctgtgactgcataccgggaatcagaacaactggtaacttcgtcatagcatgaagcatccatggacctggcatgatggtgaatgacttgcacaactgtatctcttttcttcctgaaaacacacaactgtgtctttcagtgtttttttccagtgcaaagcctctcatacatcaagcaaatggatggtcaaaggaagcagaatcgttctttgatgtagtagagcttgctggctctgcctccccagtcctgaaccagtatgactgctggaatgaagctgcgcttgtggggacatcctccatgacccattcaaagcccttggggtagtagatccctgtcattggatgtgggacccacaatgatgtttctggggacttcacttcagtaggctccagtcgcttcacaaggttcaacatggattactagttaccggagcagagctgccgatttcgcaagcgcatggcggcccatcgaatgcaggctggggcgtttgctaagatgccactggtggttatccttggtagcaaccagctgatagcagttccttcttgtttggtacctccctcatcctcaacccaggtatttatacactagctgtagccttgcagatgcaatgccacaacaccaaccaccttccgcaataaaagagacaccgtacatccattggattatagagaactagacacgcttaacatacagcaaagctaaagaggaggaggggtttgttaaaggattatagacaattttgttcactgtcgctagcttccaatggagcaactgaaatgacggttttgagcctctgattgaacgcctctggacaaaacaccaccagaactgatgctcctagaatctgaagtcagttttgccaaggagtgcagtcttggactgtactgttttgctattttgtgtaaccatgcgacagcaccaccgaggctgtagctagcattgttagcaaagtggaaccttgacattatgaacaaaagatgagagccggacacaattagaagaaaactctacagttacagaaattccacgatgaagggttgatagctgcaaattattttgttataataaagtcctcaatggcttgtaaaattagcaagctgatgtagaggctaaaaacacttatggagtatgataaaagcttagagtcctcagagcacaggtcagagacagcgttttgggtgacagtcgacattggctcttaaagactcgctagcgcggttatttttcttgttctctcatcactgggtaagatctgtactcagctgtcgaagtcaattagccattgagcacgcccattaacaggtgaactcagagtggaaatccatctggatgtgattatcatgcatatttcaagatatgtatcctcaagcgccatcgacgctctgtttcttgtgcacaataatggagagcatgggatctgattctccgcttccataacgcacagctacggcgcaaaactaaagacaaagcatttcaggccttccgtatttgacagactgacagtacagtcacgagaagcacgacgctgcctgcacaggagttgtactgggacatgtctgggagtggaataaagctgctgattttgttctcatcggcttcgatccgtctgttggctccattgcttttggtagaagggtaggaagtcttccagggctggatggtatgctgctatacaaggaatcttgatcacttcacaggttattggcacttgttttcgcgtcccctattccaaaagaaattatgctggcatgttttgcttgttactccctgtgactggtccgaacagtttccaagacaattatgtactgattttgtctgggcattggaagtctggaacagaatgtggcttcctaaacaaggtaatcgattgcactataaaaagttgaataaattgtaaagggttgggatacatttttttgagattactgcctcctgtttatcctgtttgttttttaatcatatgggaacttaaacgtatggactgtcttgctgacacggtggagcccacttgactgttcaatatgcagaactgactaattgggcatcagtatgacttttaggatcaactagtcggttactcgtgca

SEQ ID NO: 60889 - DNA, 2763 bp, Zea Mays
aaagcccgtcagccggtgtgtagacccaatacggcccggccgatttgtcgctgacgtcacctcatcttcaccaccggagtccggagtaatgcgcaggccacagggtcgggttcgctttttcttggcttcttctctcgtccatccacagggggaaggagcaggagggagggagccatggttgtcagcacattcactggccccgggattgggatcgggttcggtgtcggctgcgggttcggcgtcgggtgggggttcggaggaatgcctcttaacacgttcggcttgggtattggtgggggctgcggagttggtcttggactaggatggggctttggaaatgcttttggttgtcagtatcgatcttcaagagtccagttccagggcattgaatttcagaagaaggctggaggagatgaatcacaaaaagttgtttcacccgagcttgctgaaaagtctcatccttatggctagtattcctgctaccacaaaatccacagagactgagttctgtgtgctgagttgcagtttaattacatacatgacaagcttaaaaacaaaacaaaataactgctgctataaagttacagtttagggaaggtcttttaagttgaaccaccagaaggttaagaaaaagtacaaaacaaaggcggacgttgtttctgatctgttggtgggtgctgtgactgcataccgggaatcagaacaactggtaacttcgtcatagcatgaagcatccatggacctggcatgatggtgaatgacttgcacaactgtatctcttttcttcctgaaaacacacaactgtgtctttcagtgtttttttccagtgcaaagcctctcatacatcaagcaaatggatggtcaaaggaagcagaatcgttctttgatgtagtagagcttgctggctctgcctccccagtcctgaaccagtatgactgctggaatgaagctgcgcttgtggggacatcctccatgacccattcaaagcccttggggtagtagatccctgtcattggatgtgggacccacaatgatgtttctggggacttcacttcagtaggctccagtcgcttcacaaggttcaacatggattactagttaccggagcagagctgccgatttcgcaagcgcatggcggcccatcgaatgcaggctggggcgtttgctaagatgccactggtggttatccttggtagcaaccagctgatagcagttccttcttgtttggtacctccctcatcctcaacccaggtatttatacactagctgtagccttgcagatgcaatgccacaacaccaaccaccttccgcaataaaagagacaccgtacatccattggattatagagaactagacacgcttaacatacagcaaagctaaagaggaggaggggtttgttaaaggattatagacaattttgttcactgtcgctagcttccaatggagcaactgaaatgacggttttgagcctctgattgaacgcctctggacaaaacaccaccagaactgatgctcctagaatctgaagtcagttttgccaaggagtgcagtcttggactgtactgttttgctattttgtgtaaccatgcgacagcaccaccgaggctgtagctagcattgttagcaaagtggaaccttgacattatgaacaaaagatgagagccggacacaattagaagaaaactctacagttacagaaattccacgatgaagggttgatagctgcaaattattttgttataataaagtcctcaatggcttgtaaaattagcaagctgatgtagaggctaaaaacacttatggagtatgataaaagcttagagtcctcagagcacaggtcagagacagcgttttgggtgacagtcgacattggctcttaaagactcgctagcgcggttatttttcttgttctctcatcactgggtaagatctgtactcagctgtcgaagtcaattagccattgagcacgcccattaacaggtgaactcagagtggaaatccatctggatgtgattatcatgcatatttcaagatatgtatcctcaagcgccatcgacgctctgtttcttgtgcacaataatggagagcatgggatctgattctccgcttccataacgcacagctacggcgcaaaactaaagacaaagcatttcaggccttccgtatttgacagactgacagtacagtcacgagaagcacgacgctgcctgcacaggagttgtactgggacatgtctgggagtggaataaagctgctgattttgttctcatcggcttcgatccgtctgttggctccattgcttttggtagaagggtaggaagtcttccagggctggatggtatgctgctatacaaggaatcttgatcacttcacaggttattggcacttgttttcgcgtcccctattccaaaagaaattatgctggcatgttttgcttgttactccctgtgactggtccgaacagtttccaagacaattatgtactgattttgtctgggcattggaagtctggaacagaatgtggcttcctaaacaaggtaatcgattgcactataaaaagttgaataaattgtaaagggttgggatacatttttttgagattactgcctcctgtttatcctgtttgttttttaatcatatgggaacttaaacgtatggactgtcttgctgacacggtggagcccacttgactgttcaatatgcagaactgactaattgggcatcagtatgacttttaggatcaactagtcggttactcgtgca

SEQ ID NO: 60890 - DNA, 2776 bp, Zea Mays
aaagcccgtcagccggtgtgtagacccaatacggcccggccgatttgtcgctgacgtcacctcatcttcaccaccggagtccggagtaatgcgcaggccacagggtcgggttcgctttttcttggcttcttctctcgtccatccacagggggaaggagcaggagggagggagccatggttgtcagcacattcactggccccgggattgggatcgggttcggtgtcggctgcgggttcggcgtcgggtgggggttcggaggaatgcctcttaacacgttcggcttgggtattggtgggggctgcggagttggtcttggactaggatggggctttggaaatgcttttggttgtcagtatcgatcttcaagagtccagttccagggcattgaatttcagaagaaggctggaggagatgaatcacaaaaagttgtttcacccgagcttgctgaaaagtctcatccttatggctagtattcctgctaccacaaaatccacagagactgagttctgtgtgctgagttgcagtttaattacatacattttcttttctcaggacaagcttaaaaacaaaacaaaataactgctgctataaagttacagtttagggaaggtcttttaagttgaaccaccagaaggttaagaaaaagtacaaaacaaaggcggacgttgtttctgatctgttggtgggtgctgtgactgcataccgggaatcagaacaactggtaacttcgtcatagcatgaagcatccatggacctggcatgatggtgaatgacttgcacaactgtatctcttttcttcctgaaaacacacaactgtgtctttcagtgtttttttccagtgcaaagcctctcatacatcaagcaaatggatggtcaaaggaagcagaatcgttctttgatgtagtagagcttgctggctctgcctccccagtcctgaaccagtatgactgctggaatgaagctgcgcttgtggggacatcctccatgacccattcaaagcccttggggtagtagatccctgtcattggatgtgggacccacaatgatgtttctggggacttcacttcagtaggctccagtcgcttcacaaggttcaacatggattactagttaccggagcagagctgccgatttcgcaagcgcatggcggcccatcgaatgcaggctggggcgtttgctaagatgccactggtggttatccttggtagcaaccagctgatagcagttccttcttgtttggtacctccctcatcctcaacccaggtatttatacactagctgtagccttgcagatgcaatgccacaacaccaaccaccttccgcaataaaagagacaccgtacatccattggattatagagaactagacacgcttaacatacagcaaagctaaagaggaggaggggtttgttaaaggattatagacaattttgttcactgtcgctagcttccaatggagcaactgaaatgacggttttgagcctctgattgaacgcctctggacaaaacaccaccagaactgatgctcctagaatctgaagtcagttttgccaaggagtgcagtcttggactgtactgttttgctattttgtgtaaccatgcgacagcaccaccgaggctgtagctagcattgttagcaaagtggaaccttgacattatgaacaaaagatgagagccggacacaattagaagaaaactctacagttacagaaattccacgatgaagggttgatagctgcaaattattttgttataataaagtcctcaatggcttgtaaaattagcaagctgatgtagaggctaaaaacacttatggagtatgataaaagcttagagtcctcagagcacaggtcagagacagcgttttgggtgacagtcgacattggctcttaaagactcgctagcgcggttatttttcttgttctctcatcactgggtaagatctgtactcagctgtcgaagtcaattagccattgagcacgcccattaacaggtgaactcagagtggaaatccatctggatgtgattatcatgcatatttcaagatatgtatcctcaagcgccatcgacgctctgtttcttgtgcacaataatggagagcatgggatctgattctccgcttccataacgcacagctacggcgcaaaactaaagacaaagcatttcaggccttccgtatttgacagactgacagtacagtcacgagaagcacgacgctgcctgcacaggagttgtactgggacatgtctgggagtggaataaagctgctgattttgttctcatcggcttcgatccgtctgttggctccattgcttttggtagaagggtaggaagtcttccagggctggatggtatgctgctatacaaggaatcttgatcacttcacaggttattggcacttgttttcgcgtcccctattccaaaagaaattatgctggcatgttttgcttgttactccctgtgactggtccgaacagtttccaagacaattatgtactgattttgtctgggcattggaagtctggaacagaatgtggcttcctaaacaaggtaatcgattgcactataaaaagttgaataaattgtaaagggttgggatacatttttttgagattactgcctcctgtttatcctgtttgttttttaatcatatgggaacttaaacgtatggactgtcttgctgacacggtggagcccacttgactgttcaatatgcagaactgactaattgggcatcagtatgacttttaggatcaactagtcggttactcgtgca

SEQ ID NO: 60891 - DNA, 1045 bp, Zea Mays
gctggccaactaaggccataatcaaaattgtccctattcatttatatcatatctcataaaattgacagtgcatatattcaaattcgaatttaattaaaataaaattattatcagatatagcccgtattctatttccacactacctaccgttgtctcccacgtcgaaaggcggataaggttttcaaacgcacgcgattgcggagatctcggccgcccgatccgccactcctccatccgacggcaggtacgtccccggccggcctactacccggcgacctcggtcgcccatggccaccgcgaaaccttatccccagaaccacacggataaaccctagctgcgcgagccccccggcgatgtcggtggccatccgctccggcgagctccttgcgtgccccgtcgcactccggcgggcgcccttggctgtgtctgtggtgtcggtgcggatgagggctaggggcgccgtggctgtgcgggcggaggcaacggccgagggggtagggaaagaggggaagaaggcggcggggaagaagaagccggcgagcgggatcaccaagccgaagcccatctctacagagctgcgggagttcgtcggcggcgcggcggagctgccccggactgaggccatcaagctggtatgggcgcacatcaagggcaacaacctccaggatccaaacaacaagaagataataatctgcgatgagaaactgaagaagatattcggagggcgtgaccgcgttgggtttctcgaaatttccgggctgctgaacccccacttccagaaatgatagggccttttttgttttgttttgttttgttttgtagatcactctcctctgttgtgctagctgttgctgatgtacgacgagcacatttagctgctaaacctgggctaaaagtggtctctgtctcttgacggcggtttaaggaaggcaaatgcgttccctgaagatgcatgtgattgtgatattcgccgttaatggtgtactagcagttgcttaatcattcatgcttatatcctatccacacacctaccgtcaaaaaaaa

SEQ ID NO: 60892 - DNA, 2281 bp, Zea Mays
gcccaaacttcggtgaaggcaagtaaaactgtgatgggttattccgtctgtcagatgaggagtcttatacttgtttatgttgtgctatcatgttcaaattcatatttttcttttgagtaccatcatttgaaaatgttcatgtttcatggatttcataggttgagtttgaggtttgattatgttactcaagtggttattatgtggaatggttggaagtaaatgcctagcacatttttatttgggaagaacttatgatgttgtcatgcataatgcactcattatccattgcattgaagtttcgtcgcgatcgtatggtccgaccgtaccggtacattgagcatcatatgttgcccgagaaggggtatggtgcagcttcatatccttagagatatggaggcagaagtcattattgcatttgtagccatgtgcattcatgggagaggtgttgaatctattatgtggatgtggataatttggacttgtgcatggtgattccacttggcgttgagtttttagttacttgtatacttgctgcaatttactgttcaaaagaaaagaaagaagtcctgaacacgtggttgtgtaagcacagttgatttacaatggcctacttgttgttgttatgtttacttgctgagatgtgttatctcacatcttgcattgtttgatgcaggcacctaatttctgctttggggaataaaggggatgtagcagcacggccactacacctttaataaaggaaccaccatttaataatgttgataatcagagttggacaagtctagtgaatcgctttgttcttggttgagcgtttattttggggtgggctgagtttcttatcccatttgttttacttcagttgggtcataattaggttttaccacttttgcattacagttctactatgtgaattatatgtctttataccttgtatgagcttcatgtttcccctccttgttatgctagttttcaaaggaggtgctgccggatttttttttcttgctttatattctttctttattacatctctagtgttgagtaagtttagtggatgaggtttatggtattatccattctgtgcgaccagtggggtgttacattacaccatcgagtgtgacaaaatcaggttccgaagctacaaagttgttcctaagggagcactgaaagggaaatgtgcccttgggcaatttctataatgttttggtgattaagtgctcaacacgtttaattaagttctcatgtgccaaacaaagtgagaagtacaaatcaaggcaaaaggtatgtttctagacttagtacattgttttgagtactaatgtatttgtctaagtgttagaaacagagcagagaagaaaagaaacaagttgcaaaagacttggttgtgtgcaggcaaagtctagctcggcctggcacaccggactgtccggtggtgcaccagacagtgtccggtggtgcaccggacagtgtccggtgagccaggctggtctctggtgaaaatgccgctctcaggattcgacggtcgtgtacgactataattcaccggacggtccggtggtgcaccggactgtccggtgagtcgtacgtggtgaactcgtcgctctcaggaaacggaaaaggtgaactggctataattcactggactatccggtggtgcaccggacggtccggtgagccgacggtcgccagcgccaatggtcggtcgcgcaatcttcgcgcgacgcgtggcggctccaacggtcggcagggggcaccggactatccggtgtgcaccggacagtgtccggtgcgccaacgggcccggagctgcaacggtcatctgtgtccgatttggaaggcaatcgtgcactggaccatctacaggacctgttcggtggcacaccggactgtccggtgcgccactcgacagaaggcaaggatagcgttccatgttgatctccaacggctcctagctgccttggggctataaaagggaccactatgcacattgaggagtcacccaagcattcactaagcatcctatgactccaagactccaacttcacgcattcgtttctttgtgatagtgatttgagctccatttgagttgtgaactccgtgcgttgtgtttcgagctcatgtcatgacttgtgtgcgtggttgtgctgcttatttgagtcttgtgtgtgttgctcttcccaaccttactcgtgtgcgttctttgtgatcaatattgtaagggcgagaggctccaacatgtggagattcctcgcaaacgggaaaaagactataaggaagaaagccg

SEQ ID NO: 60893 - DNA, 2182 bp, Zea Mays
cgggtatcgtccgtgtccgtccagatccaccacacagcagcgcaccagccagccacagccacaccacaaatccgccaccgcaatcgcctccccctatttaatgccatcccgcttcctccgttcttcccaaaccaaacccagctcaggcacaaccccaacgcaccgccgccgctcgcctggcctcacctcgccggagaagagttataagacaggagaaccccgtccccggggcgcaggcctcggcagcttccgtgaccaccgcccaatcctgccacagctgccctccctcctcccctctgggcgtggccgagttgtaggcatcacggctagcgttgcagccccccggcgcggccccgcagctgcgcaggtggagcccacgggcaccatcgcctccgctgtcgcgtccagccccgctccgcacggcggccgcggggcgctgccctcggccggaggaagcccgtccgatctcctcttcctcgccggcggcggtcgcctctgagccgttcctgtctctcaccttcttcctttcctagcaattagtcccttctgctaacccccccggaccccgacgagttctcaccccgagagtaactgaccgacctaccggcatggagatgaagctgaccatcaggagggtgcccaccgtcgtctccaactaccaggaggacgccgacaagccgcgcgcgggctgcgggaggaactgcctcggcgactgctgcctgcctgcttccaagcttcccctctacgcgttcaagttgactccggcaaagggctcgcaggaggatgctgcttcaaccaagttacttgttgatattctccttagtgagtgggaggacaggatgactcgaggcttattccgctacgatgtcactgcctgtgagaccaagccgtttgaccctgccaaattcaatttcacaaaagttggccaggaagaggttctcttccaatttgagaatagtggtggtgatgacagctatttcctgaacaacgctccaatcattgctgttgatcgggctccaaatgttattgctatcaatgtaagcccaattgaatatggacatgtgcttctcattcctcgtgttctggaccgcctgcctcagaggattgatccagagagcttcttgcttgcactgcaaatggcagccgagggaggtagcccatacttcaggcttggttacaatagcttgggtgcgtttgccaccatcaatcacctccactttcaggcgtactacttgtcagtgcctttccctgttgagaaggcagctacccacaagatcccactctctgaggacacgaagaagaatggggtgaccgtgtccaagctgataaattatcctgtgagaggcctggtatttgagggagggaacaccctggacgacctggccactgtggtttctaatgcttgcatttggctgcaagacaacaatgtgccttacaatgtgctcatttctgactgtggcaagagggttttcctgttcccccagtgctacgcagagaagcaggctctgggtgaagtgagccaggagctgctggacactcaggtgaacccagctgtgtgggagatcagtggacacatggtgctgaaacggaggatggactatgaggaggcatctgaaacctccgcgtggaaactcctcgccgaggtctctctctccgaggagcgcttcgaggaagtgaaggcgtacatcttcagcgctgctggcctggttcagtatgatgaggaagaggaggaagccagcgacggtgagggccctacggcctatgttcctgtcaaggttacccctctgcccgtcgctgaagggtgcctcgtcctcccgtgagtccgtggtcggttaaataaagggccgtatatgattgcgagccctgtgctctgccgctattttcttctcgtttgtgtcttgctgctctcgtggtgaactcgctactccagtactctgcaatattaagcagaagctattgtattgtttgggtcgtttgtcagctaaattgaaatgcgatggacatttactagtatctgctctctgtttcttctatatatcatgtgtaggctcacgcgcctgtctcaatttgagcggcttcgttttacatctgcgtcactagagatccggatttgactcacttggtgatggttttagtgatgtggagtcatgtgagaggataaatgaaaggtgatggttttact

SEQ ID NO: 60894 - DNA, 2150 bp, Zea Mays
cagaggcggcggcagcagtggacgcggaggagccctagccagcctccgggtgccggcgcggcgaggtgagtggttcagtccgacggctggcgtccgcgtgtcggattgcgcgattcccgctgacattccggtgctggatttcggcaggttgtggattcgatggcggtggcgtcgcggctggcggtcgcgcgggtgtcgccggacggcgcgcgccccgcggcggcggcggcggcaggggggagggggaggagcgggctcgcggcggttcggctcccgtcgaccgccggttgggtgaggaggagggggcgcggcggggccgtcgcggccagccctcccacggaggaggccgtgcagatgacggagccgctcaccaaggaggacctcgtcgcctacctcgtctccgggtgcaagcccaaggagaattggagaattgggacggagcacgaaaagttcggtttcgaagtcgacactttacgccctataaaatatgatcagattcgtgacatactgaacggtcttgctgagagatttgattgggacaagataatggaagaaaacaatgttatcggtctcaagcagggaaagcaaagcatctcactagaacctggaggccaatttgaacttagtggcgctcctctcgaaacattacatcaaacttgtgctgaggtcaattcgcatctttatcaggttaaagcagttggagaggaaatgggaataggatttcttgggcttggctttcagccaaaatgggcactgagtgacataccaataatgccaaagggaagatacgaaataatgaggaattacatgcctaaagttggtactcttggccttgatatgatgttccggacatgtactgtgcaggttaatcttgacttcagttcagaacaggatatgataaggaaatttcgcgctggcctcgctttgcagcctattgcaactgcaatatttgccaattctccgttcaaagaaggaaaaccaaatggatttctcagcttaaggagccatatctggacagatactgataataatcgtgcagggatgctcccttttgtctttgacgactcatttgggattttatgcaaggaaagcttccacaggctcctggggagttgcccactcttaacgattgggagaaccatctaacaacaatttttcctgaggttaggctaaagaggtaccttgagatgagaggtgctgatggtggcccatggaggagattgtgtgcgttgcctgcattttgggttgggctgctgtacgacgaggaatcgttacaaagcattttagacatgacttttgattggacaaaggaggaaagagagatgctaagacggaaggtaccatcgactggtttgaagacgccgtttcgtgatggatatgtaagagatttagctgaggaagttctaaaactggccaagaatggactggaaagaagagggtacaaggaggttggtttccttagagaggtcgacgaagtagtgagaacaggagtgacgcctgcggagaggctgctgaacctgtacgagaccaagtggcaacgcaacgtcgaccatgttttcgagcatttgttatactgattactgaggatgacgccgccgaacgacgttggactgagcttgtagatgtaccccgtaccctaatacagagtctcgtcttgattcattcaatgcctgagccggaagggctcagtttcaggcacacaggagcagagctttcggttggttgttgacggggggcaaccgctgcacagcccggtgctgtgcctacaaataacttcgcctggaactggaacggatcactcatcactgtgctttgctttgacttgatctgcctgtctctccagggagatggaacaaactactgtttgtaccggcccgttttgttttgcagctatgaaaatcgccgtattgaaaataagtccgtcttctgcacgatggaactgtttgtttttcctttttttttggattgttgggacttgggatgtttgttcggggttaacatggcaaaagtgatctcatcgacgataaataaatgaactgatggtttgatccggaatctgcgatatctgcatgttcctttgtagccggtctttatggtctgctacctctgctacgataccttagggtacatgattttccgtacgcatcgtc

SEQ ID NO: 60895 - DNA, 2523 bp, Zea Mays
aaaaaagtgactcccactgaaactcagtactactagtaatgaacggctcgcctctcgcaatcagcagggcacccgcgcccacacgccagtgacgaagccgccgccgccgccgccgcacgcacgcaccggcggcttctgccttctgctgccgatgccgctcgcccgctcctgcgattgatgcgcgcacttcaacgcgccgtcctgacgcccgggccccaccaccacaccgctttataaagtgaccagctcgcgctgctggccccgtctcttcttactcccttcttccgcggtggtagtaccgcgacggaagcagaggcggcggcagcagtggacgcggaggagccctagccagcctccgggtgccggcgcggcgaggtgagtggttcagtccgacggctggcgtccgcgtgtcggattgcgcgattcccgctgacattccggtgctggatttcggcaggttgtggattcgatggcggtggcgtcgcggctggcggtcgcgcgggtgtcgccggacggcgcgcgccccgcggcggcggcggcggcaggggggagggggaggagcgggctcgcggcggttcggctcccgtcgaccgccggttgggtgaggaggagggggcgcggcggggccgtcgcggccagccctcccacggaggaggccgtgcagatgacggagccgctcaccaaggaggacctcgtcgcctacctcgtctccgggtgcaagcccaaggagaattggagaattgggacggagcacgaaaagttcggtttcgaagtcgacactttacgccctataaaatatgatcagattcgtgacatactgaacggtcttgctgagagatttgattgggacaagataatggaagaaaacaatgttatcggtctcaagcagggaaagcaaagcatctcactagaacctggaggccaatttgaacttagtggcgctcctctcgaaacattacatcaaacttgtgctgaggtcaattcgcatctttatcaggttaaagcagttggagaggaaatgggaataggatttcttgggcttggctttcagccaaaatgggcactgagtgacataccaataatgccaaagggaagatacgaaataatgaggaattacatgcctaaagttggtactcttggccttgatatgatgttccggacatgtactgtgcaggttaatcttgacttcagttcagaacaggatatgataaggaaatttcgcgctggcctcgctttgcagcctattgcaactgcaatatttgccaattctccgttcaaagaaggaaaaccaaatggatttctcagcttaaggagccatatctggacagatactgataataatcgtgcagggatgctcccttttgtctttgacgactcatttgggtttgagcaatatgtggactatgcattagaagtccccatgtattttgtgtaccgaaataaaaagattttatgcaaggaaagcttccacaggctcctggggagttgcccactcttaacgattgggagaaccatctaacaacaatttttcctgaggttaggctaaagaggtaccttgagatgagaggtgctgatggtggcccatggaggagattgtgtgcgttgcctgcattttgggttgggctgctgtacgacgaggaatcgttacaaagcattttagacatgacttttgattggacaaaggaggaaagagagatgctaagacggaaggtaccatcgactggtttgaagacgccgtttcgtgatggatatgtaagagatttagctgaggaagttctaaaactggccaagaatggactggaaagaagagggtacaaggaggttggtttccttagagaggtcgacgaagtagtgagaacaggagtgacgcctgcggagaggctgctgaacctgtacgagaccaagtggcaacgcaacgtcgaccatgttttcgagcatttgttatactgattactgaggatgacgccgccgaacgacgttggactgagcttgtagatgtaccccgtaccctaatacagagtctcgtcttgattcattcaatgcctgagccggaagggctcagtttcaggcacacaggagcagagctttcggttggttgttgacggggggcaaccgctgcacagcccggtgctgtgcctacaaataacttcgcctggaactggaacggatcactcatcactgtgctttgctttgacttgatctgcctgtctctccagggagatggaacaaactactgtttgtaccggcccgttttgttttgcagctatgaaaatcgccgtattgaaaataagtccgtcttctgcacgatggaactgtttgtttttcctttttttttggattgttgggacttgggatgtttgttcggggttaacatggcaaaagtgatctcatcgacgataaataaatgaactgatggtttgatccggaatctgcgatatctgcatgttcctttgtagccggtctttatggtctgctacctctgctacgataccttagggtacatgattttccgtacgcatcgtc

SEQ ID NO: 60896 - DNA, 2292 bp, Zea Mays
aaaaaaaagtgactcccactgaaactcagtactactagtaatgaacggctcgcctctcgcaatcagcagggcacccgcgcccacacgccagtgacgaagccgccgccgccgccgccgcacgcacgcaccggcggcttctgccttctgctgccgatgccgctcgcccgctcctgcgattgatgcgcgcacttcaacgcgccgtcctgacgcccgggccccaccaccacaccgctttataaagtgaccagctcgcgctgctggccccgtctcttcttactcccttcttccgcggtggtagtaccgcgacggaagcagaggcggcggcagcagtggacgcggaggagccctagccagcctccgggtgccggcgcggcgagccctcccacggaggaggccgtgcagatgacggagccgctcaccaaggaggacctcgtcgcctacctcgtctccgggtgcaagcccaaggagaattggagaattgggacggagcacgaaaagttcggtttcgaagtcgacactttacgccctataaaatatgatcagattcgtgacatactgaacggtcttgctgagagatttgattgggacaagataatggaagaaaacaatgttatcggtctcaagcagggaaagcaaagcatctcactagaacctggaggccaatttgaacttagtggcgctcctctcgaaacattacatcaaacttgtgctgaggtcaattcgcatctttatcaggttaaagcagttggagaggaaatgggaataggatttcttgggcttggctttcagccaaaatgggcactgagtgacataccaataatgccaaagggaagatacgaaataatgaggaattacatgcctaaagttggtactcttggccttgatatgatgttccggacatgtactgtgcaggttaatcttgacttcagttcagaacaggatatgataaggaaatttcgcgctggcctcgctttgcagcctattgcaactgcaatatttgccaattctccgttcaaagaaggaaaaccaaatggatttctcagcttaaggagccatatctggacagatactgataataatcgtgcagggatgctcccttttgtctttgacgactcatttgggtttgagcaatatgtggactatgcattagaagtccccatgtattttgtgtaccgaaataaaaagtatattgactgcaccggaatgtcgtttcgggattttatgcaaggaaagcttccacaggctcctggggagttgcccactcttaacgattgggagaaccatctaacaacaatttttcctgaggttaggctaaagaggtaccttgagatgagaggtgctgatggtggcccatggaggagattgtgtgcgttgcctgcattttgggttgggctgctgtacgacgaggaatcgttacaaagcattttagacatgacttttgattggacaaaggaggaaagagagatgctaagacggaaggtaccatcgactggtttgaagacgccgtttcgtgatggatatgtaagagatttagctgaggaagttctaaaactggccaagaatggactggaaagaagagggtacaaggaggttggtttccttagagaggtcgacgaagtagtgagaacaggagtgacgcctgcggagaggctgctgaacctgtacgagaccaagtggcaacgcaacgtcgaccatgttttcgagcatttgttatactgattactgaggatgacgccgccgaacgacgttggactgagcttgtagatgtaccccgtaccctaatacagagtctcgtcttgattcattcaatgcctgagccggaagggctcagtttcaggcacacaggagcagagctttcggttggttgttgacggggggcaaccgctgcacagcccggtgctgtgcctacaaataacttcgcctggaactggaacggatcactcatcactgtgctttgctttgacttgatctgcctgtctctccagggagatggaacaaactactgtttgtaccggcccgttttgttttgcagctatgaaaatcgccgtattgaaaataagtccgtcttctgcacgatggaactgtttgtttttcctttttttttggattgttgggacttgggatgtttgttcggggttaacatggcaaaagtgatctcatcgacgataaataaatgaactgatggtttgatccggaatctgcgatatctgcatgttcctttgtagccggtctttatggtctgctacctctgctacgataccttagggtacatgattttccgtacgcatcgtc

SEQ ID NO: 60897 - DNA, 2476 bp, Zea Mays
ccaaaaaaaagtgactcccactgaaactcagtactactagtaatgaacggctcgcctctcgcaatcagcagggcacccgcgcccacacgccagtgacgaagccgccgccgccgccgccgcacgcacgcaccggcggcttctgccttctgctgccgatgccgctcgcccgctcctgcgattgatgcgcgcacttcaacgcgccgtcctgacgcccgggccccaccaccacaccgctttataaagtgaccagctcgcgctgctggccccgtctcttcttactcccttcttccgcggtggtagtaccgcgacggaagcagaggcggcggcagcagtggacgcggaggagccctagccagcctccgggtgccggcgcggcgaggttgtggattcgatggcggtggcgtcgcggctggcggtcgcgcgggtgtcgccggacggcgcgcgccccgcggcggcggcggcggcaggggggagggggaggagcgggctcgcggcggttcggctcccgtcgaccgccggttgggtgaggaggagggggcgcggcggggccgtcgcggccagccctcccacggaggaggccgtgcagatgacggagccgctcaccaaggaggacctcgtcgcctacctcgtctccgggtgcaagcccaaggagaattggagaattgggacggagcacgaaaagttcggtttcgaagtcgacactttacgccctataaaatatgatcagattcgtgacatactgaacggtcttgctgagagatttgattgggacaagataatggaagaaaacaatgttatcggtctcaagcagggaaagcaaagcatctcactagaacctggaggccaatttgaacttagtggcgctcctctcgaaacattacatcaaacttgtgctgaggtcaattcgcatctttatcaggttaaagcagttggagaggaaatgggaataggatttcttgggcttggctttcagccaaaatgggcactgagtgacataccaataatgccaaagggaagatacgaaataatgaggaattacatgcctaaagttggtactcttggccttgatatgatgttccggacatgtactgtgcaggttaatcttgacttcagttcagaacaggatatgataaggaaatttcgcgctggcctcgctttgcagcctattgcaactgcaatatttgccaattctccgttcaaagaaggaaaaccaaatggatttctcagcttaaggagccatatctggacagatactgataataatcgtgcagggatgctcccttttgtctttgacgactcatttgggtttgagcaatatgtggactatgcattagaagtccccatgtattttgtgtaccgaaataaaaagtatattgactgcaccggaatgtcgtttcgggattttatgcaaggaaagcttccacaggctcctggggagttgcccactcttaacgattgggagaaccatctaacaacaatttttcctgaggttaggctaaagaggtaccttgagatgagaggtgctgatggtggcccatggaggagattgtgtgcgttgcctgcattttgggttgggctgctgtacgacgaggaatcgttacaaagcattttagacatgacttttgattggacaaaggaggaaagagagatgctaagacggaaggtaccatcgactggtttgaagacgccgtttcgtgatggatatgtaagagatttagctgaggaagttctaaaactggccaagaatggactggaaagaagagggtacaaggaggttggtttccttagagaggtcgacgaagtagtgagaacaggagtgacgcctgcggagaggctgctgaacctgtacgagaccaagtggcaacgcaacgtcgaccatgttttcgagcatttgttatactgattactgaggatgacgccgccgaacgacgttggactgagcttgtagatgtaccccgtaccctaatacagagtctcgtcttgattcattcaatgcctgagccggaagggctcagtttcaggcacacaggagcagagctttcggttggttgttgacggggggcaaccgctgcacagcccggtgctgtgcctacaaataacttcgcctggaactggaacggatcactcatcactgtgctttgctttgacttgatctgcctgtctctccagggagatggaacaaactactgtttgtaccggcccgttttgttttgcagctatgaaaatcgccgtattgaaaataagtccgtcttctgcacgatggaactgtttgtttttcctttttttttggattgttgggacttgggatgtttgttcggggttaacatggcaaaagtgatctcatcgacgataaataaatgaactgatggtttgatccggaatctgcgatatctgcatgttcctttgtagccggtctttatggtctgctacctctgctacgataccttagggtacatgattttccgtacgcatcgtc

SEQ ID NO: 60898 - DNA, 2522 bp, Zea Mays
ccaaaaaaaagtgactcccactgaaactcagtactactagtaatgaacggctcgcctctcgcaatcagcagggcacccgcgcccacacgccagtgacgaagccgccgccgccgccgccgcacgcacgcaccggcggcttctgccttctgctgccgatgccgctcgcccgctcctgcgattgatgcgcgcacttcaacgcgccgtcctgacgcccgggccccaccaccacaccgctttataaagtgaccagctcgcgctgctggccccgtctcttcttactcccttcttccgcggtggtagtaccgcgacggaagcagaggcggcggcagcagtggacgcggaggagccctagccagcctccgggtgccggcgcggcgaggtgagtggttcagtccgacggctggcgtccgcgtgtcggattgcgcgattcccgctgacattccggtgctggatttcggcaggttgtggattcgatggcggtggcgtcgcggctggcggtcgcgcgggtgtcgccggacggcgcgcgccccgcggcggcggcggcggcaggggggagggggaggagcgggctcgcggcggttcggctcccgtcgaccgccggttgggtgaggaggagggggcgcggcggggccgtcgcggccagccctcccacggaggaggccgtgcagatgacggagccgctcaccaaggaggacctcgtcgcctacctcgtctccgggtgcaagcccaaggagaattggagaattgggacggagcacgaaaagttcggtttcgaagtcgacactttacgccctataaaatatgatcagattcgtgacatactgaacggtcttgctgagagatttgattgggacaagataatggaagaaaacaatgttatcggtctcaagcagggaaagcaaagcatctcactagaacctggaggccaatttgaacttagtggcgctcctctcgaaacattacatcaaacttgtgctgaggtcaattcgcatctttatcaggttaaagcagttggagaggaaatgggaataggatttcttgggcttggctttcagccaaaatgggcactgagtgacataccaataatgccaaagatacgaaataatgaggaattacatgcctaaagttggtactcttggccttgatatgatgttccggacatgtactgtgcaggttaatcttgacttcagttcagaacaggatatgataaggaaatttcgcgctggcctcgctttgcagcctattgcaactgcaatatttgccaattctccgttcaaagaaggaaaaccaaatggatttctcagcttaaggagccatatctggacagatactgataataatcgtgcagggatgctcccttttgtctttgacgactcatttgggtttgagcaatatgtggactatgcattagaagtccccatgtattttgtgtaccgaaataaaaagattttatgcaaggaaagcttccacaggctcctggggagttgcccactcttaacgattgggagaaccatctaacaacaatttttcctgaggttaggctaaagaggtaccttgagatgagaggtgctgatggtggcccatggaggagattgtgtgcgttgcctgcattttgggttgggctgctgtacgacgaggaatcgttacaaagcattttagacatgacttttgattggacaaaggaggaaagagagatgctaagacggaaggtaccatcgactggtttgaagacgccgtttcgtgatggatatgtaagagatttagctgaggaagttctaaaactggccaagaatggactggaaagaagagggtacaaggaggttggtttccttagagaggtcgacgaagtagtgagaacaggagtgacgcctgcggagaggctgctgaacctgtacgagaccaagtggcaacgcaacgtcgaccatgttttcgagcatttgttatactgattactgaggatgacgccgccgaacgacgttggactgagcttgtagatgtaccccgtaccctaatacagagtctcgtcttgattcattcaatgcctgagccggaagggctcagtttcaggcacacaggagcagagctttcggttggttgttgacggggggcaaccgctgcacagcccggtgctgtgcctacaaataacttcgcctggaactggaacggatcactcatcactgtgctttgctttgacttgatctgcctgtctctccagggagatggaacaaactactgtttgtaccggcccgttttgttttgcagctatgaaaatcgccgtattgaaaataagtccgtcttctgcacgatggaactgtttgtttttcctttttttttggattgttgggacttgggatgtttgttcggggttaacatggcaaaagtgatctcatcgacgataaataaatgaactgatggtttgatccggaatctgcgatatctgcatgttcctttgtagccggtctttatggtctgctacctctgctacgataccttagggtacatgattttccgtacgcatcgtc

SEQ ID NO: 60899 - DNA, 2592 bp, Zea Mays
atcgcaggatccagccggccgttccaccactacacccccccaaaaaaaagtgactcccactgaaactcagtactactagtaatgaacggctcgcctctcgcaatcagcagggcacccgcgcccacacgccagtgacgaagccgccgccgccgccgccgcacgcacgcaccggcggcttctgccttctgctgccgatgccgctcgcccgctcctgcgattgatgcgcgcacttcaacgcgccgtcctgacgcccgggccccaccaccacaccgctttataaagtgaccagctcgcgctgctggccccgtctcttcttactcccttcttccgcggtggtagtaccgcgacggaagcagaggcggcggcagcagtggacgcggaggagccctagccagcctccgggtgccggcgcggcgaggtgagtggttcagtccgacggctggcgtccgcgtgtcggattgcgcgattcccgctgacattccggtgctggatttcggcaggttgtggattcgatggcggtggcgtcgcggctggcggtcgcgcgggtgtcgccggacggcgcgcgccccgcggcggcggcggcggcaggggggagggggaggagcgggctcgcggcggttcggctcccgtcgaccgccggttgggtgaggaggagggggcgcggcggggccgtcgcggccagccctcccacggaggaggccgtgcagatgacggagccgctcaccaaggaggacctcgtcgcctacctcgtctccgggtgcaagcccaaggagaattggagaattgggacggagcacgaaaagttcggtttcgaagtcgacactttacgccctataaaatatgatcagattcgtgacatactgaacggtcttgctgagagatttgattgggacaagataatggaagaaaacaatgttatcggtctcaagcagggaaagcaaagcatctcactagaacctggaggccaatttgaacttagtggcgctcctctcgaaacattacatcaaacttgtgctgaggtcaattcgcatctttatcaggttaaagcagttggagaggaaatgggaataggatttcttgggcttggctttcagccaaaatgggcactgagtgacataccaataatgccaaagatacgaaataatgaggaattacatgcctaaagttggtactcttggccttgatatgatgttccggacatgtactgtgcaggttaatcttgacttcagttcagaacaggatatgataaggaaatttcgcgctggcctcgctttgcagcctattgcaactgcaatatttgccaattctccgttcaaagaaggaaaaccaaatggatttctcagcttaaggagccatatctggacagatactgataataatcgtgcagggatgctcccttttgtctttgacgactcatttgggtttgagcaatatgtggactatgcattagaagtccccatgtattttgtgtaccgaaataaaaagtatattgactgcaccggaatgtcgtttcgggattttatgcaaggaaagcttccacaggctcctggggagttgcccactcttaacgattgggagaaccatctaacaacaatttttcctgaggttaggctaaagaggtaccttgagatgagaggtgctgatggtggcccatggaggagattgtgtgcgttgcctgcattttgggttgggctgctgtacgacgaggaatcgttacaaagcattttagacatgacttttgattggacaaaggaggaaagagagatgctaagacggaaggtaccatcgactggtttgaagacgccgtttcgtgatggatatgtaagagatttagctgaggaagttctaaaactggccaagaatggactggaaagaagagggtacaaggaggttggtttccttagagaggtcgacgaagtagtgagaacaggagtgacgcctgcggagaggctgctgaacctgtacgagaccaagtggcaacgcaacgtcgaccatgttttcgagcatttgttatactgattactgaggatgacgccgccgaacgacgttggactgagcttgtagatgtaccccgtaccctaatacagagtctcgtcttgattcattcaatgcctgagccggaagggctcagtttcaggcacacaggagcagagctttcggttggttgttgacggggggcaaccgctgcacagcccggtgctgtgcctacaaataacttcgcctggaactggaacggatcactcatcactgtgctttgctttgacttgatctgcctgtctctccagggagatggaacaaactactgtttgtaccggcccgttttgttttgcagctatgaaaatcgccgtattgaaaataagtccgtcttctgcacgatggaactgtttgtttttcctttttttttggattgttgggacttgggatgtttgttcggggttaacatggcaaaagtgatctcatcgacgataaataaatgaactgatggtttgatccggaatctgcgatatctgcatgttcctttgtagccggtctttatggtctgctacctctgctacgataccttagggtacatgattttccgtacgcatcgtc

SEQ ID NO: 60900 - DNA, 1885 bp, Zea Mays
caccgcagaggatcctcgcgcggcacccctctcatcatcgtcttcgtcatcagcgacgatccagtattgaattgggacggagcacgaaaagttcggtttcgaagtcgacactttacgccctataaaatatgatcagattcgtgacatactgaacggtcttgctgagagatttgattgggacaagataatggaagaaaacaatgttatcggtctcaagcagggaaagcaaagcatctcactagaacctggaggccaatttgaacttagtggcgctcctctcgaaacattacatcaaacttgtgctgaggtcaattcgcatctttatcaggttaaagcagttggagaggaaatgggaataggatttcttgggcttggctttcagccaaaatgggcactgagtgacataccaataatgccaaagggaagatacgaaataatgaggaattacatgcctaaagttggtactcttggccttgatatgatgttccggacatgtactgtgcaggttaatcttgacttcagttcagaacaggatatgataaggaaatttcgcgctggcctcgctttgcagcctattgcaactgcaatatttgccaattctccgttcaaagaaggaaaaccaaatggatttctcagcttaaggagccatatctggacagatactgataataatcgtgcagggatgctcccttttgtctttgacgactcatttgggtttgagcaatatgtggactatgcattagaagtccccatgtattttgtgtaccgaaataaaaagtatattgactgcaccggaatgtcgtttcgggattttatgcaaggaaagcttccacaggctcctggggagttgcccactcttaacgattgggagaaccatctaacaacaatttttcctgaggttaggctaaagaggtaccttgagatgagaggtgctgatggtggcccatggaggagattgtgtgcgttgcctgcattttgggttgggctgctgtacgacgaggaatcgttacaaagcattttagacatgacttttgattggacaaaggaggaaagagagatgctaagacggaaggtaccatcgactggtttgaagacgccgtttcgtgatggatatgtaagagatttagctgaggaagttctaaaactggccaagaatggactggaaagaagagggtacaaggaggttggtttccttagagaggtcgacgaagtagtgagaacaggagtgacgcctgcggagaggctgctgaacctgtacgagaccaagtggcaacgcaacgtcgaccatgttttcgagcatttgttatactgattactgaggatgacgccgccgaacgacgttggactgagcttgtagatgtaccccgtaccctaatacagagtctcgtcttgattcattcaatgcctgagccggaagggctcagtttcaggcacacaggagcagagctttcggttggttgttgacggggggcaaccgctgcacagcccggtgctgtgcctacaaataacttcgcctggaactggaacggatcactcatcactgtgctttgctttgacttgatctgcctgtctctccagggagatggaacaaactactgtttgtaccggcccgttttgttttgcagctatgaaaatcgccgtattgaaaataagtccgtcttctgcacgatggaactgtttgtttttcctttttttttggattgttgggacttgggatgtttgttcggggttaacatggcaaaagtgatctcatcgacgataaataaatgaactgatggtttgatccggaatctgcgatatctgcatgttcctttgtagccggtctttatggtctgctacctctgctacgataccttagggtacatgattttccgtacgcatcgtc

SEQ ID NO: 60901 - DNA, 246 bp, Zea Mays
ctgttcgtcgtcgtccaacggatgcgtccttgggagtcagacagcaccagctctggttttccggtgatggcgagcttcgctctggaaggggcgatgactgggctgtcacggttggcgacccacaccacggtgtgctctggcaccttgttgtaccatatgccgacgtataaactcttgttatagttacctgcggagaagaagccgagagcaaaggctccgtccttggagatgagcacgtcgccgggc

SEQ ID NO: 60902 - DNA, 585 bp, Zea Mays
ccacaagttccatgcctgaatcgacaaatatacaattttatagtgaccacatattcattttctcatggtatctagttctgaattcttagcatatcacgaaacttacatatgctataaggttagggaaatccatgagaaggtgcggtgagctgatctttaatccacttacaatctccagcagtattacaccaaagctgtaggtgtcagatttgaccgaaaaggatccttccatggcatattcaggagccatgtaaccgctgtgtaaattattccaacaaaaaggtttgtgtagtcttaaaacttatgcaaataagttctatctaaataattcgttctgaaagagttacttactatgtccctacaactcggtttgtatttgcttggagctgcttgccaaagaatatcctcgccatgccaaaatctgatatcttagggctcatctccttatctaacaagatattgcttgttttcagatctctatggattatagtcagtcttgagtcctgatggagatacatgattcctctagcaaccccctggattatcttgaaccttgtcgtccactgaagcactgatttttttgat

SEQ ID NO: 60903 - DNA, 206 bp, Zea Mays
ctacaatctatattatccacggattcaacaaacaccatacgtccatacagaaacaagctcacagatataaaaatcacatagcacagattcacaggtctcatgtacagtcagttatcaaaaaagttggtgcactgttgcaaaaccctgaaaattcagagtacaatatgatatggttaaacatctaacgagcctcaagtgctgtcaag

SEQ ID NO: 60904 - DNA, 1798 bp, Zea Mays
ctctttcatttagcatcatgaatgaatataaacaatattgaattacatttatacctttggcttgacagaaggcgaaaatctaaatacaacgtgcgagtgaatacaagccagcgtgaatagtacgggattactgttcatctatttataggcatagaacgcagctcggtcggaattacaatcatgccctcgataaataattataaacatgacacaaactatcatggactgattggtcttttcctctttaagttggtggagccctttgtcttaagacatttcactatgcggaagctccctggatcatggcttcggcttgtatcttcgtgttctgtccgcttgtatcaacttgccaaaggtgtttttgcttaaaggaccttcggcgacgaagcatgcccccaacagcaacgatcagactcaacaacttacaaccttagcttcacaattcttggacacctaacacttataaaacttgattgaagaactttcattaactttctaaactaattttccagctatcctgtgtatcacatatattaataaaacatcacatttttttacctagtcagcatagtatgaccactatcatagaatttccacaagattacaattttaacacctacagtcccaccagcaccgagacctattgatacctccttcactatatgacatcgaccaactcaccgtaaatgactcaggcatcctaataaatattatacctaccaccacgacacacatatactaaaggcaatatgaccaatatagttagtatatctaacaattcccttcatcgaactaataacagaattagcaatccgactcaccacagaatcatcacgattaatatacctagtcagaccattcatcaattcactaacacgaataacaaattggcttaccctgactaatccgacacgatagtcggaagaacgacgatggtttctggttgacatctttgatcacacacatctggcgagcaatgcacacaatttctattcttgaccagaaacccatgggattcattttgttgagctggtgacgtgtggccagcacaagaatgttttcacggcttaggacttggcgtagatgagtatggcgatcgacgacatcgacgtgtcaacacgacaattaccattcaacaaaaactttggcatgacgactcgttcaagttaaggcgagcgcgatccaggtactacagcagcatgccgacaagtccacgacggcacaacgaggtggacgcggcaacgcatggcccaacgggcaaagagggcgcgacggctggggagctaggctagctcggatagggacagccgacgtgatgaccatggcgaataggaaatcgacgaccggcttaggcgatgccggtgagccgaatgcacggatgagctgagcgccgagcgcatgggggatagaggggcgctaccaggggatggctgagcgcggcgagatggcatcggtgagctagagaagccgagcagggacgggtccggcaaggtcgcggctgaggcgaacaaggagcaggggcgcgacggttagtcggtgagctaaaaactgggagcggcggccggtgaagagcttagctccagggagccacgcgagggaaagctggaagctaatccgacagtggttcagcggccagctaatccgacagtggttcagcggcaagcgatggctgggtccgagggggccagtacccaagccgagcggcacgttgaggtcagcactccgagcgtacatgctctttgcccatgtccgcgatgaaccagccgcaggaggatcccagactcgggcatggaggaag

SEQ ID NO: 60905 - DNA, 942 bp, Zea Mays
actggcttcaagtgatactagctgggatttagctcgaaatggcccacgtgccgatcggagctgggccggaaaatgcttgttcaggctttgaaattaacaccaaataaaaagaagaatggcgggcgcgtagagcattcgcagtagcagataaggcgcgttgcgttatctaatccgtccaagaggctgcggtgctcgctcaggctcactgctcagtgctcactgctcactagctaaaaacatctcctttcttatccatggagacggcagcgctcacctcccactccctgcagcgcccagcagcagcagcagctgctcccgcgcatggccagcggcggagggtcggagcggcgggcctgcggcaccggcagccgcgcgccggcggcaggatccgggccctgccttcggcggaggtcatcagcgagatcctgagccccaagctggtgcccggctcgcccgccgacaccggcgacgtctcctcgctcgtcccggccgtgaggaaccgacgcgtcggcgatggaggacggtggtggtgacattagtcgctccatcaaccacgatttgaggctgctcggagaacctggagtccctgagagccgtgctactaccactaccgaccatgctagtggcagtggtagtagtgctgcagttcctatcgacctcgccgtcggggaatctggcgctggcctaggcgcagaagctcctgctgaggttggtcagggctccagcgaccgcaagaggtgtaacacctcaaaggtatgggatgattttgagcctgtgtacacgattaagaacggcaagaggttcacaatggttaacaagttcaagtctcatacaagtttacaaaaaacgttcaagtctcatacaagaaacgtcgtgattgatcatcatttgagaattaatgtgagttttggccactacctccactaccatagagcaaactga

SEQ ID NO: 60906 - DNA, 1372 bp, Zea Mays
atacaaagtacatgatgatgacagaggaagataaaagaggcaaagaaattgaaaagacaacatattctcagaagatgaaattaccaattttcagcaccatatattggagataattggaagtactcagatggctggaaggcgttttactcaaaatggatcaagcagtactcagatatacgcacaaatgacgctgtcatatgtttcaaagcagggtggatacatggatctgatgatggaacagatacgtaactcgcaaggagaatcagtgagtgaagtaggcaatgaaatgcaaagtggcctatgtacacaaaatgaaaccatgaacaaaaacctactagtggccccatgtgagacatacacacagatgattcttgaggaggactcaacgcttgcaaatgcagacatatccaagcagcaacaggatgtgttaacaggatatgtttcaaaccagatatataactcgcaaggagaatcagtgagtgaagtaggcaatgaaatgcaaagtggcctatgcacacaaaatgaaaccatgaacaacaacctactagaagcaccatgtgagacatatacacagatgattcttgaggaggactccccgcttgcaaatgcagacatatccaaggagacatttggggaatgcaatgaagctgatacatctaaatatggggaagcagtataccacagggatctctttgagataattcatgtacaacaactaactgaatgtgcgcaaaatgatgatggaaaagaaactaaaacatcgagtgctagtgcaaactttgatgatgcagaagctgaaacaacaaatgcaggagatgaagagttaacagaggatcagattgatgccttcattatgagtgagcaaatagctgcaacagaagggaacaatgcatcaatagacaacaaatacacacctcaagttgggatggaatttaagaccaggggagatgcagagcacttcttattcttctatggttgtttggctagttttaaaccagcaatcacccacactttcaggacttccaacaaaaaaagaagcaatgaagtaacaaaggtggagctaaaatgtaacaaacatggcaaaacaaaaaagacaaaccagcaggaacaagatatttgcacagaaaaaaagcgatgcgagaaaggcccaaaaaggaatacaaatgtccaagttaaaacagattgcagagtattcatggttataaaggaacatggacaaaaatgggtgatcgataagttagacttggaacacaatcatgagctcagaccagcaaacagcaacaacatgtttagtgggcataagtacatgacagatatggaaaaaggaattataagaaccttaaccacaacaacatacctacatagaagatga

SEQ ID NO: 60907 - DNA, 1958 bp, Zea Mays
cttaggttaggactgggtagaatgcgcaggattacgtggggactgattattggtgtggcgtgaagcatgaatgaaggcagggcgagcggcgcataggatccagatcttgcgaagaaaaagcaatatgaaagcaagccgtttccgcgttgaaacccagcaccccagcagcaggcgtccaacaacacctctctttctctgccttctcttggtggtggtctactggtcttggtcccgtgtgcggcaaggccaaggccaacccggctgtctctcctctcctctcctgctcttgacttccatttccatcccaattcccaccactgacctgaccgcccgcacgccgcccttggcctcgatcacatcatccctccgctccacttttgccgccgtcctccgtctccctccccccgcgtccaaatccaaccatccccaccgcgcgcctccgccatggatcccttccaccacctcaacagctccttctccaatccctaccacccgctcctctccccgtcgccgccgcactttcccctgccgcccccgcccccgcagctgccctccgtctccgccgcctccagcgcgagcctcgagcgggagcgcctcccgcagtggtcccacgccgagacggccgccttcctcgccgtgcgcgccgacctcgatcactccttcctcaccaccaagcgcaacaaggcgctctgggaggccgtctccgcgcgcctccacgcgcagggcttcgcgcgcaccccggaccagtgcaagtccaagtggaagaacctcgtcaccaggttcaagggcaccgaggccgccgccgccgccgccgcggccgacccggcctccgcgcagcagcagcagccgaggccgcagttcccgttccacgacgaggtgcggcggatattcgacgccagggccgagcgcgcgcaggcattggagaggaagagggccaagggcaagggcgtccgcacggcggcggcggcggcgctggacgacgaaggcgccggcgagggggacgacgccgccgatgttgacgacgacgaagaggacgaggacgaagaggccgcggcgggcgacgaggaggccggcgggggcctgcctgctgcggcggacgcgggcggcagggccggcgcgaagaagcgcaggcggaagcaggcgcgcgccgccgccgctagggccgcggcggggcagggcgaggtggaggccatgctgcgggagttcatgcgccggcaggccgagatggaggagcgctgggcggaggccgccgaggcgcgcgaggccgagcgccgggcgcgcgaggaggagtggcgcgccgccatggtcgcgctgggcgaggagcgcctcgcgctcgtgcgccgctggcgggagcgcgaggacgccctgcgcgcgcgcgcagaggagcgcgaggagcgccgccaccagctcgtcgccgcgctgctcgccaagctcggcggcgccgactgctgacgtgtcgtgctgcgtcgatcggcatgcatgatgcatcatccatcgatcgatggtctccctcgcgcgcgcgcgccacgcgaccagctcgtccatccgaatcggcgaatccttcgaccccccgcccaccgaatatcacgctccaccggactaggatatcacatgcttcattctgcaattgaggggggcaccaacatctatccatgtgcgggactactactccagtagacaaggaccaattgtccgtcgacctgatgtggatggagcgatgatggagattaattcggattgtgccaacaaattgcactgatatatatgatggagttgcattattgaagtggtacataaggttgtactagttaatttgactactacctgacactgtacagtggcagagagcaaacgatggtgttgcttgcacgctagctttcacgaatactcgaaatttcagttcacgtaggttatagcgaagattgcattttatctctaagctttatccatttgagttt

SEQ ID NO: 60908 - DNA, 4064 bp, Zea Mays
agcaagccgtttccgcgttgaaacccagcaccccagcagcaggcgtccaacaacacctctctttctctgccttctcttggtggtggtctactggtcttggtcccgtgtgcggcaaggccaaggccaacccggctgtctctcctctcctctcctgctcttgacttccatttccatcccaattcccaccactgacctgaccgcccgcacgccgcccttggcctcgatcacatcatccctccgctccacttttgccgccgtcctccgtctccctccccccgcgtccaaatccaaccatccccaccgcgcgcctccgccatggatcccttccaccacctcaacagctccttctccaatccctaccacccgctcctctccccgtcgccgccgcactttcccctgccgcccccgcccccgcagctgccctccgtctccgccgcctccagcgcgagcctcgagcgggagcgcctcccgcagtggtcccacgccgagacggccgccttcctcgccgtgcgcgccgacctcgatcactccttcctcaccaccaagcgcaacaaggcgctctgggaggccgtctccgcgcgcctccacgcgcagggcttcgcgcgcaccccggaccagtgcaagtccaagtggaagaacctcgtcaccaggttcaagggcaccgaggccgccgccgccgccgccgcggccgacccggcctccgcgcagcagcagcagccgaggccgcagttcccgttccacgacgaggtgcggcggatattcgacgccagggccgagcgcgcgcaggcattggagaggaagagggccaagggcaagggcgtccgcacggcggcggcggcggcgctggacgacgaaggcgccggcgagggggacgacgccgccgatgttgacgacgacgaagaggacgaggacgaagaggccgcggcgggcgacgaggaggccggcgggggcctgcctgctgcggcggacgcgggcggcagggccggcgcgaagaagcgcaggcggaagcaggcgcgcgccgccgccgctagggccgcggcggggcagggcgaggtggaggccatgctgcgggagttcatgcgccggcaggccgagatggaggagcgctgggcggaggccgccgaggcgcgcgaggccgagcgccgggcgcgcgaggaggagtggcgcgccgccatggtcgcgctgggcgaggagcgcctcgcgctcgtgcgccgctggcgggagcgcgaggacgccctgcgcgcgcgcgcagaggagcgcgaggagcgccgccaccagctcgtcgccgcgctgctcgccaagctcggcggcgccgactgctgacgtgtcgtgctgcgtcgatcggcatgcatgatgcatcatccatcgatcgatggtctccctcgcgcgcgcgcgccacgcgaccagctcgtccatccgaatcggcgaatccttcgaccccccgcccaccggagaaggaaaaaaaaacgatgtttcaccgcgaagcgtgcgcatcgtcggccggatagctactctactttacatatttagatggacatcgaccaccggtgcagtgatcgatcaatccatccatgtccatgcatcacccccatgatctttgttgattagggtttctctgctagaatgcatgcatgaggtgatgtgtatacatggcatatatatatgcttgttaggtaggtggtgaaaagggtttcatgatctatatattgcagctcaccatgcatgcaatctcatatttgtttagtagccatcactgatactataagtaggcttagctaatttcatcatatcctcagcttcaggatcggcttattgagctttttctggctttacaagtgcatggatcggaaggatggatgcatgctcttagcttctccttggtacttctccccatatatagagatcgatctcgaggcctcctctttcctccgtcgtctttagtctttacaagatgatccgtaggacctcccgcaccatggtcggtgcttttccgatccactcgaaaacgggtgtgtgtggtgatatgtctctgcaggccctgcgtagcttttgagcgacacggcctagtagccgcaagatcttgctccgtttcctctctctctctcttcagttgcatgggtaaagatatgcatctcactagcgaaaagagatttgcatctgaaaagttgtaggattggactggccggctaggatagatgatcaagaaagggagagagagaggatgcatggtggatactagctagaagcacatggttgctggtagagggtgcaggagcctgctttgctttgctttgcgctagcttatcatacaggaaggatcgagggaagggtatcgatgcccctgcggccttcccgttgcatatgcatactcttctaccttaggggaaaaaaagtcagaggtgtccagtagaagccactactgctgcatatatacacacgaccaaccaaagtagcaactagctaatcagcatctagtctctaatctctatgaggtgtgcttgcttgtgtttgaaacgataataactagtgtcaattacatgatcatctcctccctaatgatgtgtgaaccgcgtgtcgtggaatgcatcatggcgtctcttgcagacagtgggcgcgccgcgcgcgcgcatgcgtgtggttagtatgaacccatcagcatgcatgcacagtgtgtgcgtaaaagcgtcgtagtatgaaaccgcgttacatgtgtacgcgcaccatatgcgtgttcggccgagaatgaatttgctggccctatacattactatattatacttacactacattatattatttgagaggggggggggggggcgtagctagttgaccagcaagtgatgtcaggttctcttctacaattaatgtttatttatacgtttgtatatgtgggttcagtcatcattcatacgctaataaaatccatcaaagctagctagctagatctgtgcttttgtcatcagtagatacgtaaatagaactgccatttctttcaaggaaaactgccagtgtggcttgtgcgaatcctttgggtgaaagccaaatgcatggtatcaactgcatatacatataagaagacttttgaggtccagacctctggcctgcttgctgtaaactttagtgcatatgctacctgctgctaaccttgttgatgatacttgatagtgtgcgtgtggtcataacaacaacttgtcggggaagctggtggtctcagtttcatttgttagtttgctactagcatgcatgaccatgtgagttcatgcatgacactagaaacaaaaactaagatacatgcatgcacgcgcgcgtgcgcgtgcacacagtgtcacacacacaggaggataaacaacaacgatatatatagtaatctgttatcttacatcatgaagcagcattttcatatttatgagttacttgtgcagataattattgagatcataatgacgggcaagtgacatcaacttatcgtgtttccgtgacctaatagtatatatctataagcatatatatacgtccaactagctagcctttttctgggcatcatgtcgtgttcactgttcacctttgatgagcgcgctcatgttgagtgttcacaatggcaacgggcaatcagaggaaacgtcgcttgtcagtatttgcttggctttagcctcagcccgacacaacgaatggacgtacgtcttgtgataataattttctggccatttgatcggttaacgacgctgcagtctgcagctgtatcagtataattatcctttttataaaaaaaattccaacttggttatcaactctatatattgtggattcagctaattagcttgtgtccatgcatgcctttatatatgcacatgcatctgctagtgcctgtggtgtgtgaggaactcacgctctcctgatgtcagtctgattttatactttgatctgatgaatacttgatgatggatattttgtggttactaattgtagactagcctcctaatttcgtactaggtagctagcagcaagtagcagctgcaaaaggatactacagtgccagtttcttggcagtatatatatatatgaaa

SEQ ID NO: 60909 - DNA, 189 bp, Zea Mays
tttgagttggagcccgacgacgaccatgccaacaacctcatcagcttcggctccaaactccaacaacgcggccagcaacggtgcctcttcctcacagcagcagtaccagctggcgatgggcaggagcgctcggcctggctccaactccaacaacgcggccagcaacggtgcctcttcatcgcagcagca

SEQ ID NO: 60910 - DNA, 557 bp, Zea Mays
accctactcgtttgccagacccgagcagtccatggaggcttcctccccacgtcgtgcttcttcacacactcagcctttatcgactcctccctcatctccatcatttcagccagcgacgggcgccctcctcctcgattccgtgtctggatgccgccccagccgtttaccgctgccacggcaagctcgctcggacacctcgcctcctcgtcgcatcgccttggcttctggtcgagtatgccctgcgctcgccactgcccttgagccggtcatccccgccgtgagtccctcccggctcggcatcaacgccagcgagcttggtccctgcgccctcccatctccctcacggtgtctgtccagccgccatgggtgcgctcgccccggcgctatccatcaacgccaccagccgcacgccaacctcacccttgccatggagcagcaacagccatggaaccccttcgtgtcgcgctctcgagtgctcaatgaaataccgcagcgagctccacctcgatctatgcagccccagttgtgacctcgtcgaaccccggtcaagaataggt

SEQ ID NO: 60911 - DNA, 696 bp, Zea Mays
gtaacatgacttgtgggtaaagggtacaacctatgtagagtgtaaaactggtatactagccgagctcacggtcatgagcagctcaggactctctgatgattaatttatggaactaaattcaatttgtcatatgcattgcatcgcaggtgttgttattacttttgttttactacttaattaggttggtatttacttatacttagtaattgctaataaaattttgaccaactttaaaagcaatactcagctctaaccatcctctttggtaagccttacacttcatgctcccacctttggcgagttcatgcacattattccccacaacttgttgagcgatgaacgtatgagagctcactcttgctgtctcacaccccccacaggtcaagaacaggtaccgcaggatgaggcgcatggaggatgctgcgatgagttcgtgagagatctaggccatcgtctctcagtcaactttgggttgctggaccgttgtctccttataatgtaaatatttatttattttgtatagaactcctgttatatagtaaaatgtgacattcgatcatgtgtcatgattcatcatatgtgtgagacttggtcccagcacacctggtgatgatgttcgcgcccgggtcttggtgccccaaaacccgggtgtgacagaagtggtatcagaggaatgttgaatgtaggacgaaacct

SEQ ID NO: 60912 - DNA, 860 bp, Zea Mays
accctactcgtttgccagacccgagcagtccatggaggcttcctccccacgtcgtgcttcttcacacactcagcctttatcgactcctccctcatctccatcatttcagccagcgacgggcgccctcctcctcgattccgtgtctggatgccgccccagccgtttaccgctgccacggcaagctcgctcggacacctcgcctcctcgtcgcatcgccttggcttctggtcgagtatgccctgcgctcgccactgcccttgagccggtcatccccgccgtgagtccctcccggctcggcatcaacgccagcgagcttggtccctgcgccctcccatctccctcacggtgtctgtccagccgccatgggtgcgctcgccccggcgctatccatcaacgccaccagccgcacgccaacctcacccttgccatggagcagcaacagccatggaaccccttcgtgtcgcgctctcgagtgctcaatgaaataccgcagcgagctccacctcgatctatgcagccccagttgtgacctcgtcgaaccccggtcaagaacaggtaccgcaggatgaggcgcatggaggatgctgcgatgagttcgtgagagatctaggccatcgtctctcagtcaactttgggttgctggaccgttgtctccttataatgtaaatatttatttattttgtatagaactcctgttatatagtaaaatgtgacattcgatcatgtgtcatgattcatcatatgtgtgagacttggtcccagcacacctggtgatgatgttcgcgcccgggtcttggtgccccaaaacccgggtgtgacagaagtggtatcagaggaatgttgaatgtaggacgaaacct

SEQ ID NO: 60913 - DNA, 603 bp, Zea Mays
cttcatctgccgcaccctactcgtttgccagacccgagcagtccatggaggcttcctccccacgtcgtgcttcttcacacactcagcctttatcgactcctccctcatctccatcatttcagccagcgacgggcgccctcctcctcgattccgtgtctggatgccgccccagccgtttaccgctgccacggcaagctcgctcggacacctcgcctcctcgtcgcatcgccttggcttctggtcgagtatgccctgcgctcgccactgcccttgagccggtcatccccgccgtgagtccctcccggctcggcatcaacgccagcgagcttggtccctgcgccctcccatctccctcacggtgtctgtccagccgccatgggtgcgctcgccccggcgctatccatcaacgccaccagccgcacgccaacctcacccttgccatggagcagcaacagccatggaaccccttcgtgtcgcgctctcgagtgctcaatgaaataccgcagcgagctccacctcgatctatgcagccccagttgtgacctcgtcgaaccccgcgtgaggacacgtgttatctgaagagcaagttggtacctggaatct

SEQ ID NO: 60914 - DNA, 292 bp, Zea Mays
tcttcatctgccgcaccctactcgtttgccagacccgagcagtccatggaggcttcctccccacgtcgtgcttcttcacacactcagcctttatcgactcctccctcatctccatcatttcagccagcgacgggcgccctcctcctcgattccgtgtctggatgccgccccagccgtttaccgctgccacggcaagctcgctcggacacctcgcctcctcgtcgcatcgccttggcttctggtcgacgtgaggacacgtgttatctgaagagcaagttggtacctggaatct

SEQ ID NO: 60915 - DNA, 2462 bp, Zea Mays
gccgcaccctactcgtttgccagacccgagcagtccatggaggcttcctccccacgtcgtgcttcttcacacactcagcctttatcgactcctccctcatctccatcatttcagccagcgacgggcgccctcctcctcgattccgtgtctggatgccgccccagccgtttaccgctgccacggcaagctcgctcggacacctcgcctcctcgtcgcatcgccttggcttctggtcgagtatgccctgcgctcgccactgcccttgagccggtcatccccgccgtgagtccctcccggctcggcatcaacgccagcgagcttggtccctgcgccctcccatctccctcacggtgtctgtccagccgccatgggtgcgctcgccccggcgctatccatcaacgccaccagccgcacgccaacctcacccttgccatggagcagcaacagccatggaaccccttcgtgtcgcgctctcgagtgctcaatgaaataccgcagcgagctccacctcgatctatgcagccccagttgtgacctcgtcgaaccccggtgagaacccgtagtctccttgtgtttattccttgttagtacctgtacacaacgtcgatttactagatgctaattatgtatatatttgtgtggtgagtaagagaattttagggaaaatttataaagaaacacgtttcagttcgacgcgctctaaatgttcgacgaaatgggagaaccaaggaactatcgtcgttcttgtatatatcgagttgattcgattttagtgagctgattcacgatatttatgttttagttaatccattgatggatagaactattagtggcaataattcttttaattgtagcataagtgtgttgtggtggtctactgaaagtctatgatctttaataatgttttaactactagatcaagtaaatgtgttgttttaactagttcgtatgatatacaagttagttcgagaaagaagtttagaaaattaattaaatagttgttatccttattataaagtttggtgttaattagtggtaaaatatgcaagtgagtctcgaatagaagtttagaaaattaattaaattgtttctatccatcctatgaatgtttgttttggcggtaaacattttatgtattgctcgtgtcaaatgatgttgtagtagcctaatgacacttaggatggtcatgcgtttaaaaaggatatggagtctagaattaactcgccctcacatgcttgatttccttatcaaattgcctcttccggtgtaagtaatatatatagagcatgatcatgtgaaatttgtgtcttaatcgtgattgattatcacctatcagtcataaaaatactagtccaaaactgaatgtttccgtatagtgttaaaataatatatattatctacttaaaagaactagtaaataattagaagagattgagttcatgtatgtttcttggaaagcttggattgttctttgatgtaactagaagttctatgactaagtataataatgtagggctgagtagtagtggtcctcctcataatcttgtttaggtaatcaatttaaatctgattgtgcttgagctgaatttttgctgcacacatcctctttgttgtggtaatagttgagtgaagcaaatcatgttttttgtgaatgtgtgatatataaaagttgtagacaatttttttatcttgctggtgtaaaaatatcatggtcataggtctagtagtttgagagttatgatttttccaggtccagtttcagaatctgtccaaattctgtacaggattgtttggctaagctaaactgagaatcagcccttagtgattatagaagaattgtagtacttttcttataatttccaacaaattttggatcaccctttttggtgtaatacccgatttgtaaaagcatagaaaatgacattatttacctcatatgtattgcctctattcatttacacatgtggacaccacattagaaacaaaaaataataataaaagacgtaccattaatttatgcatcatgctgaggttttattttgtgtgcattatttgtgacaaaataaaaataatataaaagaaatatagtaaattccaaagtggaatttgagatctaaaagaaatcttagaatggagaaaagggaaagaaaaaatgagaaaggctatgaaaatataaataataaatatataactatatttctaaaagtgatatttctaaacttcacaatatgatgtggcgcaagtttgagttcaaattcgaaattcaaaatgaacttgtaaatgaagaaaagaaattatagcataaaacagaaaataatagaaggctttatgggccaactccacccaattcggcccagttttccccatgctcagcccctctgctcacctcagatcaacgacgtgtatcaccagatcgcaacaaactgcactggagatcccgaaatcggctgcgtcgatctcgc

SEQ ID NO: 60916 - DNA, 1279 bp, Zea Mays
cccgcctgtccggtgtcgcgtgccgaggctgtgaggccgtcgcgtctcgcgtcactggctccccgctcctcgcagcaccaaaaacgcggcaggccgagaaatgttcccgaccgcgaggaccatgacaccgagcaggagacggaggaaggggagcgggaggcggtggcggttacccgcgcctgcacctggcttcaagcctccgatccgcccaaggcatcataaatgatgaatatgggggcacattgtatgatggattccttggagtgctaaatgctactccggggttgtcccaaatcatttatagcttggcaggagtagcaacaggcatctattcttcactgtcaggaattcagtggaatggaagatatgacatatgccagaaccgagaaaatgtttggaaagtgagaaggtgctttgtattgggtgttaaaggactactatgtctgctattaaacatgtagaagaacacatttcagcataatctagtctacataagaatgttgacagcaagctgaaaaaagttcccatgaaactggtatctgtcaagaggatcttgaggtgaactgactgtactgtacccattagccggcaattacctaacgtttggtaagcatgtagtccccaccagaaagtaaatagaagtgggtgtagccaatacaacatctggtacatgtcctaaaatatgaaaaatttcaggtaattttaaagtgtgatgggctgttgcatacttgtatgtagtttgatttgatgatagcttccaaaattttttcataagatcttttcatcgtcactaatactgtccagtgtctaaagaacacataattttttcatcatataaataaaaagaggcattcactggcctttgcctcagccctggactcctggcattcacttgtaggtagcaaccgtgtgacaattctatgtgtgaagtaattggatggacactgaactgttcttatgccagtcaggatcactgaggcccagaataaaggcttcctttgttcattccaatccttaactggcagtcacttgcactattgagaatgagaatagatcgtctctgagacttggaactctatataggagtcagaggcaagagtctagttacccatttcgatgtatcatcatcactgtagttgagtatttacatggcgcggcgtgacgaggaagatatctgttccgccaacatcagcttggtcgtctttgagctcatcaatcaagcacgcgttgcattcaagcatcatgcaaagtcaaggtaaccagtaaacataggttgaag

SEQ ID NO: 60917 - DNA, 451 bp, Zea Mays
cccgcctgtccggtgtcgcgtgccgaggctgtgaggccgtcgcgtctcgcgtcactggctccccgctcctcgcagcaccaaaaacgcggcaggccgagaaatgttcccgaccgcgaggaccatgacaccgagcaggagacggaggaaggggagcgggaggcggtggcggttacccgcgcctgcacctggcttcaagcctccgatccgcccaagaattcagtggaatggaagatatgacatatgccagaaccgagaaaatgtttggaaagtgagaaggtgctttgtattgggtgttaaaggactactatgtctgctattaaacatgtagaagaacacatttcagcataatctagtctacataagaatgttgacagcaagctgaaaaaagttcccatgaaactggtatctgtcaagaggcaaagtcaaggtaaccagtaaacataggttgaag

SEQ ID NO: 60918 - DNA, 4086 bp, Zea Mays
cccgcctgtccggtgtcgcgtgccgaggctgtgaggccgtcgcgtctcgcgtcactggctccccgctcctcgcagcaccaaaaacgcggcaggccgagaaatgttcccgaccgcgaggaccatgacaccgagcaggagacggaggaaggggagcgggaggcggtggcggttacccgcgcctgcacctggcttcaagcctccgatccgcccaaggcatcataaatgatgaatatgggggcacattgtatgatggattccttggagtgctaaatgctactccggggttgtcccaaatcatttatagcttggcaggagtagcaacaggcatctattcttcactgtcagggtaaattaccttcggcagtctccactttatataccacatgcttcttcaagcacagtgagcatttcctaattcctattataccgcttaacaataatctcgaaggagaagtgcaatttctttgtcttccttcgtaccagacaacccttcatatagttatatgtaattgaatgtcgtcaagttttgtataagctggaagtttatttttctgttttctcatagtttgggaagaaagagatgcctgcttgtcaatggtagtgaatcatgcccgatttaggtcaatttatggttggatttatctcacctacaaatatgctttctatccttacactattagttagctttgttactcttgtggcccgaacctgtcagtttaagtatttcaatatttttgcctaagcctatagtgtgatgatgagaagtactacaacaataagctggagcttgaatggtccagtgtgaaagtaagttttcaactgaaatccttgaaatacattagacttgtgatctttttacaagcttaatgtaaaacgcattaagaaaactgtatatgcttagcagaaagtgattgattggtgtagaagttcttttcagttgacgttaaagcttaatggagatcaccgctcaggatgctaaatgaagtagaaaatagtgcccagaaataagtagtaggaaaaaaaactattctgttttaggataaacttctgagtggtagcaatatattttattttcggagtttggatttattccaacacagtgagtagtctgggttaactgtggcttcagagctgtgtttgctatcacttttctgactgtgatagtgtgatatgatctttttgagtaaaagtttgattttatcaactttctgattccgacttccaccacggttgattagtagatcatacacagacatttcgtgctatctgtaaaatctgatctggaacttctttgcctattgaaattttgtagttcttcttcattgaagaaccgagaaagttatatcattgtatatatgcattcacactactatatgagtatatttttgttgtgccttttgctacaactttgctgtggttttcgattttcatctctaccgcaactttgcttgggactcaaatgttatattgtgttgctatgacgccagatctgtaaatgttacctataataataaatcttacatatacctagaggtggtaatggatcatgatctaaatgcttcttcacaaaatggtaaggttctaaataatttttagtttaaaaatgaatagaaatagagtttgatcctaatctgatccgatacttaaatcttatagtgtaaaatttagagcccattatcacccctacatataccatgtacaactccattgtttttctcgaatgacacattcatagttttaggtgttttgataggcaaatagccctcaaataaataaccagaaactcgcacacacaagacaaacacagtgggtttggtgactggactgacttagccttttctgattctctctctctctctctctctctttctctaggcagctgtgagctacattttaagatttgatagccttctaattaatgcagaatattacacgcttaatcagcctattactgctaatctgctattccttcatgctaaaattaagctaaagataagtctatgaacctagacactagtgtgcacctagacacacaattactctcgacatgtttaactatggttgcatggaatggattgactaatagtcattagtcaatggttttaatggctcatgtagtgattgtggctaattcaatgggtgtaaatcataattggtttatgaggagagatttttttaaaattttagcgtatatatgtaatactgataaaattaatgatctagcagacctaccatgggtgttaggacaagttttttagattttgacactggcagcaatcctccatctctgaccaaatttaattatttcttttgctccatatatatacataatgctttagtttttttttatcgtgattggactttattagttgcatgcttatttctctgacatcacctccaacaagaaatcaatagtgacaatgttgtcttgaggatgcaaaacatgtaaagaccaaaactggctgccaaaatgacatccatttcaaatggggagtagtaattacttagctattgtttgtttcctaagatctgcatttaaattggtgaacatattgtttatcttaatacttgccacacattgttttgatcttattttctcacatagtcacatacatataaacagccataactcataatagctctagaattcctgcaagactgatcttcagtgttcatgacaactttatggcttatgttctgatgtagttcgttacaaatagaaagaatcacacttcagaatgccacaaattttctgatagccatgaatattgcgtgtctgatattgtttttgtacatgaagggagcatgcttctttaagtacatggtatggtactccctccgttctaaattcaaagtcactttgacttttttggtacatagattttgctatgttatgtctagatacatagcaaaatttatgtaccaaaaaaaagagtcaaagtgacttataatttggaacaaagggagtagcctagaacgaccttgcttttcctttcctgcttctcatatcacaaatcaaatggatcatacaaaattttggctggccatttaatcgagctttggttgcaaagattatttcatattttgaagacattgctgccgattttcagaattcagtggaatggaagatatgacatatgccagaaccgagaaaatgtttggaaagtgagaaggtgctttgtattgggtgttaaaggactactatgtctgctattaaacatgtagaagaacacatttcagcataatctagtctacataagaatgttgacagcaagctgaaaaaagttcccatgaaactggtatctgtcaagaggtaactcagagcatgtaccataagcattttctttgatctatagtttgttggattcgttctaatgaggtccttcattaggatcttgaggtgaactgactgtactgtacccattagccggcaattacctaacgtttggtaagcatgtagtccccaccagaaagtaaatagaagtgggtgtagccaatacaacatctggtacatgtcctaaaatatgaaaaatttcaggtaattttaaagtgtgatgggctgttgcatacttgtatgtagtttgatttgatgatagcttccaaaattttttcataagatcttttcatcgtcactaatactgtccagtgtctaaagaacacataattttttcatcatataaataaaaagaggcattcactggcctttgcctcagccctggactcctggcattcacttgtaggtagcaaccgtgtgacaattctatgtgtgaagtaattggatggacactgaactgttcttatgccagtcaggatcactgaggcccagaataaaggcttcctttgttcattccaatccttaactggcagtcacttgcactattgagaatgagaatagatcgtctctgagacttggaactctatataggagtcagaggcaagagtctagttacccatttcgatgtatcatcatcactgtagttgagtatttacatggcgcggcgtgacgaggaagatatctgttccgccaacatcagcttggtcgtctttgagctcatcaatcaagcacgcgttgcattcaagcatcat

SEQ ID NO: 60919 - DNA, 4431 bp, Zea Mays
cccgcctgtccggtgtcgcgtgccgaggctgtgaggccgtcgcgtctcgcgtcactggctccccgctcctcgcagcaccaaaaacgcggcaggccgagaaatgttcccgaccgcgaggaccatgacaccgagcaggagacggaggaaggggagcgggaggcggtggcggttacccgcgcctgcacctggcttcaagcctccgatccgcccaaggtcagttgcggtgcggcatcctgccttccatttcggccattactctcagcttcgctcgagctcctatcctcgccctgcaatcgcggcggatccggcgttccccactccgtgtgggtctaggtccggtgcgcgcgccgctgcctagatgctagcttttgcacggcgggtcgctgggctccgacttctcgtctcctgctgtttccgacgccattgtgacccccctggattggatggaggctgcaaatcccccgcctccgacgatccgaccggtggcaccctgttattacctgattcatcagtcattcgattcggatgctgcatgcatgatgctggtgtttcgattggagtataagcctgtgcatttgataattgattttgttattggtctatcagccaaggttgcacgtctgtttttttggtcgaatcccacgactacttttttactgctagtggagattcttttttacttcacatgaggcgtagggtagacgagtccaaatgagttgttgagcaggtactacttgggtcttgggaattccatatgctaggggtaggacgagtcaacatcgggagttgctttcagctactgttcctagctcggttttttctggggacggaaaataatgctaaataaaaaaataatctgaaaaacgacacatctccccctagatattttgaactgttaatctggcactttgttctcgcaggcatcataaatgatgaatatgggggcacattgtatgatggattccttggagtgctaaatgctactccggggttgtcccaaatcatttatagcttggcaggagtagcaacaggcatctattcttcactgtcagggtaaattaccttcggcagtctccactttatataccacatgcttcttcaagcacagtgagcatttcctaattcctattataccgcttaacaataatctcgaaggagaagtgcaatttctttgtcttccttcgtaccagacaacccttcatatagttatatgtaattgaatgtcgtcaagttttgtataagctggaagtttatttttctgttttctcatagtttgggaagaaagagatgcctgcttgtcaatggtagtgaatcatgcccgatttaggtcaatttatggttggatttatctcacctacaaatatgctttctatccttacactattagttagctttgttactcttgtggcccgaacctgtcagtttaagtatttcaatatttttgcctaagcctatagtgtgatgatgagaagtactacaacaataagctggagcttgaatggtccagtgtgaaagtaagttttcaactgaaatccttgaaatacattagacttgtgatctttttacaagcttaatgtaaaacgcattaagaaaactgtatatgcttagcagaaagtgattgattggtgtagaagttcttttcagttgacgttaaagcttaatggagatcaccgctcaggatgctaaatgaagtagaaaatagtgcccagaaataagtagtaggaaaaaaaactattctgttttaggataaacttctgagtggtagcaatatattttattttcggagtttggatttattccaacacagtgagtagtctgggttaactgtggcttcagagctgtgtttgctatcacttttctgactgtgatagtgtgatatgatctttttgagtaaaagtttgattttatcaactttctgattccgacttccaccacggttgattagtagatcatacacagacatttcgtgctatctgtaaaatctgatctggaacttctttgcctattgaaattttgtagttcttcttcattgaagaaccgagaaagttatatcattgtatatatgcattcacactactatatgagtatatttttgttgtgccttttgctacaactttgctgtggttttcgattttcatctctaccgcaactttgcttgggactcaaatgttatattgtgttgctatgacgccagatctgtaaatgttacctataataataaatcttacatatacctagaggtggtaatggatcatgatctaaatgcttcttcacaaaatggtaaggttctaaataatttttagtttaaaaatgaatagaaatagagtttgatcctaatctgatccgatacttaaatcttatagtgtaaaatttagagcccattatcacccctacatataccatgtacaactccattgtttttctcgaatgacacattcatagttttaggtgttttgataggcaaatagccctcaaataaataaccagaaactcgcacacacaagacaaacacagtgggtttggtgactggactgacttagccttttctgattctctctctctctctctctctctttctctaggcagctgtgagctacattttaagatttgatagccttctaattaatgcagaatattacacgcttaatcagcctattactgctaatctgctattccttcatgctaaaattaagctaaagataagtctatgaacctagacactagtgtgcacctagacacacaattactctcgacatgtttaactatggttgcatggaatggattgactaatagtcattagtcaatggttttaatggctcatgtagtgattgtggctaattcaatgggtgtaaatcataattggtttatgaggagagatttttttaaaattttagcgtatatatgtaatactgataaaattaatgatctagcagacctaccatgggtgttaggacaagttttttagattttgacactggcagcaatcctccatctctgaccaaatttaattatttcttttgctccatatatatacataatgctttagtttttttttatcgtgattggactttattagttgcatgcttatttctctgacatcacctccaacaagaaatcaatagtgacaatgttgtcttgaggatgcaaaacatgtaaagaccaaaactggctgccaaaatgacatccatttcaaatggggagtagtaattacttagctattgtttgtttcctaagatctgcatttaaattggtgaacatattgtttatcttaatacttgccacacattgttttgatcttattttctcacatagtcacatacatataaacagccataactcataatagctctagaattcctgcaagactgatcttcagtgttcatgacaactttatggcttatgttctgatgtagttcgttacaaatagaaagaatcacacttcagaatgccacaaattttctgatagccatgaatattgcgtgtctgatattgtttttgtacatgaagggagcatgcttctttaagtacatggtatggtactccctccgttctaaattcaaagtcactttgacttttttggtacatagattttgctatgttatgtctagatacatagcaaaatttatgtaccaaaaaaaagagtcaaagtgacttataatttggaacaaagggagtagcctagaacgaccttgcttttcctttcctgcttctcatatcacaaatcaaatggatcatacaaaattttggctggccatttaatcgagctttggttgcaaagattatttcatattttgaagacattgctgccgattttcagaattcagtggaatggaagatatgacatatgccagaaccgagaaaatgtttggaaagtgagaaggtgctttgtattgggtgttaaaggactactatgtctgctattaaacatgtagaagaacacatttcagcataatctagtctacataagaatgttgacagcaagctgaaaaaagttcccatgaaactggtatctgtcaagaggtaactcagagcatgtaccataagcattttctttgatctatagtttgttggattcgttctaatgaggtccttcattaggatcttgaggtgaactgactgtactgtacccattagccggcaattacctaacgtttggatcactgaggcccagaataaaggcttcctttgttcattccaatccttaactggcagtcacttgcactattgagaatgagaatagatcgtctctgagacttggaactctatataggagtcagaggcaagagtctagttacccatttcgatgtatcatcatcactgtagttgagtatttacatggcgcggcgtgacgaggaagatatctgttccgccaacatcagcttggtcgtctttgagctcatcaatcaagcacgcgttgcattcaagcatcat

SEQ ID NO: 60920 - DNA, 4793 bp, Zea Mays
cccgcctgtccggtgtcgcgtgccgaggctgtgaggccgtcgcgtctcgcgtcactggctccccgctcctcgcagcaccaaaaacgcggcaggccgagaaatgttcccgaccgcgaggaccatgacaccgagcaggagacggaggaaggggagcgggaggcggtggcggttacccgcgcctgcacctggcttcaagcctccgatccgcccaaggtcagttgcggtgcggcatcctgccttccatttcggccattactctcagcttcgctcgagctcctatcctcgccctgcaatcgcggcggatccggcgttccccactccgtgtgggtctaggtccggtgcgcgcgccgctgcctagatgctagcttttgcacggcgggtcgctgggctccgacttctcgtctcctgctgtttccgacgccattgtgacccccctggattggatggaggctgcaaatcccccgcctccgacgatccgaccggtggcaccctgttattacctgattcatcagtcattcgattcggatgctgcatgcatgatgctggtgtttcgattggagtataagcctgtgcatttgataattgattttgttattggtctatcagccaaggttgcacgtctgtttttttggtcgaatcccacgactacttttttactgctagtggagattcttttttacttcacatgaggcgtagggtagacgagtccaaatgagttgttgagcaggtactacttgggtcttgggaattccatatgctaggggtaggacgagtcaacatcgggagttgctttcagctactgttcctagctcggttttttctggggacggaaaataatgctaaataaaaaaataatctgaaaaacgacacatctccccctagatattttgaactgttaatctggcactttgttctcgcaggcatcataaatgatgaatatgggggcacattgtatgatggattccttggagtgctaaatgctactccggggttgtcccaaatcatttatagcttggcaggagtagcaacaggcatctattcttcactgtcagggtaaattaccttcggcagtctccactttatataccacatgcttcttcaagcacagtgagcatttcctaattcctattataccgcttaacaataatctcgaaggagaagtgcaatttctttgtcttccttcgtaccagacaacccttcatatagttatatgtaattgaatgtcgtcaagttttgtataagctggaagtttatttttctgttttctcatagtttgggaagaaagagatgcctgcttgtcaatggtagtgaatcatgcccgatttaggtcaatttatggttggatttatctcacctacaaatatgctttctatccttacactattagttagctttgttactcttgtggcccgaacctgtcagtttaagtatttcaatatttttgcctaagcctatagtgtgatgatgagaagtactacaacaataagctggagcttgaatggtccagtgtgaaagtaagttttcaactgaaatccttgaaatacattagacttgtgatctttttacaagcttaatgtaaaacgcattaagaaaactgtatatgcttagcagaaagtgattgattggtgtagaagttcttttcagttgacgttaaagcttaatggagatcaccgctcaggatgctaaatgaagtagaaaatagtgcccagaaataagtagtaggaaaaaaaactattctgttttaggataaacttctgagtggtagcaatatattttattttcggagtttggatttattccaacacagtgagtagtctgggttaactgtggcttcagagctgtgtttgctatcacttttctgactgtgatagtgtgatatgatctttttgagtaaaagtttgattttatcaactttctgattccgacttccaccacggttgattagtagatcatacacagacatttcgtgctatctgtaaaatctgatctggaacttctttgcctattgaaattttgtagttcttcttcattgaagaaccgagaaagttatatcattgtatatatgcattcacactactatatgagtatatttttgttgtgccttttgctacaactttgctgtggttttcgattttcatctctaccgcaactttgcttgggactcaaatgttatattgtgttgctatgacgccagatctgtaaatgttacctataataataaatcttacatatacctagaggtggtaatggatcatgatctaaatgcttcttcacaaaatggtaaggttctaaataatttttagtttaaaaatgaatagaaatagagtttgatcctaatctgatccgatacttaaatcttatagtgtaaaatttagagcccattatcacccctacatataccatgtacaactccattgtttttctcgaatgacacattcatagttttaggtgttttgataggcaaatagccctcaaataaataaccagaaactcgcacacacaagacaaacacagtgggtttggtgactggactgacttagccttttctgattctctctctctctctctctctctttctctaggcagctgtgagctacattttaagatttgatagccttctaattaatgcagaatattacacgcttaatcagcctattactgctaatctgctattccttcatgctaaaattaagctaaagataagtctatgaacctagacactagtgtgcacctagacacacaattactctcgacatgtttaactatggttgcatggaatggattgactaatagtcattagtcaatggttttaatggctcatgtagtgattgtggctaattcaatgggtgtaaatcataattggtttatgaggagagatttttttaaaattttagcgtatatatgtaatactgataaaattaatgatctagcagacctaccatgggtgttaggacaagttttttagattttgacactggcagcaatcctccatctctgaccaaatttaattatttcttttgctccatatatatacataatgctttagtttttttttatcgtgattggactttattagttgcatgcttatttctctgacatcacctccaacaagaaatcaatagtgacaatgttgtcttgaggatgcaaaacatgtaaagaccaaaactggctgccaaaatgacatccatttcaaatggggagtagtaattacttagctattgtttgtttcctaagatctgcatttaaattggtgaacatattgtttatcttaatacttgccacacattgttttgatcttattttctcacatagtcacatacatataaacagccataactcataatagctctagaattcctgcaagactgatcttcagtgttcatgacaactttatggcttatgttctgatgtagttcgttacaaatagaaagaatcacacttcagaatgccacaaattttctgatagccatgaatattgcgtgtctgatattgtttttgtacatgaagggagcatgcttctttaagtacatggtatggtactccctccgttctaaattcaaagtcactttgacttttttggtacatagattttgctatgttatgtctagatacatagcaaaatttatgtaccaaaaaaaagagtcaaagtgacttataatttggaacaaagggagtagcctagaacgaccttgcttttcctttcctgcttctcatatcacaaatcaaatggatcatacaaaattttggctggccatttaatcgagctttggttgcaaagattatttcatattttgaagacattgctgccgattttcagaattcagtggaatggaagatatgacatatgccagaaccgagaaaatgtttggaaagtgagaaggtgctttgtattgggtgttaaaggactactatgtctgctattaaacatgtagaagaacacatttcagcataatctagtctacataagaatgttgacagcaagctgaaaaaagttcccatgaaactggtatctgtcaagaggtaactcagagcatgtaccataagcattttctttgatctatagtttgttggattcgttctaatgaggtccttcattaggatcttgaggtgaactgactgtactgtacccattagccggcaattacctaacgtttggtaagcatgtagtccccaccagaaagtaaatagaagtgggtgtagccaatacaacatctggtacatgtcctaaaatatgaaaaatttcaggtaattttaaagtgtgatgggctgttgcatacttgtatgtagtttgatttgatgatagcttccaaaattttttcataagatcttttcatcgtcactaatactgtccagtgtctaaagaacacataattttttcatcatataaataaaaagaggcattcactggcctttgcctcagccctggactcctggcattcacttgtaggtagcaaccgtgtgacaattctatgtgtgaagtaattggatggacactgaactgttcttatgccagtcaggatcactgaggcccagaataaaggcttcctttgttcattccaatccttaactggcagtcacttgcactattgagaatgagaatagatcgtctctgagacttggaactctatataggagtcagaggcaagagtctagttacccatttcgatgtatcatcatcactgtagttgagtatttacatggcgcggcgtgacgaggaagatatctgttccgccaacatcagcttggtcgtctttgagctcatcaatcaagcacgcgttgcattcaagcatcat

SEQ ID NO: 60921 - DNA, 827 bp, Zea Mays
gtcccgcctgtccggtgtcgcgtgccgaggctgtgaggccgtcgcgtctcgcgtcactggctccccgctcctcgcagcaccaaaaacgcggcaggccgagaaatgttcccgaccgcgaggaccatgacaccgagcaggagacggaggaaggggagcgggaggcggtggcggttacccgcgcctgcacctggcttcaagcctccgatccgcccaaggcatcataaatgatgaatatgggggcacattgtatgatggattccttggagtgctaaatgctactccggggttgtcccaaatcatttatagcttggcaggagtagcaacaggcatctattcttcactgtcaggaattcagtggaatggaagatatgacatatgccagaaccgagaaaatgtttggaaagtgagaaggtgctttgtattgggtgttaaaggactactatgtctgctattaaacatgtagaagaacacatttcagcataatctagtctacataagaatgttgacagcaagctgaaaaaagttcccatgaaactggtatctgtcaagaggatcactgaggcccagaataaaggcttcctttgttcattccaatccttaactggcagtcacttgcactattgagaatgagaatagatcgtctctgagacttggaactctatataggagtcagaggcaagagtctagttacccatttcgatgtatcatcatcactgtagttgagtatttacatggcgcggcgtgacgaggaagatatctgttccgccaacatcagcttggtcgtctttgagctcatcaatcaagcacgcgttgcattcaagcatcat

SEQ ID NO: 60922 - DNA, 1712 bp, Zea Mays
gaaaaataaaaagatatttgaattcgagtgcgtagagcaacaaagtgaagaatgcagagaaagcaaggcagcagaggcgcctaagatttccagaaaccaagaccgcattattgaagacggcccagcacaaagcaaagccaggattccagggcatatataaataataaaaccctcgaggaggcgcaggcgcgcagcgcatgcacagtcatcaggtccaaaaggcttccaccacccaccagaccgacgaccactctcacaagcggcagtgcagtgcacccaaataaatcagctgggaggaggagcaccagcaccccaagagcagagctgagcagagcagcgtgcgtccaggatgtacccgtaccgcatgagcaacgtggcgatcggctacctgaacctggcgacgctgctggcctcgatcccggtcatcggcgcgggcctctggctggccaagggctcggcaacgcccacgtgctcctccatccttcaagcaccgctcctcgccgtcggcttcgccgtgctgctcgtgtccctcgcgggcttcgtcggcgcctgcttccacgtggcctgggcgctgtggctgtatctcgccgccgtgatgctcctcatcgccttcctcctcggcctcaccgtgttcgggttcgccgtcaccgcaggcggcggcggcgagcaggtgtacggtcggccgtaccgggagtaccgcgtcgccgactactccccgtggctgcagaggcacgtgcgggacgccaggtactggcgccccgcactcgcctgcgtcgtcgggtccagggcgtgccccaagatccacaactggactcccatggactacctccagcacgacctcacgccgatacagtccggctgctgcaagccgccgacggcgtgccagtacagcgggggcgtggccgtcggggcgcaggacgaggactgctaccgctggaacaacgccccgggcgtcctctgctaccagtgcgactcgtgcaaggccggcgtcatggagcaggtgcgccaggactggcacaagatcgccgtgctcaacgtcgtcgtgctcgtcgccctcgtctgcatctgctcctgcggctgctgcgccttcaggaacgcccgccgctccctctccgagtacccgtacggggtaaaccaaatgtccaagattgacccgcgctgggactactactggtactcttatttgtttaccctcttctttccaactaatttctcttaaaactgatttcatcaccgaaaatgttaaaactgtatacgaaagaggattaaggtaaggaagattatggagcgtaaacaatcccatgaacaaaagaatacatctcccagcttttatccctgtttgttttctatggttttttttaacactgcttgcttttgtgctttgtgtttgctgtaggtggcgatggtggcgtggtagaagagaacagctctactaggctagctctagcttctcaatgcttgtatgatatcttagctcctgtcttccatcgaaaagatgaaataatacttgagagctgtgttagccccctatggtgctctacttgtttctagttgtacagcttcctccatgtctgcataattaagcttctgtacatatctgagttaagaggagactcgtcagcggatgcctagtttttttttcttcgatatggtttaactccaagtaacctatgcacattcatcataaatgcaaactagttacatttctgcac

SEQ ID NO: 60923 - DNA, 4217 bp, Zea Mays
ctccacgtagacgttggagagcaggtatggcgtgacccgcgggcagaggcctgctctgctggccaggcgtcagtgtccgtccaaaccgcaagaccccacgcgacgcgacacgcgaggaagacgaaacatggctgccactgcgacgtgcgactgcgagcccaccaactctctcacacaactgtcacgctcgctactccatccatccacactccccttctttctcctttgcttctccttctcccagacctccctaccgttgctaccccgggggccggcggggcgcacgtgtcccaccctcctcccctttccttccctctctctctatctgtctgcccagtccagtcccccgccccgcctcacagtcacacttcaccaatctcgcgcacactctccaatgacccaatctccccgagcctgccactgccagcgccagctcctccctggcattccagtcccagctccggatcgcttcacgggccgggaagcagcacccgcgctgcgcgcctgatgcgcgcagccaatgccggcgctcgcgtccaccgccatggcccgagccgccgcgcccatcctcctccacctcctcctccttctgctcctcctcactgaccacggccccggccccgccgccgcggtgcgcttcgactacgcctcgctcaccctcggcagcctgaggctgctgggcgacgcgcacctcaagaacggcaccatccgcctgtcccgggacctgcccgtcccgacctcgggcgccggccgcgcgctctacgccaccgcggtgcccctccgcgggggcttctccacgcagttcgccttcaccgtggccacgctcaacccgtcctccgtcggcggcgggctggccttcgtgctcgccaccgacggggccacgctcggcgacgcgggcgcgtacatcggcgtgtccgtcgccaccgacgccgccgccgtcgagttcgacacgctcatggacgtccagttcggcgaccccaacggcaaccacgtcggcctggatctcggctccatggtctcggcagccgcagccgacctcgggggcgacgatgccggcgtcgacctcgccagcggcaggaccatcaacgcctggatcgactaccgcccctcttcttctccttccggctccgccgccggtatcttggaggtcttcgtgtcctacgcgcccaagcaaccgcccaagcccgtgctctccgcgccgctcgacctcgcggaggccgtcaaggacgccgcgttcgtcggattctccgcctccactcaggggagcacggaggtgcacgccatcgagtggtggagcttctccaccgcgtcgccggccccgtccccgcgttccgccgcgccggcgccggagtcccaggcgctcccgcctcccgtcgccactccggtgctcccgtcgccgctgctcccgggagggacgacgacggcgccagcgccgccatccgggagcgccggcgcgcccgccgcctcgatcgccccgtcgtcaggcgccacggtggggaggaatgccgccggatcggggacgccgcgccctcccgcggccgtggccggcgccgccacggcaggcgccttcgtggccgcctccttcgcgggcgtcgcgctctgggcgctagcgcgccgcgcaagggccaggaagcggcaggccgcgttggcggtgggcaccaggcgcgacagcagcgtggcgtcggcggcggcgctcgcgcggtccccgcgggagttcagctacaaggagctgagcgccgcgacgaggggcttcgacgcgtcgcgcgtcgtcggcaacggtgcgttcggcaccgtgtacaagggcatcgtgccggacacgggcgccatggtcgccgtgaagcgctgcaccacgggcgcgcgcggcggcggcggcggcagcggcgagcaggcgcgttcggagttcctgtcggagctctccatcatcgcggggctccggcaccgcaacctgctccggctgcaggggtggtgctacgagaagggggagatcctgctggtgtacgactacatgcgcaacggcagcctggacagggcgctgttcgacgcgtcggcgcccgtgctgccgtggcggcaccggcgcgagatcctggccggcgtggcgtcggcgctggcctacctccaccacgagtgcgagcggcgcgtgatccaccgggacgtcaagtccagcaacgtgatgctggacgaggcgtaccgcgcgcggctgggcgacttcgggctggcgcggcaggcggagcacggcgagtcccccgacgcgacggcggcggcgggcaccatggggtacctggcgcccgagtacctgctgacgggccgcgccagcgagtgcaccgacgtgttcagcttcggcgcgctggcgctggaggtggcgtgcgggcggcggccgatcggcgccacccctgagggcgtcggcgggtgctgcagcaacctggtggagtgggtgtggagcctgcacgcggaggcccggattctgggcgccgtggacccgcggctgggcggggagttcgaggagggcgaggcccggcgcgccctgctggtggggctggcgtgctccagcccggagccggcgctgcggcccgggatgcgcgccgtggtgcaggtgctgggcggcgaggcggacccgccgttcgtgccggcggcgcggccgtccatgagcctcggcagcgccaaccagcagctgctgctgagcctgcaggacagcgtgtcggactaccacgccatgctggggctcccgctgtcggactcgtcgtcgtccggctcgctcagctcgtcctcgctcaccagcacgctgcgcaggggcggccacgacatccgggtcagcagcaccgccggcgaagccaggtgactgcctgagcctgaccgggggggtattgagtacataggattgtttgtttagtagcagcaatgcagtccagatcacatcatcaaagccagcctccattcgttacattattacacacatttgtctcgataataatacagagctcgcatgattccttcgattagctcagagctcagatcagccaattgtcctcttcctcgaaccgcaggaggatcagagattcaaaaacgccagcttttcccctcccggccccacccactatctttttgttggtagacctttgcggaggtgagcacggagataatcccacggcacgggtgagaagagaagattattctctccggtgcagagagaaagatgcctttctctgttctgttcatcccgtgagtgagacgtcacaaggtgtcgagctgtaccaaaggaaaggaaaggatagcttgcgccggtacgcgatcctgtgcttgcggagggaaggaaagcatcctcttctccttctcatctctctgctagcgcctagtgctgcggcgcgctgctttgacatccatggcgtggtcaggcaccgaccggaagtcgtcgcgcggaggccggcgccgcctttactccacgtctaccattacaactgtgctactagaaaaagaggaggaggaggaggaagaagaggtggcggccactagtgagtagtgacgctcgtacggcgtggcaccaactgatgctgctaccattacaaatgatgcgagtctactctaggctactcgcctcgtgctacactgctacagcagcgacgacctgcggtcaaaaaaggcgttatcattcgattcacgcgttttttctttcttgtgaagccgtcgttgttctcgatttctggtagttgcaggaagagaagcgagagcgagtgagggaccacggttgtctgtaaagaatctccagtcgattgagcgagcgagcgaagaggagggtgtggtgtgatctgggcggcggctccagtgcacgacggcacaaatcaggccccctttggaacacaggaatgtgaaaacataggtataggaaaaacaaaggattagagttggctatgaattgcaatcctatatgaattgggaatgcacgaaaatttctcacctggcatttggatgctgtgcaggaatttgaatagagagataagagtcataggaaagtttccaagaggttggacctcttgttattttcctccaaaatttgtatggaggaaagcaatccataggaatttcaaaggatttgataggattgaatcctgtgttccaaagactcacacaggaatttttcttgtagggaaggaatccttcaaaaatccttcatatttcctttgttccaaaggagccctcaaggccatgggttgatcacttccaaa

SEQ ID NO: 60924 - DNA, 1873 bp, Zea Mays
ccccgacagttgttgtgtgtaagaaaaatagggtttcagtggcggcagcctccactcacgccgccgtcgcctccgagccccactgcccgatccagacaaccaccccgcccagatccagatccacctgtactggatctcacagcctccgcttctgctttcctttatgtcgtcgaccgcgatgtcttgggacgggcgccgacgggggagatggagctgccgagcaacgctggcgacggcgaactcctgcccatggaggagcacaaggagcgcgcgctgcggcacctactccgccgatccaagcgcccgctggaggagttcgtggccgccgtggcagacgtcgcggagcagctggtgagcgcgtatctggacctgggcgtcgagtggcgcggcgcagactggcgggagcggttcctggccagtcgtacgatagcgcgagctcgatggccaggcggcacacgtcacaccgggtggcaactggcagggcaatgcccgatcaggtctccgtcgtcgattcgtctgaacagctatcctcatcatattttaatgtctcgagcataatacggagtacatatctgtatttacgtcagcgttattgcaacgctctctctccgtggtctcttctacatactataatagtagtacattagtactaacaatgtggttggccatggcatgcttgcttcgagatcaacatgaacaatggaagcacaagtacgggaatccatgtagaagcgtgaagattttccggtgccaattgccacggaataatgccttctactcagctcaacctccaaagcatgatggctctgacaaaccactctgtccaggagctcctgtatgccactggtgtggtacctggaaaggtgataaaatatgtagtagctgcaagaaagcaaggtactgttatgagaaacatcaggtatgtatgccaaactttagtgtccatcaattcgtttctgacagctgatacaaacttatattttagattgatggctcttgattgctgtttcttaggcactgcattggcgtactggtcataaaaatgattgcctccagataataagttctgttgcttcaaattcagttctgccagctgtaggaataggtgattatctttttttatatggctgacaatgatagtatactcagtatcaaagaatatagtttttgaattgtgttttctgctaggtacgacatctattaatttttttgtttgttatatatgttttttctccacaaacattctttagatttgatagccttttaagcgactagttatatgggacctggaagtctttttatgtcttctagtgtacttcactatgcacttatttctatctcaagaattgctgctatgattagtcagcggttagtgacacttgtttttttccccactattgctttttagaggtgatgctgatgtgcaagcatcttcaccttgagttctgccttgccagaatgaatcaagtttattttcccatcctgctccatttgaggcaaattgaacagggatttgtttggcttccaaatggtttgttggtcctaaaatagtcagaatcacatgacatctgtgctatagatatggacctcggtggttttctccacattaggaaagctggaagagccttttgaactcagtttttttgctaacagtggtgttatggtgaaacagagttttgtgtgtatgtaccaacagataaaatgtaaacacgacattatcatagttgagtacaggaataattatctcgtatatcttattgcaaaatctgaaacagttctcctgtagatggttagcttgcattttacgctacattcgttattatgaaacagatggacgatttacgttaaaatttatactcatttacgttgtttt

SEQ ID NO: 60925 - DNA, 1851 bp, Zea Mays
ccccgacagttgttgtgtgtaagaaaaatagggtttcagtggcggcagcctccactcacgccgccgtcgcctccgagccccactgcccgatccagacaaccaccccgcccagatccagatccacctgtactggatctcacagcctccgcttctgctttcctttatgtcgtcgaccgcgatgtcttgggacgggtacggcgggcagatctaccctggaggcggtgttccagcagcctgagacgaccccccttgcaggcgccgacgggggagatggagctgccgagcaacgctggcgacggcgaactcctgcccatggaggagcacaaggagcgcgcgctgcggcacctactccgccgatccaagcgcccgctggaggagttcgtggccgccgtggcagacgtcgcggagcagctgggcacacgtcacaccgggtggcaactggcagggcaatgcccgatcaggtctccgtcgtcgattcgtctgaacagctatcctcatcatattttaatgtctcgagcataatacggagtacatatctgtatttacgtcagcgttattgcaacgctctctctccgtggtctcttctacatactataatagtagtacattagtactaacaatgtggttggccatggcatgcttgcttcgagatcaacatgaacaatggaagcacaagtacgggaatccatgtagaaggtgatgaaaatcttgtatctgtaatggtttttgttcagatatcttctgattttgatggtttgcagtggattgttttccagcgtgaagattttccggtgccaattgccacggaataatgccttctactcagctcaacctccaaagcatgatggctctgacaaaccactctgtccaggagctcctgtatgccactggtgtggtacctggaaaggtgataaaatatgtagtagctgcaagaaagcaaggtactgttatgagaaacatcagattgatggctcttgattgctgtttcttaggcactgcattggcgtactggtcataaaaatgattgcctccagataataagttctgttgcttcaaattcagttctgccagctgtaggaataggtgattatctttttttatatggctgacaatgatagtatactcagtatcaaagaatatagtttttgaattgtgttttctgctaggtacgacatctattaatttttttgtttgttatatatgttttttctccacaaacattctttagatttgatagccttttaagcgactagttatatgggacctggaagtctttttatgtcttctagtgtacttcactatgcacttatttctatctcaagaattgctgctatgattagtcagcggttagtgacacttgtttttttccccactattgctttttagaggtgatgctgatgtgcaagcatcttcaccttgagttctgccttgccagaatgaatcaagtttattttcccatcctgctccatttgaggcaaattgaacagggatttgtttggcttccaaatggtttgttggtcctaaaatagtcagaatcacatgacatctgtgctatagatatggacctcggtggttttctccacattaggaaagctggaagagccttttgaactcagtttttttgctaacagtggtgttatggtgaaacagagttttgtgtgtatgtaccaacagataaaatgtaaacacgacattatcatagttgagtacaggaataattatctcgtatatcttattgcaaaatctgaaacagttctcctgtagatggttagcttgcattttacgctacattcgttattatgaaacagatggacgatttacgttaaaatttatactcatttacgttgtttt

SEQ ID NO: 60926 - DNA, 2425 bp, Zea Mays
ccccgacagttgttgtgtgtaagaaaaatagggtttcagtggcggcagcctccactcacgccgccgtcgcctccgagccccactgcccgatccagacaaccaccccgcccagatccagatccacctgtactggatctcacagcctccgcttctgctttcctttatgtcgtcgaccgcgatgtcttgggacgggtacggcgggcagatctaccctggaggcggtgttccagcagcctgagacgaccccccttgcaggcgccgacgggggagatggagctgccgagcaacgctggcgacggcgaactcctgcccatggaggagcacaaggagcgcgcgctgcggcacctactccgccgatccaagcgcccgctggaggagttcgtggccgccgtggcagacgtcgcggagcagctggtgagcgcgtatctggacctgggcgtcgagtggcgcggcgcagactggcgggagcggttcctggccagtcgtacgatagcgcgagctcgatggccaggcgtaggtacccaactgtcttcttccccttccttttagattccattgagattcgtcagaacttttatgcgagttccttttttagccgataattatgtcagtatcttgagataagatggatgaattggattcaacacatatatatttgttgtggatgtagccacctttcttgcttcgtgaattatttgttgtggatgtaattccaatggaaaatatatattattgaggttagcttcagctgcgttccagttatatcgcagttactcctgcttttgggattgagctggcgttttggttatttagagtgttaatttgactcttttagttgcattatagggatctgacatcatttaaaataatttaggatgatttcattagtgatatgattctgaaaaatggtaaaggatgctttagtttcgtccagcataatttacctaataattttaggacactaaatttggttgagaattccaaaaatgagcttaaatcatgtgatcggtccgctagcatcacatagttgttgtcttcctgtcgtgcccatgtatgtatcttggaacaagtttgtgtgaccaaataatttgcatcagggcacacgtcacaccgggtggcaactggcagggcaatgcccgatcaggtctccgtcgtcgattcgtctgaacagctatcctcatcatattttaatgtctcgagcataatacggagtacatatctgtatttacgtcagcgttattgcaacgctctctctccgtggtctcttctacatactataatagtagtacattagtactaacaatgtggttggccatggcatgcttgcttcgagatcaacatgaacaatggaagcacaagtacgggaatccatgtagaagcgtgaagattttccggtgccaattgccacggaataatgccttctactcagctcaacctccaaagcatgatggctctgacaaaccactctgtccaggagctcctgtatgccactggtgtggtacctggaaaggtgataaaatatgtagtagctgcaagaaagcaaggtactgttatgagaaacatcaggcactgcattggcgtactggtcataaaaatgattgcctccagataataagttctgttgcttcaaattcagttctgccagctgtaggaataggtgattatctttttttatatggctgacaatgatagtatactcagtatcaaagaatatagtttttgaattgtgttttctgctaggtacgacatctattaatttttttgtttgttatatatgttttttctccacaaacattctttagatttgatagccttttaagcgactagttatatgggacctggaagtctttttatgtcttctagtgtacttcactatgcacttatttctatctcaagaattgctgctatgattagtcagcggttagtgacacttgtttttttccccactattgctttttagaggtgatgctgatgtgcaagcatcttcaccttgagttctgccttgccagaatgaatcaagtttattttcccatcctgctccatttgaggcaaattgaacagggatttgtttggcttccaaatggtttgttggtcctaaaatagtcagaatcacatgacatctgtgctatagatatggacctcggtggttttctccacattaggaaagctggaagagccttttgaactcagtttttttgctaacagtggtgttatggtgaaacagagttttgtgtgtatgtaccaacagataaaatgtaaacacgacattatcatagttgagtacaggaataattatctcgtatatcttattgcaaaatctgaaacagttctcctgtagatggttagcttgcattttacgctacattcgttattatgaaacagatggacgatttacgttaaaatttatactcatttacgttgtttt

SEQ ID NO: 60927 - DNA, 2418 bp, Zea Mays
ccccgacagttgttgtgtgtaagaaaaatagggtttcagtggcggcagcctccactcacgccgccgtcgcctccgagccccactgcccgatccagacaaccaccccgcccagatccagatccacctgtactggatctcacagcctccgcttctgctttcctttatgtcgtcgaccgcgatgtcttgggacgggtacggcgggcagatctaccctggaggcggtgttccagcagcctgagacgaccccccttgcaggcgccgacgggggagatggagctgccgagcaacgctggcgacggcgaactcctgcccatggaggagcacaaggagcgcgcgctgcggcacctactccgccgatccaagcgcccgctggaggagttcgtggccgccgtggcagacgtcgcggagcagctggtgagcgcgtatctggacctgggcgtcgagtggcgcggcgcagactggcgggagcggttcctggccagtcgtacgatagcgcgagctcgatggccaggcgtaggtacccaactgtcttcttccccttccttttagattccattgagattcgtcagaacttttatgcgagttccttttttagccgataattatgtcagtatcttgagataagatggatgaattggattcaacacatatatatttgttgtggatgtagccacctttcttgcttcgtgaattatttgttgtggatgtaattccaatggaaaatatatattattgaggttagcttcagctgcgttccagttatatcgcagttactcctgcttttgggattgagctggcgttttggttatttagagtgttaatttgactcttttagttgcattatagggatctgacatcatttaaaataatttaggatgatttcattagtgatatgattctgaaaaatggtaaaggatgctttagtttcgtccagcataatttacctaataattttaggacactaaatttggttgagaattccaaaaatgagcttaaatcatgtgatcggtccgctagcatcacatagttgttgtcttcctgtcgtgcccatgtatgtatcttggaacaagtttgtgtgaccaaataatttgcatcagggcacacgtcacaccgggtggcaactggcagggcaatgcccgatcaggtctccgtcgtcgattcgtctgaacagctatcctcatcatattttaatgtctcgagcataatacggagtacatatctgtatttacgtcagcgttattgcaacgctctctctccgtggtctcttctacatactataatagtagtacattagtactaacaatgtggttggccatggcatgcttgcttcgagatcaacatgaacaatggaagcacaagtacgggaatccatgtagaagattttccggtgccaattgccacggaataatgccttctactcagctcaacctccaaagcatgatggctctgacaaaccactctgtccaggagctcctgtatgccactggtgtggtacctggaaaggtgataaaatatgtagtagctgcaagaaagcaaggtactgttatgagaaacatcaggcactgcattggcgtactggtcataaaaatgattgcctccagataataagttctgttgcttcaaattcagttctgccagctgtaggaataggtgattatctttttttatatggctgacaatgatagtatactcagtatcaaagaatatagtttttgaattgtgttttctgctaggtacgacatctattaatttttttgtttgttatatatgttttttctccacaaacattctttagatttgatagccttttaagcgactagttatatgggacctggaagtctttttatgtcttctagtgtacttcactatgcacttatttctatctcaagaattgctgctatgattagtcagcggttagtgacacttgtttttttccccactattgctttttagaggtgatgctgatgtgcaagcatcttcaccttgagttctgccttgccagaatgaatcaagtttattttcccatcctgctccatttgaggcaaattgaacagggatttgtttggcttccaaatggtttgttggtcctaaaatagtcagaatcacatgacatctgtgctatagatatggacctcggtggttttctccacattaggaaagctggaagagccttttgaactcagtttttttgctaacagtggtgttatggtgaaacagagttttgtgtgtatgtaccaacagataaaatgtaaacacgacattatcatagttgagtacaggaataattatctcgtatatcttattgcaaaatctgaaacagttctcctgtagatggttagcttgcattttacgctacattcgttattatgaaacagatggacgatttacgttaaaatttatactcatttacgttgtttt

SEQ ID NO: 60928 - DNA, 1890 bp, Zea Mays
ctccactcgatcggtcgacctaaaatcatctttacgttttgttgtacataagtttacgtttattttgctataacactatcgtataaaacagatcactctatccaacctccccgacagttgttgtgtgtaagaaaaatagggtttcagtggcggcagcctccactcacgccgccgtcgcctccgagccccactgcccgatccagacaaccaccccgcccagatccagatccacctgtactggatctcacagcctccgcttctgctttcctttatgtcgtcgaccgcgatgtcttgggacgggcgccgacgggggagatggagctgccgagcaacgctggcgacggcgaactcctgcccatggaggagcacaaggagcgcgcgctgcggcacctactccgccgatccaagcgcccgctggaggagttcgtggccgccgtggcagacgtcgcggagcagctggtgagcgcgtatctggacctgggcgtcgagtggcgcggcgcagactggcgggagcggttcctggccagtcgtacgatagcgcgagctcgatggccaggcgtagggcacacgtcacaccgggtggcaactggcagggcaatgcccgatcaggtctccgtcgtcgattcgtctgaacagctatcctcatcatattttaatgtctcgagcataatacggagtacatatctgtatttacgtcagcgttattgcaacgctctctctccgtggtctcttctacatactataatagtagtacattagtactaacaatgtggttggccatggcatgcttgcttcgagatcaacatgaacaatggaagcacaagtacgggaatccatgtagaagcgtgaagattttccggtgccaattgccacggaataatgccttctactcagctcaacctccaaagcatgatggctctgacaaaccactctgtccaggagctcctgtatgccactggtgtggtacctggaaaggtgataaaatatgtagtagctgcaagaaagcaaggtactgttatgagaaacatcaggcactgcattggcgtactggtcataaaaatgattgcctccagataataagttctgttgcttcaaattcagttctgccagctgtaggaataggtgattatctttttttatatggctgacaatgatagtatactcagtatcaaagaatatagtttttgaattgtgttttctgctaggtacgacatctattaatttttttgtttgttatatatgttttttctccacaaacattctttagatttgatagccttttaagcgactagttatatgggacctggaagtctttttatgtcttctagtgtacttcactatgcacttatttctatctcaagaattgctgctatgattagtcagcggttagtgacacttgtttttttccccactattgctttttagaggtgatgctgatgtgcaagcatcttcaccttgagttctgccttgccagaatgaatcaagtttattttcccatcctgctccatttgaggcaaattgaacagggatttgtttggcttccaaatggtttgttggtcctaaaatagtcagaatcacatgacatctgtgctatagatatggacctcggtggttttctccacattaggaaagctggaagagccttttgaactcagtttttttgctaacagtggtgttatggtgaaacagagttttgtgtgtatgtaccaacagataaaatgtaaacacgacattatcatagttgagtacaggaataattatctcgtatatcttattgcaaaatctgaaacagttctcctgtagatggttagcttgcattttacgctacattcgttattatgaaacagatggacgatttacgttaaaatttatactcatttacgttgtttt

SEQ ID NO: 60929 - DNA, 1765 bp, Zea Mays
ccccgacagttgttgtgtgtaagaaaaatagggtttcagtggcggcagcctccactcacgccgccgtcgcctccgagccccactgcccgatccagacaaccaccccgcccagatccagatccacctgtactggatctcacagcctccgcttctgctttcctttatgtcgtcgaccgcgatgtcttgggacgggcgccgacgggggagatggagctgccgagcaacgctggcgacggcgaactcctgcccatggaggagcacaaggagcgcgcgctgcggcacctactccgccgatccaagcgcccgctggaggagttcgtggccgccgtggcagacgtcgcggagcagctggtgagcgcgtatctggacctgggcgtcgagtggcgcggcgcagactggcgggagcggttcctggccagtcgtacgatagcgcgagctcgatggccaggcgtagggcacacgtcacaccgggtggcaactggcagggcaatgcccgatcaggtctccgtcgtcgattcgtctgaacagctatcctcatcatattttaatgtctcgagcataatacggagtacatatctgtatttacgtcagcgttattgcaacgctctctctccgtggtctcttctacatactataatagtagtacattagtactaacaatgtggttggccatggcatgcttgcttcgagatcaacatgaacaatggaagcacaagtacgggaatccatgtagaagtggattgttttccagcgtgaagattttccggtgccaattgccacggaataatgccttctactcagctcaacctccaaagcatgatggctctgacaaaccactctgtccaggagctcctgtatgccactggtgtggtacctggaaaggtgataaaatatgtagtagctgcaagaaagcaaggtactgttatgagaaacatcaggcactgcattggcgtactggtcataaaaatgattgcctccagataataagttctgttgcttcaaattcagttctgccagctgtaggaataggtgattatctttttttatatggctgacaatgatagtatactcagtatcaaagaatatagtttttgaattgtgttttctgctaggtacgacatctattaatttttttgtttgttatatatgttttttctccacaaacattctttagatttgatagccttttaagcgactagttatatgggacctggaagtctttttatgtcttctagtgtacttcactatgcacttatttctatctcaagaattgctgctatgattagtcagcggttagtgacacttgtttttttccccactattgctttttagaggtgatgctgatgtgcaagcatcttcaccttgagttctgccttgccagaatgaatcaagtttattttcccatcctgctccatttgaggcaaattgaacagggatttgtttggcttccaaatggtttgttggtcctaaaatagtcagaatcacatgacatctgtgctatagatatggacctcggtggttttctccacattaggaaagctggaagagccttttgaactcagtttttttgctaacagtggtgttatggtgaaacagagttttgtgtgtatgtaccaacagataaaatgtaaacacgacattatcatagttgagtacaggaataattatctcgtatatcttattgcaaaatctgaaacagttctcctgtagatggttagcttgcattttacgctacattcgttattatgaaacagatggacgattt

SEQ ID NO: 60930 - DNA, 1314 bp, Zea Mays
ccccgacagttgttgtgtgtaagaaaaatagggtttcagtggcggcagcctccactcacgccgccgtcgcctccgagccccactgcccgatccagacaaccaccccgcccagatccagatccacctgtactggatctcacagcctccgcttctgctttcctttatgtcgtcgaccgcgatgtcttgggacgggtacggcgggcagatctaccctggaggcggtgttccagcagcctgagacgaccccccttgcaggcgccgacgggggagatggagctgccgagcaacgctggcgacggcgaactcctgcccatggaggagcacaaggagcgcgcgctgcggcacctactccgccgatccaagcgcccgctggaggagttcgtggccgccgtggcagacgtcgcggagcagctggtgagcgcgtatctggacctgggcgtcgagtggcgcggcgcagactggcgggagcggttcctggccagtcgtacgatagcgcgagctcgatggccaggcggcacacgtcacaccgggtggcaactggcagggcaatgcccgatcaggtctccgtcgtcgattcgtctgaacagctatcctcatcatattttaatgtctcgagcataatacggagtacatatctgtatttacgtcagcgttattgcaacgctctctctccgtggtctcttctacatactataatagtagtacattagtactaacaatgtggttggccatggcatgcttgcttcgagatcaacatgaacaatggaagcacaagtacgggaatccatgtagaagcgtgaagattttccggtgccaattgccacggaataatgccttctactcagctcaacctccaaagcatgatggctctgacaaaccactctgtccaggagctcctgtatgccactggtgtggtacctggaaaggtgataaaatatgtagtagctgcaagaaagcaaggtactgttatgagaaacatcagggatttgtttggcttccaaatggtttgttggtcctaaaatagtcagaatcacatgacatctgtgctatagatatggacctcggtggttttctccacattaggaaagctggaagagccttttgaactcagtttttttgctaacagtggtgttatggtgaaacagagttttgtgtgtatgtaccaacagataaaatgtaaacacgacattatcatagttgagtacaggaataattatctcgtatatcttattgcaaaatctgaaacagttctcctgtagatggttagcttgcattttacgctacattcgttattatgaaacagatggacgattt

SEQ ID NO: 60931 - DNA, 1255 bp, Zea Mays
ccccgacagttgttgtgtgtaagaaaaatagggtttcagtggcggcagcctccactcacgccgccgtcgcctccgagccccactgcccgatccagacaaccaccccgcccagatccagatccacctgtactggatctcacagcctccgcttctgctttcctttatgtcgtcgaccgcgatgtcttgggacgggcgccgacgggggagatggagctgccgagcaacgctggcgacggcgaactcctgcccatggaggagcacaaggagcgcgcgctgcggcacctactccgccgatccaagcgcccgctggaggagttcgtggccgccgtggcagacgtcgcggagcagctggtgagcgcgtatctggacctgggcgtcgagtggcgcggcgcagactggcgggagcggttcctggccagtcgtacgatagcgcgagctcgatggccaggcgtagggcacacgtcacaccgggtggcaactggcagggcaatgcccgatcaggtctccgtcgtcgattcgtctgaacagctatcctcatcatattttaatgtctcgagcataatacggagtacatatctgtatttacgtcagcgttattgcaacgctctctctccgtggtctcttctacatactataatagtagtacattagtactaacaatgtggttggccatggcatgcttgcttcgagatcaacatgaacaatggaagcacaagtacgggaatccatgtagaagcgtgaagattttccggtgccaattgccacggaataatgccttctactcagctcaacctccaaagcatgatggctctgacaaaccactctgtccaggagctcctgtatgccactggtgtggtacctggaaaggtgataaaatatgtagtagctgcaagaaagcaaggtactgttatgagaaacatcagggatttgtttggcttccaaatggtttgttggtcctaaaatagtcagaatcacatgacatctgtgctatagatatggacctcggtggttttctccacattaggaaagctggaagagccttttgaactcagtttttttgctaacagtggtgttatggtgaaacagagttttgtgtgtatgtaccaacagataaaatgtaaacacgacattatcatagttgagtacaggaataattatctcgtatatcttattgcaaaatctgaaacagttctcctgtagatggttagcttgcattttacgctacattcgttattatgaaacagatggacgattt

SEQ ID NO: 60932 - DNA, 1782 bp, Zea Mays
ttttgttgtacataagtttacgtttattttgctataacactatcgtataaaacagatcactctatccaacctccccgacagttgttgtgtgtaagaaaaatagggtttcagtggcggcagcctccactcacgccgccgtcgcctccgagccccactgcccgatccagacaaccaccccgcccagatccagatccacctgtactggatctcacagcctccgcttctgctttcctttatgtcgtcgaccgcgatgtcttgggacgggtacggcgggcagatctaccctggaggcggtgttccagcagcctgagacgaccccccttgcaggcgccgacgggggagatggagctgccgagcaacgctggcgacggcgaactcctgcccatggaggagcacaaggagcgcgcgctgcggcacctactccgccgatccaagcgcccgctggaggagttcgtggccgccgtggcagacgtcgcggagcagctgggcacacgtcacaccgggtggcaactggcagggcaatgcccgatcaggtctccgtcgtcgattcgtctgaacagctatcctcatcatattttaatgtctcgagcataatacggagtacatatctgtatttacgtcagcgttattgcaacgctctctctccgtggtctcttctacatactataatagtagtacattagtactaacaatgtggttggccatggcatgcttgcttcgagatcaacatgaacaatggaagcacaagtacgggaatccatgtagaagcgtgaagattttccggtgccaattgccacggaataatgccttctactcagctcaacctccaaagcatgatggctctgacaaaccactctgtccaggagctcctgtatgccactggtgtggtacctggaaaggtgataaaatatgtagtagctgcaagaaagcaaggtactgttatgagaaacatcaggcactgcattggcgtactggtcataaaaatgattgcctccagataataagttctgttgcttcaaattcagttctgccagctgtaggaataggtgattatctttttttatatggctgacaatgatagtatactcagtatcaaagaatatagtttttgaattgtgttttctgctaggtacgacatctattaatttttttgtttgttatatatgttttttctccacaaacattctttagatttgatagccttttaagcgactagttatatgggacctggaagtctttttatgtcttctagtgtacttcactatgcacttatttctatctcaagaattgctgctatgattagtcagcggttagtgacacttgtttttttccccactattgctttttagaggtgatgctgatgtgcaagcatcttcaccttgagttctgccttgccagaatgaatcaagtttattttcccatcctgctccatttgaggcaaattgaacagggatttgtttggcttccaaatggtttgttggtcctaaaatagtcagaatcacatgacatctgtgctatagatatggacctcggtggttttctccacattaggaaagctggaagagccttttgaactcagtttttttgctaacagtggtgttatggtgaaacagagttttgtgtgtatgtaccaacagataaaatgtaaacacgacattatcatagttgagtacaggaataattatctcgtatatcttattgcaaaatctgaaacagttctcctgtagatggttagcttgcattttacgctacattcgttattatgaaacagatggacgattt

SEQ ID NO: 60933 - DNA, 1820 bp, Zea Mays
gtcgacctaaaatcatctttacgttttgttgtacataagtttacgtttattttgctataacactatcgtataaaacagatcactctatccaacctccccgacagttgttgtgtgtaagaaaaatagggtttcagtggcggcagcctccactcacgccgccgtcgcctccgagccccactgcccgatccagacaaccaccccgcccagatccagatccacctgtactggatctcacagcctccgcttctgctttcctttatgtcgtcgaccgcgatgtcttgggacgggtacggcgggcagatctaccctggaggcggtgttccagcagcctgagacgaccccccttgcaggcgccgacgggggagatggagctgccgagcaacgctggcgacggcgaactcctgcccatggaggagcacaaggagcgcgcgctgcggcacctactccgccgatccaagcgcccgctggaggagttcgtggccgccgtggcagacgtcgcggagcagctgggcacacgtcacaccgggtggcaactggcagggcaatgcccgatcaggtctccgtcgtcgattcgtctgaacagctatcctcatcatattttaatgtctcgagcataatacggagtacatatctgtatttacgtcagcgttattgcaacgctctctctccgtggtctcttctacatactataatagtagtacattagtactaacaatgtggttggccatggcatgcttgcttcgagatcaacatgaacaatggaagcacaagtacgggaatccatgtagaagtggattgttttccagcgtgaagattttccggtgccaattgccacggaataatgccttctactcagctcaacctccaaagcatgatggctctgacaaaccactctgtccaggagctcctgtatgccactggtgtggtacctggaaaggtgataaaatatgtagtagctgcaagaaagcaaggtactgttatgagaaacatcaggcactgcattggcgtactggtcataaaaatgattgcctccagataataagttctgttgcttcaaattcagttctgccagctgtaggaataggtgattatctttttttatatggctgacaatgatagtatactcagtatcaaagaatatagtttttgaattgtgttttctgctaggtacgacatctattaatttttttgtttgttatatatgttttttctccacaaacattctttagatttgatagccttttaagcgactagttatatgggacctggaagtctttttatgtcttctagtgtacttcactatgcacttatttctatctcaagaattgctgctatgattagtcagcggttagtgacacttgtttttttccccactattgctttttagaggtgatgctgatgtgcaagcatcttcaccttgagttctgccttgccagaatgaatcaagtttattttcccatcctgctccatttgaggcaaattgaacagggatttgtttggcttccaaatggtttgttggtcctaaaatagtcagaatcacatgacatctgtgctatagatatggacctcggtggttttctccacattaggaaagctggaagagccttttgaactcagtttttttgctaacagtggtgttatggtgaaacagagttttgtgtgtatgtaccaacagataaaatgtaaacacgacattatcatagttgagtacaggaataattatctcgtatatcttattgcaaaatctgaaacagttctcctgtagatggttagcttgcattttacgctacattcgttattatgaaacagatggacgattt

SEQ ID NO: 60934 - DNA, 904 bp, Zea Mays
ccccgacagttgttgtgtgtaagaaaaatagggtttcagtggcggcagcctccactcacgccgccgtcgcctccgagccccactgcccgatccagacaaccaccccgcccagatccagatccacctgtactggatctcacagcctccgcttctgctttcctttatgtcgtcgaccgcgatgtcttgggacgggcgccgacgggggagatggagctgccgagcaacgctggcgacggcgaactcctgcccatggaggagcacaaggagcgcgcgctgcggcacctactccgccgatccaagcgcccgctggaggagttcgtggccgccgtggcagacgtcgcggagcagctgggcacacgtcacaccgggtggcaactggcagggcaatgcccgatcaggtctccgtcgtcgattcgtctgaacagctatcctcatcatattttaatgtctcgagcataatacggagtacatatctgtatttacgtcagcgttattgcaacgctctctctccgtggtctcttctacatactataatagtagtacattagtactaacaatgtggttggccatggcatgcttgcttcgagatcaacatgaacaatggaagcacaagtacgggaatccatgtagaaggtgatgaaaatcttgtatctgtaatggtttttgttcagatatcttctgattttgatggtttgcagtggattgttttccagcgtgaagattttccggtgccaattgccacggaataatgccttctactcagctcaacctccaaagcatgatggctctgacaaaccactctgtccaggagctcctgtatgccactggtgtggtacctggaaaggtgataaaatatgtagtagctgcaagaaagcaagattgatggctcttgattgctgtttct

SEQ ID NO: 60935 - DNA, 4115 bp, Zea Mays
ccgcggcggcggctgacgggctgagaataggagagagaaacccctctttctcttcctctccttctcgacgaacccgtcccacaagcacgtgcgagccaaggcagacaagagcgaggtggagagagggagagagagtgagtgagagaggaaaaccccgcccccgtccaggcaaccttcgtcgacgcatacggcggaggccacagaggcgccacgcgagggagccccgccgcagcagcggccgcgaattcggcacccccggatctccttgccggcgcccggggccccgatcgcctcctccccatggtcgtgcccctccgggcgttctcctcgcgcgggcgcctgccatgtcggacctcgcttccaccagcaaggataaacttgcgtattttagaataaaggagctcaaagatatcttaaatcagctggggttgccgaagcatggaaagaagcaggaccttgttgacagggtattggcagaattatcagatgagcaaggtcaacgccatcatggatggggaaggaaaaatgctcttacaagggaggcggtggcaaaagttgttgatgacacatacagcaggaaaatgcaagtatgtgctcctgaccttccctctaggagtcacagtgggtcagatttcaatcattttaggcccaaagaggaagccactgacttctactatgtggagactaaggtccgctgcctttgcaatagcacaatgctaaatgacaagattatcaagtgtgaagatggcaaatgccagctgtggcagcattttacctgcgtactcattccagatacacccacggagggtgctggccctgatattccacctcatttttattgtgaactgtgccgactgaaccgggcagatccgttttgggtgactacagcaaatccactactacctgtgaaatttatctcatctggtgttggaaatgatggagcaagcgcacctcaaattgtggagaagaccttccaactttcccgagcagaaagagaaacagtccagaggccagaatacgatctccaggtttggtgcattcttgtaaatgacaaagtccagttcaggatgcaatggcctcaatatgcagaattgcaagtgaacggtattcctgtacgagtaatgaccaggcctggttctcagttactagggataaatggacgtgatgatgggccactggtaaccacatgcagtagagaagggattaataaaattagcttatcaagagttgatgctcgaaccttttgctttggagttcgaattgttaggaggaggactgttcctcaggtattaagcttgatcccaaaggaaggtgaaggggagtcttttgaggatgctcttgctcgtgttcgtcgttgtcttggaggtggaggtgctacagacaatgctgatagtgatagcgatctggaagtggttactgaatctgttacagtcaaccttcgttgccctaatagtggatccagaatgaggattgctggaaggttcaagccttgtgttcacatgggctgttttgatcttgaaacttttgtggaattgaatcaacgctcacgcaagtggcaatgcccaatatgtttaaataattactctctcgagaacttgatgattgatccttatttcaatcggattacttctttgttgcacaattgcagtgaagatgttaatgaacttgatgttaaacctgatgggtcatggcgtgtgatgggtgatgccgctaccagagatttatctcagtggcatatgcctgatggtactctttgtgactcaaaggaagatacaaaccctggtgtcgcaagtgttaatgagttcaagagagagggtgcttctgatgaacatagaactttgaaacttggaattaaaaaaaaccctattggattatggcaggttagcagtaaagcagatgatatgaaacctgtggttagaaatcacatccaaaataacactgggttttcaacaccaaacattgtgcctatgatcagtagccccactgggagttacagagatggcgaagatgtaagtgtgaaccaagaagggggtggtattcaatttgatatatcattgaaccaagagtttgacagttttgcccacaactttggtcagacatacaatacagaggatagaccacaacatccacaccataatgctgcagatgtcattgttcttagtgattctgatgaagaaaatgacccgactgttcagccgccagctgtctatgaaaatactcctacaaatgatgacagttttcctttcgtcactgatgctgccggatctggatatcctgaaaggtaccaggaggatgctagtgttggtacaagtggtcttggtttattgaggcagaacactggtgaatttgaaataaataactggcaaatgctttcttacccacaaccagagcaagggtttcagttttttgtgactgatactgatgttggcaatccttttgttgctccacataattcctttactattgcaccagaagactactctcttggctgtaatgttggaatagaggacccctctgcagctcacgatgtttcaatttgccgaaacagtaatgatgtgcatggaagcttggttgataacccactggcattaacaggtgacgatccatctttgcaaatttttcttccaagtcaaccttccactgttccccttcagcaagaattgagtgagcgttctgatactccaaatggagtccaccctaacgattggaggatatcgcttacgcttgccgctggtggagggggcaatgaagagtctacaagtgttggcggtctaaaatcacaaccaaaagtttcatcgaaagagcttctgctcttggaagcatgaacaatgacagatgcactggatctaatctaaatcctaaaaggattgaaaatatattttctcatcctcgccaaccgcggtctgttaggcctcgtctgtgtttgtcattagatactgattcagagtagtttggacatcacactgggatagctgaatttgctattaatctggtaaagttggcttccagaatcttgatcgttactgtggagggctatctggttattctggttgatacaaagagatacaccagtgtggatgctttgttgcattaacctggtaagattcaagtgttctatatgatccaagtgggatctgcatagagttcatctaatggttggtacaggatattttctaactgggagtggtttaatgtggctagtggagcaggctgtacattgtccctgacatttactgggtataaaggaatagggggccatcacttggcacaagacaaatacatgtgttgtgtgtaccatcattgtatttagggtttgggtgctaatttagatgtttattaccctgacgtttgatggagaataaattattccttgaagtggtggtcaataaacagagagcccttcggttttgagtcggagctgctgaccgttcatctgttcttgttgcgaagtggtcgctcccgctttggttcagctgcagctttcatggcgggactgaccatgccaaagtcttgtgtagcagagggcaatctccatgatgtcatgcgatacaagtgatctgtattttgccctacaggatgacaagtttctttgtgcaacatgctgtattattggttcgatactctttactatgtgggttcagtgcaggtgcataggacataccggcagtctccggactttgctgtgatctgcctggagcagagcatctgccgcctatcgcacatgtaaacttgcaggtggtggtggattgtaccagctttatgaaccctggcgattgaaaggcgctgggattgagtactgggtacgaagaacgtcgtttctttcagaacatgaaagcacatcgtcggtgcacagatggtgaaatcatgctctgggcgcaaataatatatctgttgctcggctgaccatcctctgatgccagcttgatcggtagaagacaggttgttaaagtaattgtaggaatgtaacttttagggctagtttggaaacttaaaattcacttttagatttatgagaattgagtagaaagttagcttatttccctggagaggatttaagttttcagactagtccttagctataagacatcatgagaatatcatacctttgcatcgtt

SEQ ID NO: 60936 - DNA, 4140 bp, Zea Mays
ccgcggcggcggctgacgggctgagaataggagagagaaacccctctttctcttcctctccttctcgacgaacccgtcccacaagcacgtgcgagccaaggcagacaagagcgaggtggagagagggagagagagtgagtgagagaggaaaaccccgcccccgtccaggcaaccttcgtcgacgcatacggcggaggccacagaggcgccacgcgagggagccccgccgcagcagcggccgcgaattcggcacccccggatctccttgccggcgcccggggccccgatcgcctcctccccatggtcgtgcccctccgggcgttctcctcgcgcgggcgcctgccatgtcggacctcgcttccaccagcaaggataaacttgcgtattttagaataaaggagctcaaagatatcttaaatcagctggggttgccgaagcatggaaagaagcaggaccttgttgacagggtattggcagaattatcagatgagcaaggtcaacgccatcatggatggggaaggaaaaatgctcttacaagggaggcggtggcaaaagttgttgatgacacatacaggaaaatgcaagtatgtgctcctgaccttccctctaggagtcacagtgggtcagatttcaatcattttaggcccaaagaggaagccactgacttctactatgtggagactaaggtccgctgcctttgcaatagcacaatgctaaatgacaagattatcaagtgtgaagatggcaaatgccagctgtggcagcattttacctgcgtactcattccagatacacccacggagggtgctggccctgatattccacctcatttttattgtgaactgtgccgactgaaccgggcagatccgttttgggtgactacagcaaatccactactacctgtgaaatttatctcatctggtgttggaaatgatggagcaagcgcacctcaaattgtggagaagaccttccaactttcccgagcagaaagagaaacagtccagaggccagaatacgatctccaggtttggtgcattcttgtaaatgacaaagtccagttcaggatgcaatggcctcaatatgcagaattgcaagtgaacggtattcctgtacgagtaatgaccaggcctggttctcagttactagggataaatggacgtgatgatgggccactggtaaccacatgcagtagagaagggattaataaaattagcttatcaagagttgatgctcgaaccttttgctttggagttcgaattgttaggaggaggactgttcctcaggtattaagcttgatcccaaaggaaggtgaaggggagtcttttgaggatgctcttgctcgtgttcgtcgttgtcttggaggtggaggtgctacagacaatgctgatagtgatagcgatctggaagtggttactgaatctgttacagtcaaccttcgttgccctaatagtggatccagaatgaggattgctggaaggttcaagccttgtgttcacatgggctgttttgatcttgaaacttttgtggaattgaatcaacgctcacgcaagtggcaatgcccaatatgtttaaataattactctctcgagaacttgatgattgatccttatttcaatcggattacttctttgttgcacaattgcagtgaagatgttaatgaacttgatgttaaacctgatgggtcatggcgtgtgatgggtgatgccgctaccagagatttatctcagtggcatatgcctgatggtactctttgtgactcaaaggaagatacaaaccctggtgtcgcaagtgttaatgagttcaagagagagggtgcttctgatgaacatagaactttgaaacttggaattaaaaaaaaccctattggattatggcaggttagcagtaaagcagatgatatgaaacctgtggttagaaatcacatccaaaataacactgggttttcaacaccaaacattgtgcctatgatcagtagccccactgggagttacagagatggcgaagatgtaagtgtgaaccaagaagggggtggtattcaatttgatatatcattgaaccaagagtttgacagttttgcccacaactttggtcagacatacaatacagaggatagaccacaacatccacaccataatgctgcagatgtcattgttcttagtgattctgatgaagaaaatgacccgactgttcagccgccagctgtctatgaaaatactcctacaaatgatgacagttttcctttcgtcactgatgctgccggatctggatatcctgaaaggtaccaggaggatgctagtgttggtacaagtggtcttggtttattgaggcagaacactggtgaatttgaaataaataactggcaaatgctttcttacccacaaccagagcaagggtttcagttttttgtgactgatactgatgttggcaatccttttgttgctccacataattcctttactattgcaccagaagactactctcttggctgtaatgttggaatagaggacccctctgcagctcacgatgtttcaatttgccgaaacagtaatgatgtgcatggaagcttggttgataacccactggcattaacaggtgacgatccatctttgcaaatttttcttccaagtcaaccttccactgttccccttcagcaagaattgagtgagcgttctgatactccaaatggagtccaccctaacgattggaggatatcgcttacgcttgccgctggtggagggggcaatgaagagtctacaagtgttggcggtctaaaatcacaaccaaaagtttcatcgaaagaggcaggagttgaacctttacttgatgctgcttctgctcttggaagcatgaacaatgacagatgcactggatctaatctaaatcctaaaaggattgaaaatatattttctcatcctcgccaaccgcggtctgttaggcctcgtctgtgtttgtcattagatactgattcagagtagtttggacatcacactgggatagctgaatttgctattaatctggtaaagttggcttccagaatcttgatcgttactgtggagggctatctggttattctggttgatacaaagagatacaccagtgtggatgctttgttgcattaacctggtaagattcaagtgttctatatgatccaagtgggatctgcatagagttcatctaatggttggtacaggatattttctaactgggagtggtttaatgtggctagtggagcaggctgtacattgtccctgacatttactgggtataaaggaatagggggccatcacttggcacaagacaaatacatgtgttgtgtgtaccatcattgtatttagggtttgggtgctaatttagatgtttattaccctgacgtttgatggagaataaattattccttgaagtggtggtcaataaacagagagcccttcggttttgagtcggagctgctgaccgttcatctgttcttgttgcgaagtggtcgctcccgctttggttcagctgcagctttcatggcgggactgaccatgccaaagtcttgtgtagcagagggcaatctccatgatgtcatgcgatacaagtgatctgtattttgccctacaggatgacaagtttctttgtgcaacatgctgtattattggttcgatactctttactatgtgggttcagtgcaggtgcataggacataccggcagtctccggactttgctgtgatctgcctggagcagagcatctgccgcctatcgcacatgtaaacttgcaggtggtggtggattgtaccagctttatgaaccctggcgattgaaaggcgctgggattgagtactgggtacgaagaacgtcgtttctttcagaacatgaaagcacatcgtcggtgcacagatggtgaaatcatgctctgggcgcaaataatatatctgttgctcggctgaccatcctctgatgccagcttgatcggtagaagacaggttgttaaagtaattgtaggaatgtaacttttagggctagtttggaaacttaaaattcacttttagatttatgagaattgagtagaaagttagcttatttccctggagaggatttaagttttcagactagtccttagctataagacatcatgagaatatcatacctttgcatcgtt

SEQ ID NO: 60937 - DNA, 4254 bp, Zea Mays
ccgcggcggcggctgacgggctgagaataggagagagaaacccctctttctcttcctctccttctcgacgaacccgtcccacaagcacgtgcgagccaaggcagacaagagcgaggtggagagagggagagagagtgagtgagagaggaaaaccccgcccccgtccaggcaaccttcgtcgacgcatacggcggaggccacagaggcgccacgcgagggagccccgccgcagcagcggccgcgaattcggcacccccggatctccttgccggcgcccggggccccgatcgcctcctccccatggtcgtgcccctccgggcgttctcctcgcgcgggcgcctgccatgtcggacctcgcttccaccagcaaggataaacttgcgtattttagaataaaggagctcaaagatatcttaaatcagctggggttgccgaagcatggaaagaagcaggaccttgttgacagggtattggcagaattatcagatgagcaaggtcaacgccatcatggatggggaaggaaaaatgctcttacaagggaggcggtggcaaaagttgttgatgacacatacagcaggaaaatgcaagtatgtgctcctgaccttccctctaggagtcacagtgggtcagatttcaatcattttaggcccaaagaggaagccactgacttctactatgtggagactaaggtccgctgcctttgcaatagcacaatgctaaatgacaagattatcaagtgtgaagatggcaaatgccagctgtggcagcattttacctgcgtactcattccagatacacccacggagggtgctggccctgatattccacctcatttttattgtgaactgtgccgactgaaccgggcagatccgttttgggtgactacagcaaatccactactacctgtgaaatttatctcatctggtgttggaaatgatggagcaagcgcacctcaaattgtggagaagaccttccaactttcccgagcagaaagagaaacagtccagaggccagaatacgatctccaggtttggtgcattcttgtaaatgacaaagtccagttcaggatgcaatggcctcaatatgcagaattgcaagtgaacggtattcctgtacgagtaatgaccaggcctggttctcagttactagggataaatggacgtgatgatgggccactggtaaccacatgcagtagagaagggattaataaaattagcttatcaagagttgatgctcgaaccttttgctttggagttcgaattgttaggaggaggactgttcctcaggtattaagcttgatcccaaaggaaggtgaaggggagtcttttgaggatgctcttgctcgtgttcgtcgttgtcttggaggtggaggtgctacagacaatgctgatagtgatagcgatctggaagtggttactgaatctgttacagtcaaccttcgttgccctaatagtggatccagaatgaggattgctggaaggttcaagccttgtgttcacatgggctgttttgatcttgaaacttttgtggaattgaatcaacgctcacgcaagtggcaatgcccaatatgtttaaataattactctctcgagaacttgatgattgatccttatttcaatcggattacttctttgttgcacaattgcagtgaagatgttaatgaacttgatgttaaacctgatgggtcatggcgtgtgatgggtgatgccgctaccagagatttatctcagtggcatatgcctgatggtactctttgtgactcaaaggaagatacaaaccctggtgtcgcaagtgttaatgagttcaagagagagggtgcttctgatgaacatagaactttgaaacttggaattaaaaaaaaccctattggattatggcaggttagcagtaaagcagatgatatgaaacctgtggttagaaatcacatccaaaataacactgggttttcaacaccaaacattgtgcctatgatcagtagccccactgggagttacagagatggcgaagatgtaagtgtgaaccaagaagggggtggtattcaatttgatatatcattgaaccaagagtttgacagttttgcccacaactttggtcagacatacaatacagaggatagaccacaacatccacaccataatgctgcagatgtcattgttcttagtgattctgatgaagaaaatgacccgactgttcagccgccagctgtctatgaaaatactcctacaaatgatgacagttttcctttcgtcactgatgctgccggatctggatatcctgaaaggtaccaggaggatgctagtgttggtacaagtggtcttggtttattgaggcagaacactggtgaatttgaaataaataactggcaaatgctttcttacccacaaccagagcaagggtttcagttttttgtgactgatactgatgttggcaatccttttgttgctccacataattcctttactattgcaccagaagactactctcttggctgtaatgttggaatagaggacccctctgcagctcacgatgtttcaatttgccgaaacagtaatgatgtgcatggaagcttggttgataacccactggcattaacaggtgacgatccatctttgcaaatttttcttccaagtcaaccttccactgttccccttcagcaagaattgagtgagcgttctgatactccaaatggagtccaccctaacgattggaggatatcgcttacgcttgccgctggtggagggggcaatgaagagtctacaagtgttggcggtctaaaatcacaaccaaaagtttcatcgaaagagcttctgctcttggaagcatgaacaatgacagatgcactggatctaatctaaatcctaaaaggattgaaaatatattttctcatcctcgccaaccgcggtctgttaggcctcgtctgtgtttgtcattagatactgattcagagtagtttggacatcacactgggatagctgaatttgctattaatctggtaaagttggcttccagaatcttgatcgttactgtggagggctatctggttattctggttgatacaaagagatacaccagtgtggatgctttgttgcattaacctggtaagattcaagtgttctatatgatccaagtgggatctgcatagagttcatctaatgaccgatctctatcatgcatcccttctggatctcgctgccgctgccgcgccgccgcagatgacccaggtgggggtatgcggtgggcggcggtgctagatttggtggggttgagagaggaggcagcttcatgccctttctggttggtacaggatattttctaactgggagtggtttaatgtggctagtggagcaggctgtacattgtccctgacatttactgggtataaaggaatagggggccatcacttggcacaagacaaatacatgtgttgtgtgtaccatcattgtatttagggtttgggtgctaatttagatgtttattaccctgacgtttgatggagaataaattattccttgaagtggtggtcaataaacagagagcccttcggttttgagtcggagctgctgaccgttcatctgttcttgttgcgaagtggtcgctcccgctttggttcagctgcagctttcatggcgggactgaccatgccaaagtcttgtgtagcagagggcaatctccatgatgtcatgcgatacaagtgatctgtattttgccctacaggatgacaagtttctttgtgcaacatgctgtattattggttcgatactctttactatgtgggttcagtgcaggtgcataggacataccggcagtctccggactttgctgtgatctgcctggagcagagcatctgccgcctatcgcacatgtaaacttgcaggtggtggtggattgtaccagctttatgaaccctggcgattgaaaggcgctgggattgagtactgggtacgaagaacgtcgtttctttcagaacatgaaagcacatcgtcggtgcacagatggtgaaatcatgctctgggcgcaaataatatatctgttgctcggctgaccatcctctgatgccagcttgatcggtagaagacaggttgttaaagtaattgtaggaatgtaacttttagggctagtttggaaacttaaaattcacttttagatttatgagaattgagtagaaagttagcttatttccctggagaggatttaagttttcagactagtccttagctataagacatcatgagaatatcatacctttgcatcgtt

SEQ ID NO: 60938 - DNA, 3905 bp, Zea Mays
ccgcggcggcggctgacgggctgagaataggagagagaaacccctctttctcttcctctccttctcgacgaacccgtcccacaagcacgtgcgagccaaggcagacaagagcgaggtggagagagggagagagagtgagtgagagaggaaaaccccgcccccgtccaggcaaccttcgtcgacgcatacggcggaggccacagaggcgccacgcgagggagccccgccgcagcagcggccgcgaattcggcacccccggatctccttgccggcgcccggggccccgatcgcctcctccccatggtcgtgcccctccgggcgttctcctcgcgcgggcgcctgccatgtcggacctcgcttccaccagcaaggataaacttgcgtattttagaataaaggagctcaaagatatcttaaatcagctggggttgccgaagcatggaaagaagcagtcgttgatcacaggaccttgttgacagggtattggcagaattatcagatgagcaaggtcaacgccatcatggatggggaaggaaaaatgctcttacaagggaggcggtggcaaaagttgttgatgacacatacagcaggaaaatgcaagtatgtgctcctgaccttccctctaggagtcacagtgggtcagatttcaatcattttaggcccaaagaggaagccactgacttctactatgtggagactaaggtccgctgcctttgcaatagcacaatgctaaatgacaagattatcaagtgtgaagatggcaaatgccagctgtggcagcattttacctgcgtactcattccagatacacccacggagggtgctggccctgatattccacctcatttttattgtgaactgtgccgactgaaccgggcagatccgttttgggtgactacagcaaatccactactacctgtgaaatttatctcatctggtgttggaaatgatggagcaagcgcacctcaaattgtggagaagaccttccaactttcccgagcagaaagagaaacagtccagaggccagaatacgatctccaggtttggtgcattcttgtaaatgacaaagtccagttcaggatgcaatggcctcaatatgcagaattgcaagtgaacggtattcctgtacgagtaatgaccaggcctggttctcagttactagggataaatggacgtgatgatgggccactggtaaccacatgcagtagagaagggattaataaaattagcttatcaagagttgatgctcgaaccttttgctttggagttcgaattgttaggaggaggactgttcctcaggtattaagcttgatcccaaaggaaggtgaaggggagtcttttgaggatgctcttgctcgtgttcgtcgttgtcttggaggtggaggtgctacagacaatgctgatagtgatagcgatctggaagtggttactgaatctgttacagtcaaccttcgttgccctaatagtggatccagaatgaggattgctggaaggttcaagccttgtgttcacatgggctgttttgatcttgaaacttttgtggaattgaatcaacgctcacgcaagtggcaatgcccaatatgtttaaataattactctctcgagaacttgatgattgatccttatttcaatcggattacttctttgtgaagatgttaatgaacttgatgttaaacctgatgggtcatggcgtgtgatgggtgatgccgctaccagagatttatctcagtggcatatgcctgatggtactctttgtgactcaaaggaagatacaaaccctggtgtcgcaagtgttaatgagttcaagagagagggtgcttctgatgaacatagaactttgaaacttggaattaaaaaaaaccctattggattatggcaggttagcagtaaagcagatgatatgaaacctgtggttagaaatcacatccaaaataacactgggttttcaacaccaaacattgtgcctatgatcagtagccccactgggagttacagagatggcgaagatgtaagtgtgaaccaagaagggggtggtattcaatttgatatatcattgaaccaagagtttgacagttttgcccacaactttggtcagacatacaatacagaggatagaccacaacatccacaccataatgctgcagatgtcattgttcttagtgattctgatgaagaaaatgacccgactgttcagccgccagctgtctatgaaaatactcctacaaatgatgacagttttcctttcgtcactgatgctgccggatctggatatcctgaaaggtaccaggaggatgctagtgttggtacaagtggtcttggtttattgaggcagaacactggtgaatttgaaataaataactggcaaatgctttcttacccacaaccagagcaagggtttcagttttttgtgactgatactgatgttggcaatccttttgttgctccacataattcctttactattgcaccagaagactactctcttggctgtaatgttggaatagaggacccctctgcagctcacgatgtttcaatttgccgaaacagtaatgatgtgcatggaagcttggttgataacccactggcattaacagcttctgctcttggaagcatgaacaatgacagatgcactggatctaatctaaatcctaaaaggattgaaaatatattttctcatcctcgccaaccgcggtctgttaggcctcgtctgtgtttgtcattagatactgattcagagtagtttggacatcacactgggatagctgaatttgctattaatctggtaaagttggcttccagaatcttgatcgttactgtggagggctatctggttattctggttgatacaaagagatacaccagtgtggatgctttgttgcattaacctggtaagattcaagtgttctatatgatccaagtgggatctgcatagagttcatctaatggttggtacaggatattttctaactgggagtggtttaatgtggctagtggagcaggctgtacattgtccctgacatttactgggtataaaggaatagggggccatcacttggcacaagacaaatacatgtgttgtgtgtaccatcattgtatttagggtttgggtgctaatttagatgtttattaccctgacgtttgatggagaataaattattccttgaagtggtggtcaataaacagagagcccttcggttttgagtcggagctgctgaccgttcatctgttcttgttgcgaagtggtcgctcccgctttggttcagctgcagctttcatggcgggactgaccatgccaaagtcttgtgtagcagagggcaatctccatgatgtcatgcgatacaagtgatctgtattttgccctacaggatgacaagtttctttgtgcaacatgctgtattattggttcgatactctttactatgtgggttcagtgcaggtgcataggacataccggcagtctccggactttgctgtgatctgcctggagcagagcatctgccgcctatcgcacatgtaaacttgcaggtggtggtggattgtaccagctttatgaaccctggcgattgaaaggcgctgggattgagtactgggtacgaagaacgtcgtttctttcagaacatgaaagcacatcgtcggtgcacagatggtgaaatcatgctctgggcgcaaataatatatctgttgctcggctgaccatcctctgatgccagcttgatcggtagaagacaggttgttaaagtaattgtaggaatgtaacttttagggctagtttggaaacttaaaattcacttttagatttatgagaattgagtagaaagttagcttatttccctggagaggatttaagttttcagactagtccttagctataagacatcatgagaatatcatacctttgcatcgtt

SEQ ID NO: 60939 - DNA, 4032 bp, Zea Mays
ccgcggcggcggctgacgggctgagaataggagagagaaacccctctttctcttcctctccttctcgacgaacccgtcccacaagcacgtgcgagccaaggcagacaagagcgaggtggagagagggagagagagtgagtgagagaggaaaaccccgcccccgtccaggcaaccttcgtcgacgcatacggcggaggccacagaggcgccacgcgagggagccccgccgcagcagcggccgcgaattcggcacccccggatctccttgccggcgcccggggccccgatcgcctcctccccatggtcgtgcccctccgggcgttctcctcgcgcgggcgcctgccatgtcggacctcgcttccaccagcaaggataaacttgcgtattttagaataaaggagctcaaagatatcttaaatcagctggggttgccgaagcatggaaagaagcaggaccttgttgacagggtattggcagaattatcagatgagcaaggtcaacgccatcatggatggggaaggaaaaatgctcttacaagggaggcggtggcaaaagttgttgatgacacatacaggaaaatgcaagtatgtgctcctgaccttccctctaggagtcacagtgggtcagatttcaatcattttaggcccaaagaggaagccactgacttctactatgtggagactaaggtccgctgcctttgcaatagcacaatgctaaatgacaagattatcaagtgtgaagatggcaaatgccagctgtggcagcattttacctgcgtactcattccagatacacccacggagggtgctggccctgatattccacctcatttttattgtgaactgtgccgactgaaccgggcagatccgttttgggtgactacagcaaatccactactacctgtgaaatttatctcatctggtgttggaaatgatggagcaagcgcacctcaaattgtggagaagaccttccaactttcccgagcagaaagagaaacagtccagaggccagaatacgatctccaggtttggtgcattcttgtaaatgacaaagtccagttcaggatgcaatggcctcaatatgcagaattgcaagtgaacggtattcctgtacgagtaatgaccaggcctggttctcagttactagggataaatggacgtgatgatgggccactggtattaagcttgatcccaaaggaaggtgaaggggagtcttttgaggatgctcttgctcgtgttcgtcgttgtcttggaggtggaggtgctacagacaatgctgatagtgatagcgatctggaagtggttactgaatctgttacagtcaaccttcgttgccctaatagtggatccagaatgaggattgctggaaggttcaagccttgtgttcacatgggctgttttgatcttgaaacttttgtggaattgaatcaacgctcacgcaagtggcaatgcccaatatgtttaaataattactctctcgagaacttgatgattgatccttatttcaatcggattacttctttgttgcacaattgcagtgaagatgttaatgaacttgatgttaaacctgatgggtcatggcgtgtgatgggtgatgccgctaccagagatttatctcagtggcatatgcctgatggtactctttgtgactcaaaggaagatacaaaccctggtgtcgcaagtgttaatgagttcaagagagagggtgcttctgatgaacatagaactttgaaacttggaattaaaaaaaaccctattggattatggcaggttagcagtaaagcagatgatatgaaacctgtggttagaaatcacatccaaaataacactgggttttcaacaccaaacattgtgcctatgatcagtagccccactgggagttacagagatggcgaagatgtaagtgtgaaccaagaagggggtggtattcaatttgatatatcattgaaccaagagtttgacagttttgcccacaactttggtcagacatacaatacagaggatagaccacaacatccacaccataatgctgcagatgtcattgttcttagtgattctgatgaagaaaatgacccgactgttcagccgccagctgtctatgaaaatactcctacaaatgatgacagttttcctttcgtcactgatgctgccggatctggatatcctgaaaggtaccaggaggatgctagtgttggtacaagtggtcttggtttattgaggcagaacactggtgaatttgaaataaataactggcaaatgctttcttacccacaaccagagcaagggtttcagttttttgtgactgatactgatgttggcaatccttttgttgctccacataattcctttactattgcaccagaagactactctcttggctgtaatgttggaatagaggacccctctgcagctcacgatgtttcaatttgccgaaacagtaatgatgtgcatggaagcttggttgataacccactggcattaacaggtgacgatccatctttgcaaatttttcttccaagtcaaccttccactgttccccttcagcaagaattgagtgagcgttctgatactccaaatggagtccaccctaacgattggaggatatcgcttacgcttgccgctggtggagggggcaatgaagagtctacaagtgttggcggtctaaaatcacaaccaaaagtttcatcgaaagaggcaggagttgaacctttacttgatgctgcttctgctcttggaagcatgaacaatgacagatgcactggatctaatctaaatcctaaaaggattgaaaatatattttctcatcctcgccaaccgcggtctgttaggcctcgtctgtgtttgtcattagatactgattcagagtagtttggacatcacactgggatagctgaatttgctattaatctggtaaagttggcttccagaatcttgatcgttactgtggagggctatctggttattctggttgatacaaagagatacaccagtgtggatgctttgttgcattaacctggtaagattcaagtgttctatatgatccaagtgggatctgcatagagttcatctaatggttggtacaggatattttctaactgggagtggtttaatgtggctagtggagcaggctgtacattgtccctgacatttactgggtataaaggaatagggggccatcacttggcacaagacaaatacatgtgttgtgtgtaccatcattgtatttagggtttgggtgctaatttagatgtttattaccctgacgtttgatggagaataaattattccttgaagtggtggtcaataaacagagagcccttcggttttgagtcggagctgctgaccgttcatctgttcttgttgcgaagtggtcgctcccgctttggttcagctgcagctttcatggcgggactgaccatgccaaagtcttgtgtagcagagggcaatctccatgatgtcatgcgatacaagtgatctgtattttgccctacaggatgacaagtttctttgtgcaacatgctgtattattggttcgatactctttactatgtgggttcagtgcaggtgcataggacataccggcagtctccggactttgctgtgatctgcctggagcagagcatctgccgcctatcgcacatgtaaacttgcaggtggtggtggattgtaccagctttatgaaccctggcgattgaaaggcgctgggattgagtactgggtacgaagaacgtcgtttctttcagaacatgaaagcacatcgtcggtgcacagatggtgaaatcatgctctgggcgcaaataatatatctgttgctcggctgaccatcctctgatgccagcttgatcggtagaagacaggttgttaaagtaattgtaggaatgtaacttttagggctagtttggaaacttaaaattcacttttagatttatgagaattgagtagaaagttagcttatttccctggagaggatttaagttttcagactagtccttagctataagacatcatgagaatatcatacctttgcatcgtt

SEQ ID NO: 60940 - DNA, 4024 bp, Zea Mays
ccgcggcggcggctgacgggctgagaataggagagagaaacccctctttctcttcctctccttctcgacgaacccgtcccacaagcacgtgcgagccaaggcagacaagagcgaggtggagagagggagagagagtgagtgagagaggaaaaccccgcccccgtccaggcaaccttcgtcgacgcatacggcggaggccacagaggcgccacgcgagggagccccgccgcagcagcggccgcgaattcggcacccccggatctccttgccggcgcccggggccccgatcgcctcctccccatggtcgtgcccctccgggcgttctcctcgcgcgggcgcctgccatgtcggacctcgcttccaccagcaaggataaacttgcgtattttagaataaaggagctcaaagatatcttaaatcagctggggttgccgaagcatggaaagaagcaggaccttgttgacagggtattggcagaattatcagatgagcaaggtcaacgccatcatggatggggaaggaaaaatgctcttacaagggaggcggtggcaaaagttgttgatgacacatacagcaggaaaatgcaagtatgtgctcctgaccttccctctaggagtcacagtgggtcagatttcaatcattttaggcccaaagaggaagccactgacttctactatgtggagactaaggtccgctgcctttgcaatagcacaatgctaaatgacaagattatcaagtgtgaagatggcaaatgccagctgtggcagcattttacctgcgtactcattccagatacacccacggagggtgctggccctgatattccacctcatttttattgtgaactgtgccgactgaaccgggcagatccgttttgggtgactacagcaaatccactactacctgtgaaatttatctcatctggtgttggaaatgatggagcaagcgcacctcaaattgtggagaagaccttccaactttcccgagcagaaagagaaacagtccagaggccagaatacgatctccaggtttggtgcattcttgtaaatgacaaagtccagttcaggatgcaatggcctcaatatgcagaattgcaagtgaacggtattcctgtacgagtaatgaccaggcctggttctcagttactagggataaatggacgtgatgatgggccactggtaaccacatgcagtagagaagggattaataaaattagcttatcaagagttgatgctcgaaccttttgctttggagttcgaattgttaggaggaggactgttcctcaggtattaagcttgatcccaaaggaaggtgaaggggagtcttttgaggatgctcttgctcgtgttcgtcgttgtcttggaggtggaggtgctacagacaatgctgatagtgatagcgatctggaagtggttactgaatctgttacagtcaaccttcgttgcccttggcaatgcccaatatgtttaaataattactctctcgagaacttgatgattgatccttatttcaatcggattacttctttgtgaagatgttaatgaacttgatgttaaacctgatgggtcatggcgtgtgatgggtgatgccgctaccagagatttatctcagtggcatatgcctgatggtactctttgtgactcaaaggaagatacaaaccctggtgtcgcaagtgttaatgagttcaagagagagggtgcttctgatgaacatagaactttgaaacttggaattaaaaaaaaccctattggattatggcaggttagcagtaaagcagatgatatgaaacctgtggttagaaatcacatccaaaataacactgggttttcaacaccaaacattgtgcctatgatcagtagccccactgggagttacagagatggcgaagatgtaagtgtgaaccaagaagggggtggtattcaatttgatatatcattgaaccaagagtttgacagttttgcccacaactttggtcagacatacaatacagaggatagaccacaacatccacaccataatgctgcagatgtcattgttcttagtgattctgatgaagaaaatgacccgactgttcagccgccagctgtctatgaaaatactcctacaaatgatgacagttttcctttcgtcactgatgctgccggatctggatatcctgaaaggtaccaggaggatgctagtgttggtacaagtggtcttggtttattgaggcagaacactggtgaatttgaaataaataactggcaaatgctttcttacccacaaccagagcaagggtttcagttttttgtgactgatactgatgttggcaatccttttgttgctccacataattcctttactattgcaccagaagactactctcttggctgtaatgttggaatagaggacccctctgcagctcacgatgtttcaatttgccgaaacagtaatgatgtgcatggaagcttggttgataacccactggcattaacaggtgacgatccatctttgcaaatttttcttccaagtcaaccttccactgttccccttcagcaagaattgagtgagcgttctgatactccaaatggagtccaccctaacgattggaggatatcgcttacgcttgccgctggtggagggggcaatgaagagtctacaagtgttggcggtctaaaatcacaaccaaaagtttcatcgaaagaggcaggagttgaacctttacttgatgctgcttctgctcttggaagcatgaacaatgacagatgcactggatctaatctaaatcctaaaaggattgaaaatatattttctcatcctcgccaaccgcggtctgttaggcctcgtctgtgtttgtcattagatactgattcagagtagtttggacatcacactgggatagctgaatttgctattaatctggtaaagttggcttccagaatcttgatcgttactgtggagggctatctggttattctggttgatacaaagagatacaccagtgtggatgctttgttgcattaacctggtaagattcaagtgttctatatgatccaagtgggatctgcatagagttcatctaatggttggtacaggatattttctaactgggagtggtttaatgtggctagtggagcaggctgtacattgtccctgacatttactgggtataaaggaatagggggccatcacttggcacaagacaaatacatgtgttgtgtgtaccatcattgtatttagggtttgggtgctaatttagatgtttattaccctgacgtttgatggagaataaattattccttgaagtggtggtcaataaacagagagcccttcggttttgagtcggagctgctgaccgttcatctgttcttgttgcgaagtggtcgctcccgctttggttcagctgcagctttcatggcgggactgaccatgccaaagtcttgtgtagcagagggcaatctccatgatgtcatgcgatacaagtgatctgtattttgccctacaggatgacaagtttctttgtgcaacatgctgtattattggttcgatactctttactatgtgggttcagtgcaggtgcataggacataccggcagtctccggactttgctgtgatctgcctggagcagagcatctgccgcctatcgcacatgtaaacttgcaggtggtggtggattgtaccagctttatgaaccctggcgattgaaaggcgctgggattgagtactgggtacgaagaacgtcgtttctttcagaacatgaaagcacatcgtcggtgcacagatggtgaaatcatgctctgggcgcaaataatatatctgttgctcggctgaccatcctctgatgccagcttgatcggtagaagacaggttgttaaagtaattgtaggaatgtaacttttagggctagtttggaaacttaaaattcacttttagatttatgagaattgagtagaaagttagcttatttccctggagaggatttaagttttcagactagtccttagctataagacatcatgagaatatcatacctttgcatcgtt

SEQ ID NO: 60941 - DNA, 4156 bp, Zea Mays
ccgcggcggcggctgacgggctgagaataggagagagaaacccctctttctcttcctctccttctcgacgaacccgtcccacaagcacgtgcgagccaaggcagacaagagcgaggtggagagagggagagagagtgagtgagagaggaaaaccccgcccccgtccaggcaaccttcgtcgacgcatacggcggaggccacagaggcgccacgcgagggagccccgccgcagcagcggccgcgaattcggcacccccggatctccttgccggcgcccggggccccgatcgcctcctccccatggtcgtgcccctccgggcgttctcctcgcgcgggcgcctgccatgtcggacctcgcttccaccagcaaggataaacttgcgtattttagaataaaggagctcaaagatatcttaaatcagctggggttgccgaagcatggaaagaagcagtcgttgatcacaggaccttgttgacagggtattggcagaattatcagatgagcaaggtcaacgccatcatggatggggaaggaaaaatgctcttacaagggaggcggtggcaaaagttgttgatgacacatacagcaggaaaatgcaagtatgtgctcctgaccttccctctaggagtcacagtgggtcagatttcaatcattttaggcccaaagaggaagccactgacttctactatgtggagactaaggtccgctgcctttgcaatagcacaatgctaaatgacaagattatcaagtgtgaagatggcaaatgccagctgtggcagcattttacctgcgtactcattccagatacacccacggagggtgctggccctgatattccacctcatttttattgtgaactgtgccgactgaaccgggcagatccgttttgggtgactacagcaaatccactactacctgtgaaatttatctcatctggtgttggaaatgatggagcaagcgcacctcaaattgtggagaagaccttccaactttcccgagcagaaagagaaacagtccagaggccagaatacgatctccaggtttggtgcattcttgtaaatgacaaagtccagttcaggatgcaatggcctcaatatgcagaattgcaagtgaacggtattcctgtacgagtaatgaccaggcctggttctcagttactagggataaatggacgtgatgatgggccactggtaaccacatgcagtagagaagggattaataaaattagcttatcaagagttgatgctcgaaccttttgctttggagttcgaattgttaggaggaggactgttcctcaggtattaagcttgatcccaaaggaaggtgaaggggagtcttttgaggatgctcttgctcgtgttcgtcgttgtcttggaggtggaggtgctacagacaatgctgatagtgatagcgatctggaagtggttactgaatctgttacagtcaaccttcgttgccctaatagtggatccagaatgaggattgctggaaggttcaagccttgtgttcacatgggctgttttgatcttgaaacttttgtggaattgaatcaacgctcacgcaagtggcaatgcccaatatgtttaaataattactctctcgagaacttgatgattgatccttatttcaatcggattacttctttgttgcacaattgcagtgaagatgttaatgaacttgatgttaaacctgatgggtcatggcgtgtgatgggtgatgccgctaccagagatttatctcagtggcatatgcctgatggtactctttgtgactcaaaggaagatacaaaccctggtgtcgcaagtgttaatgagttcaagagagagggtgcttctgatgaacatagaactttgaaacttggaattaaaaaaaaccctattggattatggcaggttagcagtaaagcagatgatatgaaacctgtggttagaaatcacatccaaaataacactgggttttcaacaccaaacattgtgcctatgatcagtagccccactgggagttacagagatggcgaagatgtaagtgtgaaccaagaagggggtggtattcaatttgatatatcattgaaccaagagtttgacagttttgcccacaactttggtcagacatacaatacagaggatagaccacaacatccacaccataatgctgcagatgtcattgttcttagtgattctgatgaagaaaatgacccgactgttcagccgccagctgtctatgaaaatactcctacaaatgatgacagttttcctttcgtcactgatgctgccggatctggatatcctgaaaggtaccaggaggatgctagtgttggtacaagtggtcttggtttattgaggcagaacactggtgaatttgaaataaataactggcaaatgctttcttacccacaaccagagcaagggtttcagttttttgtgactgatactgatgttggcaatccttttgttgctccacataattcctttactattgcaccagaagactactctcttggctgtaatgttggaatagaggacccctctgcagctcacgatgtttcaatttgccgaaacagtaatgatgtgcatggaagcttggttgataacccactggcattaacaggtgacgatccatctttgcaaatttttcttccaagtcaaccttccactgttccccttcagcaagaattgagtgagcgttctgatactccaaatggagtccaccctaacgattggaggatatcgcttacgcttgccgctggtggagggggcaatgaagagtctacaagtgttggcggtctaaaatcacaaccaaaagtttcatcgaaagaggcaggagttgaacctttacttgatgctgcttctgctcttggaagcatgaacaatgacagatgcactggatctaatctaaatcctaaaaggattgaaaatatattttctcatcctcgccaaccgcggtctgttaggcctcgtctgtgtttgtcattagatactgattcagagtagtttggacatcacactgggatagctgaatttgctattaatctggtaaagttggcttccagaatcttgatcgttactgtggagggctatctggttattctggttgatacaaagagatacaccagtgtggatgctttgttgcattaacctggtaagattcaagtgttctatatgatccaagtgggatctgcatagagttcatctaatggttggtacaggatattttctaactgggagtggtttaatgtggctagtggagcaggctgtacattgtccctgacatttactgggtataaaggaatagggggccatcacttggcacaagacaaatacatgtgttgtgtgtaccatcattgtatttagggtttgggtgctaatttagatgtttattaccctgacgtttgatggagaataaattattccttgaagtggtggtcaataaacagagagcccttcggttttgagtcggagctgctgaccgttcatctgttcttgttgcgaagtggtcgctcccgctttggttcagctgcagctttcatggcgggactgaccatgccaaagtcttgtgtagcagagggcaatctccatgatgtcatgcgatacaagtgatctgtattttgccctacaggatgacaagtttctttgtgcaacatgctgtattattggttcgatactctttactatgtgggttcagtgcaggtgcataggacataccggcagtctccggactttgctgtgatctgcctggagcagagcatctgccgcctatcgcacatgtaaacttgcaggtggtggtggattgtaccagctttatgaaccctggcgattgaaaggcgctgggattgagtactgggtacgaagaacgtcgtttctttcagaacatgaaagcacatcgtcggtgcacagatggtgaaatcatgctctgggcgcaaataatatatctgttgctcggctgaccatcctctgatgccagcttgatcggtagaagacaggttgttaaagtaattgtaggaatgtaacttttagggctagtttggaaacttaaaattcacttttagatttatgagaattgagtagaaagttagcttatttccctggagaggatttaagttttcagactagtccttagctataagacatcatgagaatatcatacctttgcatcgtt

SEQ ID NO: 60942 - DNA, 4076 bp, Zea Mays
ccgcggcggcggctgacgggctgagaataggagagagaaacccctctttctcttcctctccttctcgacgaacccgtcccacaagcacgtgcgagccaaggcagacaagagcgaggtggagagagggagagagagtgagtgagagaggaaaaccccgcccccgtccaggcaaccttcgtcgacgcatacggcggaggccacagaggcgccacgcgagggagccccgccgcagcagcggccgcgaattcggcacccccggatctccttgccggcgcccggggccccgatcgcctcctccccatggtcgtgcccctccgggcgttctcctcgcgcgggcgcctgccatgtcggacctcgcttccaccagcaaggataaacttgcgtattttagaataaaggagctcaaagatatcttaaatcagctggggttgccgaagcatggaaagaagcagtcgttgatcacaggaccttgttgacagggtattggcagaattatcagatgagcaaggtcaacgccatcatggatggggaaggaaaaatgctcttacaagggaggcggtggcaaaagttgttgatgacacatacagcaggaaaatgcaagtatgtgctcctgaccttccctctaggagtcacagtgggtcagatttcaatcattttaggcccaaagaggaagccactgacttctactatgtggagactaaggtccgctgcctttgcaatagcacaatgctaaatgacaagattatcaagtgtgaagatggcaaatgccagctgtggcagcattttacctgcgtactcattccagatacacccacggagggtgctggccctgatattccacctcatttttattgtgaactgtgccgactgaaccgggcagatccgttttgggtgactacagcaaatccactactacctgtgaaatttatctcatctggtgttggaaatgatggagcaagcgcacctcaaattgtggagaagaccttccaactttcccgagcagaaagagaaacagtccagaggccagaatacgatctccaggtttggtgcattcttgtaaatgacaaagtccagttcaggatgcaatggcctcaatatgcagaattgcaagtgaacggtattcctgtacgagtaatgaccaggcctggttctcagttactagggataaatggacgtgatgatgggccactggtattaagcttgatcccaaaggaaggtgaaggggagtcttttgaggatgctcttgctcgtgttcgtcgttgtcttggaggtggaggtgctacagacaatgctgatagtgatagcgatctggaagtggttactgaatctgttacagtcaaccttcgttgccctaatagtggatccagaatgaggattgctggaaggttcaagccttgtgttcacatgggctgttttgatcttgaaacttttgtggaattgaatcaacgctcacgcaagtggcaatgcccaatatgtttaaataattactctctcgagaacttgatgattgatccttatttcaatcggattacttctttgtgaagatgttaatgaacttgatgttaaacctgatgggtcatggcgtgtgatgggtgatgccgctaccagagatttatctcagtggcatatgcctgatggtactctttgtgactcaaaggaagatacaaaccctggtgtcgcaagtgttaatgagttcaagagagagggtgcttctgatgaacatagaactttgaaacttggaattaaaaaaaaccctattggattatggcaggttagcagtaaagcagatgatatgaaacctgtggttagaaatcacatccaaaataacactgggttttcaacaccaaacattgtgcctatgatcagtagccccactgggagttacagagatggcgaagatgtaagtgtgaaccaagaagggggtggtattcaatttgatatatcattgaaccaagagtttgacagttttgcccacaactttggtcagacatacaatacagaggatagaccacaacatccacaccataatgctgcagatgtcattgttcttagtgattctgatgaagaaaatgacccgactgttcagccgccagctgtctatgaaaatactcctacaaatgatgacagttttcctttcgtcactgatgctgccggatctggatatcctgaaaggtaccaggaggatgctagtgttggtacaagtggtcttggtttattgaggcagaacactggtgaatttgaaataaataactggcaaatgctttcttacccacaaccagagcaagggtttcagttttttgtgactgatactgatgttggcaatccttttgttgctccacataattcctttactattgcaccagaagactactctcttggctgtaatgttggaatagaggacccctctgcagctcacgatgtttcaatttgccgaaacagtaatgatgtgcatggaagcttggttgataacccactggcattaacaggtgacgatccatctttgcaaatttttcttccaagtcaaccttccactgttccccttcagcaagaattgagtgagcgttctgatactccaaatggagtccaccctaacgattggaggatatcgcttacgcttgccgctggtggagggggcaatgaagagtctacaagtgttggcggtctaaaatcacaaccaaaagtttcatcgaaagaggcaggagttgaacctttacttgatgctgcctgtcaagcatttccaggatcatcgaggttaacttttgaagcttctgctcttggaagcatgaacaatgacagatgcactggatctaatctaaatcctaaaaggattgaaaatatattttctcatcctcgccaaccgcggtctgttaggcctcgtctgtgtttgtcattagatactgattcagagtagtttggacatcacactgggatagctgaatttgctattaatctggtaaagttggcttccagaatcttgatcgttactgtggagggctatctggttattctggttgatacaaagagatacaccagtgtggatgctttgttgcattaacctggtaagattcaagtgttctatatgatccaagtgggatctgcatagagttcatctaatggttggtacaggatattttctaactgggagtggtttaatgtggctagtggagcaggctgtacattgtccctgacatttactgggtataaaggaatagggggccatcacttggcacaagacaaatacatgtgttgtgtgtaccatcattgtatttagggtttgggtgctaatttagatgtttattaccctgacgtttgatggagaataaattattccttgaagtggtggtcaataaacagagagcccttcggttttgagtcggagctgctgaccgttcatctgttcttgttgcgaagtggtcgctcccgctttggttcagctgcagctttcatggcgggactgaccatgccaaagtcttgtgtagcagagggcaatctccatgatgtcatgcgatacaagtgatctgtattttgccctacaggatgacaagtttctttgtgcaacatgctgtattattggttcgatactctttactatgtgggttcagtgcaggtgcataggacataccggcagtctccggactttgctgtgatctgcctggagcagagcatctgccgcctatcgcacatgtaaacttgcaggtggtggtggattgtaccagctttatgaaccctggcgattgaaaggcgctgggattgagtactgggtacgaagaacgtcgtttctttcagaacatgaaagcacatcgtcggtgcacagatggtgaaatcatgctctgggcgcaaataatatatctgttgctcggctgaccatcctctgatgccagcttgatcggtagaagacaggttgttaaagtaattgtaggaatgtaacttttagggctagtttggaaacttaaaattcacttttagatttatgagaattgagtagaaagttagcttatttccctggagaggatttaagttttcagactagtccttagctataagacatcatgagaatatcatacctttgcatcgtt

SEQ ID NO: 60943 - DNA, 4118 bp, Zea Mays
ccgcggcggcggctgacgggctgagaataggagagagaaacccctctttctcttcctctccttctcgacgaacccgtcccacaagcacgtgcgagccaaggcagacaagagcgaggtggagagagggagagagagtgagtgagagaggaaaaccccgcccccgtccaggcaaccttcgtcgacgcatacggcggaggccacagaggcgccacgcgagggagccccgccgcagcagcggccgcgaattcggcacccccggatctccttgccggcgcccggggccccgatcgcctcctccccatggtcgtgcccctccgggcgttctcctcgcgcgggcgcctgccatgtcggacctcgcttccaccagcaaggataaacttgcgtattttagaataaaggagctcaaagatatcttaaatcagctggggttgccgaagcatggaaagaagcaggaccttgttgacagggtattggcagaattatcagatgagcaaggtcaacgccatcatggatggggaaggaaaaatgctcttacaagggaggcggtggcaaaagttgttgatgacacatacagcaggaaaatgcaagtatgtgctcctgaccttccctctaggagtcacagtgggtcagatttcaatcattttaggcccaaagaggaagccactgacttctactatgtggagactaaggtccgctgcctttgcaatagcacaatgctaaatgacaagattatcaagtgtgaagatggcaaatgccagctgtggcagcattttacctgcgtactcattccagatacacccacggagggtgctggccctgatattccacctcatttttattgtgaactgtgccgactgaaccgggcagatccgttttgggtgactacagcaaatccactactacctgtgaaatttatctcatctggtgttggaaatgatggagcaagcgcacctcaaattgtggagaagaccttccaactttcccgagcagaaagagaaacagtccagaggccagaatacgatctccaggtttggtgcattcttgtaaatgacaaagtccagttcaggatgcaatggcctcaatatgcagaattgtattcctgtacgagtaatgaccaggcctggttctcagttactagggataaatggacgtgatgatgggccactggtaaccacatgcagtagagaagggattaataaaattagcttatcaagagttgatgctcgaaccttttgctttggagttcgaattgttaggaggaggactgttcctcaggtattaagcttgatcccaaaggaaggtgaaggggagtcttttgaggatgctcttgctcgtgttcgtcgttgtcttggaggtggaggtgctacagacaatgctgatagtgatagcgatctggaagtggttactgaatctgttacagtcaaccttcgttgccctaatagtggatccagaatgaggattgctggaaggttcaagccttgtgttcacatgggctgttttgatcttgaaacttttgtggaattgaatcaacgctcacgcaagtggcaatgcccaatatgtttaaataattactctctcgagaacttgatgattgatccttatttcaatcggattacttctttgtgaagatgttaatgaacttgatgttaaacctgatgggtcatggcgtgtgatgggtgatgccgctaccagagatttatctcagtggcatatgcctgatggtactctttgtgactcaaaggaagatacaaaccctggtgtcgcaagtgttaatgagttcaagagagagggtgcttctgatgaacatagaactttgaaacttggaattaaaaaaaaccctattggattatggcaggttagcagtaaagcagatgatatgaaacctgtggttagaaatcacatccaaaataacactgggttttcaacaccaaacattgtgcctatgatcagtagccccactgggagttacagagatggcgaagatgtaagtgtgaaccaagaagggggtggtattcaatttgatatatcattgaaccaagagtttgacagttttgcccacaactttggtcagacatacaatacagaggatagaccacaacatccacaccataatgctgcagatgtcattgttcttagtgattctgatgaagaaaatgacccgactgttcagccgccagctgtctatgaaaatactcctacaaatgatgacagttttcctttcgtcactgatgctgccggatctggatatcctgaaaggtaccaggaggatgctagtgttggtacaagtggtcttggtttattgaggcagaacactggtgaatttgaaataaataactggcaaatgctttcttacccacaaccagagcaagggtttcagttttttgtgactgatactgatgttggcaatccttttgttgctccacataattcctttactattgcaccagaagactactctcttggctgtaatgttggaatagaggacccctctgcagctcacgatgtttcaatttgccgaaacagtaatgatgtgcatggaagcttggttgataacccactggcattaacaggtgacgatccatctttgcaaatttttcttccaagtcaaccttccactgttccccttcagcaagaattgagtgagcgttctgatactccaaatggagtccaccctaacgattggaggatatcgcttacgcttgccgctggtggagggggcaatgaagagtctacaagtgttggcggtctaaaatcacaaccaaaagtttcatcgaaagaggcaggagttgaacctttacttgatgctgcttctgctcttggaagcatgaacaatgacagatgcactggatctaatctaaatcctaaaaggattgaaaatatattttctcatcctcgccaaccgcggtctgttaggcctcgtctgtgtttgtcattagatactgattcagagtagtttggacatcacactgggatagctgaatttgctattaatctggtaaagttggcttccagaatcttgatcgttactgtggagggctatctggttattctggttgatacaaagagatacaccagtgtggatgctttgttgcattaacctggtaagattcaagtgttctatatgatccaagtgggatctgcatagagttcatctaatggttggtacaggatattttctaactgggagtggtttaatgtggctagtggagcaggctgtacattgtccctgacatttactgggtataaaggaatagggggccatcacttggcacaagacaaatacatgtgttgtgtgtaccatcattgtatttagggtttgggtgctaatttagatgtttattaccctgacgtttgatggagaataaattattccttgaagtggtggtcaataaacagagagcccttcggttttgagtcggagctgctgaccgttcatctgttcttgttgcgaagtggtcgctcccgctttggttcagctgcagctttcatggcgggactgaccatgccaaagtcttgtgtagcagagggcaatctccatgatgtcatgcgatacaagtgatctgtattttgccctacaggatgacaagtttctttgtgcaacatgctgtattattggttcgatactctttactatgtgggttcagtgcaggtgcataggacataccggcagtctccggactttgctgtgatctgcctggagcagagcatctgccgcctatcgcacatgtaaacttgcaggtggtggtggattgtaccagctttatgaaccctggcgattgaaaggcgctgggattgagtactgggtacgaagaacgtcgtttctttcagaacatgaaagcacatcgtcggtgcacagatggtgaaatcatgctctgggcgcaaataatatatctgttgctcggctgaccatcctctgatgccagcttgatcggtagaagacaggttgttaaagtaattgtaggaatgtaacttttagggctagtttggaaacttaaaattcacttttagatttatgagaattgagtagaaagttagcttatttccctggagaggatttaagttttcagactagtccttagctataagacatcatgagaatatcatacctttgcatcgtt

SEQ ID NO: 60944 - DNA, 4414 bp, Zea Mays
ccgcggcggcggctgacgggctgagaataggagagagaaacccctctttctcttcctctccttctcgacgaacccgtcccacaagcacgtgcgagccaaggcagacaagagcgaggtggagagagggagagagagtgagtgagagaggaaaaccccgcccccgtccaggcaaccttcgtcgacgcatacggcggaggccacagaggcgccacgcgagggagccccgccgcagcagcggccgcgaattcggcacccccggatctccttgccggcgcccggggccccgatcgcctcctccccatggtcgtgcccctccgggcgttctcctcgcgcgggcgcctgccatgtcggacctcgcttccaccagcaaggataaacttgcgtattttagaataaaggagctcaaagatatcttaaatcagctggggttgccgaagcatggaaagaagcaggattgcaactgaatggtggcgcatggcatacgagcctccagggtgaactagccatctggcagtacatagttgttgggtctgtttgctgtagtgctgtgcacaactcgctttggcagtaaccatgggttcaatccatcagcattgcattttcaggaatcagaaccattccccccccccccccccccaacacaatcagaatctcatcttcactatacttggctcagctttgtacttgtggtatctgatccatttttgtagtcgttgatcacaggaccttgttgacagggtattggcagaattatcagatgagcaaggtcaacgccatcatggatggggaaggaaaaatgctcttacaagggaggcggtggcaaaagttgttgatgacacatacagcaggaaaatgcaagtatgtgctcctgaccttccctctaggagtcacagtgggtcagatttcaatcattttaggcccaaagaggaagccactgacttctactatgtggagactaaggtccgctgcctttgcaatagcacaatgctaaatgacaagattatcaagtgtgaagatggcaaatgccagctgtggcagcattttacctgcgtactcattccagatacacccacggagggtgctggccctgatattccacctcatttttattgtgaactgtgccgactgaaccgggcagatccgttttgggtgactacagcaaatccactactacctgtgaaatttatctcatctggtgttggaaatgatggagcaagcgcacctcaaattgtggagaagaccttccaactttcccgagcagaaagagaaacagtccagaggccagaatacgatctccaggtttggtgcattcttgtaaatgacaaagtccagttcaggatgcaatggcctcaatatgcagaattgcaagtgaacggtattcctgtacgagtaatgaccaggcctggttctcagttactagggataaatggacgtgatgatgggccactggtaaccacatgcagtagagaagggattaataaaattagcttatcaagagttgatgctcgaaccttttgctttggagttcgaattgttaggaggaggactgttcctcaggtattaagcttgatcccaaaggaaggtgaaggggagtcttttgaggatgctcttgctcgtgttcgtcgttgtcttggaggtggaggtgctacagacaatgctgatagtgatagcgatctggaagtggttactgaatctgttacagtcaaccttcgttgccctaatagtggatccagaatgaggattgctggaaggttcaagccttgtgttcacatgggctgttttgatcttgaaacttttgtggaattgaatcaacgctcacgcaagtggcaatgcccaatatgtttaaataattactctctcgagaacttgatgattgatccttatttcaatcggattacttctttgttgcacaattgcagtgaagatgttaatgaacttgatgttaaacctgatgggtcatggcgtgtgatgggtgatgccgctaccagagatttatctcagtggcatatgcctgatggtactctttgtgactcaaaggaagatacaaaccctggtgtcgcaagtgttaatgagttcaagagagagggtgcttctgatgaacatagaactttgaaacttggaattaaaaaaaaccctattggattatggcaggttagcagtaaagcagatgatatgaaacctgtggttagaaatcacatccaaaataacactgggttttcaacaccaaacattgtgcctatgatcagtagccccactgggagttacagagatggcgaagatgtaagtgtgaaccaagaagggggtggtattcaatttgatatatcattgaaccaagagtttgacagttttgcccacaactttggtcagacatacaatacagaggatagaccacaacatccacaccataatgctgcagatgtcattgttcttagtgattctgatgaagaaaatgacccgactgttcagccgccagctgtctatgaaaatactcctacaaatgatgacagttttcctttcgtcactgatgctgccggatctggatatcctgaaaggtaccaggaggatgctagtgttggtacaagtggtcttggtttattgaggcagaacactggtgaatttgaaataaataactggcaaatgctttcttacccacaaccagagcaagggtttcagttttttgtgactgatactgatgttggcaatccttttgttgctccacataattcctttactattgcaccagaagactactctcttggctgtaatgttggaatagaggacccctctgcagctcacgatgtttcaatttgccgaaacagtaatgatgtgcatggaagcttggttgataacccactggcattaacaggtgacgatccatctttgcaaatttttcttccaagtcaaccttccactgttccccttcagcaagaattgagtgagcgttctgatactccaaatggagtccaccctaacgattggaggatatcgcttacgcttgccgctggtggagggggcaatgaagagtctacaagtgttggcggtctaaaatcacaaccaaaagtttcatcgaaagaggcaggagttgaacctttacttgatgctgcttctgctcttggaagcatgaacaatgacagatgcactggatctaatctaaatcctaaaaggattgaaaatatattttctcatcctcgccaaccgcggtctgttaggcctcgtctgtgtttgtcattagatactgattcagagtagtttggacatcacactgggatagctgaatttgctattaatctggtaaagttggcttccagaatcttgatcgttactgtggagggctatctggttattctggttgatacaaagagatacaccagtgtggatgctttgttgcattaacctggtaagattcaagtgttctatatgatccaagtgggatctgcatagagttcatctaatggttggtacaggatattttctaactgggagtggtttaatgtggctagtggagcaggctgtacattgtccctgacatttactgggtataaaggaatagggggccatcacttggcacaagacaaatacatgtgttgtgtgtaccatcattgtatttagggtttgggtgctaatttagatgtttattaccctgacgtttgatggagaataaattattccttgaagtggtggtcaataaacagagagcccttcggttttgagtcggagctgctgaccgttcatctgttcttgttgcgaagtggtcgctcccgctttggttcagctgcagctttcatggcgggactgaccatgccaaagtcttgtgtagcagagggcaatctccatgatgtcatgcgatacaagtgatctgtattttgccctacaggatgacaagtttctttgtgcaacatgctgtattattggttcgatactctttactatgtgggttcagtgcaggtgcataggacataccggcagtctccggactttgctgtgatctgcctggagcagagcatctgccgcctatcgcacatgtaaacttgcaggtggtggtggattgtaccagctttatgaaccctggcgattgaaaggcgctgggattgagtactgggtacgaagaacgtcgtttctttcagaacatgaaagcacatcgtcggtgcacagatggtgaaatcatgctctgggcgcaaataatatatctgttgctcggctgaccatcctctgatgccagcttgatcggtagaagacaggttgttaaagtaattgtaggaatgtaacttttagggctagtttggaaacttaaaattcacttttagatttatgagaattgagtagaaagttagcttatttccctggagaggatttaagttttcagactagtccttagctataagacatcatgagaatatcatacctttgcatcgtt

SEQ ID NO: 60945 - DNA, 4198 bp, Zea Mays
ccgcggcggcggctgacgggctgagaataggagagagaaacccctctttctcttcctctccttctcgacgaacccgtcccacaagcacgtgcgagccaaggcagacaagagcgaggtggagagagggagagagagtgagtgagagaggaaaaccccgcccccgtccaggcaaccttcgtcgacgcatacggcggaggccacagaggcgccacgcgagggagccccgccgcagcagcggccgcgaattcggcacccccggatctccttgccggcgcccggggccccgatcgcctcctccccatggtcgtgcccctccgggcgttctcctcgcgcgggcgcctgccatgtcggacctcgcttccaccagcaaggataaacttgcgtattttagaataaaggagctcaaagatatcttaaatcagctggggttgccgaagcatggaaagaagcagtcgttgatcacaggaccttgttgacagggtattggcagaattatcagatgagcaaggtcaacgccatcatggatggggaaggaaaaatgctcttacaagggaggcggtggcaaaagttgttgatgacacatacagcaggaaaatgcaagtatgtgctcctgaccttccctctaggagtcacagtgggtcagatttcaatcattttaggcccaaagaggaagccactgacttctactatgtggagactaaggtccgctgcctttgcaatagcacaatgctaaatgacaagattatcaagtgtgaagatggcaaatgccagctgtggcagcattttacctgcgtactcattccagatacacccacggagggtgctggccctgatattccacctcatttttattgtgaactgtgccgactgaaccgggcagatccgttttgggtgactacagcaaatccactactacctgtgaaatttatctcatctggtgttggaaatgatggagcaagcgcacctcaaattgtggagaagaccttccaactttcccgagcagaaagagaaacagtccagaggccagaatacgatctccaggtttggtgcattcttgtaaatgacaaagtccagttcaggatgcaatggcctcaatatgcagaattgcaagtgaacggtattcctgtacgagtaatgaccaggcctggttctcagttactagggataaatggacgtgatgatgggccactggtaaccacatgcagtagagaagggattaataaaattagcttatcaagagttgatgctcgaaccttttgctttggagttcgaattgttaggaggaggactgttcctcaggtattaagcttgatcccaaaggaaggtgaaggggagtcttttgaggatgctcttgctcgtgttcgtcgttgtcttggaggtggaggtgctacagacaatgctgatagtgatagcgatctggaagtggttactgaatctgttacagtcaaccttcgttgccctaatagtggatccagaatgaggattgctggaaggttcaagccttgtgttcacatgggctgttttgatcttgaaacttttgtggaattgaatcaacgctcacgcaagtggcaatgcccaatatgtttaaataattactctctcgagaacttgatgattgatccttatttcaatcggattacttctttgttgcacaattgcagtgaagatgttaatgaacttgatgttaaacctgatgggtcatggcgtgtgatgggtgatgccgctaccagagatttatctcagtggcatatgcctgatggtactctttgtgactcaaaggaagatacaaaccctggtgtcgcaagtgttaatgagttcaagagagagggtgcttctgatgaacatagaactttgaaacttggaattaaaaaaaaccctattggattatggcaggttagcagtaaagcagatgatatgaaacctgtggttagaaatcacatccaaaataacactgggttttcaacaccaaacattgtgcctatgatcagtagccccactgggagttacagagatggcgaagatgtaagtgtgaaccaagaagggggtggtattcaatttgatatatcattgaaccaagagtttgacagttttgcccacaactttggtcagacatacaatacagaggatagaccacaacatccacaccataatgctgcagatgtcattgttcttagtgattctgatgaagaaaatgacccgactgttcagccgccagctgtctatgaaaatactcctacaaatgatgacagttttcctttcgtcactgatgctgccggatctggatatcctgaaaggtaccaggaggatgctagtgttggtacaagtggtcttggtttattgaggcagaacactggtgaatttgaaataaataactggcaaatgctttcttacccacaaccagagcaagggtttcagttttttgtgactgatactgatgttggcaatccttttgttgctccacataattcctttactattgcaccagaagactactctcttggctgtaatgttggaatagaggacccctctgcagctcacgatgtttcaatttgccgaaacagtaatgatgtgcatggaagcttggttgataacccactggcattaacaggtgacgatccatctttgcaaatttttcttccaagtcaaccttccactgttccccttcagcaagaattgagtgagcgttctgatactccaaatggagtccaccctaacgattggaggatatcgcttacgcttgccgctggtggagggggcaatgaagagtctacaagtgttggcggtctaaaatcacaaccaaaagtttcatcgaaagaggcaggagttgaacctttacttgatgctgcctgtcaagcatttccaggatcatcgaggttaacttttgaagcttctgctcttggaagcatgaacaatgacagatgcactggatctaatctaaatcctaaaaggattgaaaatatattttctcatcctcgccaaccgcggtctgttaggcctcgtctgtgtttgtcattagatactgattcagagtagtttggacatcacactgggatagctgaatttgctattaatctggtaaagttggcttccagaatcttgatcgttactgtggagggctatctggttattctggttgatacaaagagatacaccagtgtggatgctttgttgcattaacctggtaagattcaagtgttctatatgatccaagtgggatctgcatagagttcatctaatggttggtacaggatattttctaactgggagtggtttaatgtggctagtggagcaggctgtacattgtccctgacatttactgggtataaaggaatagggggccatcacttggcacaagacaaatacatgtgttgtgtgtaccatcattgtatttagggtttgggtgctaatttagatgtttattaccctgacgtttgatggagaataaattattccttgaagtggtggtcaataaacagagagcccttcggttttgagtcggagctgctgaccgttcatctgttcttgttgcgaagtggtcgctcccgctttggttcagctgcagctttcatggcgggactgaccatgccaaagtcttgtgtagcagagggcaatctccatgatgtcatgcgatacaagtgatctgtattttgccctacaggatgacaagtttctttgtgcaacatgctgtattattggttcgatactctttactatgtgggttcagtgcaggtgcataggacataccggcagtctccggactttgctgtgatctgcctggagcagagcatctgccgcctatcgcacatgtaaacttgcaggtggtggtggattgtaccagctttatgaaccctggcgattgaaaggcgctgggattgagtactgggtacgaagaacgtcgtttctttcagaacatgaaagcacatcgtcggtgcacagatggtgaaatcatgctctgggcgcaaataatatatctgttgctcggctgaccatcctctgatgccagcttgatcggtagaagacaggttgttaaagtaattgtaggaatgtaacttttagggctagtttggaaacttaaaattcacttttagatttatgagaattgagtagaaagttagcttatttccctggagaggatttaagttttcagactagtccttagctataagacatcatgagaatatcatacctttgcatcgtt

SEQ ID NO: 60946 - DNA, 4115 bp, Zea Mays
caaaaaccggatttgacagcggccgataacgtccgccgcggcggcggctgacgggctgagaataggagagagaaacccctctttctcttcctctccttctcgacgaacccgtcccacaagcacgtgcgagccaaggcagacaagagcgaggtggagagagggagagagagtgagtgagagaggaaaaccccgcccccgtccaggcaaccttcgtcgacgcatacggcggaggccacagaggcgccacgcgagggagccccgccgcagcagcggccgcgaattcggcacccccggatctccttgccggcgcccggggccccgatcgcctcctccccatggtcgtgcccctccgggcgttctcctcgcgcgggcgcctgccatgtcggacctcgcttccaccagcaaggataaacttgcgtattttagaataaaggagctcaaagatatcttaaatcagctggggttgccgaagcatggaaagaagcaggaccttgttgacagggtattggcagaattatcagatgagcaaggtcaacgccatcatggatggggaaggaaaaatgctcttacaagggaggcggtggcaaaagttgttgatgacacatacagcaggaaaatgcaagtatgtgctcctgaccttccctctaggagtcacagtgggtcagatttcaatcattttaggcccaaagaggaagccactgacttctactatgtggagactaaggtccgctgcctttgcaatagcacaatgctaaatgacaagattatcaagtgtgaagatggcaaatgccagctgtggcagcattttacctgcgtactcattccagatacacccacggagggtgctggccctgatattccacctcatttttattgtgaactgtgccgactgaaccgggcagatccgttttgggtgactacagcaaatccactactacctgtgaaatttatctcatctggtgttggaaatgatggagcaagcgcacctcaaattgtggagaagaccttccaactttcccgagcagaaagagaaacagtccagaggccagaatacgatctccaggtttggtgcattcttgtaaatgacaaagtccagttcaggatgcaatggcctcaatatgcagaattgcaagtgaacggtattcctgtacgagtaatgaccaggcctggttctcagttactagggataaatggacgtgatgatgggccactggtaaccacatgcagtagagaagggattaataaaattagcttatcaagagttgatgctcgaaccttttgctttggagttcgaattgttaggaggaggactgttcctcaggtattaagcttgatcccaaaggaaggtgaaggggagtcttttgaggatgctcttgctcgtgttcgtcgttgtcttggaggtggaggtgctacagacaatgctgatagtgatagcgatctggaagtggttactgaatctgttacagtcaaccttcgttgcccttggcaatgcccaatatgtttaaataattactctctcgagaacttgatgattgatccttatttcaatcggattacttctttgttgcacaattgcagtgaagatgttaatgaacttgatgttaaacctgatgggtcatggcgtgtgatgggtgatgccgctaccagagatttatctcagtggcatatgcctgatggtactctttgtgactcaaaggaagatacaaaccctggtgtcgcaagtgttaatgagttcaagagagagggtgcttctgatgaacatagaactttgaaacttggaattaaaaaaaaccctattggattatggcaggttagcagtaaagcagatgatatgaaacctgtggttagaaatcacatccaaaataacactgggttttcaacaccaaacattgtgcctatgatcagtagccccactgggagttacagagatggcgaagatgtaagtgtgaaccaagaagggggtggtattcaatttgatatatcattgaaccaagagtttgacagttttgcccacaactttggtcagacatacaatacagaggatagaccacaacatccacaccataatgctgcagatgtcattgttcttagtgattctgatgaagaaaatgacccgactgttcagccgccagctgtctatgaaaatactcctacaaatgatgacagttttcctttcgtcactgatgctgccggatctggatatcctgaaaggtaccaggaggatgctagtgttggtacaagtggtcttggtttattgaggcagaacactggtgaatttgaaataaataactggcaaatgctttcttacccacaaccagagcaagggtttcagttttttgtgactgatactgatgttggcaatccttttgttgctccacataattcctttactattgcaccagaagactactctcttggctgtaatgttggaatagaggacccctctgcagctcacgatgtttcaatttgccgaaacagtaatgatgtgcatggaagcttggttgataacccactggcattaacaggtgacgatccatctttgcaaatttttcttccaagtcaaccttccactgttccccttcagcaagaattgagtgagcgttctgatactccaaatggagtccaccctaacgattggaggatatcgcttacgcttgccgctggtggagggggcaatgaagagtctacaagtgttggcggtctaaaatcacaaccaaaagtttcatcgaaagaggcaggagttgaacctttacttgatgctgcctgtcaagcatttccaggatcatcgaggttaacttttgaagcttctgctcttggaagcatgaacaatgacagatgcactggatctaatctaaatcctaaaaggattgaaaatatattttctcatcctcgccaaccgcggtctgttaggcctcgtctgtgtttgtcattagatactgattcagagtagtttggacatcacactgggatagctgaatttgctattaatctggtaaagttggcttccagaatcttgatcgttactgtggagggctatctggttattctggttgatacaaagagatacaccagtgtggatgctttgttgcattaacctggtaagattcaagtgttctatatgatccaagtgggatctgcatagagttcatctaatggttggtacaggatattttctaactgggagtggtttaatgtggctagtggagcaggctgtacattgtccctgacatttactgggtataaaggaatagggggccatcacttggcacaagacaaatacatgtgttgtgtgtaccatcattgtatttagggtttgggtgctaatttagatgtttattaccctgacgtttgatggagaataaattattccttgaagtggtggtcaataaacagagagcccttcggttttgagtcggagctgctgaccgttcatctgttcttgttgcgaagtggtcgctcccgctttggttcagctgcagctttcatggcgggactgaccatgccaaagtcttgtgtagcagagggcaatctccatgatgtcatgcgatacaagtgatctgtattttgccctacaggatgacaagtttctttgtgcaacatgctgtattattggttcgatactctttactatgtgggttcagtgcaggtgcataggacataccggcagtctccggactttgctgtgatctgcctggagcagagcatctgccgcctatcgcacatgtaaacttgcaggtggtggtggattgtaccagctttatgaaccctggcgattgaaaggcgctgggattgagtactgggtacgaagaacgtcgtttctttcagaacatgaaagcacatcgtcggtgcacagatggtgaaatcatgctctgggcgcaaataatatatctgttgctcggctgaccatcctctgatgccagcttgatcggtagaagacaggttgttaaagtaattgtaggaatgtaacttttagggctagtttggaaacttaaaattcacttttagatttatgagaattgagtagaaagttagcttatttccctggagaggatttaagttttcagactagtccttagctataagacatcatgagaatatcatacctttgcatcgtt

SEQ ID NO: 60947 - DNA, 4220 bp, Zea Mays
caaaaaccggatttgacagcggccgataacgtccgccgcggcggcggctgacgggctgagaataggagagagaaacccctctttctcttcctctccttctcgacgaacccgtcccacaagcacgtgcgagccaaggcagacaagagcgaggtggagagagggagagagagtgagtgagagaggaaaaccccgcccccgtccaggcaaccttcgtcgacgcatacggcggaggccacagaggcgccacgcgagggagccccgccgcagcagcggccgcgaattcggcacccccggatctccttgccggcgcccggggccccgatcgcctcctccccatggtcgtgcccctccgggcgttctcctcgcgcgggcgcctgccatgtcggacctcgcttccaccagcaaggataaacttgcgtattttagaataaaggagctcaaagatatcttaaatcagctggggttgccgaagcatggaaagaagcaggaccttgttgacagggtattggcagaattatcagatgagcaaggtcaacgccatcatggatggggaaggaaaaatgctcttacaagggaggcggtggcaaaagttgttgatgacacatacagcaggaaaatgcaagtatgtgctcctgaccttccctctaggagtcacagtgggtcagatttcaatcattttaggcccaaagaggaagccactgacttctactatgtggagactaaggtccgctgcctttgcaatagcacaatgctaaatgacaagattatcaagtgtgaagatggcaaatgccagctgtggcagcattttacctgcgtactcattccagatacacccacggagggtgctggccctgatattccacctcatttttattgtgaactgtgccgactgaaccgggcagatccgttttgggtgactacagcaaatccactactacctgtgaaatttatctcatctggtgttggaaatgatggagcaagcgcacctcaaattgtggagaagaccttccaactttcccgagcagaaagagaaacagtccagaggccagaatacgatctccaggtttggtgcattcttgtaaatgacaaagtccagttcaggatgcaatggcctcaatatgcagaattgcaagtgaacggtattcctgtacgagtaatgaccaggcctggttctcagttactagggataaatggacgtgatgatgggccactggtaaccacatgcagtagagaagggattaataaaattagcttatcaagagttgatgctcgaaccttttgctttggagttcgaattgttaggaggaggactgttcctcaggtattaagcttgatcccaaaggaaggtgaaggggagtcttttgaggatgctcttgctcgtgttcgtcgttgtcttggaggtggaggtgctacagacaatgctgatagtgatagcgatctggaagtggttactgaatctgttacagtcaaccttcgttgccctaatagtggatccagaatgaggattgctggaaggttcaagccttgtgttcacatgggctgttttgatcttgaaacttttgtggaattgaatcaacgctcacgcaagtggcaatgcccaatatgtttaaataattactctctcgagaacttgatgattgatccttatttcaatcggattacttctttgttgcacaattgcagtgaagatgttaatgaacttgatgttaaacctgatgggtcatggcgtgtgatgggtgatgccgctaccagagatttatctcagtggcatatgcctgatggtactctttgtgactcaaaggaagatacaaaccctggtgtcgcaagtgttaatgagttcaagagagagggtgcttctgatgaacatagaactttgaaacttggaattaaaaaaaaccctattggattatggcaggttagcagtaaagcagatgatatgaaacctgtggttagaaatcacatccaaaataacactgggttttcaacaccaaacattgtgcctatgatcagtagccccactgggagttacagagatggcgaagatgtaagtgtgaaccaagaagggggtggtattcaatttgatatatcattgaaccaagagtttgacagttttgcccacaactttggtcagacatacaatacagaggatagaccacaacatccacaccataatgctgcagatgtcattgttcttagtgattctgatgaagaaaatgacccgactgttcagccgccagctgtctatgaaaatactcctacaaatgatgacagttttcctttcgtcactgatgctgccggatctggatatcctgaaaggtaccaggaggatgctagtgttggtacaagtggtcttggtttattgaggcagaacactggtgaatttgaaataaataactggcaaatgctttcttacccacaaccagagcaagggtttcagttttttgtgactgatactgatgttggcaatccttttgttgctccacataattcctttactattgcaccagaagactactctcttggctgtaatgttggaatagaggacccctctgcagctcacgatgtttcaatttgccgaaacagtaatgatgtgcatggaagcttggttgataacccactggcattaacaggtgacgatccatctttgcaaatttttcttccaagtcaaccttccactgttccccttcagcaagaattgagtgagcgttctgatactccaaatggagtccaccctaacgattggaggatatcgcttacgcttgccgctggtggagggggcaatgaagagtctacaagtgttggcggtctaaaatcacaaccaaaagtttcatcgaaagaggcaggagttgaacctttacttgatgctgcctgtcaagcatttccaggatcatcgaggttaacttttgaagcttctgctcttggaagcatgaacaatgacagatgcactggatctaatctaaatcctaaaaggattgaaaatatattttctcatcctcgccaaccgcggtctgttaggcctcgtctgtgtttgtcattagatactgattcagagtagtttggacatcacactgggatagctgaatttgctattaatctggtaaagttggcttccagaatcttgatcgttactgtggagggctatctggttattctggttgatacaaagagatacaccagtgtggatgctttgttgcattaacctggtaagattcaagtgttctatatgatccaagtgggatctgcatagagttcatctaatggttggtacaggatattttctaactgggagtggtttaatgtggctagtggagcaggctgtacattgtccctgacatttactgggtataaaggaatagggggccatcacttggcacaagacaaatacatgtgttgtgtgtaccatcattgtatttagggtttgggtgctaatttagatgtttattaccctgacgtttgatggagaataaattattccttgaagtggtggtcaataaacagagagcccttcggttttgagtcggagctgctgaccgttcatctgttcttgttgcgaagtggtcgctcccgctttggttcagctgcagctttcatggcgggactgaccatgccaaagtcttgtgtagcagagggcaatctccatgatgtcatgcgatacaagtgatctgtattttgccctacaggatgacaagtttctttgtgcaacatgctgtattattggttcgatactctttactatgtgggttcagtgcaggtgcataggacataccggcagtctccggactttgctgtgatctgcctggagcagagcatctgccgcctatcgcacatgtaaacttgcaggtggtggtggattgtaccagctttatgaaccctggcgattgaaaggcgctgggattgagtactgggtacgaagaacgtcgtttctttcagaacatgaaagcacatcgtcggtgcacagatggtgaaatcatgctctgggcgcaaataatatatctgttgctcggctgaccatcctctgatgccagcttgatcggtagaagacaggttgttaaagtaattgtaggaatgtaacttttagggctagtttggaaacttaaaattcacttttagatttatgagaattgagtagaaagttagcttatttccctggagaggatttaagttttcagactagtccttagctataagacatcatgagaatatcatacctttgcatcgtt

SEQ ID NO: 60948 - DNA, 4178 bp, Zea Mays
caaaaaccggatttgacagcggccgataacgtccgccgcggcggcggctgacgggctgagaataggagagagaaacccctctttctcttcctctccttctcgacgaacccgtcccacaagcacgtgcgagccaaggcagacaagagcgaggtggagagagggagagagagtgagtgagagaggaaaaccccgcccccgtccaggcaaccttcgtcgacgcatacggcggaggccacagaggcgccacgcgagggagccccgccgcagcagcggccgcgaattcggcacccccggatctccttgccggcgcccggggccccgatcgcctcctccccatggtcgtgcccctccgggcgttctcctcgcgcgggcgcctgccatgtcggacctcgcttccaccagcaaggataaacttgcgtattttagaataaaggagctcaaagatatcttaaatcagctggggttgccgaagcatggaaagaagcaggaccttgttgacagggtattggcagaattatcagatgagcaaggtcaacgccatcatggatggggaaggaaaaatgctcttacaagggaggcggtggcaaaagttgttgatgacacatacagcaggaaaatgcaagtatgtgctcctgaccttccctctaggagtcacagtgggtcagatttcaatcattttaggcccaaagaggaagccactgacttctactatgtggagactaaggtccgctgcctttgcaatagcacaatgctaaatgacaagattatcaagtgtgaagatggcaaatgccagctgtggcagcattttacctgcgtactcattccagatacacccacggagggtgctggccctgatattccacctcatttttattgtgaactgtgccgactgaaccgggcagatccgttttgggtgactacagcaaatccactactacctgtgaaatttatctcatctggtgttggaaatgatggagcaagcgcacctcaaattgtggagaagaccttccaactttcccgagcagaaagagaaacagtccagaggccagaatacgatctccaggtttggtgcattcttgtaaatgacaaagtccagttcaggatgcaatggcctcaatatgcagaattgcaagtgaacggtattcctgtacgagtaatgaccaggcctggttctcagttactagggataaatggacgtgatgatgggccactggtaaccacatgcagtagagaagggattaataaaattagcttatcaagagttgatgctcgaaccttttgctttggagttcgaattgttaggaggaggactgttcctcaggtattaagcttgatcccaaaggaaggtgaaggggagtcttttgaggatgctcttgctcgtgttcgtcgttgtcttggaggtggaggtgctacagacaatgctgatagtgatagcgatctggaagtggttactgaatctgttacagtcaaccttcgttgccctaatagtggatccagaatgaggattgctggaaggttcaagccttgtgttcacatgggctgttttgatcttgaaacttttgtggaattgaatcaacgctcacgcaagtggcaatgcccaatatgtttaaataattactctctcgagaacttgatgattgatccttatttcaatcggattacttctttgttgcacaattgcagtgaagatgttaatgaacttgatgttaaacctgatgggtcatggcgtgtgatgggtgatgccgctaccagagatttatctcagtggcatatgcctgatggtactctttgtgactcaaaggaagatacaaaccctggtgtcgcaagtgttaatgagttcaagagagagggtgcttctgatgaacatagaactttgaaacttggaattaaaaaaaaccctattggattatggcaggttagcagtaaagcagatgatatgaaacctgtggttagaaatcacatccaaaataacactgggttttcaacaccaaacattgtgcctatgatcagtagccccactgggagttacagagatggcgaagatgtaagtgtgaaccaagaagggggtggtattcaatttgatatatcattgaaccaagagtttgacagttttgcccacaactttggtcagacatacaatacagaggatagaccacaacatccacaccataatgctgcagatgtcattgttcttagtgattctgatgaagaaaatgacccgactgttcagccgccagctgtctatgaaaatactcctacaaatgatgacagttttcctttcgtcactgatgctgccggatctggatatcctgaaaggtaccaggaggatgctagtgttggtacaagtggtcttggtttattgaggcagaacactggtgaatttgaaataaataactggcaaatgctttcttacccacaaccagagcaagggtttcagttttttgtgactgatactgatgttggcaatccttttgttgctccacataattcctttactattgcaccagaagactactctcttggctgtaatgttggaatagaggacccctctgcagctcacgatgtttcaatttgccgaaacagtaatgatgtgcatggaagcttggttgataacccactggcattaacaggtgacgatccatctttgcaaatttttcttccaagtcaaccttccactgttccccttcagcaagaattgagtgagcgttctgatactccaaatggagtccaccctaacgattggaggatatcgcttacgcttgccgctggtggagggggcaatgaagagtctacaagtgttggcggtctaaaatcacaaccaaaagtttcatcgaaagaggcaggagttgaacctttacttgatgctgcttctgctcttggaagcatgaacaatgacagatgcactggatctaatctaaatcctaaaaggattgaaaatatattttctcatcctcgccaaccgcggtctgttaggcctcgtctgtgtttgtcattagatactgattcagagtagtttggacatcacactgggatagctgaatttgctattaatctggtaaagttggcttccagaatcttgatcgttactgtggagggctatctggttattctggttgatacaaagagatacaccagtgtggatgctttgttgcattaacctggtaagattcaagtgttctatatgatccaagtgggatctgcatagagttcatctaatggttggtacaggatattttctaactgggagtggtttaatgtggctagtggagcaggctgtacattgtccctgacatttactgggtataaaggaatagggggccatcacttggcacaagacaaatacatgtgttgtgtgtaccatcattgtatttagggtttgggtgctaatttagatgtttattaccctgacgtttgatggagaataaattattccttgaagtggtggtcaataaacagagagcccttcggttttgagtcggagctgctgaccgttcatctgttcttgttgcgaagtggtcgctcccgctttggttcagctgcagctttcatggcgggactgaccatgccaaagtcttgtgtagcagagggcaatctccatgatgtcatgcgatacaagtgatctgtattttgccctacaggatgacaagtttctttgtgcaacatgctgtattattggttcgatactctttactatgtgggttcagtgcaggtgcataggacataccggcagtctccggactttgctgtgatctgcctggagcagagcatctgccgcctatcgcacatgtaaacttgcaggtggtggtggattgtaccagctttatgaaccctggcgattgaaaggcgctgggattgagtactgggtacgaagaacgtcgtttctttcagaacatgaaagcacatcgtcggtgcacagatggtgaaatcatgctctgggcgcaaataatatatctgttgctcggctgaccatcctctgatgccagcttgatcggtagaagacaggttgttaaagtaattgtaggaatgtaacttttagggctagtttggaaacttaaaattcacttttagatttatgagaattgagtagaaagttagcttatttccctggagaggatttaagttttcagactagtccttagctataagacatcatgagaatatcatacctttgcatcgtt

SEQ ID NO: 60949 - DNA, 3320 bp, Zea Mays
ccgcggcggcggctgacgggctgagaataggagagagaaacccctctttctcttcctctccttctcgacgaacccgtcccacaagcacgtgcgagccaaggcagacaagagcgaggtggagagagggagagagagtgagtgagagaggaaaaccccgcccccgtccaggcaaccttcgtcgacgcatacggcggaggccacagaggcgccacgcgagggagccccgccgcagcagcggccgcgaattcggcacccccggatctccttgccggcgcccggggccccgatcgcctcctccccatggtcgtgcccctccgggcgttctcctcgcgcgggcgcctgccatgtcggacctcgcttccaccagcaaggataaacttgcgtattttagaataaaggagctcaaagatatcttaaatcagctggggttgccgaagcatggaaagaagcaggaccttgttgacagggtattggcagaattatcagatgagcaaggtcaacgccatcatggatggggaaggaaaaatgctcttacaagggaggcggtggcaaaagttgttgatgacacatacaggaaaatgcaagtatgtgctcctgaccttccctctaggagtcacagtgggtcagatttcaatcattttaggcccaaagaggaagccactgacttctactatgtggagactaaggtccgctgcctttgcaatagcacaatgctaaatgacaagattatcaagtgtgaagatggcaaatgccagctgtggcagcattttacctgcgtactcattccagatacacccacggagggtgctggccctgatattccacctcatttttattgtgaactgtgccgactgaaccgggcagatccgttttgggtgactacagcaaatccactactacctgtgaaatttatctcatctggtgttggaaatgatggagcaagcgcacctcaaattgtggagaagaccttccaactttcccgagcagaaagagaaacagtccagaggccagaatacgatctccaggtttggtgcattcttgtaaatgacaaagtccagttcaggatgcaatggcctcaatatgcagaattgcaagtgaacggtattcctgtacgagtaatgaccaggcctggttctcagttactagggataaatggacgtgatgatgggccactggtaaccacatgcagtagagaagggattaataaaattagcttatcaagagttgatgctcgaaccttttgctttggagttcgaattgttaggaggaggactgttcctcaggtattaagcttgatcccaaaggaaggtgaaggggagtcttttgaggatgctcttgctcgtgttcgtcgttgtcttggaggtggaggtgctacagacaatgctgatagtgatagcgatctggaagtggttactgaatctgttacagtcaaccttcgttgccctaatagtggatccagaatgaggattgctggaaggttcaagccttgtgttcacatgggctgttttgatcttgaaacttttgtggaattgaatcaacgctcacgcaagtggcaatgcccaatatgtttaaataattactctctcgagaacttgatgattgatccttatttcaatcggattacttctttgtgaagatgttaatgaacttgatgttaaacctgatgggtcatggcgtgtgatgggtgatgccgctaccagagatttatctcagtggcatatgcctgatggtactctttgtgactcaaaggaagatacaaaccctggtgtcgcaagtgttaatgagttcaagagagagggtgcttctgatgaacatagaactttgaaacttggaattaaaaaaaaccctattggattatggcaggttagcagtaaagcagatgatatgaaacctgtggttagaaatcacatccaaaataacactgggttttcaacaccaaacattgtgcctatgatcagtagccccactgggagttacagagatggcgaagatgtaagtgtgaaccaagaagggggtggtattcaatttgatatatcattgaaccaagagtttgacagttttgcccacaactttggtcagacatacaatacagaggatagaccacaacatccacaccataatgctgcagatgtcattgttcttagtgattctgatgaagaaaatgacccgactgttcagccgccagctgtctatgaaaatactcctacaaatgatgacagttttcctttcgtcactgatgctgccggatctggatatcctgaaaggtaccaggaggatgctagtgttggtacaagtggtcttggtttattgaggcagaacactggtgaatttgaaataaataactggcaaatgctttcttacccacaaccagagcaagggtttcagttttttgtgactgatactgatgttggcaatccttttgttgctccacataattcctttactattgcaccagaagactactctcttggctgtaatgttggaatagaggacccctctgcagctcacgatgtttcaatttgccgaaacagtaatgatgtgcatggaagcttggttgataacccactggcattaacaggtgacgatccatctttgcaaatttttcttccaagtcaaccttccactgttccccttcagcaagaattgagtgagcgttctgatactccaaatggagtccaccctaacgattggaggatatcgcttacgcttgccgctggtggagggggcaatgaagagtctacaagtgttggcggtctaaaatcacaaccaaaagtttcatcgaaagaggcaggagttgaacctttacttgatgctgcctgtcaagcatttccaggatcatcgaggttaacttttgaagcttctgctcttggaagcatgaacaatgacagatgcactggatctaatctaaatcctaaaaggattgaaaatatattttctcatcctcgccaaccgcggtctgttaggcctcgtctgtgtttgtcattagatactgattcagagtagtttggacatcacactgggatagctgaatttgctattaatctggtaaagttggcttccagaatcttgatcgttactgtggagggctatctggttattctggttgatacaaagagatacaccagtgtggatgctttgttgcattaacctggtaagattcaagtgttctatatgatccaagtgggatctgcatagagttcatctaatgaccgatctctatcatgcatcccttctggatctcgctgccgctgccgcgccgccgcagatgacccaggtgggggtatgcggtgggcggcggtgctagatttggtggggttgag

SEQ ID NO: 60950 - DNA, 3902 bp, Zea Mays
atgtgttttccaacccctaccatcccctccctccccggcgcctcacccacaccaccccacagccccacgtcggtgcctactccaggcccggcggccactccctcctcccctttggcgccggaggccacccctgttcctctggccgttggccgttccaaggcccttaggtggcgcgacgatggaagcccggagtcctcttccgtggcttccctaggacttcatcgacgtaggccatcatacaaggaggctcttctccttcccaggcctgctcccttcctaggccgggaggatgactttggagctggctgggtgacagttgaaggaaggcaagctcgtcgacgccgccttcgccacctcaagccccctcctctttcccccagggtcgtgccttccgaccttcgggggaagtgttttaattgcttctctccttcccaccgtgctgctgtgtgtcgtcggcaggtgcggtgcttctgttgccggttgcctgggcaccgtgcttacgtgtgcccgcgtcggcgatcagccgcacccctgccgcagcgaggactggtgtggcggcctgtctccctgtcctctgggatggccggctcaaatgacagtctcgctggaagagtcgtggatggaggtgaagatggcggtggcgtactgaagaggcgcacccgccgtggactgaggaggagaagatctggaaacctgagggatagcgccgatcaagatgcaattgttgcggtgccttcccaacgtccggccgatcagtgccacgatcgtgcattggggaggcccaggaggatcatcaaacactccaggatgattcttcaggcagaagataacctccggcgggccctgatcatcactgtcattgatcaatcgaattctggctgcgccgcggacgtgtctgacgcgctcgctgtgaggtttaacctcgatgcgcagacgctcgacctccgtcgtgctgcgccgaattcattcatcgcgtttctccccaatgaagaggtggcgtgccgggtcttcaatggcggcattccttttgtctctcccaccgttcgtcttcacatcaaacgctggtccagacatgccatggccgtcggcgggagggagctaccagtgccagttgacatcgagttgagaggaatccctgctcacctctgggggttggaaacagcaacacaacttctcgatgaatattgcctcattcgagatgtgcatcctgactccgcggaaggcggcgatctttcagtcttcaagttgagtgcatggtgcgacgagccagagctggtgccggcggaattagatcttctggcggaggagccgcagttgggtgccagtgacttcggcagttttcctcacactctggtgttcccaatcaccgtgcgggtgtgccgttcagatgcgatcttggacaggaggccctcgcctccgccgcagccaccattttccggcgacgatcgcgagcagaaccacggcaagcggcggcgggatcaacattcaatttcttcggtgcctggacgcaggccagtgcacgcgcgtctcgggccatgcgtccggaccgactctgcgcctggggggacatgtgaaacgatcgcgctcccggttcccttgggggcagtgagcaccgcttcggcttctcgaccccgggcgcgcctcgggccttgtggtggtgccggctctgcgcctggatgtacagttgggacgttcagtgccccgggacccttgagcgctgtggttgctgtgggggctgaagaagccgcttcgggctctacaattccgacgccagcccctttggtttctcccccaacggcgctcgtcacttcggttatagtcccaggagccgccaatgctttaacaaccggctctccatctgaagatcctgggcccgcctcattaattggtgcaatttcctctggtctattggattctgagaggccaattctgcatgacaactcatttaatgtggcggcttttgaggaggctggcggttttcagaggttaggacagggcccagaaaatctttgtgctgatgcttcaggacgggcctctgtgccattttctcatgtcccgcatgtcccagatgtccctgctgataatgctgcacaagtcaggaatccctgggatattatcaagtactcactgcaagcaaaaccaccatgctttaaggtgtactctagaagacgagataccgtgcctgtgcaatcccaggaatggcaatgcccaatatgtttaaataattactctctcgagaacttgatgattgatccttatttcaatcggattacttctttgtgaagatgttaatgaacttgatgttaaacctgatgggtcatggcgtgtgatgggtgatgccgctaccagagatttatctcagtggcatatgcctgatggtactctttgtgactcaaaggaagatacaaaccctggtgtcgcaagtgttaatgagttcaagagagagggtgcttctgatgaacatagaactttgaaacttggaattaaaaaaaaccctattggattatggcaggttagcagtaaagcagatgatatgaaacctgtggttagaaatcacatccaaaataacactgggttttcaacaccaaacattgtgcctatgatcagtagccccactgggagttacagagatggcgaagatgtaagtgtgaaccaagaagggggtggtattcaatttgatatatcattgaaccaagagtttgacagttttgcccacaactttggtcagacatacaatacagaggatagaccacaacatccacaccataatgctgcagatgtcattgttcttagtgattctgatgaagaaaatgacccgactgttcagccgccagctgtctatgaaaatactcctacaaatgatgacagttttcctttcgtcactgatgctgccggatctggatatcctgaaaggtaccaggaggatgctagtgttggtacaagtggtcttggtttattgaggcagaacactggtgaatttgaaataaataactggcaaatgctttcttacccacaaccagagcaagggtttcagttttttgtgactgatactgatgttggcaatccttttgttgctccacataattcctttactattgcaccagaagactactctcttggctgtaatgttggaatagaggacccctctgcagctcacgatgtttcaatttgccgaaacagtaatgatgtgcatggaagcttggttgataacccactggcattaacaggtgacgatccatctttgcaaatttttcttccaagtcaaccttccactgttccccttcagcaagaattgagtgagcgttctgatactccaaatggagtccaccctaacgattggaggatatcgcttacgcttgccgctggtggagggggcaatgaagagtctacaagtgttggcggtctaaaatcacaaccaaaagtttcatcgaaagaggcaggagttgaacctttacttgatgctggtttgtctcccttttatgaatttaattcttctttttttggatcattttgctcctaaggataatggtttgctacactccttttctttttgttagcctgtcaagcatttccaggatcatcgaggttaacttttgaaggcaggcatcttagctcatactttttcccatagaaaatgtgcaaagtctgatatcttaaatatagaagcctataaactatttaattgtctagtcaataaaatgcatgagtagaattttagcaactcttaaattgcttgtggtcgatggttctttttagaatttgccggtaacaaaaagaactatgaattgaacattgaaagttttaaccttctaacctattgctgttgtgatctcaacgacagctatctgcatactattcatgttattgttgtaacatttttgttctcgattgcagcttctgct

SEQ ID NO: 60951 - DNA, 1180 bp, Zea Mays
tttgcagtaaaaaagtttcaggagcttgtgttgttctaatgggtgagaactgggacgacagcactcaatccaaggagcaaatcgaggcaagcctaataagcaggcaagaggcagcgataagaagagaaagagctcttgcatatgcattttcacatcagtggaagagcacatcaagatctgcgaacccaatgtttgtagacccaaataacttgcagtggggctggagctggttggagcgctggatggcagcaaaaccttgggagggacgcaatgggaccgacaaggagagcaacattgatcgcggctccgtcaagaatatgagcttgaaccttggagttggagagggtgagatcacaaaagctttcaaccgccgggactcaaagccagagaagccatcaccaccgactccaaaaccggcccgtccagcttccaggcaatccccttcgacgccctctgctagagtggccccaatacctgcgaggaggaaatccagcacgccaaagaatgggctttcacaggtggacgatgacgtgaggagcgtgctcagtgtgcagtctgagcgaccaaggaggcacagcatagccacgacgtcgaccatgcgggacgatgagagcctcgcgagctccccgtcgctcccgagctacatggttcccacagaatctgcgagggccaaatctcgcacagcaacggccaatggcgcagagacgcctgagaaaggaggctctgctggaccagtcaagaagaggttgtctttccaaggtggagctgcggctgcctcaccgatgcgacggcattctggccctcccaaggtggagagcgctgtgaaggacattgctgcgccaccacagcctgaggccttggtagccaatggtggtggaagcaagtgacttgtattgacaagttccaggatgggggagcgggttatggtcttatggagggacatgtttcatccgtgaacagaagttaagagtggtgccggatctacgaatggtttgaattgttttcccgttacaaccacattgtttgctgtataagattcactgtacctgccagttggttccatttgttgttttctgtaaaacaaacatcaatttgtcactagaatctgtgatgcttgtatgtaaacaggtcctctatttatgtgagccatatatttcattttcagaagattccttgtgct

SEQ ID NO: 60952 - DNA, 1391 bp, Zea Mays
attaggtcttcgatatttgggggttaggaggaggcaaggagggcactaagagcactacgaggccttgtacgattgaagtcattggttgagggtaattcagttaagcgtcaatctgcaagcactctgcgctgtatgcaaactctatcgcgggtgcagtcacaaatacgatctaggagagcaaagatgtccgaggagaaccaggccctccaacgccagctcctacttaaacaggaactggagaatttcagaatgggtgagaactgggacgacagcactcaatccaaggagcaaatcgaggcaagcctaataagcaggcaagaggcagcgataagaagagaaagagctcttgcatatgcattttcacatcagtggaagagcacatcaagatctgcgaacccaatgtttgtagacccaaataacttgcagtggggctggagctggttggagcgctggatggcagcaaaaccttgggagggacgcaatgggaccgacaaggagagcaacattgatcgcggctccgtcaagaatatgagcttgaaccttggagttggagagggtgagatcacaaaagctttcaaccgccgggactcaaagccagagaagccatcaccaccgactccaaaaccggcccgtccagcttccaggcaatccccttcgacgccctctgctagagtggccccaatacctgcgaggaggaaatccagcacgccaaagaatgggctttcacaggtggacgatgacgtgaggagcgtgctcagtgtgcagtctgagcgaccaaggaggcacagcatagccacgacgtcgaccatgcgggacgatgagagcctcgcgagctccccgtcgctcccgagctacatggttcccacagaatctgcgagggccaaatctcgcacagcaacggccaatggcgcagagacgcctgagaaaggaggctctgctggaccagtcaagaagaggttgtctttccaaggtggagctgcggctgcctcaccgatgcgacggcattctggccctcccaaggtggagagcgctgtgaaggacattgctgcgccaccacagcctgaggccttggtagccaatggtggtggaagcaagtgacttgtattgacaagttccaggatgggggagcgggttatggtcttatggagggacatgtttcatccgtgaacagaagttaagagtggtgccggatctacgaatggtttgaattgttttcccgttacaaccacattgtttgctgtataagattcactgtacctgccagttggttccatttgttgttttctgtaaaacaaacatcaatttgtcactagaatctgtgatgcttgtatgtaaacaggtcctctatttatgtgagccatatatttcattttcagaagattccttgtgct

SEQ ID NO: 60953 - DNA, 1390 bp, Zea Mays
cacagtgttaattataacacgaagacaacattgcaaggagggcactaagagcactacgaggccttgtacgattgaagtcattggttgagggtaattcagttaagcgtcaatctgcaagcactctgcgctgtatgcaaactctatcgcgggtgcagtcacaaatacgatctaggagagcaaagatgtccgaggagaaccaggccctccaacgccagctcctacttaaacaggaactggagaatttcagaatgggtgagaactgggacgacagcactcaatccaaggagcaaatcgaggcaagcctaataagcaggcaagaggcagcgataagaagagaaagagctcttgcatatgcattttcacatcagtggaagagcacatcaagatctgcgaacccaatgtttgtagacccaaataacttgcagtggggctggagctggttggagcgctggatggcagcaaaaccttgggagggacgcaatgggaccgacaaggagagcaacattgatcgcggctccgtcaagaatatgagcttgaaccttggagttggagagggtgagatcacaaaagctttcaaccgccgggactcaaagccagagaagccatcaccaccgactccaaaaccggcccgtccagcttccaggcaatccccttcgacgccctctgctagagtggccccaatacctgcgaggaggaaatccagcacgccaaagaatgggctttcacaggtggacgatgacgtgaggagcgtgctcagtgtgcagtctgagcgaccaaggaggcacagcatagccacgacgtcgaccatgcgggacgatgagagcctcgcgagctccccgtcgctcccgagctacatggttcccacagaatctgcgagggccaaatctcgcacagcaacggccaatggcgcagagacgcctgagaaaggaggctctgctggaccagtcaagaagaggttgtctttccaaggtggagctgcggctgcctcaccgatgcgacggcattctggccctcccaaggtggagagcgctgtgaaggacattgctgcgccaccacagcctgaggccttggtagccaatggtggtggaagcaagtgacttgtattgacaagttccaggatgggggagcgggttatggtcttatggagggacatgtttcatccgtgaacagaagttaagagtggtgccggatctacgaatggtttgaattgttttcccgttacaaccacattgtttgctgtataagattcactgtacctgccagttggttccatttgttgttttctgtaaaacaaacatcaatttgtcactagaatctgtgatgcttgtatgtaaacaggtcctctatttatgtgagccatatatttcattttcagaagattccttgtgct

SEQ ID NO: 60954 - DNA, 1673 bp, Zea Mays
cccaattccgaagaatccagtcagaggctaaggaggaaatcagcagctagcaacccagcaccggtagatctgaccccatctacctccctggaagtcaatgtttcggtgccaccccctccggctcctcctccagttcctcgccagaccgacgaggtcagggtccccgaagccgagcaggagcagagcaagcatgtcaccctggaggaggcccctgctgctgctgctgccccagcacaggcgtcggtgctgccacctggtgcgccaaccgaagagctcgccgcaatcaagatccagaccgccttccgaggttacctggcaaggagggcactaagagcactacgaggccttgtacgattgaagtcattggttgagggtaattcagttaagcgtcaatctgcaagcactctgcgctgtatgcaaactctatcgcgggtgcagtcacaaatacgatctaggagagcaaagatgtccgaggagaaccaggccctccaacgccagctcctacttaaacaggaactggagaatttcagaatgggtgagaactgggacgacagcactcaatccaaggagcaaatcgaggcaagcctaataagcaggcaagaggcagcgataagaagagaaagagctcttgcatatgcattttcacatcagtggaagagcacatcaagatctgcgaacccaatgtttgtagacccaaataacttgcagtggggctggagctggttggagcgctggatggcagcaaaaccttgggagggacgcaatgggaccgacaaggagagcaacattgatcgcggctccgtcaagaatatgagcttgaaccttggagttggagagggtgagatcacaaaagctttcaaccgccgggactcaaagccagagaagccatcaccaccgactccaaaaccggcccgtccagcttccaggcaatccccttcgacgccctctgctagagtggccccaatacctgcgaggaggaaatccagcacgccaaagaatgggctttcacaggtggacgatgacgtgaggagcgtgctcagtgtgcagtctgagcgaccaaggaggcacagcatagccacgacgtcgaccatgcgggacgatgagagcctcgcgagctccccgtcgctcccgagctacatggttcccacagaatctgcgagggccaaatctcgcacagcaacggccaatggcgcagagacgcctgagaaaggaggctctgctggaccagtcaagaagaggttgtctttccaaggtggagctgcggctgcctcaccgatgcgacggcattctggccctcccaaggtggagagcgctgtgaaggacattgctgcgccaccacagcctgaggccttggtagccaatggtggtggaagcaagtgacttgtattgacaagttccaggatgggggagcgggttatggtcttatggagggacatgtttcatccgtgaacagaagttaagagtggtgccggatctacgaatggtttgaattgttttcccgttacaaccacattgtttgctgtataagattcactgtacctgccagttggttccatttgttgttttctgtaaaacaaacatcaatttgtcactagaatctgtgatgcttgtatgtaaacaggtcctctatttatgtgagccatatatttcattttcagaagattccttgtgct

SEQ ID NO: 60955 - DNA, 2218 bp, Zea Mays
gatccgctgtgtccccagctgtccaaagtcccactcccagcttccctccccctaaaaaactctcacacatcaccgcgagagaggaggctgagccgcggaggagcagcggcgcatcgcaacactaaccaaaggtacacacacgcttccctcctgcgcttctccctccctccgcgactgctcccacgcagctgttgccctccggaaatccaaagctcccggcctcctgcactgcgtccctgtcaggcctgctaagctccagccaaaaaatcgttggcctcggtctggtgcctgctcctcctgccgtcctcgctcctccccacctcccgcggcctcccacgcgacatgattgcattgcgggctgccgcggagctcagctctcctgtcctgccaccaccacgccgctgacgatgccttcctctcgcctgcctctgcctgcgcacaaccgaaacggtgccgagccagggtgactgttccgaggagcgtggcgtggacccatggggaagaagggcaagtggttcggcgccgtcaagaaggtcttcagccccgaatccaaggagaagaaagaggagaggctaaggaggaaatcagcagctagcaacccagcaccggtagatctgaccccatctacctccctggaagtcaatgtttcggtgccaccccctccggctcctcctccagttcctcgccagaccgacgaggtcagggtccccgaagccgagcaggagcagagcaagcatgtcaccctggaggaggcccctgctgctgctgctgccccagcacaggcgtcggtgctgccacctggtgcgccaaccgaagagctcgccgcaatcaagatccagaccgccttccgaggttacctggcaaggagggcactaagagcactacgaggccttgtacgattgaagtcattggttgagggtaattcagttaagcgtcaatctgcaagcactctgcgctgtatgcaaactctatcgcgggtgcagtcacaaatacgatctaggagagcaaagatgtccgaggagaaccaggccctccaacgccagctcctacttaaacaggaactggagaatttcagaatgggtgagaactgggacgacagcactcaatccaaggagcaaatcgaggcaagcctaataagcaggcaagaggcagcgataagaagagaaagagctcttgcatatgcattttcacatcagtggaagagcacatcaagatctgcgaacccaatgtttgtagacccaaataacttgcagtggggctggagctggttggagcgctggatggcagcaaaaccttgggagggacgcaatgggaccgacaaggagagcaacattgatcgcggctccgtcaagaatatgagcttgaaccttggagttggagagggtgagatcacaaaagctttcaaccgccgggactcaaagccagagaagccatcaccaccgactccaaaaccggcccgtccagcttccaggcaatccccttcgacgccctctgctagagtggccccaatacctgcgaggaggaaatccagcacgccaaagaatgggctttcacaggtggacgatgacgtgaggagcgtgctcagtgtgcagtctgagcgaccaaggaggcacagcatagccacgacgtcgaccatgcgggacgatgagagcctcgcgagctccccgtcgctcccgagctacatggttcccacagaatctgcgagggccaaatctcgcacagcaacggccaatggcgcagagacgcctgagaaaggaggctctgctggaccagtcaagaagaggttgtctttccaaggtggagctgcggctgcctcaccgatgcgacggcattctggccctcccaaggtggagagcgctgtgaaggacattgctgcgccaccacagcctgaggccttggtagccaatggtggtggaagcaagtgacttgtattgacaagttccaggatgggggagcgggttatggtcttatggagggacatgtttcatccgtgaacagaagttaagagtggtgccggatctacgaatggtttgaattgttttcccgttacaaccacattgtttgctgtataagattcactgtacctgccagttggttccatttgttgttttctgtaaaacaaacatcaatttgtcactagaatctgtgatgcttgtatgtaaacaggtcctctatttatgtgagccatatatttcattttcagaagattccttgtgct

SEQ ID NO: 60956 - DNA, 1951 bp, Zea Mays
cctcgatccgctgtgtccccagctgtccaaagtcccactcccagcttccctccccctaaaaaactctcacacatcaccgcgagagaggaggctgagccgcggaggagcagcggcgcatcgcaacactaaccaaagatactgataggtggtctggttcgtgacttgttcagtcctcctctccaggtgccgagccagggtgactgttccgaggagcgtggcgtggacccatggggaagaagggcaagtggttcggcgccgtcaagaaggtcttcagccccgaatccaaggagaagaaagaggagaggctaaggaggaaatcagcagctagcaacccagcaccggtagatctgaccccatctacctccctggaagtcaatgtttcggtgccaccccctccggctcctcctccagttcctcgccagaccgacgaggtcagggtccccgaagccgagcaggagcagagcaagcatgtcaccctggaggaggcccctgctgctgctgctgccccagcacaggcgtcggtgctgccacctggtgcgccaaccgaagagctcgccgcaatcaagatccagaccgccttccgaggttacctggcaaggagggcactaagagcactacgaggccttgtacgattgaagtcattggttgagggtaattcagttaagcgtcaatctgcaagcactctgcgctgtatgcaaactctatcgcgggtgcagtcacaaatacgatctaggagagcaaagatgtccgaggagaaccaggccctccaacgccagctcctacttaaacaggaactggagaatttcagaatgggtgagaactgggacgacagcactcaatccaaggagcaaatcgaggcaagcctaataagcaggcaagaggcagcgataagaagagaaagagctcttgcatatgcattttcacatcagtggaagagcacatcaagatctgcgaacccaatgtttgtagacccaaataacttgcagtggggctggagctggttggagcgctggatggcagcaaaaccttgggagggacgcaatgggaccgacaaggagagcaacattgatcgcggctccgtcaagaatatgagcttgaaccttggagttggagagggtgagatcacaaaagctttcaaccgccgggactcaaagccagagaagccatcaccaccgactccaaaaccggcccgtccagcttccaggcaatccccttcgacgccctctgctagagtggccccaatacctgcgaggaggaaatccagcacgccaaagaatgggctttcacaggtggacgatgacgtgaggagcgtgctcagtgtgcagtctgagcgaccaaggaggcacagcatagccacgacgtcgaccatgcgggacgatgagagcctcgcgagctccccgtcgctcccgagctacatggttcccacagaatctgcgagggccaaatctcgcacagcaacggccaatggcgcagagacgcctgagaaaggaggctctgctggaccagtcaagaagaggttgtctttccaaggtggagctgcggctgcctcaccgatgcgacggcattctggccctcccaaggtggagagcgctgtgaaggacattgctgcgccaccacagcctgaggccttggtagccaatggtggtggaagcaagtgacttgtattgacaagttccaggatgggggagcgggttatggtcttatggagggacatgtttcatccgtgaacagaagttaagagtggtgccggatctacgaatggtttgaattgttttcccgttacaaccacattgtttgctgtataagattcactgtacctgccagttggttccatttgttgttttctgtaaaacaaacatcaatttgtcactagaatctgtgatgcttgtatgtaaacaggtcctctatttatgtgagccatatatttcattttcagaagattccttgtgct

SEQ ID NO: 60957 - DNA, 1612 bp, Zea Mays
cctcgatccgctgtgtccccagctgtccaaagtcccactcccagcttccctccccctaaaaaactctcacacatcaccgcgagagaggaggctgagccgcggaggagcagcggcgcatcgcaacactaaccaaaggtgccgagccagggtgactgttccgaggagcgtggcgtggacccatggggaagaagggcaagtggttcggcgccgtcaagaaggtcttcagccccgaatccaaggagaagaaagaggaggcaaggagggcactaagagcactacgaggccttgtacgattgaagtcattggttgagggtaattcagttaagcgtcaatctgcaagcactctgcgctgtatgcaaactctatcgcgggtgcagtcacaaatacgatctaggagagcaaagatgtccgaggagaaccaggccctccaacgccagctcctacttaaacaggaactggagaatttcagaatgggtgagaactgggacgacagcactcaatccaaggagcaaatcgaggcaagcctaataagcaggcaagaggcagcgataagaagagaaagagctcttgcatatgcattttcacatcagtggaagagcacatcaagatctgcgaacccaatgtttgtagacccaaataacttgcagtggggctggagctggttggagcgctggatggcagcaaaaccttgggagggacgcaatgggaccgacaaggagagcaacattgatcgcggctccgtcaagaatatgagcttgaaccttggagttggagagggtgagatcacaaaagctttcaaccgccgggactcaaagccagagaagccatcaccaccgactccaaaaccggcccgtccagcttccaggcaatccccttcgacgccctctgctagagtggccccaatacctgcgaggaggaaatccagcacgccaaagaatgggctttcacaggtggacgatgacgtgaggagcgtgctcagtgtgcagtctgagcgaccaaggaggcacagcatagccacgacgtcgaccatgcgggacgatgagagcctcgcgagctccccgtcgctcccgagctacatggttcccacagaatctgcgagggccaaatctcgcacagcaacggccaatggcgcagagacgcctgagaaaggaggctctgctggaccagtcaagaagaggttgtctttccaaggtggagctgcggctgcctcaccgatgcgacggcattctggccctcccaaggtggagagcgctgtgaaggacattgctgcgccaccacagcctgaggccttggtagccaatggtggtggaagcaagtgacttgtattgacaagttccaggatgggggagcgggttatggtcttatggagggacatgtttcatccgtgaacagaagttaagagtggtgccggatctacgaatggtttgaattgttttcccgttacaaccacattgtttgctgtataagattcactgtacctgccagttggttccatttgttgttttctgtaaaacaaacatcaatttgtcactagaatctgtgatgcttgtatgtaaacaggtcctctatttatgtgagccatatatttcattttcagaagattccttgtgct

SEQ ID NO: 60958 - DNA, 1204 bp, Zea Mays
ctcctgtctgttccctcggctggctctggctgctcatctcgccaacatatatagtgttagaaatttcaaagatcgatattgggtcaaggctaatatttggattataatttttagctatgttggtaactacttctggacacattacttcttcacagttcttggcgcgtcatatacttttccatcatggaggatgaataatgtacctcatacgacatttctcctgacccatgcttgtttcctgttctatcatatggcatcaaatatgacacttcgtagattgcgccattctacagctcatttaccacagtctatttgctggttatttgaagctgcatggattttagcactgtcatacttcatagcgtacctggagaccctagccattgcaaatttcccgtactatgaattcgttgaccgggatataatgtacaaagtaggttccttgttctacgcaatatacttcatcgtcagcttcccaatgttttcaaggattgacgagaaagacgagaagtggagcctgtccagggtagccgtcgactctctgggcgcagcaatgctggtgacgataatactggacctatggcgcatatttctggggccaatagttcccgtcccagagtcgaggcagtgtggccaaccagggctcgcatggttccaagcgcagaacggaagcacctgattcagtgaagctgcaagttctgcgtttccacttgaatacttcatcatcacctagcattcaccgaggcggagatcttagagcaataaccctcgagagaaatcatggcctcactccttttgataaatagctgtgccttctgtggccggatgcaattgtgcaaatgccactttcagtagttatatttgtatgttttctccgtttggtgaattacagagagatatgtctgtaacgtgaacaagatcatgctgttctaattcctgaaactctatgtggtgctttgtgatcggattatttttaggtgtcgtttgcttcgttggggtgtaggtgtaaccgatttgattacagcggcatccgattacgttgttgcattgtttgagccacaacttttaatgtgctaccatgtatgtaatcatatacgaactaaaatgcagtgttatctagtatgcctcccaccaaagtgtaatgcgataccagaacttacctgatctgaaccaaacaatataaataatagcttactttcttttc

SEQ ID NO: 60959 - DNA, 1160 bp, Zea Mays
cccccctcctcctgtctgttccctcggctggctctggctgctcatctcgccaacatatgcagatagtgttagaaatttcaaagatcgatattgggtcaaggctaatatttggattataatttttagctatgttggtaactacttctggacacattacttcttcacagttcttggcgcgtcatatacttttccatcatggaggatgaataatgtacctcatacgacatttctcctgacccatgcttgtttcctgttctatcatatggcatcaaatatgacacttcgtagattgcgccattctacagctcatttaccacagtctatttgctggttatttgaagctgcatggattttagcactgtcatacttcatagcgtacctggagaccctagccattgcaaatttcccgtactatgaattcgttgaccgggatataatgtacaaagattgacgagaaagacgagaagtggagcctgtccagggtagccgtcgactctctgggcgcagcaatgctggtgacgataatactggacctatggcgcatatttctggggccaatagttcccgtcccagagtcgaggcagtgtggccaaccagggctcgcatggttccaagcgcagaacggaagcacctgattcagtgaagctgcaagttctgcgtttccacttgaatacttcatcatcacctagcattcaccgaggcggagatcttagagcaataaccctcgagagaaatcatggcctcactccttttgataaatagctgtgccttctgtggccggatgcaattgtgcaaatgccactttcagtagttatatttgtatgttttctccgtttggtgaattacagagagatatgtctgtaacgtgaacaagatcatgctgttctaattcctgaaactctatgtggtgctttgtgatcggattatttttaggtgtcgtttgcttcgttggggtgtaggtgtaaccgatttgattacagcggcatccgattacgttgttgcattgtttgagccacaacttttaatgtgctaccatgtatgtaatcatatacgaactaaaatgcagtgttatctagtatgcctcccaccaaagtgtaatgcgataccagaacttacctgatctgaaccaaacaatataaataatagcttactttcttttc

SEQ ID NO: 60960 - DNA, 2565 bp, Zea Mays
gtttttggcttgttctcccactaacgcttggcgactcacgagtcgagggtttctctcctgcgcggcggctacctctctccacggcggcggcgggcgatcctgcagatcccgcggctccctccgcgattcgagtcagactcagatgggggaaggcacagagagcggcggcggggcgaccacagcgccgcctctgaggtatataaggtgctacaagtgcgggttctgcgacgtggtccggtccaagaagtgcttgctccgcgcccacgtgcttgagcaccacaaggatgaggtggatgctttggggggttactgggaaggtggagatgctggtccgcgcaaagagatcagccgtgcgtgcgaacagtgcgggatgagcttcaagaagcaggcgcatctgaagcaacatatgcagagccattcgctcgagatgtgtgaagcattggatctcaaagaactccaaaatgcgagaaggccttgaacggactagtaccaggatggggagaccctcctgagaagctccatcaagagttccttcattcacgctattcttcaggttgtgtgttctgagctattctgagctgcttgctgctttttttgttattatgttcctgtcacatgacatatgctaaaggtctagtctgagattgcgatgccacttttttcaacaagttgggcgtctgctgttctagtcatatttgataattgatgaatttacactgcaatgctgtttgagtatatctagctgtcaccgtttgatggccctcattattgacaggatagatttagcaggcatagagagacacaattcctgttctgcatagtttatgtgctcgactttagttatgtgttcactgaaatgattggatcatgatcttccttagttgaattatacatttcatgcaaaaatcaaattaattttcatttgaaggtgagttatgcggatacggtgtgctgctatttgcccctgtatttggggactggtgtacgacatttgatttgctggtttttgtaggcaatttgttgacatatgaatgcgtgaagcattggatcccaaagaactccaaaatgcgataaggccttgaatggactagtatcaggattgggagaccatcctgagaagctccatcaagcatgccttgttcacgcgtttcttaagaggcccttttcctgcactgttgatggttgcccctttagctatagcaggaaggatcatttgaacagacatttacttactcatgaagggaaactatttgtgtgccctgtcgaaggatgtggccgtaagttcaatatcaagggtaatatgcagagacatgttcaggaaatccacaaagatgtctctccttgtgaaagcaagaaagaattcatctgtccaaaggttaactgtgggaaggctttcaaatatgcttctaagttaaagaagcacgaagaatcacatgtccagctggaatacacagaagttatgtgctgtgagccaggctgcatgaagttcttttcaaacatggaatgcctgaaggcgcataaccaatcttgccatcaatatgttcagtgtgatatctgtggtacgaaacagctaaagaagaatttccagcgccatcatcggatgcatgaaggttcctgcgtcactgagagggttaaatgccacatcgaggactgcaaatgttcgttctcgaagaaatccaatttggacaagcatgttaaggcggtacatgagcagcgtcgtccttttgtgtgccaattctctgggtgtggcaagaggttttcttacaagcacgtaagggacaatcatgagaagtcaagcgctcatgtgcacactgagggtgattttgtcgaggctgatgagcagcggccacgttcagtaggtgggtgcaagaggaaacccgtatctgttgagagtttgatgcgtaagagggtagccgctcctgacgatgggcctgctcatgctgatgcaactgaatatttgagatggcttctgtcggtttgattggacgttcaagtgcactttgtgtagttggaaacatcagcgatttacttggcatgtataggaagatgaatgtctctagtatgttatgtaaatgtttatgtacggtatcagaaatacagatcattggacctcaattataaaggcaatatgctgtattggcaagatcttgaatgtaagagcggttgctcatgatcattagatctatgtgtcttcagcacagcttggcaacatgttttggtatgttcgcagttgcagtgtctttgcctttttttgcctcctgctggttgcaggtgaaaattggattcatgattcttgaatgctcttatgtaacaacaaaaatatctgttcagttctcattgtgcagaaccacagcactcttcattccgatttgcagatgcacgtgaccaaaaaagataatttgcagatgcaccatgaacccgtggcaccagatgcccgtcagcagctggcacccgtccagctcgcgccggagagcctccaggcggaccagctccgccgccccgcggatcgattggactagcgacgaggccgagatgcgcacggacgtcatcggcggcggcgatggc

SEQ ID NO: 60961 - DNA, 1829 bp, Zea Mays
gtttttggcttgttctcccactaacgcttggcgactcacgagtcgagggtttctctcctgcgcggcggctacctctctccacggcggcggcgggcgatcctgcagatcccgcggctccctccgcgattcgaggatgaggtggatgctttggggggttactgggaaggtggagatgctggtccgcgcaaagagatcagccgtgcgtgcgaacagtgcgggatgagcttcaagaagcaggcgcatctgaagcaacatatgcagagccattcgctcgaggcaatttgttgacatatgaatgcgtgaagcattggatcccaaagaactccaaaatgcgataaggccttgaatggactagtatcaggattgggagaccatcctgagaagctccatcaagcatgccttgttcacgcgtttcttaagaggcccttttcctgcactgttgatggttgcccctttagctatagcaggaaggatcatttgaacagacatttacttactcatgaagggaaactatttgtgtgccctgtcgaaggatgtggccgtaagttcaatatcaagggtaatatgcagagacatgttcaggaaatccacaaagatgtctctccttgtgaaagcaagaaagaattcatctgtccaaaggttaactgtgggaaggctttcaaatatgcttctaagttaaagaagcacgaagaatcacatgtccagctggaatacacagaagttatgtgctgtgagccaggctgcatgaagttcttttcaaacatggaatgcctgaaggcgcataaccaatcttgccatcaatatgttcagtgtgatatctgtggtacgaaacagctaaagaagaatttccagcgccatcatcggatgcatgaaggttcctgcgtcactgagagggttaaatgccacatcgaggactgcaaatgttcgttctcgaagaaatccaatttggacaagcatgttaaggcggtacatgagcagcgtcgtccttttgtgtgccaattctctgggtgtggcaagaggttttcttacaagcacgtaagggacaatcatgagaagtcaagcgctcatgtgcacactgagggtgattttgtcgaggctgatgagcagcggccacgttcagtaggtgggtgcaagaggaaacccgtatctgttgagagtttgatgcgtaagagggtagccgctcctgacgatgggcctgctcatgctgatgcaactgaatatttgagatggcttctgtcggtttgattggacgttcaagtgcactttgtgtagttggaaacatcagcgatttacttggcatgtataggaagatgaatgtctctagtatgttatgtaaatgtttatgtacggtatcagaaatacagatcattggacctcaattataaaggcaatatgctgtattggcaagatcttgaatgtaagagcggttgctcatgatcattagatctatgtgtcttcagcacagcttggcaacatgttttggtatgttcgcagttgcagtgtctttgcctttttttgcctcctgctggttgcaggtgaaaattggattcatgattcttgaatgctcttatgtaacaacaaaaatatctgttcagttctcattgtgcagaaccacagcactcttcattccgatttgcagatgcacgtgaccaaaaaagataatttgcagatgcaccatgaacccgtggcaccagatgcccgtcagcagctggcacccgtccagctcgcgccggagagcctccaggcggaccagctccgccgccccgcggatcgattggactagcgacgaggccgagatgcgcacggacgtcatcggcggcggcgatggc

SEQ ID NO: 60962 - DNA, 3075 bp, Zea Mays
gtttttggcttgttctcccactaacgcttggcgactcacgagtcgagggtttctctcctgcgcggcggctacctctctccacggcggcggcgggcgatcctgcagatcccgcggctccctccgcgattcgagactcagatgggggaaggcacagagagcggcggcggggcgaccacagcgccgcctctgaggtatataaggtgctacaagtgcgggttctgcgacgtggtccggtccaagaagtgcttgctccgcgcccacgtgcttgagcaccacaaggatgaggtggatgctttggggggttactgggaaggtggagatgctggtccgcgcaaagagatcagccgtgcgtgcgaacagtgcgggatgagcttcaagaagcaggcgcatctgaagcaacatatgcagagccattcgctcgaggtactgatctggctgcttatgttgggttttttggtatattgctcagtgaatgctcaggctactagtgctcgcctggtttgttactatccgcttaatgtttattgtgtgagaaaaggccgaaagcgagatacatgctggtttgactcttttggtgtggttgctacaaccctgttataataacaattggttcgatggatgactctgtatacctcatggtctttctttagtccattgtatgttattattaattatgctgacttttgcagtctgtttgttcagatacagatgtgtgaagcattggatctcaaagaactccaaaatgcgagaaggccttgaacggactagtaccaggatggggagaccctcctgagaagctccatcaagagttccttcattcacgctattcttcaggttgtgtgttctgagctattctgagctgcttgctgctttttttgttattatgttcctgtcacatgacatatgctaaaggtctagtctgagattgcgatgccacttttttcaacaagttgggcgtctgctgttctagtcatatttgataattgatgaatttacactgcaatgctgtttgagtatatctagctgtcaccgtttgatggccctcattattgacaggatagatttagcaggcatagagagacacaattcctgttctgcatagtttatgtgctcgactttagttatgtgttcactgaaatgattggatcatgatcttccttagttgaattatacatttcatgcaaaaatcaaattaattttcatttgaaggtgagttatgcggatacggtgtgctgctatttgcccctgtatttggggactggtgtacgacatttgatttgctggtttttgtaggcaatttgttgacatatgaatgcgtgaagcattggatcccaaagaactccaaaatgcgataaggccttgaatggactagtatcaggattgggagaccatcctgagaagctccatcaagcatgccttgttcacgcgtttcttaaggtttgctcatttcgttccagccttctcattctaagatttttccttttatgttattatttacttgcacttttataattgtattttctattattttcacaccacttaaagctcatgttgtagcatgcctggttgcactttgtggtactgtttgcatctctattactttatttgtatcaaacctttttttaggtactatatagtgatacatgtctttccaaaactactgcagaggcccttttcctgcactgttgatggttgcccctttagctatagcaggaaggatcatttgaacagacatttacttactcatgaagggaaactatttgtgtgccctgtcgaaggatgtggccgtaagttcaatatcaagggtaatatgcagagacatgttcaggaaatccacaaagatgtctctccttgtgaaagcaagaaagaattcatctgtccaaaggttaactgtgggaaggctttcaaatatgcttctaagttaaagaagcacgaagaatcacatgtccagctggaatacacagaagttatgtgctgtgagccaggctgcatgaagttcttttcaaacatggaatgcctgaaggcgcataaccaatcttgccatcaatatgttcagtgtgatatctgtggtacgaaacagctaaagaagaatttccagcgccatcatcggatgcatgaaggttcctgcgtcactgagagggttaaatgccacatcgaggactgcaaatgttcgttctcgaagaaatccaatttggacaagcatgttaaggcggtacatgagcagcgtcgtccttttgtgtgccaattctctgggtgtggcaagaggttttcttacaagcacgtaagggacaatcatgagaagtcaagcgctcatgtgcacactgagggtgattttgtcgaggctgatgagcagcggccacgttcagtaggtgggtgcaagaggaaacccgtatctgttgagagtttgatgcgtaagagggtagccgctcctgacgatgggcctgctcatgctgatgcaactgaatatttgagatggcttctgtcggtttgattggacgttcaagtgcactttgtgtagttggaaacatcagcgatttacttggcatgtataggaagatgaatgtctctagtatgttatgtaaatgtttatgtacggtatcagaaatacagatcattggacctcaattataaaggcaatatgctgtattggcaagatcttgaatgtaagagcggttgctcatgatcattagatctatgtgtcttcagcacagcttggcaacatgttttggtatgttcgcagttgcagtgtctttgcctttttttgcctcctgctggttgcaggtgaaaattggattcatgattcttgaatgctcttatgtaacaacaaaaatatctgttcagttctcattgtgcagaaccacagcactcttcattccgatttgcagatgcacgtgaccaaaaaagataatttgcagatgcaccatgaacccgtggcaccagatgcccgtcagcagctggcacccgtccagctcgcgccggagagcctccaggcggaccagctccgccgccccgcggatcgattggactagcgacgaggccgagatgcgcacggacgtcatcggcggcggcgatggc

SEQ ID NO: 60963 - DNA, 1964 bp, Zea Mays
gtttttggcttgttctcccactaacgcttggcgactcacgagtcgagggtttctctcctgcgcggcggctacctctctccacggcggcggcgggcgatcctgcagatcccgcggctccctccgcgattcgagactcagatgggggaaggcacagagagcggcggcggggcgaccacagcgccgcctctgaggtatataaggtgctacaagtgcgggttctgcgacgtggtccggtccaagaagtgcttgctccgcgcccacgtgcttgagcaccacaaggatgaggtggatgctttggggggttactgggaaggtggagatgctggtccgcgcaaagagatcagccgtgcgtgcgaacagtgcgggatgagcttcaagaagcaggcgcatctgaagcaacatatgcagagccattcgctcgagatacagatgtgtgaagcattggatctcaaagaactccaaaatgcgagaaggccttgaacggactagtaccaggatggggagaccctcctgagaagctccatcaagagttccttcattcacgctattcttcagaggcccttttcctgcactgttgatggttgcccctttagctatagcaggaaggatcatttgaacagacatttacttactcatgaagggaaactatttgtgtgccctgtcgaaggatgtggccgtaagttcaatatcaagggtaatatgcagagacatgttcaggaaatccacaaagatgtctctccttgtgaaagcaagaaagaattcatctgtccaaaggttaactgtgggaaggctttcaaatatgcttctaagttaaagaagcacgaagaatcacatgtccagctggaatacacagaagttatgtgctgtgagccaggctgcatgaagttcttttcaaacatggaatgcctgaaggcgcataaccaatcttgccatcaatatgttcagtgtgatatctgtggtacgaaacagctaaagaagaatttccagcgccatcatcggatgcatgaaggttcctgcgtcactgagagggttaaatgccacatcgaggactgcaaatgttcgttctcgaagaaatccaatttggacaagcatgttaaggcggtacatgagcagcgtcgtccttttgtgtgccaattctctgggtgtggcaagaggttttcttacaagcacgtaagggacaatcatgagaagtcaagcgctcatgtgcacactgagggtgattttgtcgaggctgatgagcagcggccacgttcagtaggtgggtgcaagaggaaacccgtatctgttgagagtttgatgcgtaagagggtagccgctcctgacgatgggcctgctcatgctgatgcaactgaatatttgagatggcttctgtcggtttgattggacgttcaagtgcactttgtgtagttggaaacatcagcgatttacttggcatgtataggaagatgaatgtctctagtatgttatgtaaatgtttatgtacggtatcagaaatacagatcattggacctcaattataaaggcaatatgctgtattggcaagatcttgaatgtaagagcggttgctcatgatcattagatctatgtgtcttcagcacagcttggcaacatgttttggtatgttcgcagttgcagtgtctttgcctttttttgcctcctgctggttgcaggtgaaaattggattcatgattcttgaatgctcttatgtaacaacaaaaatatctgttcagttctcattgtgcagaaccacagcactcttcattccgatttgcagatgcacgtgaccaaaaaagataatttgcagatgcaccatgaacccgtggcaccagatgcccgtcagcagctggcacccgtccagctcgcgccggagagcctccaggcggaccagctccgccgccccgcggatcgattggactagcgacgaggccgagatgcgcacggacgtcatcggcggcggcgatggc

SEQ ID NO: 60964 - DNA, 2566 bp, Zea Mays
gtttttggcttgttctcccactaacgcttggcgactcacgagtcgagggtttctctcctgcgcggcggctacctctctccacggcggcggcgggcgatcctgcagatcccgcggctccctccgcgattcgagtcagactcagatgggggaaggcacagagagcggcggcggggcgaccacagcgccgcctctgaggtatataaggtgctacaagtgcgggttctgcgacgtggtccggtccaagaagtgcttgctccgcgcccacgtgcttgagcaccacaaggatgaggtggatgctttggggggttactgggaaggtggagatgctggtccgcgcaaagagatcagccgtgcgtgcgaacagtgcgggatgagcttcaagaagcaggcgcatctgaagcaacatatgcagagccattcgctcgagatacagatgtgtgaagcattggatctcaaagaactccaaaatgcgagaaggccttgaacggactagtaccaggatggggagaccctcctgagaagctccatcaagagttccttcattcacgctattcttcaggttgtgtgttctgagctattctgagctgcttgctgctttttttgttattatgttcctgtcacatgacatatgctaaaggtctagtctgagattgcgatgccacttttttcaacaagttgggcgtctgctgttctagtcatatttgataattgatgaatttacactgcaatgctgtttgagtatatctagctgtcaccgtttgatggccctcattattgacaggatagatttagcaggcatagagagacacaattcctgttctgcatagtttatgtgctcgactttagttatgtgttcactgaaatgattggatcatgatcttccttagttgaattatacatttcatgcaaaaatcaaattaattttcatttgaaggtgagttatgcggatacggtgtgctgctatttgcccctgtatttggggactggtgtacgacatttgatttgctggtttttgtaggcaatttgttgacatatgaatgcgtgaagcattggatcccaaagaactccaaaatgcgataaggccttgaatggactagtatcaggattgggagaccatcctgagaagctccatcaagcatgccttgttcacgcgtttcttaagaggcccttttcctgcactgttgatggttgcccctttagctatagcaggaaggatcatttgaacagacatttacttactcatgaagggaaactatttgtgtgccctgtcgaaggatgtggccgtaagttcaatatcaagggtaatatgcagagacatgttcaggaaatccacaaagatgtctctccttgtgaaagcaagaaagaattcatctgtccaaaggttaactgtgggaaggctttcaaatatgcttctaagttaaagaagcacgaagaatcacatgctggaatacacagaagttatgtgctgtgagccaggctgcatgaagttcttttcaaacatggaatgcctgaaggcgcataaccaatcttgccatcaatatgttcagtgtgatatctgtggtacgaaacagctaaagaagaatttccagcgccatcatcggatgcatgaaggttcctgcgtcactgagagggttaaatgccacatcgaggactgcaaatgttcgttctcgaagaaatccaatttggacaagcatgttaaggcggtacatgagcagcgtcgtccttttgtgtgccaattctctgggtgtggcaagaggttttcttacaagcacgtaagggacaatcatgagaagtcaagcgctcatgtgcacactgagggtgattttgtcgaggctgatgagcagcggccacgttcagtaggtgggtgcaagaggaaacccgtatctgttgagagtttgatgcgtaagagggtagccgctcctgacgatgggcctgctcatgctgatgcaactgaatatttgagatggcttctgtcggtttgattggacgttcaagtgcactttgtgtagttggaaacatcagcgatttacttggcatgtataggaagatgaatgtctctagtatgttatgtaaatgtttatgtacggtatcagaaatacagatcattggacctcaattataaaggcaatatgctgtattggcaagatcttgaatgtaagagcggttgctcatgatcattagatctatgtgtcttcagcacagcttggcaacatgttttggtatgttcgcagttgcagtgtctttgcctttttttgcctcctgctggttgcaggtgaaaattggattcatgattcttgaatgctcttatgtaacaacaaaaatatctgttcagttctcattgtgcagaaccacagcactcttcattccgatttgcagatgcacgtgaccaaaaaagataatttgcagatgcaccatgaacccgtggcaccagatgcccgtcagcagctggcacccgtccagctcgcgccggagagcctccaggcggaccagctccgccgccccgcggatcgattggactagcgacgaggccgagatgcgcacggacgtcatcggcggcggcgatggc

SEQ ID NO: 60965 - DNA, 2205 bp, Zea Mays
gtttttggcttgttctcccactaacgcttggcgactcacgagtcgagggtttctctcctgcgcggcggctacctctctccacggcggcggcgggcgatcctgcagatcccgcggctccctccgcgattcgagactcagatgggggaaggcacagagagcggcggcggggcgaccacagcgccgcctctgaggtatataaggtgctacaagtgcgggttctgcgacgtggtccggtccaagaagtgcttgctccgcgcccacgtgcttgagcaccacaaggatgaggtggatgctttggggggttactgggaaggtggagatgctggtccgcgcaaagagatcagccgtgcgtgcgaacagtgcgggatgagcttcaagaagcaggcgcatctgaagcaacatatgcagagccattcgctcgaggcaatttgttgacatatgaatgcgtgaagcattggatcccaaagaactccaaaatgcgataaggccttgaatggactagtatcaggattgggagaccatcctgagaagctccatcaagcatgccttgttcacgcgtttcttaaggtttgctcatttcgttccagccttctcattctaagatttttccttttatgttattatttacttgcacttttataattgtattttctattattttcacaccacttaaagctcatgttgtagcatgcctggttgcactttgtggtactgtttgcatctctattactttatttgtatcaaacctttttttaggtactatatagtgatacatgtctttccaaaactactgcagaggcccttttcctgcactgttgatggttgcccctttagctatagcaggaaggatcatttgaacagacatttacttactcatgaagggaaactatttgtgtgccctgtcgaaggatgtggccgtaagttcaatatcaagggtaatatgcagagacatgttcaggaaatccacaaagatgtctctccttgtgaaagcaagaaagaattcatctgtccaaaggttaactgtgggaaggctttcaaatatgcttctaagttaaagaagcacgaagaatcacatgtccagctggaatacacagaagttatgtgctgtgagccaggctgcatgaagttcttttcaaacatggaatgcctgaaggcgcataaccaatcttgccatcaatatgttcagtgtgatatctgtggtacgaaacagctaaagaagaatttccagcgccatcatcggatgcatgaaggttcctgcgtcactgagagggttaaatgccacatcgaggactgcaaatgttcgttctcgaagaaatccaatttggacaagcatgttaaggcggtacatgagcagcgtcgtccttttgtgtgccaattctctgggtgtggcaagaggttttcttacaagcacgtaagggacaatcatgagaagtcaagcgctcatgtgcacactgagggtgattttgtcgaggctgatgagcagcggccacgttcagtaggtgggtgcaagaggaaacccgtatctgttgagagtttgatgcgtaagagggtagccgctcctgacgatgggcctgctcatgctgatgcaactgaatatttgagatggcttctgtcggtttgattggacgttcaagtgcactttgtgtagttggaaacatcagcgatttacttggcatgtataggaagatgaatgtctctagtatgttatgtaaatgtttatgtacggtatcagaaatacagatcattggacctcaattataaaggcaatatgctgtattggcaagatcttgaatgtaagagcggttgctcatgatcattagatctatgtgtcttcagcacagcttggcaacatgttttggtatgttcgcagttgcagtgtctttgcctttttttgcctcctgctggttgcaggtgaaaattggattcatgattcttgaatgctcttatgtaacaacaaaaatatctgttcagttctcattgtgcagaaccacagcactcttcattccgatttgcagatgcacgtgaccaaaaaagataatttgcagatgcaccatgaacccgtggcaccagatgcccgtcagcagctggcacccgtccagctcgcgccggagagcctccaggcggaccagctccgccgccccgcggatcgattggactagcgacgaggccgagatgcgcacggacgtcatcggcggcggcgatggc

SEQ ID NO: 60966 - DNA, 2850 bp, Zea Mays
gtttttggcttgttctcccactaacgcttggcgactcacgagtcgagggtttctctcctgcgcggcggctacctctctccacggcggcggcgggcgatcctgcagatcccgcggctccctccgcgattcgagtcagactcagatgggggaaggcacagagagcggcggcggggcgaccacagcgccgcctctgaggtatataaggtgctacaagtgcgggttctgcgacgtggtccggtccaagaagtgcttgctccgcgcccacgtgcttgagcaccacaaggatgaggtggatgctttggggggttactgggaaggtggagatgctggtccgcgcaaagagatcagccgtgcgtgcgaacagtgcgggatgagcttcaagaagcaggcgcatctgaagcaacatatgcagagccattcgctcgaggtactgatctggctgcttatgttgggttttttggtatattgctcagtgaatgctcaggctactagtgctcgcctggtttgttactatccgcttaatgtttattgtgtgagaaaaggccgaaagcgagatacatgctggtttgactcttttggtgtggttgctacaaccctgttataataacaattggttcgatggatgactctgtatacctcatggtctttctttagtccattgtatgttattattaattatgctgacttttgcagtctgtttgttcagatacagatgtgtgaagcattggatctcaaagaactccaaaatgcgagaaggccttgaacggactagtaccaggatggggagaccctcctgagaagctccatcaagagttccttcattcacgctattcttcaggttgtgtgttctgagctattctgagctgcttgctgctttttttgttattatgttcctgtcacatgacatatgctaaaggtctagtctgagattgcgatgccacttttttcaacaagttgggcgtctgctgttctagtcatatttgataattgatgaatttacactgcaatgctgtttgagtatatctagctgtcaccgtttgatggccctcattattgacaggatagatttagcaggcatagagagacacaattcctgttctgcatagtttatgtgctcgactttagttatgtgttcactgaaatgattggatcatgatcttccttagttgaattatacatttcatgcaaaaatcaaattaattttcatttgaaggtgagttatgcggatacggtgtgctgctatttgcccctgtatttggggactggtgtacgacatttgatttgctggtttttgtaggcaatttgttgacatatgaatgcgtgaagcattggatcccaaagaactccaaaatgcgataaggccttgaatggactagtatcaggattgggagaccatcctgagaagctccatcaagcatgccttgttcacgcgtttcttaagaggcccttttcctgcactgttgatggttgcccctttagctatagcaggaaggatcatttgaacagacatttacttactcatgaagggaaactatttgtgtgccctgtcgaaggatgtggccgtaagttcaatatcaagggtaatatgcagagacatgttcaggaaatccacaaagatgtctctccttgtgaaagcaagaaagaattcatctgtccaaaggttaactgtgggaaggctttcaaatatgcttctaagttaaagaagcacgaagaatcacatgtccagctggaatacacagaagttatgtgctgtgagccaggctgcatgaagttcttttcaaacatggaatgcctgaaggcgcataaccaatcttgccatcaatatgttcagtgtgatatctgtggtacgaaacagctaaagaagaatttccagcgccatcatcggatgcatgaaggttcctgcgtcactgagagggttaaatgccacatcgaggactgcaaatgttcgttctcgaagaaatccaatttggacaagcatgttaaggcggtacatgagcagcgtcgtccttttgtgtgccaattctctgggtgtggcaagaggttttcttacaagcacgtaagggacaatcatgagaagtcaagcgctcatgtgcacactgagggtgattttgtcgaggctgatgagcagcggccacgttcagtaggtgggtgcaagaggaaacccgtatctgttgagagtttgatgcgtaagagggtagccgctcctgacgatgggcctgctcatgctgatgcaactgaatatttgagatggcttctgtcggtttgattggacgttcaagtgcactttgtgtagttggaaacatcagcgatttacttggcatgtataggaagatgaatgtctctagtatgttatgtaaatgtttatgtacggtatcagaaatacagatcattggacctcaattataaaggcaatatgctgtattggcaagatcttgaatgtaagagcggttgctcatgatcattagatctatgtgtcttcagcacagcttggcaacatgttttggtatgttcgcagttgcagtgtctttgcctttttttgcctcctgctggttgcaggtgaaaattggattcatgattcttgaatgctcttatgtaacaacaaaaatatctgttcagttctcattgtgcagaaccacagcactcttcattccgatttgcagatgcacgtgaccaaaaaagataatttgcagatgcaccatgaacccgtggcaccagatgcccgtcagcagctggcacccgtccagctcgcgccggagagcctccaggcggaccagctccgccgccccgcggatcgattggactagcgacgaggccgagatgcgcacggacgtcatcggcggcggcgatggc

SEQ ID NO: 60967 - DNA, 3079 bp, Zea Mays
gtttttggcttgttctcccactaacgcttggcgactcacgagtcgagggtttctctcctgcgcggcggctacctctctccacggcggcggcgggcgatcctgcagatcccgcggctccctccgcgattcgagtcagactcagatgggggaaggcacagagagcggcggcggggcgaccacagcgccgcctctgaggtatataaggtgctacaagtgcgggttctgcgacgtggtccggtccaagaagtgcttgctccgcgcccacgtgcttgagcaccacaaggatgaggtggatgctttggggggttactgggaaggtggagatgctggtccgcgcaaagagatcagccgtgcgtgcgaacagtgcgggatgagcttcaagaagcaggcgcatctgaagcaacatatgcagagccattcgctcgaggtactgatctggctgcttatgttgggttttttggtatattgctcagtgaatgctcaggctactagtgctcgcctggtttgttactatccgcttaatgtttattgtgtgagaaaaggccgaaagcgagatacatgctggtttgactcttttggtgtggttgctacaaccctgttataataacaattggttcgatggatgactctgtatacctcatggtctttctttagtccattgtatgttattattaattatgctgacttttgcagtctgtttgttcagatacagatgtgtgaagcattggatctcaaagaactccaaaatgcgagaaggccttgaacggactagtaccaggatggggagaccctcctgagaagctccatcaagagttccttcattcacgctattcttcaggttgtgtgttctgagctattctgagctgcttgctgctttttttgttattatgttcctgtcacatgacatatgctaaaggtctagtctgagattgcgatgccacttttttcaacaagttgggcgtctgctgttctagtcatatttgataattgatgaatttacactgcaatgctgtttgagtatatctagctgtcaccgtttgatggccctcattattgacaggatagatttagcaggcatagagagacacaattcctgttctgcatagtttatgtgctcgactttagttatgtgttcactgaaatgattggatcatgatcttccttagttgaattatacatttcatgcaaaaatcaaattaattttcatttgaaggtgagttatgcggatacggtgtgctgctatttgcccctgtatttggggactggtgtacgacatttgatttgctggtttttgtaggcaatttgttgacatatgaatgcgtgaagcattggatcccaaagaactccaaaatgcgataaggccttgaatggactagtatcaggattgggagaccatcctgagaagctccatcaagcatgccttgttcacgcgtttcttaaggtttgctcatttcgttccagccttctcattctaagatttttccttttatgttattatttacttgcacttttataattgtattttctattattttcacaccacttaaagctcatgttgtagcatgcctggttgcactttgtggtactgtttgcatctctattactttatttgtatcaaacctttttttaggtactatatagtgatacatgtctttccaaaactactgcagaggcccttttcctgcactgttgatggttgcccctttagctatagcaggaaggatcatttgaacagacatttacttactcatgaagggaaactatttgtgtgccctgtcgaaggatgtggccgtaagttcaatatcaagggtaatatgcagagacatgttcaggaaatccacaaagatgtctctccttgtgaaagcaagaaagaattcatctgtccaaaggttaactgtgggaaggctttcaaatatgcttctaagttaaagaagcacgaagaatcacatgtccagctggaatacacagaagttatgtgctgtgagccaggctgcatgaagttcttttcaaacatggaatgcctgaaggcgcataaccaatcttgccatcaatatgttcagtgtgatatctgtggtacgaaacagctaaagaagaatttccagcgccatcatcggatgcatgaaggttcctgcgtcactgagagggttaaatgccacatcgaggactgcaaatgttcgttctcgaagaaatccaatttggacaagcatgttaaggcggtacatgagcagcgtcgtccttttgtgtgccaattctctgggtgtggcaagaggttttcttacaagcacgtaagggacaatcatgagaagtcaagcgctcatgtgcacactgagggtgattttgtcgaggctgatgagcagcggccacgttcagtaggtgggtgcaagaggaaacccgtatctgttgagagtttgatgcgtaagagggtagccgctcctgacgatgggcctgctcatgctgatgcaactgaatatttgagatggcttctgtcggtttgattggacgttcaagtgcactttgtgtagttggaaacatcagcgatttacttggcatgtataggaagatgaatgtctctagtatgttatgtaaatgtttatgtacggtatcagaaatacagatcattggacctcaattataaaggcaatatgctgtattggcaagatcttgaatgtaagagcggttgctcatgatcattagatctatgtgtcttcagcacagcttggcaacatgttttggtatgttcgcagttgcagtgtctttgcctttttttgcctcctgctggttgcaggtgaaaattggattcatgattcttgaatgctcttatgtaacaacaaaaatatctgttcagttctcattgtgcagaaccacagcactcttcattccgatttgcagatgcacgtgaccaaaaaagataatttgcagatgcaccatgaacccgtggcaccagatgcccgtcagcagctggcacccgtccagctcgcgccggagagcctccaggcggaccagctccgccgccccgcggatcgattggactagcgacgaggccgagatgcgcacggacgtcatcggcggcggcgatggc

SEQ ID NO: 60968 - DNA, 2579 bp, Zea Mays
cagtggttgtttttggcttgttctcccactaacgcttggcgactcacgagtcgagggtttctctcctgcgcggcggctacctctctccacggcggcggcgggcgatcctgcagatcccgcggctccctccgcgattcgagtcagactcagatgggggaaggcacagagagcggcggcggggcgaccacagcgccgcctctgaggtatataaggtgctacaagtgcgggttctgcgacgtggtccggtccaagaagtgcttgctccgcgcccacgtgcttgagcaccacaaggatgaggtggatgctttggggggttactgggaaggtggagatgctggtccgcgcaaagagatcagccgtgcgtgcgaacagtgcgggatgagcttcaagaagcaggcgcatctgaagcaacatatgcagagccattcgctcgagatacagatgtgtgaagcattggatctcaaagaactccaaaatgcgagaaggccttgaacggactagtaccaggatggggagaccctcctgagaagctccatcaagagttccttcattcacgctattcttcaggttgtgtgttctgagctattctgagctgcttgctgctttttttgttattatgttcctgtcacatgacatatgctaaaggtctagtctgagattgcgatgccacttttttcaacaagttgggcgtctgctgttctagtcatatttgataattgatgaatttacactgcaatgctgtttgagtatatctagctgtcaccgtttgatggccctcattattgacaggatagatttagcaggcatagagagacacaattcctgttctgcatagtttatgtgctcgactttagttatgtgttcactgaaatgattggatcatgatcttccttagttgaattatacatttcatgcaaaaatcaaattaattttcatttgaaggtgagttatgcggatacggtgtgctgctatttgcccctgtatttggggactggtgtacgacatttgatttgctggtttttgtaggcaatttgttgacatatgaatgcgtgaagcattggatcccaaagaactccaaaatgcgataaggccttgaatggactagtatcaggattgggagaccatcctgagaagctccatcaagcatgccttgttcacgcgtttcttaagaggcccttttcctgcactgttgatggttgcccctttagctatagcaggaaggatcatttgaacagacatttacttactcatgaagggaaactatttgtgtgccctgtcgaaggatgtggccgtaagttcaatatcaagggtaatatgcagagacatgttcaggaaatccacaaagatgtctctccttgtgaaagcaagaaagaattcatctgtccaaaggttaactgtgggaaggctttcaaatatgcttctaagttaaagaagcacgaagaatcacatgtccagctggaatacacagaagttatgtgctgtgagccaggctgcatgaagttcttttcaaacatggaatgcctgaaggcgcataaccaatcttgccatcaatatgttcagtgtgatatctgtggtacgaaacagctaaagaagaatttccagcgccatcatcggatgcatgaaggttcctgcgtcactgagagggttaaatgccacatcgaggactgcaaatgttcgttctcgaagaaatccaatttggacaagcatgttaaggcggtacatgagcagcgtcgtccttttgtgtgccaattctctgggtgtggcaagaggttttcttacaagcacgtaagggacaatcatgagaagtcaagcgctcatgtgcacactgagggtgattttgtcgaggctgatgagcagcggccacgttcagtaggtgggtgcaagaggaaacccgtatctgttgagagtttgatgcgtaagagggtagccgctcctgacgatgggcctgctcatgctgatgcaactgaatatttgagatggcttctgtcggtttgattggacgttcaagtgcactttgtgtagttggaaacatcagcgatttacttggcatgtataggaagatgaatgtctctagtatgttatgtaaatgtttatgtacggtatcagaaatacagatcattggacctcaattataaaggcaatatgctgtattggcaagatcttgaatgtaagagcggttgctcatgatcattagatctatgtgtcttcagcacagcttggcaacatgttttggtatgttcgcagttgcagtgtctttgcctttttttgcctcctgctggttgcaggtgaaaattggattcatgattcttgaatgctcttatgtaacaacaaaaatatctgttcagttctcattgtgcagaaccacagcactcttcattccgatttgcagatgcacgtgaccaaaaaagataatttgcagatgcaccatgaacccgtggcaccagatgcccgtcagcagctggcacccgtccagctcgcgccggagagcctccaggcggaccagctccgccgccccgcggatcgattggactagcgacgaggccgagatgcgcacggacgtcatcggcggcggcgatggc

SEQ ID NO: 60969 - DNA, 2586 bp, Zea Mays
ggcccatctcccagtggttgtttttggcttgttctcccactaacgcttggcgactcacgagtcgagggtttctctcctgcgcggcggctacctctctccacggcggcggcgggcgatcctgcagatcccgcggctccctccgcgattcgagactcagatgggggaaggcacagagagcggcggcggggcgaccacagcgccgcctctgaggtatataaggtgctacaagtgcgggttctgcgacgtggtccggtccaagaagtgcttgctccgcgcccacgtgcttgagcaccacaaggatgaggtggatgctttggggggttactgggaaggtggagatgctggtccgcgcaaagagatcagccgtgcgtgcgaacagtgcgggatgagcttcaagaagcaggcgcatctgaagcaacatatgcagagccattcgctcgagatacagatgtgtgaagcattggatctcaaagaactccaaaatgcgagaaggccttgaacggactagtaccaggatggggagaccctcctgagaagctccatcaagagttccttcattcacgctattcttcaggttgtgtgttctgagctattctgagctgcttgctgctttttttgttattatgttcctgtcacatgacatatgctaaaggtctagtctgagattgcgatgccacttttttcaacaagttgggcgtctgctgttctagtcatatttgataattgatgaatttacactgcaatgctgtttgagtatatctagctgtcaccgtttgatggccctcattattgacaggatagatttagcaggcatagagagacacaattcctgttctgcatagtttatgtgctcgactttagttatgtgttcactgaaatgattggatcatgatcttccttagttgaattatacatttcatgcaaaaatcaaattaattttcatttgaaggtgagttatgcggatacggtgtgctgctatttgcccctgtatttggggactggtgtacgacatttgatttgctggtttttgtaggcaatttgttgacatatgaatgcgtgaagcattggatcccaaagaactccaaaatgcgataaggccttgaatggactagtatcaggattgggagaccatcctgagaagctccatcaagcatgccttgttcacgcgtttcttaagaggcccttttcctgcactgttgatggttgcccctttagctatagcaggaaggatcatttgaacagacatttacttactcatgaagggaaactatttgtgtgccctgtcgaaggatgtggccgtaagttcaatatcaagggtaatatgcagagacatgttcaggaaatccacaaagatgtctctccttgtgaaagcaagaaagaattcatctgtccaaaggttaactgtgggaaggctttcaaatatgcttctaagttaaagaagcacgaagaatcacatgtccagctggaatacacagaagttatgtgctgtgagccaggctgcatgaagttcttttcaaacatggaatgcctgaaggcgcataaccaatcttgccatcaatatgttcagtgtgatatctgtggtacgaaacagctaaagaagaatttccagcgccatcatcggatgcatgaaggttcctgcgtcactgagagggttaaatgccacatcgaggactgcaaatgttcgttctcgaagaaatccaatttggacaagcatgttaaggcggtacatgagcagcgtcgtccttttgtgtgccaattctctgggtgtggcaagaggttttcttacaagcacgtaagggacaatcatgagaagtcaagcgctcatgtgcacactgagggtgattttgtcgaggctgatgagcagcggccacgttcagtaggtgggtgcaagaggaaacccgtatctgttgagagtttgatgcgtaagagggtagccgctcctgacgatgggcctgctcatgctgatgcaactgaatatttgagatggcttctgtcggtttgattggacgttcaagtgcactttgtgtagttggaaacatcagcgatttacttggcatgtataggaagatgaatgtctctagtatgttatgtaaatgtttatgtacggtatcagaaatacagatcattggacctcaattataaaggcaatatgctgtattggcaagatcttgaatgtaagagcggttgctcatgatcattagatctatgtgtcttcagcacagcttggcaacatgttttggtatgttcgcagttgcagtgtctttgcctttttttgcctcctgctggttgcaggtgaaaattggattcatgattcttgaatgctcttatgtaacaacaaaaatatctgttcagttctcattgtgcagaaccacagcactcttcattccgatttgcagatgcacgtgaccaaaaaagataatttgcagatgcaccatgaacccgtggcaccagatgcccgtcagcagctggcacccgtccagctcgcgccggagagcctccaggcggaccagctccgccgccccgcggatcgattggactagcgacgaggccgagatgcgcacggacgtcatcggcggcggcgatggc

SEQ ID NO: 60970 - DNA, 796 bp, Zea Mays
ccgtggctttgcatctgcaaccccgcccgatcaatcttcctcgttccgccgctccctcgcctccggcagcgaggagcgatggctctgtctgcgacgctacggatttctcttagcgtcgcgttctttggggttctggcgttcgtgcttggtgtcatcgccgaaaacaaaaagtataaatttatgcaagaggaggatgggttttggcatagtggtgggaagccttcccattcagccaaaggtcctgcattcgacgcagcctctttgcaaaatgctctctgcaaaatgcttgtctcagccctggctcttgcaatgtcgctgtgggcaactgtcaccgagggtcttcaccgcagcaagaacatccaccacgacatggactaccagtgccctactgccaagaccggcctgttcggcggcgccgctttcctcgcccttgacgctgctctcttctggcttgtttgccagatgctggccctcaatgcaagggctgactaccttgacgaggatgacggcaagggagaatatggccagatttatgctgctcaagtcgatgatggctcgaaggtctgagcctatgtggtcatgctcggcagggttctatgattagtgtcatttggctacattatgccatcaacaaagtcgctttagctctcagtaaatttgtatataagttgcaaagtcttacataaggctggtggttattgcactttcgtgtttcagtgtgatcgataaacagtatctcagtacaatcggtttgctatgccccttggcgaacttgtccttgagttttctgttctct

SEQ ID NO: 60971 - DNA, 743 bp, Zea Mays
gccgtgcgtccgtggctttgcatctgcaaccccgcccgatcaatcttcctcgttccgccgctccctcgcctccggcagcgaggtgaggccaccgatcggaccttccctagcggcggcgcctaccaacctcaaggagcgatggctctgtctgcgacgctacggatttctcttagcgtcgcgttctttggggttctggcgttcgtgcttggtgtcatcgccgaaaacaaaaaggcttgtctcagccctggctcttgcaatgtcgctgtgggcaactgtcaccgagggtcttcaccgcagcaagaacatccaccacgacatggactaccagtgccctactgccaagaccggcctgttcggcggcgccgctttcctcgcccttgacgctgctctcttctggcttgtttgccagatgctggccctcaatgcaagggctgactaccttgacgaggatgacggcaagggagaatatggccagatttatgctgctcaagtcgatgatggctcgaaggtctgagcctatgtggtcatgctcggcagggttctatgattagtgtcatttggctacattatgccatcaacaaagtcgctttagctctcagtaaatttgtatataagttgcaaagtcttacataaggctggtggttattgcactttcgtgtttcagtgtgatcgataaacagtatctcagtacaatcggtttgctatgccccttggcgaacttgtccttgagttttctgttctct

SEQ ID NO: 60972 - DNA, 856 bp, Zea Mays
gccgtgcgtccgtggctttgcatctgcaaccccgcccgatcaatcttcctcgttccgccgctccctcgcctccggcagcgaggtgaggccaccgatcggaccttccctagcggcggcgcctaccaacctcaaggagcgatggctctgtctgcgacgctacggatttctcttagcgtcgcgttctttggggttctggcgttcgtgcttggtgtcatcgccgaaaacaaaaagtataaatttatgcaagaggaggatgggttttggcatagtggtgggaagccttcccattcagccaaaggtcctgcattcgacgcagcctctttgcaaaatgctctctgcaaaatgcttgtctcagccctggctcttgcaatgtcgctgtgggcaactgtcaccgagggtcttcaccgcagcaagaacatccaccacgacatggactaccagtgccctactgccaagaccggcctgttcggcggcgccgctttcctcgcccttgacgctgctctcttctggcttgtttgccagatgctggccctcaatgcaagggctgactaccttgacgaggatgacggcaagggagaatatggccagatttatgctgctcaagtcgatgatggctcgaaggtctgagcctatgtggtcatgctcggcagggttctatgattagtgtcatttggctacattatgccatcaacaaagtcgctttagctctcagtaaatttgtatataagttgcaaagtcttacataaggctggtggttattgcactttcgtgtttcagtgtgatcgataaacagtatctcagtacaatcggtttgctatgccccttggcgaacttgtccttgagttttctgttctct

SEQ ID NO: 60973 - DNA, 1628 bp, Zea Mays
aaattttaaaatcccctctaattctcatgtcaccaaatgagctctaagagttggataaataactgatgggtcctagagagagacaaacactagtgctttagaatagacatgctgagcacacctgatgtacaccggcatatgtgtgacggcaagtatatatgactcactaatcactatacaaggagaccacctaagaacgaacaaacaatcaaccaagcagcagcagtagttaaccaacaccactatcaacaccaatacgaaaaaggtactctagtagacacatgccttcctcttcttcctcctttttttttcctttttctttctacatggtttcggtaaatctagtttcttcctacgagaggggttcttgaacccacggccggcggcggcgatgatgccggatcctgagccgcctctggcaaatgccctgtgacgtctccattcgccagcttccagctccccctcgcctcccggaacgacttgagaagctcggcgtagcccggggtccgcagctcctctatcgactccacgcccggcaggcacttcccggcgctttcgctgatctccacgaccttgtggtgatgctcccccttcagctccctcatctccccgtggcacggcgtgaggaccgccccgatgttcgcgcacgcgtcgcggtcaagcttcagcgagcctggaatggcaggaatggggttgtaaaggggaaaaagaaaaagaagaggaagctgtccatggctccatgctatgctatgctatgctatgcactgcactgcacggcacttaggtgaggccaagtttcagttcagagcgtggtctcactgtcaattgaagaaaggagagcctcgtttgcaacgtcgatatcttcaagagttgccgatgccgcagacgacagtttggaacgcagcaattcgttggcctctgtcccggtcctgtttgtcatacacacaggcgcatcatcagcacacactcgtagccgaccattcatttcaacagagaaattttttactgcccaagatcccatgtcgattcctatcctgatattacctgactatagaatccactgactccacgtttcctttgccgaggctgaacagagaatcctccgcgttcttccattgctgtgcacccacggtggccttcgccttgctgcaacaaatttccgggtgaatgtaaaaaaaaaaaagttaagaacatccgcgtcttcgaaccagaaggaataaccaccatcacatggcatgacgctgaagtgaactgaccattctacaagcacttcggccaggcaagaccttccgctgtcgactgctttggtatcctcagcgtaattcttctcggtctcttccatgtaaaagccccacttctcgcgcacggacgaggtcaagtcctgggccgtcgagatttctttctgcaggtggctcgttctgttcacggcgctctcccggaggctgcccactgctgtttggacctgcaatgcgtgctcatgatgaaacgttggcatagcagagaggtgtgagagcatcacttcttttttatagcacgtcgtttacttggtgtgttttagtcagatgggtacgaaacaagtttaagctgttgaaacaactgaaaaaaaaacgctcaccagcttcttcttc

SEQ ID NO: 60974 - DNA, 4798 bp, Zea Mays
ccaccccaccccagcccccgcggcggccctcccccgatccgacggctcgatccccagccactctttatcctccgcacccgctcgccccgtcgccctgcttcctcacaacttgccccccctttttccgttccgttccctcgctcgtcgccgcgcgcgctaggttagggtttcgccgcatcccggccgctccgcccgcttcggatcgttccggtgggaggccatggcgatcgtgaggaccggagccggcaaccgggtccccaggcttgacggcggcagtgaaggctcgccggaggccacggaggacgacgacaacgaggaggagtcgcgggccacgccgtcgcaagagtccgaggccaacggcttctccgtcgacgacgacgatggccagaacggcagcggcggaggaggcaaggatccagaggaggtggtggaggaagaggaggaggaagagggggactcagggatgggttccgatgggctggacgtcgctgagctcggcgagcccagcaccgagatatgccaggtcggggaccagagtgttgccgtgccgctggagctctacgacctcgacggcctcggcgacgtgctctcgctcgtcgcctggaacaccctgctcagcgaggatgagcggctgcgcctcgccgcctttctgcccgacatggaccaggagacctttgcgcgcacgctcgtcgaactcttcgcggggcgaaacttccactttgggagccccctggccgccttcttcaagcgcctcaagggcgggctctgtgacccgagggtcaacctgtaccgccgtggtacccgtttcgcggagcggcgcaagcattgctactggatccagagctaccacaactccatggtgcggggcctccgggagatcaaggattgcttgaagggccacgagagatacagccttgctgagaagatcaggatgttgcacacgttaaaggcacagcagcagcagaggaaggctctagagttggcgaggcgggctgggtcggagactgattccgagagcagagggtctggagaacaggtcttagatcggctcaagcatgataagagtggacagaagaagtcggggaagttagtgaaggagaagtcgaaggggctgctgcgagcgggtatgccgaaaggagtggatgaggattacatgggagggtctggccgcgatgctgtgatgtcactctctgagctttctaggtatgatccacgcacgcatagagggaagcttcccaggagcatagagggccattactcggaggaccttggatatggaagggattcatcaagatcttggtttcagagggctctgcccaagccagtgaagaaggaattaactacgacctatgatggtaatctgtatggaaataactacagtgataaccatactgcctctccttaccactacggcaggaatcccattgctaatcagggagttaccttagcagcagcatatgatcctccttattttgataccagaaggaattcaaggtactcgggtagagactgggcacagggtggaaaaggtgtgcacactaacgctttaatgggtgatgagatgaactggccagctggtatccacactggtacattacatgacaggcagaaggggcagtctgcaggtgattacaggagcaggaaagatcaagctggttatggcctgaaggttaagtcctataaaagtattgaccagcaggttaatgatgcccatgttggttctgaccctagaagcaagatatcacaagcgaagatggcaggtaaatccagtacacaactagataggactggccagaagcactccaggagcaatgctgtctatgctcaaagtgatgagacagaatctgattcctcggaaaagtttgaagatggcggggaagtgcattatcttgaacggaagccagagcgtcaccattctgggtattatagaccagcacatggtgccaaaaagccaaacaagcttgctaaagtggccaaaatgaactatcctactactgatgcagatttagaaccctcccagagcaaaggattcgaagggaagggttcagagactggctatttacgtgatgtggatgtgatggtgacagaacagattagtgatgtcatgaaacctccagcagcaagtggtgaaaggaagcggaaaggggcgggaaatctggacatgcatgtttatcataactctgatctgcatgaaattaatgaagatgcaaatgactcatccaggttggcggagaatgaaaggtttgctagtagatcaggccatgcaggccaagattctaatggtgattatgttggtactgaaagagtcagctctagctccaaaaaagcaaaaggaagagtcgaagttcctagcctggatgagcatggtgagcatttgtcatctggctcaaagcttgttgagaacattggtggatccaagaagaaaaacaaaaaaaagccagagagcagcaccacagatgcagctattatagcagaaccagctgctgctgtacctgaaattaatgtggtagctgcagagcctgagaaggttgagaagcccaagaagaagtatgtaccgataacaccaacaatccatactggtttttcgttctctgttgtacatcttttaactgctgtaaagaaggctatggtcactcctgctgaggatactccagccacagcgaagcaaccagatggagaggagggcaaaatttgtttcaacaatgaagaacacatcaaaacacctcatcaagaacaaagtacaacagatcaaactgaacaggtccttgagggtgcaaatgccagtgctgcagaacaaactgtaccaatcaatgcaccggcgcttactgttcaagagattgtcaatcgaattagagaaaatcctggagaccctaggatacttgaaacacaggagcccctccaagatttagttcgaggagtattgaaagtactttcatctagaacagctcctctaggtgcaaagggctggaaagcattagttgcctatgagaagtcaaacaaaagttggttctgggttggtccagtaccttctgtttcatcatatgatgaccctgatgaagaaacttctgctgaagcatggagtataccgcacaagatgcttgttaagttggttgatgcattttctaattggctgaaaagtggtcaggaaacccttaagcagataggttcccttccaccacctccaccaccaaatcctgcaaacttggatttgaaggaaaggttcaaggagcttaaagcgcaaaaaagtctgaacactataagcccaagctcagatgaagcaagggcatatttccagcgtgaggaatttttgaggtactcaatacctgatagagcattttgctatactgctgttgatggggagaagtctatagttgctcccttgagaagaggaggtggaaagccaacggcgaaagcgaggggtcaccccatgctcttacctgatcggccgccacatgtcactatcctctgtcttgtaagggatgctgcgtccaggttgcctgcaagaactggaactagagcagatgtctgctcactactcagagattcacaatacctaaaccatgaagaagccaataaagaggctgcaatcaatcaagtcgtcagcggagctctcgatcgtttgcattatgaacgcgacccttgcgtgctatatgacaatgacaaaaaactgtggacctatctgcacaggggcagggaggaggaagattttgaggatgatggcacatcatctacaaagaaatggaagagaccaaggagggatctctctgatcctgcagagccaggtgcagcaaatgatgatgttgacgacgagggcactggcacccctccaggaagcaatgcaaaaaaacaaaaggcagaccatggagattctacattgtcaggagaagccaacgatgagggaaatcatccaactcagaatccgtcttctggtggcctggaaggtgatcctgatcttaatgcaagaaattacgaagaatcaggtggagttgtttacatggatgcaagaacagatgttggtgttgggtcgaattcaatagatgcaaaaccaggcagcagggctgatgataatacagcaagctggcagtcactcccagaacagaataaaaccagtacggcgctccctgaggacaccagcatggatggtaccccagggccagcataggtgatttgtgcagaaaccagttggctggtgttaggagaatttgtttcatttttaatgttgcttctcttcccctctaagctgcagatgtaaacttggaatcctaagattggttttcagtacagctcagtccgttttatagtgaaattgccgtgctatactttccgcgggattatattatcatcttatagttcttctgtgattatattatcatcttatagtgtgcccagtggttatattgtttgtaaatagacagcccacttgattttttaggatatctagatgccctagttcatcatatagtgttgcttggaacagtttcaggggcagctggccattgatctagtcttcatgtcccagtcatagaccctgcaaatggatgttcatgtatttcaaatgataattgcaaattgctaatgatactagatatcaaacgaggaaaaggactcgaaacagcaggcagtgtccactgtccagccaagccgccacagccgtccgatgagatcactgtagtttatacactagtattggataggagtccagatgtgaaaaaggtcaataacagctagcaggtgctggtgtaataaatagatcctgatacagtttacagtttatgtataaaagatcaatgcagcattt

SEQ ID NO: 60975 - DNA, 994 bp, Zea Mays
gaaagtagtagtacagagctaaatgactgttgttcaatgatcataagagaatatttggtcagagtagtcataagttcagaaaaatgcaatagttgcttcatccaaaacaaatgcagcatttggacggttgacttagcatatctgttaaacaagttttcagtcagcttttctttctgtaccgtgacccttcgagcaaatccacaatattctgctgaatccttttataggttacttgttctgacaaacttctactgcacaaggcttctgaagttctcatcaataatgttctaaaaatggtcattacataggagcaattgcaagaagacatcgatcgagtggacgagctatttgggaaggcgctcgatgttggaattagtattcaatgcaggtccatcaccgcatacgacattgcttttctactattatccgggcactgcattgctattgctttagtggacaaatcgaagctaaatttgccttgcatgagtgattatgatgtacaacaacacaacgatgagcctgactacatgggtaagtcgcattgtgcaatttccatgttcttgtgaggcgattgatacgcgtttcggtggtttttcattattttcttatcttatattacaagcagcatggatgttccatcccatcgtattgtagcactgcagaattattgatgaccaacaagcggcttcagtagtttaattctggataacacacatttatgtagcaaaagaagctagcatagtttttttttgcaatggtagctaaataactaatgaacatgtgtacagtacagttcacatgccacgtcttatttttcttgtctggtaaaaatacggagttcaaatctccatgttttcctttttcccacatataaacaactatatatatgacaaaacacattgcaaacgcaaacctttaccactaaagtgttgtgattgtattccccctttgcaggacactatgtcgtaatatttgggtatgatgctgatgattg

SEQ ID NO: 60976 - DNA, 1514 bp, Zea Mays
gttccttcgtcgctttgctttcttccttttcttcccttcccctcccagtcgcacgcgctcgcgacgcgcaagtcgcagcaaccgtgactcgccccgggcccgcatggcagcgggcatggtgcgtgcaggtcaaagcctatccacgcgccggccccgcgaatagcacccccgggcccgcatggcagcctgactcggcgccacgcgtttgctcctcccggctcccatcttggctccttccttctcgtcgtctcctcggctatatatccgccagccggggggaaggggaacggccaaaccagcacccgccgccgacagggaacatcgccggccgagatcggctgcacatctgtgctgcttcagggcgccggagttcgcgtcgtcgttcggtaacttgcggggtcaatgggaggagggaaagacaagcatgacgagagcgacaaggggctcttctcgaacatgatgcacggcgttgccggtggtcatgggtacccccaccagggataccctccgcagggctacccaccgcaaccaggagcatacccgcctcccccaggggcgtatcctcctcctccaggggcatatcctcctccacctggggcatacccaccacaatatgggtaccctcagccaggtggctacccaccgcaaccaggagcatacccacctcccccaggggcgtatcctcctccacccggcgcatacccaccacaatatgggtaccctcagccgggtggctacccaactcaaggtggatatcctcctgcaggctaccccggctcatctcaccagggttatgggagcagccacgccgggggccacatggggacgggggcaatgctagctggaggtgccgccgccgccgctgccgcttacggagcacacaagctttctcatggccatagcggacacggtggacatgggccctttggaggccatggtcgtggtcgtggtcgtggtggttatggccgtggtcgtggtcaccacggcaagttcaagcatggcaagcacggacacggcatgttcagcggcaagttcaagaagtggaagtgatgtgctctccttggttgatcgtagctagcggtggtaatgaatcacgatctaaatgttttttcacaatatgttagagtccgtaaataattttagtttaaaaatgaataaaaatatagctcgatcctaatcagattcgatccttaaattttgtagtgtaaaatttatggcacattaccatccctaatgatagctgaattcaggcttctaggacatgtgttgccaggaatgccttttcagtatctatctagattgtggcaagtgacatgttgctaataagtgacataaataaccatttgctggtatgctgtatatgttggtctcgtggatggagcgctttaaagattatattctgtgtgttggaatgatatggttgtactgtatcctgaccatgctggcactgaatggtttctgttgccagtaaatcattgttcatgcaagttattatctgaccaatcgatttcgtt

SEQ ID NO: 60977 - DNA, 1865 bp, Zea Mays
agcgagttggattcagagtcagagcaaccctatctcttccccactccgctcctcgctcaccctctcaccaaatccttctcctccgcgccgccacagccgggcgcgcctctcgatcgagatccaggagatatgcctcgttatgatgatcgccatgggaatacacgcttgtatgttggaagattggcccctcgcacccgttcccgcgacctagaatatcttttcagcaaatatggaaggtaagagccgcactctgtctgcacagagagttattctgaagttcagagtgtgctaacttttattatgagggtgagacaccagttctgtcctagtatcacgagcagtttgtgctaacactgtggttgaattttgtggtacacagctacacatcaatcctgctaaactacactagcaaatatagggtcctttcctattttgttgatgatatgtggtttatgaaggttttgtgttgcttgaagtcattctgaggtttttgtggatggggtcatacaagtcttttttcttggtgtatgctctgttacatcactaagcacttcatagatgtttgacctccgggcctgtttgacttgaatgatcttgttgaaggttttcggttttttacccaaccatggaggtctgtggtggaagggtgcccttggtggaattggtggccattgttccgatatttgtggaggactttggtgaagggcgcccttggtgtaatcttattgactgttgtagatgaagttgcaagttgatgcatttgagtacttgactcatgtcagcagcttactgtttgtggaaactatttgcgcagaatacgtgaagtggagttgaagcgtgactatgcattcatttacaacctagatggcagggaagtcgatggaagccgtattattgttgaatttgctaaaggagttcctcgtggttctggtggttcacgtgagtacatgggaagaggacctccaccaggaacaggtcgttgttttaactgtggaatggatggtcactgggcaagggactgcaaggctggtgactggaagaacaaatgctaccgctgtggtgaatcgggccatatagagagaaattgccagaacagtccaaggaatctcaggcgtgataaaagctattcacggtctccatccccacgtggtggacgtggccgcagccggagctacagcagaagccggagctatagccgatccagatccccatctggatctcccaggggtggacgccgtgaacgtgacgagaggagatctaggagtcttagctacagcaggagcgcaagccccaggcgttctgtctcacctgcaaaggaaaaggagcgcagtcgcacacccaatggcagtaggagcccaaggagccccagcccaagggctgaggtgagcccaccactgaaggataatggtgcacgcaatggctcagaccatgaaggcaaccctggtggtggagagaacagcaagaggagtcggagcccatctgatggctaccgtagccctgtggccaatgggcgcagcccgagcccgagggacgatcggagcccaagccccaagggcaacaacgaagatgacgagcgccgtggttcacctagaggaagtcagtcccccctgaactgagaaattctgatcaaatttgggccgcacgattcggttgtaactgttatattttagtttgagacaacaaactgtatttgctcatttctcatacagtcaggtttatgctttttgagctagaaaacatgtgtaagaatttgttaccttcaagctattcctggtttgtgatatggtaatacttgaactatttagcttgccaaatctgaatacttttaactatcaagtatcttgagttagtttgtctgttttgct

SEQ ID NO: 60978 - DNA, 1803 bp, Zea Mays
agcgagttggattcagagtcagagcaaccctatctcttccccactccgctcctcgctcaccctctcaccaaatccttctcctccgcgccgccacagccgggcgcgcctctcgatcgagatccaggagatatgcctcgttatgatgatcgccatgggaatacacgcttgtatgttggaagattggcccctcgcacccgttcccgcgacctagaatatcttttcagcaaatatggaaggtaagagccgcactctgtctgcacagagagttattctgaagttcagagtgtgctaacttttattatgagggtgagacaccagttctgtcctagtatcacgagcagtttgtgctaacactgtggttgaattttgtggtacacagctacacatcaatcctgctaaactacactagcaaatatagggtcctttcctattttgttgatgatatgtggtttatgaaggttttgtgttgcttgaagtcattctgaggtttttgtggatggggtcatacaagtcttttttcttggtgtatgctctgttacatcactaagcacttcatagatgtttgacctccgggcctgtttgacttgaatgatcttgttgaaggttttcggttttttacccaaccatggaggtctgtggtggaagggtgcccttggtggaattggtggccattgttccgatatttgtggaggactttggtgaagggcgcccttggtaatacgtgaagtggagttgaagcgtgactatgcattcattgaattcagtgacccccgtgatgctgatgatgcgcagtacaacctagatggcagggaagtcgatggaagccgtattattgttgaatttgctaaaggagttcctcgtggttctggtggttcacgtgagtacatgggaagaggacctccaccaggaacaggtcgttgttttaactgtggaatggatggtcactgggcaagggactgcaaggctggtgactggaagaacaaatgctaccgctgtggtgaatcgggccatatagagagaaattgccagaacagtccaaggaatctcaggcgtgataaaagctattcacggtctccatccccacgtggtggacgtggccgcagccggagctacagcagaagccggagctatagccgatccagatccccatctggatctcccaggggtggacgccgtgaacgtgacgagaggagatctaggagtcttagctacagcaggagcgcaagccccaggcgttctgtctcacctgcaaaggaaaaggagcgcagtcgcacacccaatggcagtaggagcccaaggagccccagcccaagggctgaggtgagcccaccactgaaggataatggtgcacgcaatggctcagaccatgaaggcaaccctggtggtggagagaacagcaagaggagtcggagcccatctgatggctaccgtagccctgtggccaatgggcgcagcccgagcccgagggacgatcggagcccaagccccaagggcaacaacgaagatgacgagcgccgtggttcacctagaggaagtcagtcccccctgaactgagaaattctgatcaaatttgggccgcacgattcggttgtaactgttatattttagtttgagacaacaaactgtatttgctcatttctcatacagtcaggtttatgctttttgagctagaaaacatgtgtaagaatttgttaccttcaagctattcctggtttgtgatatggtaatacttgaactatttagcttgccaaatctgaatacttttaactatcaagtatcttgagttagtttgtctgttttgct

SEQ ID NO: 60979 - DNA, 630 bp, Zea Mays
agcgagttggattcagagtcagagcaaccctatctcttccccactccgctcctcgctcaccctctcaccaaatccttctcctccgcgccgccacagccgggcgcgcctctcgatcgagatccaggagatatgcctcgttatgatgatcgccatgggaatacacgcttgtatgttggaagattggcccctcgcacccgttcccgcgacctagaatatcttttcagcaaatatggaaggttttcggttttttacccaaccatggaggtctgtggtggaagggtgcccttggtggaattggtggccattgttccgatatttgtggaggactttggtgaagggcgcccttggtaatacgtgaagtggagttgaagcgtgactatgcattcattgtatgttctactacactcaggctatctccaaccattccccctcccaatccctccatttgtactttctattcatatttaaatacattcccctcaactattcttccccctattttttctcctctccacccattccccctattcagctccccctttactctttaactgagctatttgccttatatatatatatatatatcactttttggattttttaaataatactaccatatttgtagtaccg

SEQ ID NO: 60980 - DNA, 1435 bp, Zea Mays
atcctaccctgctgccgatgaacttgtgttctttcttctcaaactttcgttcttttcctattttctttatcctgccctgcgcacacgaaacatgctaattaaagacgtacgcgatgcgtcctaagcttctccactaataatataaccccgagcatgcacgcacgctgatcatccatctataaatacgccaattagcaaactagagctactagcagcaggccaatggagaaccctccgagcatcctagtgactcccatggctccggccatgtcggcgcagttcacaagaataaccttcagcaacctgtttgtccgtcgggctggcccaggcagcacggagctgaccgtggagggaaggccatccgaccagctgggcaggagaaacctcactgacagccccgtatttgacggccgtggccctgacgccagcctcgtggctcgcgtacagggagtcgctacccagatgggcgacgtgcgccagttgtacaccgtcgtgttccaggagaggccgctcaagggctccacgctcgtcaccgaaggcgcgatgacagaagggtcagacgagtgggcgatctacggtggaactggagtgttcgcgatggcgagaggcgtcataaggagaacgtttcttgccgacacgagcggcgggaactccgacgagcttgccgtggaggttctctgcccggtgttccgcccggcggcgtttggctcatcgtcgtcacagccagcagcaaaggacatcgcgacgacggagccgccgaggcgtctgcagagcctgaccgtccgcgccggcgttgccgtggactccatcgagttcacctacagtaccgacacaggtggtcagacgcgcaccgctgggcgatggggtggacttggcggcaacgtccggaagctcgatcttggcgacgctgaatacgtcaaggaagtttctggaacgtacggcgcattcgaaggtgcgactacccttacctcgttcaggattgtcaccagcaccgccagagcttgggggccatggggcatcgagagcggcacacgtttctgcatcaccgcgcccatcggcagcagcatcgtgggattctatggacgcgcgacgaccaggctcgtcgctgcgatcggtgtctacctgcgccaactttagtctggtttcagcagcaggacgggtactacagatatgctagataaaggtcttatatatgtcatatgacctatcatggtcttatatgttcgatcgtcgtcgtgtctgtatgtacatacatggttgtcaaataaagctctttgcattttgataaagattgacaccaccatgctattatatgttaactaggtgagtgcccgtgtgttgcaacggaaccgtataataacacgataacttatgtacatatgtgttatattgttataggtatgtgctcgtgtgttacgacggaagtaaaaaaaaa

SEQ ID NO: 60981 - DNA, 1359 bp, Zea Mays
ctaacacaacggaggcaataggatgggatggtcatctataaataagtagcccggcgcagccttctttggagcagggagaagaacacagggcacacgcactacacgcacggcacgcagatacatatagagagaggttagctatagcttgcacatctatttaactaactaactaactggctagctagctcgatccgcagagcaaagcgaaagcagcaagaagcaaagcaatggagaaccctgcgagtgtgctagttctaccagcgcagttcaccaaactcaccttcggaaacctgtacatccgccgggccgggccgggcagcagggagataaccgaggagggcaggtgcgacctggacaagagatacgtgagtgacttccccgtctacgacggccgcggccccgacgccagccttgtggcccgcgtgcaggggatcaccagcgaaatcgggaacgcgcaccaactgttcgtcgttgttttcgacaccgacaggctcaagggctccacgctcgtcaccaatggcgtgataacggccgggtctgacgagtgggcgatctacggcggaaccggggtgtttgccatggcgaggggcgtcataaggagaaggtatctcgccgacagggccggcgggaacactgatgagctcaacatggatgtcttctgccggccgtttggctcacagtcagagctgcaagataaggtgcaggggcagggctctagcgtcaccaagattggactatggggtggaccgggagggtcggcacaggacatcacggcggagcggccgccgcagcgtctgcacagcgtcaccgttcgtgctggcgtcgccgtcgactccatcgagttcacctatactgacagcgctgggcagaggcgcgccgctgggcgatggggtggactcgggggcaatgttcgaacgatcgaccttggcgacgccgaggatgtcagggaagtctcgggaacatacggcgcatttgaaggtgccactacgctgacctcgctcaggctcgtcaccagcagcagaacctggggcccctggggtgtcgagaacgggacgcgtttctccgtcacggcgcccatcggcagcagcatcgtgggattctatgcgcgggcgggaaccaggctcgtcgatgctatcggtgtttacttgcgtcagatttaattcgaataatagcaggggagctactgctagctacgtacctgctccatcctccattatcctttatttcaattcgctcatcatcgtcgtgtgtaaattaaataaataaagctcttgtgcccatattatatatagttgtcatggccgtgccgtgtctatgtgcgtatacaagtttggctcatataatatttattcgatctct

SEQ ID NO: 60982 - DNA, 1405 bp, Zea Mays
ctaacacaacggaggcaataggatgggatggtcatctataaataagtagcccggcgcagccttctttggagcagggagaagaacacagggcacacgcactacacgcacggcacgcagatacatatagagagaggttagctatagcttgcacatctatttaactaactaactaactggctagctagctcgatccgcagagcaaagcgaaagcagcaagaagcaaagcaatggagaaccctgcgagtgtgctagttctaccagcgcagttcaccaaactcaccttcggaaacctgtacatccgccgggccgggccgggcagcagggagataaccgaggagggcaggtgcgacctggacaagagatacgtgagtgacttccccgtctacgacggccgcggccccgacgccagccttgtggcccgcgtgcaggggatcaccagcgaaatcgggaacgcgcaccaactgttcgtcgttgttttcgacaccgacagctgttcgtctcgccctgcatatgcgtctctctgctgccaggctcaagggctccacgctcgtcaccaatggcgtgataacggccgggtctgacgagtgggcgatctacggcggaaccggggtgtttgccatggcgaggggcgtcataaggagaaggtatctcgccgacagggccggcgggaacactgatgagctcaacatggatgtcttctgccggccgtttggctcacagtcagagctgcaagataagatgcaggtgcaggggcagggctctagcgtcaccaagattggactatggggtggaccgggagggtcggcacaggacatcacggcggagcggccgccgcagcgtctgcacagcgtcaccgttcgtgctggcgtcgccgtcgactccatcgagttcacctatactgacagcgctgggcagaggcgcgccgctgggcgatggggtggactcgggggcaatgttcgaacgatcgaccttggcgacgccgaggatgtcagggaagtctcgggaacatacggcgcatttgaaggtgccactacgctgacctcgctcaggctcgtcaccagcagcagaacctggggcccctggggtgtcgagaacgggacgcgtttctccgtcacggcgcccatcggcagcagcatcgtgggattctatgcgcgggcgggaaccaggctcgtcgatgctatcggtgtttacttgcgtcagatttaattcgaataatagcaggggagctactgctagctacgtacctgctccatcctccattatcctttatttcaattcgctcatcatcgtcgtgtgtaaattaaataaataaagctcttgtgcccatattatatatagttgtcatggccgtgccgtgtctatgtgcgtatacaagtttggctcatataatatttattcgatctct

SEQ ID NO: 60983 - DNA, 2965 bp, Zea Mays
ccagaggccagatccccttccgtctcaactattccttcgcacgccgccggcacccgcagggccccacctgccagtgaaaacttctcccccgcagttccatctctccgtcgccgtcgtcgtcgcgtcctccgcgtctccggcgagtctagagagagagagagagagagagagaggaaggagggtggagggccgcgcccatggacgcggagcttctggagctgcagcggcagctagaggcggcgcagagcgcgaggtccagcgtgcgcctgtcggagcggaacgtggtggagttggtgcggaagctgcaggagcgaggcatcatcgacttcgacctcctccacaccgtctccggcaaggagtacatcacatccgaccatttgaagcatgagattaagatggagatcaagaagagaggccgtgcatctctagttgacttatcagataccctgggggtggacctttaccatgttgagaggcagtcacagaaggtcgtctccgatgatcccactctaatgctgataaatggcgagatcatgtcacaatcttactgggacaccgtgacggaagagataaatgagaagcttcaggagcgcagtcagattgccttggcagagattgctgctcagttacatattggatccgagcttgtcatcagtatcctcgagccgcggcttggaactattgtgaaaggaaggctagaaggcggacagctatacactccagcgtatgtctcacggattactgctatggttcgtggtgctgcaaggggtataacagtgccaacaaacctgccatctgtttggaactccttgcaacaacagcttcatgagatgcatggtgctagtggagtttctgtggaaggttcattcttccaatccattttcaatggtttgctaaaagaaggtgctgtactgggatcagtccgtgcaggaggacagtggacaccagctgttttcgcccatgcccaaaaggagagtgttgatgcttttttctcacagaactcttacattgggtacgacgtgcttcagaaacttgcaattcctcaacctaaacagttcttggaggcccgatatccagatggtattgcattggatgctgtctttgttcatacttctgtggttgatatgctcgatactgcggttggtgatgcaattgagaatggacactggattgattctctttcagttcttccatcatatattagtggaccagatgcaaccaaaattttatctatctgtccatctctgcagaaggctatcaagtcttctaaagcagtggtatttggagagtcatgtgtcttcagtaacatgtttattaagggtatttttgaccgacttgagaaagatatggactcgtttggtattagacttagtgttggtcaaggaagacctgtgaatacgaatctgggtagtgagcacaagacagggtctggtcagcactcggacacaaaagatcttggtggtaatggcactagcagtaccggtgcttcatcagacagagggtcaaagaagaaaagggggaaagggacagggtctaccaaaggtggatcacttgaaaaggatgatgacaatgaagaaagcattcctgttaagggcaagaaatctcacaggaaaaacaaggatgctggtgcatctggtgacataaaacatggtggtaaaaaaacgtcagagaaaatgatagaggagaatgcaaatatctttcctgatgaattgatagaagaaaaggttttggctgttgctccagagttagaagagttgggaggctctgatgactcaaatgccccccttaaattgttgtcttctcacctgaggccaatgcttgttgactcatgggcaaagaaacggaacaccatgctgtcaggaaatgctgaaagaaggcgacgcttgctcgataatctgcagaagcagatagatgaggctgtcctggagatacaactctatgaaaaagctttggatgtatttgaggaagatcctactacttctggtatactacacaagcatcttctaagaagtatgggcactccaatagttgacaaagttttgattacattggataaggacaacaaattgaagaatggaatggaggttgaggatagcgaagatcatgtccaattgagcactgctgaccgaagctctctggccaaggatcttcctagtgcattgtcattgaaggctcaagctttaattgaagcattagagggaaagaggtttgattcatttatggatgccttaagagatatactggaggaaagtggcttgacatttaagaagcttgataaaaggttagagaggacaatgctgcattcctatcgcaaggatttgacagcacaagtttcatcagagaatgatcctgttgcctttcttccaaaagtcgttgctttacttttcctgcaggcatataataaggctattcaggcaccaggaagagctgttggtgctgttatcacactgctgaagctgccagctgcaacctacaaggtattgactgattatcacagcactactgtgaaacttttagcactacaagctgctgctactgacgatgaagaagattgcacatcagaccgaatgcgagaaaggaaggaggatctggaagaaaggctgatgccagaactgaaatccctggtcctcggcacaaacaaagagtgatcaacaacattcttgtgcataccggaccatttcggcgtacatatacaaagcaacactcagcttaaaagtttttttttgctctgtttttgcaatttgcaccgtttgaaagcaaaagatagcaggaaacaggtttactgattgtaagaatctgactagtttatactcccgtttacattcctgcactaggtttctactgataacaacaaaattatactatggtgtaatgaagagcatagtggatgttaacagggaatcagggatgaaagtagatatctgaattgttaggataatatatatatatatactctattcattac

SEQ ID NO: 60984 - DNA, 2924 bp, Zea Mays
ccagaggccagatccccttccgtctcaactattccttcgcacgccgccggcacccgcagggccccacctgccagtgaaaacttctcccccgcagttccatctctccgtcgccgtcgtcgtcgcgtcctccgcgtctccggcgagtctagagagagagagagagagagagagaggaaggagggtggagggccgcgcccatggacgcggagcttctggagctgcagcggcagctagaggcggcgcagagcgcgaggtccagcgtgcgcctgtcggagcggaacgtggtggagttggtgcggaagctgcaggagcgaggcatcatcgacttcgacctcctccacaccgtctccggcaaggagtacatcacatccgaccatttgaagcatgagattaagatggagatcaagaagagaggccgtgcatctctagttgacttatcagataccctgggggtggacctttaccatgttgagaggcagtcacagaaggtcgtctccgatgatcccactctaatgctgataaatggcgagatcatgtcacaatcttactgggacaccgtgacggaagagataaatgagaagcttcaggagcgcagtcagattgccttggcagagattgctgctcagttacatattggatccgagcttgtcatcagtatcctcgagccgcggcttggaactattgtgaaaggaaggctagaaggcggacagctatacactccagcgtatgtctcacggattactgctatggttcgtggtgctgcaaggggtataacagtgccaacaaacctgccatctgtttggaactccttgcaacaacagcttcatgagatgcatggtgctagtggagtttctgtggaaggttcattcttccaatccattttcaatggtttgctaaaagaaggtgctgtactgggatcagtccgtgcaggaggacagtggacaccagctgttttcgcccatgcccaaaaggagagtgttgatgcttttttctcacagaactcttacattgggtacgacgtgcttcagaaacttgcaattcctcaacctaaacagttcttggaggcccgatatccagatggtattgcattggatgctgtctttgttcatacttctgtggttgatatgctcgatactgcggttggtgatgcaattgagaatggacactggattgattctctttcagttcttccatcatatattagtggaccagatgcaaccaaaattttatctatctgtccatctctgcagaaggctatcaagtcttctaaagcagtggtatttggagagtcatgtgtcttcagtaacatgtttattaagggtatttttgaccgacttgagaaagatatggactcgtttggtattagacttagtgttggtcaaggaagacctgtgaatacgaatctgggtagtgagcacaagacagggtctggtcagcactcggacacaaaagatcttggtggtaatggcactagcagtaccggtgcttcatcagacagagggtcaaagaagaaaagggggaaagggacagggtctaccaaaggtggatcacttgaaaaggatgatgacaatgaagaaagcattcctgttaagggcaagaaatctcacaggaaaaacaaggatgctggtgcatctggtgacataaaacatggtggtaaaaaaacgtcagagaaaatgatagaggagaatgcaaatatctttcctgatgaattgatagaagaaaaggttttggctgttgctccagagttagaagagttgggaggctctgatgactcaaatgccccccttaaattgttgtcttctcacctgaggccaatgcttgttgactcatgggcaaagaaacggaacaccatgctgtcaggaaatgctgaaagaaggcgacgcttgctcgataatctgcagaagcagatagatgaggctgtcctggagatacaactctatgaaaaagctttggatgtatttgaggaagatcctactacttctggtatactacacaagcatcttctaagaagtatgggcactccaatagttgacaaagttttgattacattggataaggacaacaaattgaagaatggaatggaggttgaggatagcgaagatcatgtccaattgagcactgctgaccgaagctctctggccaaggatcttcctagtgcattgtcattgaaggctcaagctttaattgaagcattagagggaaagtggcttgacatttaagaagcttgataaaaggttagagaggacaatgctgcattcctatcgcaaggatttgacagcacaagtttcatcagagaatgatcctgttgcctttcttccaaaagtcgttgctttacttttcctgcaggcatataataaggctattcaggcaccaggaagagctgttggtgctgttatcacactgctgaaggataagctgccagctgcaacctacaaggtattgactgattatcacagcactactgtgaaacttttagcactacaagctgctgctactgacgatgaagaagattgcacatcagaccgaatgcgagaaaggaaggaggatctggaagaaaggctgatgccagaactgaaatccctggtcctcggcacaaacaaagagtgatcaacaacattcttgtgcataccggaccatttcggcgtacatatacaaagcaacactcagcttaaaagtttttttttgctctgtttttgcaatttgcaccgtttgaaagcaaaagatagcaggaaacaggtttactgattgtaagaatctgactagtttatactcccgtttacattcctgcactaggtttctactgataacaacaaaattatactatggtgtaatgaagagcatagtggatgttaacagggaatcagggatgaaagtagatatctgaattgttaggataatatatatatatatactctattcattac

SEQ ID NO: 60985 - DNA, 2982 bp, Zea Mays
agcccccagacccagaggccagatccccttccgtctcaactattccttcgcacgccgccggcacccgcagggccccacctgccagtgaaaacttctcccccgcagttccatctctccgtcgccgtcgtcgtcgcgtcctccgcgtctccggcgagtctagagagagagagagagagagagagaggaaggagggtggagggccgcgcccatggacgcggagcttctggagctgcagcggcagctagaggcggcgcagagcgcgaggtccagcgtgcgcctgtcggagcggaacgtggtggagttggtgcggaagctgcaggagcgaggcatcatcgacttcgacctcctccacaccgtctccggcaaggagtacatcacatccgaccatttgaagcatgagattaagatggagatcaagaagagaggccgtgcatctctagttgacttatcagataccctgggggtggacctttaccatgttgagaggcagtcacagaaggtcgtctccgatgatcccactctaatgctgataaatggcgagatcatgtcacaatcttactgggacaccgtgacggaagagataaatgagaagcttcaggagcgcagtcagattgccttggcagagattgctgctcagttacatattggatccgagcttgtcatcagtatcctcgagccgcggcttggaactattgtgaaaggaaggctagaaggcggacagctatacactccagcgtatgtctcacggattactgctatggttcgtggtgctgcaaggggtataacagtgccaacaaacctgccatctgtttggaactccttgcaacaacagcttcatgagatgcatggtgctagtggagtttctgtggaaggttcattcttccaatccattttcaatggtttgctaaaagaaggtgctgtactgggatcagtccgtgcaggaggacagtggacaccagctgttttcgcccatgcccaaaaggagagtgttgatgcttttttctcacagaactcttacattgggtacgacgtgcttcagaaacttgcaattcctcaacctaaacagttcttggaggcccgatatccagatggtattgcattggatgctgtctttgttcatacttctgtggttgatatgctcgatactgcggttggtgatgcaattgagaatggacactggattgattctctttcagttcttccatcatatattagtggaccagatgcaaccaaaattttatctatctgtccatctctgcagaaggctatcaagtcttctaaagcagtggtatttggagagtcatgtgtcttcagtaacatgtttattaagggtatttttgaccgacttgagaaagatatggactcgtttggtattagacttagtgttggtcaaggaagacctgtgaatacgaatctgggtagtgagcacaagacagggtctggtcagcactcggacacaaaagatcttggtggtaatggcactagcagtaccggtgcttcatcagacagagggtcaaagaagaaaagggggaaagggacagggtctaccaaaggtggatcacttgaaaaggatgatgacaatgaagaaagcattcctgttaagggcaagaaatctcacaggaaaaacaaggatgctggtgcatctggtgacataaaacatggtggtaaaaaaacgtcagagaaaatgatagaggagaatgcaaatatctttcctgatgaattgatagaagaaaaggttttggctgttgctccagagttagaagagttgggaggctctgatgactcaaatgccccccttaaattgttgtcttctcacctgaggccaatgcttgttgactcatgggcaaagaaacggaacaccatgctgtcaggaaatgctgaaagaaggcgacgcttgctcgataatctgcagaagcagatagatgaggctgtcctggagatacaactctatgaaaaagctttggatgtatttgaggaagatcctactacttctggtatactacacaagcatcttctaagaagtatgggcactccaatagttgacaaagttttgattacattggataaggacaacaaattgaagaatggaatggaggttgaggatagcgaagatcatgtccaattgagcactgctgaccgaagctctctggccaaggatcttcctagtgcattgtcattgaaggctcaagctttaattgaagcattagagggaaagaggtttgattcatttatggatgccttaagagatatactggaggaaagtggcttgacatttaagaagcttgataaaaggttagagaggacaatgctgcattcctatcgcaaggatttgacagcacaagtttcatcagagaatgatcctgttgcctttcttccaaaagtcgttgctttacttttcctgcaggcatataataaggctattcaggcaccaggaagagctgttggtgctgttatcacactgctgaaggataagctgccagctgcaacctacaaggtattgactgattatcacagcactactgtgaaacttttagcactacaagctgctgctactgacgatgaagaagattgcacatcagaccgaatgcgagaaaggaaggaggatctggaagaaaggctgatgccagaactgaaatccctggtcctcggcacaaacaaagagtgatcaacaacattcttgtgcataccggaccatttcggcgtacatatacaaagcaacactcagcttaaaagtttttttttgctctgtttttgcaatttgcaccgtttgaaagcaaaagatagcaggaaacaggtttactgattgtaagaatctgactagtttatactcccgtttacattcctgcactaggtttctactgataacaacaaaattatactatggtgtaatgaagagcatagtggatgttaacagggaatcagggatgaaagtagatatctgaattgttaggataatatatatatatatactctattcattac

SEQ ID NO: 60986 - DNA, 2982 bp, Zea Mays
cagcccccagacccagaggccagatccccttccgtctcaactattccttcgcacgccgccggcacccgcagggccccacctgccagtgaaaacttctcccccgcagttccatctctccgtcgccgtcgtcgtcgcgtcctccgcgtctccggcgagtctagagagagagagagagagagagagaggaaggagggtggagggccgcgcccatggacgcggagcttctggagctgcagcggcagctagaggcggcgcagagcgcgaggtccagcgtgcgcctgtcggagcggaacgtggtggagttggtgcggaagctgcaggagcgaggcatcatcgacttcgacctcctccacaccgtctccggcaaggagtacatcacatccgaccatttgaagcatgagattaagatggagatcaagaagagaggccgtgcatctctagttgacttatcagataccctgggggtggacctttaccatgttgagaggcagtcacagaaggtcgtctccgatgatcccactctaatgctgataaatggcgagatcatgtcacaatcttactgggacaccgtgacggaagagataaatgagaagcttcaggagcgcagtcagattgccttggcagagattgctgctcagttacatattggatccgagcttgtcatcagtatcctcgagccgcggcttggaactattgtgaaaggaaggctagaaggcggacagctatacactccagcgtatgtctcacggattactgctatggttcgtggtgctgcaaggggtataacagtgccaacaaacctgccatctgtttggaactccttgcaacaacagcttcatgagatgcatggtgctagtggagtttctgtggaaggttcattcttccaatccattttcaatggtttgctaaaagaaggtgctgtactgggatcagtccgtgcaggaggacagtggacaccagctgttttcgcccatgcccaaaaggagagtgttgatgcttttttctcacaaactcttacattgggtacgacgtgcttcagaaacttgcaattcctcaacctaaacagttcttggaggcccgatatccagatggtattgcattggatgctgtctttgttcatacttctgtggttgatatgctcgatactgcggttggtgatgcaattgagaatggacactggattgattctctttcagttcttccatcatatattagtggaccagatgcaaccaaaattttatctatctgtccatctctgcagaaggctatcaagtcttctaaagcagtggtatttggagagtcatgtgtcttcagtaacatgtttattaagggtatttttgaccgacttgagaaagatatggactcgtttggtattagacttagtgttggtcaaggaagacctgtgaatacgaatctgggtagtgagcacaagacagggtctggtcagcactcggacacaaaagatcttggtggtaatggcactagcagtaccggtgcttcatcagacagagggtcaaagaagaaaagggggaaagggacagggtctaccaaaggtggatcacttgaaaaggatgatgacaatgaagaaagcattcctgttaagggcaagaaatctcacaggaaaaacaaggatgctggtgcatctggtgacataaaacatggtggtaaaaaaacgtcagagaaaatgatagaggagaatgcaaatatctttcctgatgaattgatagaagaaaaggttttggctgttgctccagagttagaagagttgggaggctctgatgactcaaatgccccccttaaattgttgtcttctcacctgaggccaatgcttgttgactcatgggcaaagaaacggaacaccatgctgtcaggaaatgctgaaagaaggcgacgcttgctcgataatctgcagaagcagatagatgaggctgtcctggagatacaactctatgaaaaagctttggatgtatttgaggaagatcctactacttctggtatactacacaagcatcttctaagaagtatgggcactccaatagttgacaaagttttgattacattggataaggacaacaaattgaagaatggaatggaggttgaggatagcgaagatcatgtccaattgagcactgctgaccgaagctctctggccaaggatcttcctagtgcattgtcattgaaggctcaagctttaattgaagcattagagggaaagaggtttgattcatttatggatgccttaagagatatactggaggaaagtggcttgacatttaagaagcttgataaaaggttagagaggacaatgctgcattcctatcgcaaggatttgacagcacaagtttcatcagagaatgatcctgttgcctttcttccaaaagtcgttgctttacttttcctgcaggcatataataaggctattcaggcaccaggaagagctgttggtgctgttatcacactgctgaaggataagctgccagctgcaacctacaaggtattgactgattatcacagcactactgtgaaacttttagcactacaagctgctgctactgacgatgaagaagattgcacatcagaccgaatgcgagaaaggaaggaggatctggaagaaaggctgatgccagaactgaaatccctggtcctcggcacaaacaaagagtgatcaacaacattcttgtgcataccggaccatttcggcgtacatatacaaagcaacactcagcttaaaagtttttttttgctctgtttttgcaatttgcaccgtttgaaagcaaaagatagcaggaaacaggtttactgattgtaagaatctgactagtttatactcccgtttacattcctgcactaggtttctactgataacaacaaaattatactatggtgtaatgaagagcatagtggatgttaacagggaatcagggatgaaagtagatatctgaattgttaggataatatatatatatatactctattcattac

SEQ ID NO: 60987 - DNA, 1512 bp, Zea Mays
ccgcgctctctgcgcccccgccgccaaacccgctaattcgctccagtccgccgcccgcgcggctgctccaacgaaggaaagtccgaccccgccgtcgccatccccgcgcggctgctccaaggaaggaaactctaatcccactatacccgtccccgctctcctctctcgagccatcatggaaggttcactctctctcgccatccccgcgcggctgctccaaggaaggaaggttcgaccccgccatcgccatcctcgcgcggctgccttcccctctcgccatccccgcacggctgctccaaggaaggaaggtccgaccccgccatctccgcagtgggagattccgatcctttgcgcccgcgcgcgccatggagccggtgtcccggaagcgcaagagcgcgccccggtgtgctccgccaccaggtccctccaagatttggcctcccgcaagcgcgcttaccggggctccgagccgcagcaatcccactgcaccgatgcccccgtcccagccgtggtgatgacggcccccgcggcgagcggcgcatcggcgtcagcgagggtcctctcggggcgcgagctcaagcggaaggtgggctgcatcgacaacgccatgcggatcgggcggcggaagcggctggagagcgagtacgacctcggcgatgagatcgggcacggcaagttcgggtccgtccgcgtctgccgccccaaggccgggacccggggcgaggaggagttcgcctgcaaggccctgccaaagaacggcggtgacacgacccaccgcgaggtggagatcatgcatcacctctcgggccacccgggcgtcgtcacgctcagggcgtctttgaagacaccgatggctcctcgatgaggtggtcagggagggtaaactctcagagcgccgcgccgccaatgtgatcaaggagctcatggtggtcctcaagtactgccacgagatgggcatcgtgcatagggacgtcaagccggagaatgttctgctcaccaggtctagaaggttgaagcttgcagattttggattggccgtgcgagttgctgatgctggctgggttcccgcggatctagttttcaattgatgattcagatggaagccacacttttgcagcgtgtatctggaccaacatgaacaagctcatgctctagcacagcccgacaaaagccatcttcttgttaaatgggcagatagccttattgcaggattgagtagccaacactcatcgcaggaggatggcggagggaaggaggactgaatgctcttgccagatgcagtgaaccttcaagtctttcgtggctgccccacattcttcgcaattacactttaatgtttatattcgatcattcctgatcttgtcttttacaggatgtctgttgagatggttgcttgcatacatctgttaagatggttgctttctggtatatattaggacattgtcatctttttcaactcatgtggtttttataggttgttattcttcaatgcttcaaatagtatgactttct

SEQ ID NO: 60988 - DNA, 1412 bp, Zea Mays
cttgtatccaccgtaagcaacttcatcttcacagcttcctgaaccaatgccaccttgctccttgtttcctcccctcacatcacttccctttgcttcataaaaggtagtaaacgatgtagaactgcattgaagtcagaatttcctgatgaggtggagacaccattagatgtcccagcaaagaagcggtttgcaaaatacagaggactaaagtcatttaggacatcatcctgggatcctaaggaatcgttgccactggactatgcaagaatatttgcatttgataactttacaagaactcaaaagcatgtctttgctaaaattgctgagttagatggaggcatgaagaattgtgctcaagtgggatcatatgtaaggctttatgtgaaaaatgttcccactgatatagcctccaaactctgtcatccatcaagaagaatacctgtggttgtttctggtcttcttcaacatgagtccaaaatgtcagttcttcacttcagcataaagaaacacgactcttacgaagctcctatcaaatctaaggagcctttgattttcaatgttggattccgacaatttactgcaaggccactgttttcatccgacaacatcaactgcaataaacacaagatggagagatttctgcaccatggccgattttcggttgcatctgtatatgctccaatttccttccctccacttcctctaatagttttgaagaacagagatggcgagcaacctgccattgctgctgtaggttcgctaaaaagtgtggatccagaccggatcattctgaagaaaattgttctgaccgggtatccacagagagtctcgaaactgaaatcgatcgtgcggtatatgttccacaatcccgacgacgtaaaatggttcaagcctgttgagttgtggacaaaacatggtcgtcgtggccgcatcaaggagactgttggtactcatggtgccatgaaatgcttattcaatagcagcattcagcagcatgatactgtgtgcatgagcttgtacaagcgcgcgtatccaaaatggcctgaacagctctaccacgtataagattgcttgacgtttggctggatatgtaccagcaggcagaagcagaacgacgggaatgaaacagccttggagcttgcgtgccgtttagcttaaactaaatattttaggattaggaaaatgttttgttggtcgcctgagctaggaggccgaattttgtattggtccttcatatacttttgaacattctccttggacgtcctttattttagtatcaaatttaaattcaagtttaattgcacgttgagataggatattgccaacttaagctttaacatgttggcatatgtgctacacgcaatcatcggagggtcttctttatcataagaaatagtaggaggtggaatagg

SEQ ID NO: 60989 - DNA, 2886 bp, Zea Mays
aagaagccctaacccacctcctcgtcctcccgccgccggcgctttccgattttgtgcactccaaccttcacgtgtctccgccgcccgtccaaagcaggaaggagctccgccccggaccgatcgagaagcgagcgacaaataagggttcctcgggccgccgactgaccacctgacgcctccagctctatcatcgtccctccaacgacccgcgcagcaaagcagccggtcctcccgccgccgccgccgacatgggcgggggccgcgcgcaggtgaacaaggcccacaagagccgcttcgcgtccaaggcttcccgccacacgcacaagatcgacaaggtcaggagcgggaagtcagaaaccagccaccgcgccgctgtaaagggggcccgcgccgcccgcatccagcagagcaaggcgatccgtgataaaaaacgtgctgctttgctgaaggagaagcgctcgtcaactggaccttcaagcgcaccgcgcgtcattgttctcgttggcctttcttcatcagcaaatgtcggatcacttgccaaggatcttttggcatttgcagaaggagatgatcggaaactgaaattatctaccattgcttctcctacttataagcttcgaaccacagtactgcaagcaccatatggtgatcttaccacatgcatggaactggcgaaggttgctgatttgttagcgttcgtactgccagccaattcattctacagtggtgatttgaatagcccaattgatgagtttggatctcaatgcctgtctgtatttagggccatgggcttacctagtacagctgtttttattcgtagctgcctgaggactgcaagttttacttggcagacacaaaggatgatttgcataagttcatgtggcttttcaaggagcagcatctttcctcgccacattggagaaaccagagatcttatgttatgtctgagcaggtctgcataaatcctgatgaaaatacgggattgtgcacattgctcgtgtctggatatttgcgggcccacaatctttcagtgaatcagcttgtccatgtttcaggtgctggtgattttcagttaggccaaattgatgtcctcaaggatccatgtcctcttagtgagcggaaaagctctgatgtaatggaaacagaagataatggaattcagattgttaacacttttgttccagacccttcaagtcaggaacccttacttgttgaaaatgtgccagatcctcttgccggggagcagacttggccaacggaagaagacatggaggaggtcgacataaacaacaaacagagaaaattggaaaagaggaagcttccccaaggcacttcagagtaccaggctgcttggattgttgaggacacagatgatgaagataacgactctgatgatgacaaccagactgaatctggaatggtcattgatgagcaaggtcactcagaccaaggaagtgatggttcagatatagatgcagtgtctcactttacggagaagtttgatggagaaactattggggatactgagatggcagatgaagaaaatttgacgaaagaccagatagaggcagagattaagaaaatcaaagaagctaatgctgatgatgaagaatttcctgatgaggtggagacaccattagatgtcccagcaaagaagcggtttgcaaaatacagaggactaaagtcatttaggacatcatcctgggatcctaaggaatcgttgccactggactatgcaagaatatttgcatttgataactttacaagaactcaaaagcatgtctttgctaaaattgctgagttagatggaggcatgaagaattgtgctcaagtgggatcatatgtaaggctttatgtgaaaaatgttcccactgatatagcctccaaactctgtcatccatcaagaagaatacctgtggttgtttctggtcttcttcaacatgagtccaaaatgtcagttcttcacttcagcataaagaaacacgactcttacgaagctcctatcaaatctaaggagcctttgattttcaatgttggattccgacaatttactgcaaggccactgttttcatccgacaacatcaactgcaataaacacaagatggagagatttctgcaccatggccgattttcggttgcatctgtatatgctccaatttccttccctccacttcctctaatagttttgaagaacagagatggcgagcaacctgccattgctgctgtaggttcgctaaaaagtgtggatccagaccggatcattctgaagaaaattgttctgaccgggtatccacagagagtctcgaaactgaaatcgatcgtgcggtatatgttccacaatcccgacgacgtaaaatggttcaagcctgttgagttgtggacaaaacatggtcgtcgtggccgcatcaaggagactgttggtactcatggtgccatgaaatgcttattcaatagcagcattcagcagcatgatactgtgtgcatgagcttgtacaagcgcgcgtatccaaaatggcctgaacagctctaccacgtataagattgcttgacgtttggctggatatgtaccagcaggcagaagcagaacgacgggaatgaaacagccttggagcttgcgtgccgtttagcttaaactaaatattttaggattaggaaaatgttttgttggtcgcctgagctaggaggccgaattttgtattggtccttcatatacttttgaacattctccttggacgtcctttattttagtatcaaatttaaattcaagtttaattgcacgttgagataggatattgccaacttaagctttaacatgttggcatatgtgctacacgcaatcatcggagggtcttctttatcataagaaatagtaggaggtggaatagg

SEQ ID NO: 60990 - DNA, 3869 bp, Zea Mays
tatcttcttccccttgtcaagtattcctccttcctggcgccgtcctgctcccttctccttccccttctctagtagctaacagttggtatcaaagacatcgatcctcggatctggagccgatccagtacacccgccgagccaaaaccctaggcgctatggatccccaaatcaagctcgctttggaggcacaaactcgttccttcctcaacgagctcgacaagaagttcgccgcgcatgacaccaaatgggagtcacgcgtcggtgatctggagcggtcggcagcggcggccgccgatcagttctacgacctcaaggcggacatccataccgatgtcactgctcagttggaattcttcgtctcttccgcgacggagcgcacagatcgggcagccgcggccacgatttcgcgcgtctcggcgctcaaatccactacctcgacctttgaggcgtggcgccccaccatggagtcgatggtcactgacttcaaactcagtgtcaaagctgtacaagccattgtcgacaacttgtctctctcatgggaacgccgtccaccagagccggaccacctcaagcctggcatcctcggcacatttgggtcggcacccgtgcgcccacctaccagagaatggactaacggccccgacgggcaccacttagactcaaatcatcgggaggctggttttggacgcatgttcgcatccacccacctcccgcccaatggtttatcgatggcttaaaagatcacattaagtctgctgttttgttacaacgtcctccaaatctcgatactgcttgtgctcttgcccaactgcaagaagaagtctcagagccggctcaggttgattatcgcaagtttatttcctccccttccacaagaccagctcaatccccgatgcctcttccccgacctccccaagctgagacggtggtggctgatcatgccaaagtatatgcagttcctcgccagcgtcaggtggatgaaaagttggcatctctgaaagcatatcgccgagctcgtgggttgtgcgacaggtgtgcagacaaatgggtgcctggccatcgttgtgcaccaacagttcaacttcatgctctacaagaattgtgggagttaattgaagaagattccagcacaaacacaaccgaaactgaacccaaaccatcaggtggcagatggaggcaatgtttcatgttcacagtttttcagagcttttcaaattcaatggtcagttcagggctacaatttcttcacagatttcagggtatttcctttactaaattatgatgtggtattgggaatggattggctcgaacaattcagccctatgaaaattcattagacagaaaaatggttatcacttccttaccatggccacactattgtgcttcaaggcaagtgtcagcagccccacaatagtgaattgttccatgtggtttacctgatggatgccacggacaacgaccaagtaactgtcgagctccaccccagaatctctgcggtattgcaacattttcagccagtgtttgatattccccaaggtatgccaccttatcgctcttgtgatcactccattcctctgattcagcgttaccagccagtgtttattaggccatactgttatgccccgactgtcaaagatgagatcgaacgacaagttagtgagatgctttcgtcaggtattattcagcataacagcagtccgttctccagtcctatgttgttggtatgcaaaaaggatcaatcgtggagattttgtgtcgactttagacacctaaatgcactcacaattaagaggaagtacacagttcctatcattgaggaattaatggacgaactacaagaagcgagttggttttctagtctggaccttcgagccagattccatcagattctgctgaaagagggcgaggagttcaaaactgctttccaaacccacaatggccactatgaattacgtgttatggccttcggcttgactggtgccccagcaacattccagagcgccatgaactccacattacagccagtcctttgcaaattcgctttggttttcttcgatgatatattggtgtacagttcaactctcgatgatcatgtggagcatctatcaacagttctctctctcttgcagaaggatcagtggcaagtgaagctgtctaaatgtacctttgccactcgttccatatcctaccttggtcatgtgatcagcgaaactggtgttcagacagatccaaacaaggttacaacagtggttaattggtcgacacctaccaatatttaggaactctgtagtttccttggtcttgcggcatactacaggaagtttgtgcagcactttggaattatttcgaagcaactgactctcctgctcaagaaaaataccaagttcatttggacacaagaacatgacattccgttccattgtctgaaaactaaactgagccaagcccctgttttagcattgtccgacttctcccaaccatttatactcgaaacatatgtgtgtgatcaaggcatcggcgtagtgcttatgcaaggaggacaccccctctcatatgtgagtaaggcacttggaccacagaataaaggactctccacatatgagaaggagtacctcgccatattaatggtcattgaccattggagaacgtatctgcaacatgcccggtttatcattcacactgatcaaaggagcttaatccacctcaatgaacaacgtctacacacagtgtggcaacaaaaggtcttttataagctgttggggctacagtattcggtagtttacaagaaaggtagtgacaacactgcggctgatgctctctctcgcaagccttctcatgactctagttgtgctgctatttccataatggctccttcatgggcgtcagcagtggccgaatcttatttgaatgatgctaaggctcaggaaatgttggccaaactttcacttgatgaatcctctattaaccatttctcccttaaagatggtcttttaaggtacaagaatagaatttgggttggctctaaccctcaacttcaccacaaattggtagcagcattccaccatagccctgttggtggccattctggcgtgcccgttacttacaggaagctcaagcaagtacttgcatggccgagcctcaaatcttttgtccagaattgggtggctgcctgtgtcacttgtcaacaagcaaaaccagactgagcccatttacctgggttactccagcccttgcgagtgcccaaagttgtgtggcatacaatctcgatggactttattgaagggttgccacggtcccaacgctttgattgcatactagtggtggtcgacttatttactaagtatgtgcacttcattccattgtcacatccattttcagctctaaccattgcccagtccttcttccagcatgtttacaagatgcatggacttccggttgctatcgtctcggaccgtgataaaattttcacaagtaatttttggaaggagctattcaagctggctggagtcaatctccatatgagcagtgcttatcatcctcaaacagacgggcaaactgagcatgttaatcagtgcctcgagacatatctgagatgctttgtgaacacttgtccctccaaatgggccagctggattgccttagcagaattttggtataacactagtcaccactctgctattgacagataaccatttgaaacactctatggatatgttttcaggcactttggtattcaggcactggattcctcttcctctgacttagctgcatttctccaggataagaagcgtatccacatgctgttgcagcaacatctccaccgggccaaacagcgtatgaagcaccaaggggataagcgccgctccgag

SEQ ID NO: 60991 - DNA, 4359 bp, Zea Mays
aacaattctacctatcttcttccccttgtcaagtattcctccttcctggcgccgtcctgctcccttctccttccccttctctagtagctaacagttggtatcaaagacatcgatcctcggatctggagccgatccagtacacccgccgagccaaaaccctaggcgctatggatccccaaatcaagctcgctttggaggcacaaactcgttccttcctcaacgagctcgacaagaagttcgccgcgcatgacaccaaatgggagtcacgcgtcggtgatctggagcggtcggcagcggcggccgccgatcagttctacgacctcaaggcggacatccataccgatgtcactgctcagttggaattcttcgtctcttccgcgacggagcgcacagatcgggcagccgcggccacgatttcgcgcgtctcggcgctcaaatccactacctcgacctttgaggcgtggcgccccaccatggagtcgatggtcactgacttcaaactcagtgtcaaagctgtacaagccattgtcgacaacttgtctctctcatgggaacgccgtccaccagagccggaccacctcaagcctggcatcctcggcacatttgggtcggcacccgtgcgcccacctaccagagaatggactaacggccccgacgggcaccacttagactcaaatcatcgggaggctggttttggacgcatgttcgcatccacccacctcccgcccaatggtatgctcccgtccgattcacccacattttcccatcttctcggttcccctcatcggttgggaggagggcacacagaggggttcacacagtcctccaattttggtcccttaccaaaggttccgtttcccccttttgatggcgacaacccccgtttatggatcactcgtagcaaagactactttgatttatacaatgttgatcccaccgcttggattcgtgtgtctaccatgcatttcacagggccgacttcccgctggttgcagtcattaggccctcagtttcgaatttacccctggccggaattcactagattactgcttcagcgctttggtcgggatcagcacgacaccctgattcgacagcttttccacattaaacagtccaccaccatagctacttatattgaacaattttctggaatagttgatcagttgttggcctatgagtctcacacagaccctcgtttctatactatgcagtttatcgatggcttaaaagatcacattaagtctgctgttttgttacaacgtcctccaaatctcgatactgcttgtgctcttgcccaactgcaagaagaagtctcagagccggctcaggttgattatcgcaagtttatttcctccccttccacaagaccagctcaatccccgatgcctcttccccgacctccccaagctgagacggtggtggctgatcatgccaaagtatatgcagttcctcgccagcgtcaggtggatgaaaagttggcatctctgaaagcatatcgccgagctcgtgggttgtgcgacaggtgtgcagacaaatgggtgcctggccatcgttgtgcaccaacagttcaacttcatgctctacaagaattgtgggagttaattgaagaagattccagcacaaacacaaccgaaactgaacccaaaccatcaggtggcagatggaggcaatgtttcatgttcacagtttttcagagcttttcaaattcaatggtcagttcagggctacaatttcttcacagatttcagggtatttcctttactaaattatgatgtggtattgggaatggattggctcgaacaattcagccctatgaaaattcattagacagaaaaatggttatcacttccttaccatggccacactattgtgcttcaaggcaagtgtcagcagccccacaatagtgaattgttccatgtggtttacctgatggatgccacggacaacgaccaagtaactgtcgagctccaccccagaatctctgcggtattgcaacattttcagccagtgtttgatattccccaaggtatgccaccttatcgctcttgtgatcactccattcctctgattcagcgttaccagccagtgtttattaggccatactgttatgccccgactgtcaaagatgagatcgaacgacaagttagtgagatgctttcgtcaggtattattcagcataacagcagtccgttctccagtcctatgttgttggtatgcaaaaaggatcaatcgtggagattttgtgtcgactttagacacctaaatgcactcacaattaagaggaagtacacagttcctatcattgaggaattaatggacgaactacaagaagcgagttggttttctagtctggaccttcgagccagattccatcagattctgctgaaagagggcgaggagttcaaaactgctttccaaacccacaatggccactatgaattacgtgttatggccttcggcttgactggtgccccagcaacattccagagcgccatgaactccacattacagccagtcctttgcaaattcgctttggttttcttcgatgatatattggtgtacagttcaactctcgatgatcatgtggagcatctatcaacagttctctctctcttgcagaaggatcagtggcaagtgaagctgtctaaatgtacctttgccactcgttccatatcctaccttggtcatgtgatcagcgaaactggtgttcagacagatccaaacaaggttacaacagtggttaattggtcgacacctaccaatatttaggaactctgtagtttccttggtcttgcggcatactacaggaagtttgtgcagcactttggaattatttcgaagcaactgactctcctgctcaagaaaaataccaagttcatttggacacaagaacatgacattccgttccattgtctgaaaactaaactgagccaagcccctgttttagcattgtccgacttctcccaaccatttatactcgaaacatatgtgtgtgatcaaggcatcggcgtagtgcttatgcaaggaggacaccccctctcatatgtgagtaaggcacttggaccacagaataaaggactctccacatatgagaaggagtacctcgccatattaatggtcattgaccattggagaacgtatctgcaacatgcccggtttatcattcacactgatcaaaggagcttaatccacctcaatgaacaacgtctacacacagtgtggcaacaaaaggtcttttataagctgttggggctacagtattcggtagtttacaagaaaggtagtgacaacactgcggctgatgctctctctcgcaagccttctcatgactctagttgtgctgctatttccataatggctccttcatgggcgtcagcagtggccgaatcttatttgaatgatgctaaggctcaggaaatgttggccaaactttcacttgatgaatcctctattaaccatttctcccttaaagatggtcttttaaggtacaagaatagaatttgggttggctctaaccctcaacttcaccacaaattggtagcagcattccaccatagccctgttggtggccattctggcgtgcccgttacttacaggaagctcaagcaagtacttgcatggccgagcctcaaatcttttgtccagaattgggtggctgcctgtgtcacttgtcaacaagcaaaaccagactgagcccatttacctgggttactccagcccttgcgagtgcccaaagttgtgtggcatacaatctcgatggactttattgaagggttgccacggtcccaacgctttgattgcatactagtggtggtcgacttatttactaagtatgtgcacttcattccattgtcacatccattttcagctctaaccattgcccagtccttcttccagcatgtttacaagatgcatggacttccggttgctatcgtctcggaccgtgataaaattttcacaagtaatttttggaaggagctattcaagctggctggagtcaatctccatatgagcagtgcttatcatcctcaaacagacgggcaaactgagcatgttaatcagtgcctcgagacatatctgagatgctttgtgaacacttgtccctccaaatgggccagctggattgccttagcagaattttggtataacactagtcaccactctgctattgacagataaccatttgaaacactctatggatatgttttcaggcactttggtattcaggcactggattcctcttcctctgacttagctgcatttctccaggataagaagcgtatccacatgctgttgcagcaacatctccaccgggccaaacagcgtatgaagcaccaaggggataagcgccgctccgag

SEQ ID NO: 60992 - DNA, 197 bp, Zea Mays
gtcgttcttgctaaaaatcaagtcagatcatgaggtggtacgttaattgatcacgtgatgttgaagacaaggtttggattgatctcaagataatgctgatggacgaagctaaagtgggtgaatcgaacaagtatcaggatgagagatgctcaccaagcgttagtacttttgtgaatgattttgtaaagtgtttgcaa

SEQ ID NO: 60993 - DNA, 3423 bp, Zea Mays
atgccccgcttcgcgttgtggcccaagtgcagagaggtggacgtggcggccctcgcggggcccgcaccgtcgctgcttccacgtgggcccccacctccccggtaccccacagttcaagatctgaattcgtcaggggagagtgagacgcaaggtctccggcagagcctagaggagcagacaggagaagcggaggcggaagcgatgctgcacggcggtgggtcgcgagcaccggcgaagccacggcgccccagctcccactctcactcccgccagcgggcgccgtccccgcccactccgtcgcgccgagcgagcggggctgtcgcttcggcttcccacgaatcgaaggagcagtcggcgttggaagctccggtgatgtcttccgtggaagagacatcgggcctctccaacaagccaagcgctgtccctgcgaagaaagacacgccgaagcaggtggagttcacccattgctcgcctggtattgttggcaggctgatgggcctagacaccgtgcctcgccccaagaaatctcttgaccgctgccagagtgacacccggggtaaccggcgacacttgtcaggagttgctcgaggcgtggacagcgcttcgtctggggatcaggcatgtaacaccagttctgatgagctgccagcatttaacgatgttttcgaggtaacagagatggagaacatggcgatgcatgggccgctgcagcctggaaatcaggagccatatctgacaaacattgaagctgatcttgaatttgtgaggcaaaagttcttggatgttaagcgccttgccactggcgaagggaatatgaactctaaggagttcagcgaagcactcgaggtactgcactccaaaagggatgttttccttgaaatccttcaggagaacaggactgcagtgtcaggattctcaggacacatccttagccacagtgggttgcagtgctcttcttataccagcaatgctgctgctgctgctgctgcacaaccgtttgagaaagaaatcccttgtggcatggaaggtgtgtgtgacgggatgcatgtcataccaaaagagtttgaggaacccgttcctagcatgccgcccagagaaacttcagttacaccagtggcgcccttggcaccaaatgagggcaagagtaaaggctcatgccgtcgctctgaaatcgttgttctgaagccaaaccttcagaggaaaagtttcacacctgttctctctcaaattgttgttctgaagccaaaccttcagaggaaaagtttcacacatgttctatcaagccaagaagcatcacaatataaacagaagagagatacacaacatttgaagcctccacaccatagtaaacaattttctgtggcacgaaacgatgaagttctcgaaggagaaaggggttttgcactacagaaggctagaaagcaagcacataggagtggtagcaggaggagatcatcccaggaagaatataaccttgaagcagatactgagaaggcaagagttagttctacttctacctctcatgaagacaccgtgcccatttattcaagcatccattcttcgggaccatcagtaagtagaaaggctagaaagcacctctcgaaaagatggcaaatgacctgccaatctgattcagaagattcaattcctaaaggcataaaaacactaggtgaaatgctcggactgtctgatagagatgcaccaagagaaaccacccacatggtaggatcagatccaaacttcagtccctataatgtgagagaggtgccagacagccctcttggcattagcagtaaagatgggtggaagacagggatttactgtgaagatgattcaagagctggtatatcaaggaattttctcaggtccaaatctcttccagcctcatctaccacttctacaaaattatcatgcaggagacagtctgcaccaacctgtaggttgcccattctgaaagatatattgaatgcacccactgatgaatctgaaaatgcacatatcaggaagagatcaccaatcagaaatgcaaaacagagaaatgaaaaagcaactgcccatctaggaagggaaaatatgctacctgaaaaagaaattcatgtaacctcggaaatagccaggcacagcatctgcgtttctgatatttctcgggcaagcaatatacatactgaaaagtgccctgatgatgctatcaaaactgaggatcaggaagagtctgattctgctcttcaacatgattacaagaaaaaaacacaaggttttatgggatgctaccagacaatagcaacatcatctccggagacaaaagaagttatatcaattcagaatcaggattgcatagaattgaaggaggaaaggaacccatcagtggagattgaagctgatcaagtctacactcgaacagcagaatcagcaagtattgcaagtgctgaatgttgtgactgctcaagtccatctgctttatcgcaacaaagttctggtgaagagacttattctggaatctttaaaagcatcaacgtcggtattcaagaactcaaagagcaactgaagatgctgaagatggaagaccaaaatgacatttgtggagactattctgatacattgtcaagcgacgagttcgataatatgaacatctcaatatatcgaaccatggaagagcagttgtctatgtttaaggatggggaggacagagatttctcttatgtacaggacatgcttgctagcgcgtgcgacttgccagagcacctagaagattggcaagtgagctcagatgtgttcctttgtcttgaaaacaagtacagcaagctggttctgtggtcaaaatccgacaggaaacttctgtttgatcttgtgaactcaattttggctgacatgaccattccagacattggcttgtgttcaaagctcatgatgaagcgctggcctgaaatagatcacggacagttaactgaaatcgtcaggcaaatggtgcagaagcgaagtaactgtgggcactttttcttggaggatgttcagcctttgccattggaccatggttctgaggtagagctggttggaacgaagattgccatgatgatccatgatgacattatgacagattttatcgtcggaatcatgtcccaggagaacctccttgttatcagctaatgtttagggctgtagtggtttagctagattgttaggcagatgagtcacaacctgcaaaccagtagtttgcgaatactagtctactatatataaaaggcttggttaagctgctgtctaattgacgttgctgcaaatcactggtttgctctctgattgtagtgctgaaatagtgacgggcggattgcattggcagggcaggtgtatgtatgtgtacatcctactacaattactgctgtgtcctaatcagcagtctgaacatgtttatcctactacactttt

SEQ ID NO: 60994 - DNA, 1230 bp, Zea Mays
gtctcttatagtgctccggccgattccacgggggcgctgcggattctggagaagatcatgagggttccgtacggagcggacaaggagttcttcagatactcgctattccttgttttctgcaaccgtatcaccacatccatggtgtctgcaatggtgttactggcaagtaagaaatccttggaccctgtggctcctctacacaaatatggcgttgtctccatatcaaacatactgaccacaacctgccagtatgaggccctcaagtatgtcagcttccctgtccaaacacttgctaaatgtgccaagatgatacctgtcatgatctggggcacaataataatgagaaagaagtatggtggaaaagattacttctttgctgtcatcgtgactctgggctgcgcattgttcattctatatccggcaatgatggatgtgagcccatttaataaaggcagagaaagcactatttggggtgtttcactcatgtttggttatcttggttttgatgggttcacaagcacgttccaagataaactcttcaaagggtatgacatggaaatacacaaccaaatattctacacgacagtgtgctcttgtcttcttagtttaagtgggctgattctccagaatcatctgattccagctgtggattttatgtttcatcacccagattgcttctctgatgttctaatcctgtccagcgttttcaaggagcatgaaacagagaatcttttggaactactgaattttagttaacattaggcggtagctatcaggatattgtagttgcttaacaaactcacccaccccacaaattgtcattcaacgaaggcatgccctccagcatcagtcggtaccgatgattgtcagcgaggtataaagcctctaccatccccttcccttgaacataacaggccctacagacagattccattttagtagaagcggtggatcgacaactgcgcctcgttggtctatcttttgtccaaatggcaggatgctgccaatgggcgttgtaagcgcaatcagccaattgggtggtaatgtaagctttagctttagatactgggagatggtctgtcaacagttacttttagcctaaacattcttgtacatctttgaaagtgaacagatttgtaatccttgtggcatataaatggtaacattgttcataacttttaaactgatatagaacccagttgttaaatataaatggattctaatctaata

SEQ ID NO: 60995 - DNA, 1945 bp, Zea Mays
cgcgtgcgccccatccaccaccgaccgggcccgtcgctgcaacaaaggcgttcagtttcgttccgtttgggttggtctgtttagtgcggcggcgacagcgacagcggaggagagcggggacgggaggggccatggcggacgcggcggcggacagggagagggacaagggcaaggacgaccgccgccgctgggcggctcgctgcggtttcgccgtcctcggcatcatgagcaccctcctcgtctacggcgtcctgcaggagaagatcatgagggttccgtacggagcggacaaggagttcttcagatactcgctattccttgttttctgcaaccgtatcaccacatccatggtgtctgcaatggtgttactggcaagtaagaaatccttggaccctgtggctcctctacacaaatatggcgttgtctccatatcaaacatactgaccacaacctgccagtatgaggccctcaagtatgtcagcttccctgtccaaacacttgctaaatgtgccaagatgatacctgtcatgatctggggcacaataataatgagaaagaagtatggtggaaaagattacttctttgctgtcatcgtgactctgggctgcgcattgttcattctatatccggcaatgatggatgtgagcccatttaataaaggcagagaaagcactatttggggtgtttcactcatgtttggttatcttggttttgatgggttcacaagcacgttccaagataaactcttcaaagggtatgacatggaaatacacaaccaaatattctacacgacagtgtgctcttgtcttcttagtttaagtgggctgattctccagaatcatctgattccagctgtggattttatgtttcatcacccagattgcttctctgatgttctaatcctgtccagcgttgcaacagctagtcagttctttatatcctacaccattcgaacatttggggctctcacatttgctaccataatgacaactagacagctggtaagtatattgctgtcctgcatctggtttgcacatcctctcagctggatgcagtgggttggcgcagccattgttttcggagctatatacgcaaagagcttcttgaggagtaaaccgcagaagacagcagtggcaagcctgccgcatggctctagcccgaaccctgctaacagtagttgacgattgatgacatgataacattaggaaacaatggacttgttgcggtaccgggacgaagatcaatggcgccatagcgccatggtgaggtaactggacaaatgggttccagatgtagctgtgtaaactgctcctgacctggaggtgatggaggtgatctccctttttagtggaaaaaaaccaaggtcactggtgattttcttcatcgaaaaggcctcagcgatgctcttcctataaaggttttcaaggagcatgaaacagagaatcttttggaactactgaattttagttaacattaggcggtagctatcaggatattgtagttgcttaacaaactcacccaccccacaaattgtcattcaacgaaggcatgccctccagcatcagtcggtaccgatgattgtcagcgaggtataaagcctctaccatccccttcccttgaacataacaggccctacagacagattccattttagtagaagcggtggatcgacaactgcgcctcgttggtctatcttttgtccaaatggcaggatgctgccaatgggcgttgtaagcgcaatcagccaattgggtggtaatgtaagctttagctttagatactgggagatggtctgtcaacagttacttttagcctaaacattcttgtacatctttgaaagtgaacagatttgtaatccttgtggcatataaatggtaacattgttcataacttttaaactgatatagaacccagttgttaaatataaatggattctaatctaata

SEQ ID NO: 60996 - DNA, 1683 bp, Zea Mays
cgcgtgcgccccatccaccaccgaccgggcccgtcgctgcaacaaaggcgttcagtttcgttccgtttgggttggtctgtttagtgcggcggcgacagcgacagcggaggagagcggggacgggaggggccatggcggacgcggcggcggacagggagagggacaagggcaaggacgaccgccgccgctgggcggctcgctgcggtttcgccgtcctcggcatcatgagcaccctcctcgtctacggcgtcctgcaggagaagatcatgagggttccgtacggagcggacaaggagttcttcagatactcgctattccttgttttctgcaaccgtatcaccacatccatggtgtctgcaatggtgttactggcaagtaagaaatccttggaccctgtggctcctctacacaaatatggcgttgtctccatatcaaacatactgaccacaacctgccagtatgaggccctcaagtatgtcagcttccctgtccaaacacttgctaaatgtgccaagatgatacctgtcatgatctggggcacaataataatgagaaagaagtatggtggaaaagattacttctttgctgtcatcgtgactctgggctgcgcattgttcattctatatccggcaatgatggatgtgagcccatttaataaaggcagagaaagcactatttggggtgtttcactcatgtttggttatcttgggtatgattgtatatttgtatgaagctttagaaaaatggctacagaaaagatagaaatacctgagttaatttcagaagctttctaccgtatgattggtagtaaaatacttgaaaatttcccaataagggcttgcactactattcgtatatgtgtagatcatacagacaactagtggccgataaactcacagttttgatgggttcacaagcacgttccaagataaactcttcaaagggtatgacatggaaatacacaaccaaatattctacacgacagtgtgctcttgtcttcttagtttaagtgggctgattctccagaatcatctgattccagctgtggattttatgtttcatcacccagattgcttctctgatgttctaatcctgtccagcgtcactggtgattttcttcatcgaaaaggcctcagcgatgctcttcctataaaggttttcaaggagcatgaaacagagaatcttttggaactactgaattttagttaacattaggcggtagctatcaggatattgtagttgcttaacaaactcacccaccccacaaattgtcattcaacgaaggcatgccctccagcatcagtcggtaccgatgattgtcagcgaggtataaagcctctaccatccccttcccttgaacataacaggccctacagacagattccattttagtagaagcggtggatcgacaactgcgcctcgttggtctatcttttgtccaaatggcaggatgctgccaatgggcgttgtaagcgcaatcagccaattgggtggtaatgtaagctttagctttagatactgggagatggtctgtcaacagttacttttagcctaaacattcttgtacatctttgaaagtgaacagatttgtaatccttgtggcatataaatggtaacattgttcataacttttaaactgatatagaacccagttgttaaatataaatggattctaatctaata

SEQ ID NO: 60997 - DNA, 1455 bp, Zea Mays
tgcactcctcggcgaaccccaccggccgcgcgtgcgccccatccaccaccgaccgggcccgtcgctgcaacaaaggcgttcagtttcgttccgtttgggttggtctgtttagtgcggcggcgacagcgacagcggaggagagcggggacgggaggggccatggcggacgcggcggcggacagggagagggacaagggcaaggacgaccgccgccgctgggcggctcgctgcggtttcgccgtcctcggcatcatgagcaccctcctcgtctacggcgtcctgcaggagaagatcatgagggttccgtacggagcggacaaggagttcttcagatactcgctattccttgttttctgcaaccgtatcaccacatccatggtgtctgcaatggtgttactggcaagtaagaaatccttggaccctgtggctcctctacacaaatatggcgttgtctccatatcaaacatactgaccacaacctgccagtatgagatctggggcacaataataatgagaaagaagtatggtggaaaagattacttctttgctgtcatcgtgactctgggctgcgcattgttcattctatatccggcaatgatggatgtgagcccatttaataaaggcagagaaagcactatttggggtgtttcactcatgtttggttatcttggttttgatgggttcacaagcacgttccaagataaactcttcaaagggtatgacatggaaatacacaaccaaatattctacacgacagtgtgctcttgtcttcttagtttaagtgggctgattctccagaatcatctgattccagctgtggattttatgtttcatcacccagattgcttctctgatgttctaatcctgtccagcgtcactggtgattttcttcatcgaaaaggcctcagcgatgctcttcctataaaggttttcaaggagcatgaaacagagaatcttttggaactactgaattttagttaacattaggcggtagctatcaggatattgtagttgcttaacaaactcacccaccccacaaattgtcattcaacgaaggcatgccctccagcatcagtcggtaccgatgattgtcagcgaggtataaagcctctaccatccccttcccttgaacataacaggccctacagacagattccattttagtagaagcggtggatcgacaactgcgcctcgttggtctatcttttgtccaaatggcaggatgctgccaatgggcgttgtaagcgcaatcagccaattgggtggtaatgtaagctttagctttagatactgggagatggtctgtcaacagttacttttagcctaaacattcttgtacatctttgaaagtgaacagatttgtaatccttgtggcatataaatggtaacattgttcataacttttaaactgatatagaacccagttgttaaatataaatggattctaatctaata

SEQ ID NO: 60998 - DNA, 1686 bp, Zea Mays
gtgcacgcctgcactcctcggcgaaccccaccggccgcgcgtgcgccccatccaccaccgaccgggcccgtcgctgcaacaaaggcgttcagtttcgttccgtttgggttggtctgtttagtgcggcggcgacagcgacagcggaggagagcggggacgggaggggccatggcggacgcggcggcggacagggagagggacaagggcaaggacgaccgccgccgctgggcggctcgctgcggtttcgccgtcctcggcatcatgagcaccctcctcgtctacggcgtcctgcaggagaagatcatgagggttccgtacggagcggacaaggagttcttcagatactcgctattccttgttttctgcaaccgtatcaccacatccatggtgtctgcaatggtgttactggcaagtaagaaatccttggaccctgtggctcctctacacaaatatggcgttgtctccatatcaaacatactgaccacaacctgccagtatgaggccctcaagtatgtcagcttccctgtccaaacacttgctaaatgtgccaagatgatacctgtcatgatctggggcacaataataatgagaaagaagtatggtggaaaagattacttctttgctgtcatcgtgactctgggctgcgcattgttcattctatatccggcaatgatggatgtgagcccatttaataaaggcagagaaagcactatttggggtgtttcactcatgtttggttatcttggttttgatgggttcacaagcacgttccaagataaactcttcaaagggtatgacatggaaatacacaaccaaatattctacacgacagtgtgctcttgtcttcttagtttaagtgggctgattctccagaatcatctgattccagctgtggattttatgtttcatcacccagattgcttctctgatgttctaatcctgtccagcgttgcaacagctagtcagttctttatatcctacaccattcgaacatttggggctctcacatttgctaccataatgacaactagacagctggtaagtatattgctgtcctgcatctggtttgcacatcctctcagctggatgcagtgggttggcgcagtcactggtgattttcttcatcgaaaaggcctcagcgatgctcttcctataaaggttttcaaggagcatgaaacagagaatcttttggaactactgaattttagttaacattaggcggtagctatcaggatattgtagttgcttaacaaactcacccaccccacaaattgtcattcaacgaaggcatgccctccagcatcagtcggtaccgatgattgtcagcgaggtataaagcctctaccatccccttcccttgaacataacaggccctacagacagattccattttagtagaagcggtggatcgacaactgcgcctcgttggtctatcttttgtccaaatggcaggatgctgccaatgggcgttgtaagcgcaatcagccaattgggtggtaatgtaagctttagctttagatactgggagatggtctgtcaacagttacttttagcctaaacattcttgtacatctttgaaagtgaacagatttgtaatccttgtggcatataaatggtaacattgttcataacttttaaactgatatagaacccagttgttaaatataaatggattctaatctaata

SEQ ID NO: 60999 - DNA, 1661 bp, Zea Mays
aatttagttgagtgactaaagtaaccaaacacccccttataatttgagggtctagtaatattagacgacaagtgtgacagaaattgtgcgacaacttttggcaagtatacaccaaactggccctgtgtcttgtgcacgcctgcactcctcggcgaaccccaccggccgcgcgtgcgccccatccaccaccgaccgggcccgtcgctgcaacaaaggcgttcagtttcgttccgtttgggttggtctgtttagtgcggcggcgacagcgacagcggaggagagcggggacgggaggggccatggcggacgcggcggcggacagggagagggacaagggcaaggacgaccgccgccgctgggcggctcgctgcggtttcgccgtcctcggcatcatgagcaccctcctcgtctacggcgtcctgcaggagaagatcatgagggttccgtacggagcggacaaggagttcttcagatactcgctattccttgttttctgcaaccgtatcaccacatccatggtgtctgcaatggtgttactggcaagtaagaaatccttggaccctgtggctcctctacacaaatatggcgttgtctccatatcaaacatactgaccacaacctgccagtatgaggccctcaagtatgtcagcttccctgtccaaacacttgctaaatgtgccaagatgatacctgtcatgatctggggcacaataataatgagaaagaagtatggtggaaaagattacttctttgctgtcatcgtgactctgggctgcgcattgttcattctatatccggcaatgatggatgtgagcccatttaataaaggcagagaaagcactatttggggtgtttcactcatgtttggttatcttggttttgatgggttcacaagcacgttccaagataaactcttcaaagggtatgacatggaaatacacaaccaaatattctacacgacagtgtgctcttgtcttcttagtttaagtgggctgattctccagaatcatctgattccagctgtggattttatgtttcatcacccagattgcttctctgatgttctaatcctgtccagcgtcactggtgattttcttcatcgaaaaggcctcagcgatgctcttcctataaaggttttcaaggagcatgaaacagagaatcttttggaactactgaattttagttaacattaggcggtagctatcaggatattgtagttgcttaacaaactcacccaccccacaaattgtcattcaacgaaggcatgccctccagcatcagtcggtaccgatgattgtcagcgaggtataaagcctctaccatccccttcccttgaacataacaggccctacagacagattccattttagtagaagcggtggatcgacaactgcgcctcgttggtctatcttttgtccaaatggcaggatgctgccaatgggcgttgtaagcgcaatcagccaattgggtggtaatgtaagctttagctttagatactgggagatggtctgtcaacagttacttttagcctaaacattcttgtacatctttgaaagtgaacagatttgtaatccttgtggcatataaatggtaacattgttcataacttttaaactgatatagaacccagttgttaaatataaatggattctaatctaata

SEQ ID NO: 61000 - DNA, 4319 bp, Zea Mays
tattcgtatatgtgtagatcatacagacaactagtggccgataaactcacagttttgatgggttcacaagcacgttccaagataaactcttcaaagggtatgacatggaaatacacaaccaaatattctacacgacagtgtgctcttgtcttcttagtttaagtgggctgattctccagaatcatctgattccagctgtggattttatgtttcatcacccagattgcttctctgatgttctaatcctgtccagcgttgcaacagctagtcagttctttatatcctacaccattcgaacatttggggctctcacatttgctaccataatgacaactagacagctggtaagtatattgctgtcctgcatctggtttgcacatcctctcagctggatgcagtgggttggcgcagccattgttttcggagctatatacgcaaagagcttcttgaggagtaaaccgcagaagacagcagtggcaagcctgccgcatggctctagcccgaaccctgctaacagtagttgacgattgatgacatgataacattaggaaacaatggacttgttgcggtaccgggacgaagatcaatggcgccatagcgccatggtgaggtaactggacaaatgggttccagatgtagctgtgtaaactgctcctgacctggaggtgatggaggtgatctccctttttagtggaaaaaaaccaaggtagtcctgatgttagtttagtatccactatccagagaccaatttttcagccatcccaggctgtgctatgttttttttctcgaactcgcaagagaattaagtgtcaaaataataagagaaggaaaagagtacaaaaaacaggggtaaaccctgccacactagagattacattattacagctctaaacacgcaagagacaactccatgagctctctggcacctgcagcacttcacatagtaaactctatggagatgaactgtagcgccaaattaactgtaggttgaagtccattaaaaaggcaactatttctaagcttccatagcttctaagcaagaagaataataatagaatccattcctttcctttcttctttaggaatcttcttcattgttctgctccaccagaatgaaaaatagtcatccgtgggctgtggcaccaaagataagggacccaacttctgaacggcagcagcccacacttgtctatcaaagacacaagaaagcagaacatgttggatagtttcagctttctgatcataaaaaggacatgccgaagggtggggaacacctcgttttgcaagtctatcagctgtccaatatttatttttttatcaccattcacgtaaaaaactttattttgggggggggggggtgcccaggttttccaaaccattttccaaggagcaaaattgattgctccctggaaaaatgtcgtatatgctgagtggcttaaatatgttccatattgatcaagtctctatcgatgttgatcttcaacctcgggctgtagcacaaagtcatttaggatttcctacaactgaagatattcttgaatcatctggattgtgaggacgcccctaatatccctcacccaattcctttctataaggccttgagcaattgttcttttattaccgattcttgttggaattattttggagagatttggagttaacacttgtatggattgctctcccagtcagctgtctttccaaaacgaagtgttgttgtccccattgccaaccaaggtctcaaccatagtcacaatgttctcgggtcgattgggtcgagaaacagggtcacaggtcatgggtcgacacttgaaaaaaatatggtacaagggggtatacctttatggctttatgggacgtgaatcgtgagttttgtacgtgaacccaagtctaatgtgtcgatgatccctgatcgattccaagggtcgagggtggtgttccaaaatcccaaggaccatatatgctatgccccagcggcctagcttaataccaacttaacaaaacctaacaccagcccaatatcgacccactatagcaatgaaaccgtatacttctgctctagacccacataggagccatagagctcacgaggcagaagcaccaccgcccaaccaaggacctttgcaacctgtaggaggagcgccgacgcaggaagccagagcgccacctcttgctggccacaggaggatcctcattcgcgcaccatacatgtcgccccgccatcatctgcgtagccttgccccaatccgcgccaccctgctccaacctgcatgatcctcctctattacaaacgagcatgagtcgttgttcccatctgcattggtacaacgattccctagcgttcgggacgatgacccatggtaaccccgacccacgatttgggacgccgattgcaggtaacggaatacggcatcgaccctgtttcttgtgactatggtctcaactgccacatggaagaaagccttttccttttttgaaacaggaattggcagccctgcccaaggtctatgagcatcattttttccagccaaagccatctaatccttggggaccagcccataacttggaggttaggtatgaggccaccaaactgcaagggtcttgtaattttatcccatgccaataaacacttgggcaaatagactcttcttttgtcgatgctttgatgacccatgtaggcaactccaaagcaagcatttggtgaattggtattgcagaaaatatatcttttactacagctaatcttcctgccttatccataagtgttgctttccaatgtggaaggttactagccaccttatcgatcaacacctgccaatctgccttacttggctttcttggtgttagagaaagacccaggtatttgcaaaggaagtctttcacttcacaagagagaacattagtcaccaaattagattcttcagaagagcatctaattgagatgacagaactcttctcaatgttagtaactaggcctgaagcttttccaaagacactcaacaaggcctttaaagatattgagctccctctcatttggcttgaggaaacaaatgacatcatctgcatgcatggagaacctatgctgcatctgctgggtggggagaggttggatgaaaccttgaccagcagaaaatctgactaaagaattcaatacctccatcaccaaaatgaatagcataggagagagtggatctctctgcctaagtcctctttgatggctaattgaacttccagtctccccattgactagcaccttgggtagttgctgtggatagtaaaatgcagatcatgttttgccacttagatccaaagccaatatgttccataaattcagtaagaaagggccatgaaactgagtaaaatgcctttgaaatgtccaattttagtagacagtaggagtctctcttctactgcagacatctagccatttgctgtactaacagaaaattatcatggatcttgctctctttcacaaaagcactctgattaatggatattaatccaggcagcactgcagctagatgattagccatcgccttagcgattgtgttggaataagtctcgtggtctgtgggaaggacaacagcagtccttgacggtttttgactgcagggatagcagcatctcagtctttttgactgcaaggacaacgtgggacagcagcagcagcatgtcagtcttttgactgcaaggacagcgtgctgcaggcatctccttttcgtttttctagcttttggaggacaacaacttgctgcagttttcttttgactagagtacaacaacacctagtggttagtgcagtttgtaggacaggtagtgcagcttgtaggacagcatattcgcatctctaggaagcatatgctgcagccccttggactataaatatgtatcccaacccttagacgggtatgacatcgtgtattgtttgagaaaataaacagagaatcgccccaacccatagtgtcatcctctggatgagagtaagagtcccgttgcttacaattggtatcaaagtcaagttatcttgtagcctaaacatcttttgctcatctccttcccacgcctctccctatactctgtcggaagcaagagctccaattgttgcttcctctcctgctcggacgagcagcctttcgtctgagacaacctcttccacacgcagcgacccctctatagcacaccatgtccctacgctcggtcacttcgagtgtgcggcgccagcaggaagccgaggtcgtcgcgacacaagaacgcgagcgagcagcagcagcggcaacggcgagggcagcacgactggtggcggcggaactggcagcagcgag

SEQ ID NO: 61001 - DNA, 4976 bp, Zea Mays
cgcgtgcgccccatccaccaccgaccgggcccgtcgctgcaacaaaggcgttcagtttcgttccgtttgggttggtctgtttagtgcggcggcgacagcgacagcggaggagagcggggacgggaggggccatggcggacgcggcggcggacagggagagggacaagggcaaggacgaccgccgccgctgggcggctcgctgcggtttcgccgtcctcggcatcatgagcaccctcctcgtctacggcgtcctgcaggagaagatcatgagggttccgtacggagcggacaaggagttcttcagatactcgctattccttgttttctgcaaccgtatcaccacatccatggtgtctgcaatggtgttactggcaagtaagaaatccttggaccctgtggctcctctacacaaatatggcgttgtctccatatcaaacatactgaccacaacctgccagtatgaggccctcaagtatgtcagcttccctgtccaaacacttgctaaatgtgccaagatgatacctgtcatgatctggggcacaataataatgagaaagaagtatggtggaaaagattacttctttgctgtcatcgtgactctgggctgcgcattgttcattctatatccggcaatgatggatgtgagcccatttaataaaggcagagaaagcactatttggggtgtttcactcatgtttggttatcttggttttgatgggttcacaagcacgttccaagataaactcttcaaagggtatgacatggaaatacacaaccaaatattctacacgacagtgtgctcttgtcttcttagtttaagtgggctgattctccagaatcatctgattccagctgtggattttatgtttcatcacccagattgcttctctgatgttctaatcctgtccagcgttgcaacagctagtcagttctttatatcctacaccattcgaacatttggggctctcacatttgctaccataatgacaactagacagctggtaagtatattgctgtcctgcatctggtttgcacatcctctcagctggatgcagtgggttggcgcagccattgttttcggagctatatacgcaaagagcttcttgaggagtaaaccgcagaagacagcagtggcaagcctgccgcatggctctagcccgaaccctgctaacagtagttgacgattgatgacatgataacattaggaaacaatggacttgttgcggtaccgggacgaagatcaatggcgccatagcgccatggtgaggtaactggacaaatgggttccagatgtagctgtgtaaactgctcctgacctggaggtgatggaggtgatctccctttttagtggaaaaaaaccaaggtagtcctgatgttagtttagtatccactatccagagaccaatttttcagccatcccaggctgtgctatgttttttttctcgaactcgcaagagaattaagtgtcaaaataataagagaaggaaaagagtacaaaaaacaggggtaaaccctgccacactagagattacattattacagctctaaacacgcaagagacaactccatgagctctctggcacctgcagcacttcacatagtaaactctatggagatgaactgtagcgccaaattaactgtaggttgaagtccattaaaaaggcaactatttctaagcttccatagcttctaagcaagaagaataataatagaatccattcctttcctttcttctttaggaatcttcttcattgttctgctccaccagaatgaaaaatagtcatccgtgggctgtggcaccaaagataagggacccaacttctgaacggcagcagcccacacttgtctatcaaagacacaagaaagcagaacatgttggatagtttcagctttctgatcataaaaaggacatgccgaagggtggggaacacctcgttttgcaagtctatcagctgtccaatatttatttttttatcaccattcacgtaaaaaactttattttgggggggggggggtgcccaggttttccaaaccattttccaaggagcaaaattgattgctccctggaaaaatgtcgtatatgctgagtggcttaaatatgttccatattgatcaagtctctatcgatgttgatcttcaacctcgggctgtagcacaaagtcatttaggatttcctacaactgaagatattcttgaatcatctggattgtgaggacgcccctaatatccctcacccaattcctttctataaggccttgagcaattgttcttttattaccgattcttgttggaattattttggagagatttggagttaacacttgtatggattgctctcccagtcagctgtctttccaaaacgaagtgttgttgtccccattgccaaccaaggtctcaaccatagtcacaatgttctcgggtcgattgggtcgagaaacagggtcacaggtcatgggtcgacacttgaaaaaaatatggtacaagggggtatacctttatggctttatgggacgtgaatcgtgagttttgtacgtgaacccaagtctaatgtgtcgatgatccctgatcgattccaagggtcgagggtggtgttccaaaatcccaaggaccatatatgctatgccccagcggcctagcttaataccaacttaacaaaacctaacaccagcccaatatcgacccactatagcaatgaaaccgtatacttctgctctagacccacataggagccatagagctcacgaggcagaagcaccaccgcccaaccaaggacctttgcaacctgtaggaggagcgccgacgcaggaagccagagcgccacctcttgctggccacaggaggatcctcattcgcgcaccatacatgtcgccccgccatcatctgcgtagccttgccccaatccgcgccaccctgctccaacctgcatgatcctcctctattacaaacgagcatgagtcgttgttcccatctgcattggtacaacgattccctagcgttcgggacgatgacccatggtaaccccgacccacgatttgggacgccgattgcaggtaacggaatacggcatcgaccctgtttcttgtgactatggtctcaactgccacatggaagaaagccttttccttttttgaaacaggaattggcagccctgcccaaggtctatgagcatcattttttccagccaaagccatctaatccttggggaccagcccataacttggaggttaggtatgaggccaccaaactgcaagggtcttgtaattttatcccatgccaataaacacttgggcaaatagactcttcttttgtcgatgctttgatgacccatgtaggcaactccaaagcaagcatttggtgaattggtattgcagaaaatatatcttttactacagctaatcttcctgccttatccataagtgttgctttccaatgtggaaggttactagccaccttatcgatcaacacctgccaatctgccttacttggctttcttggtgttagagaaagacccaggtatttgcaaaggaagtctttcacttcacaagagagaacattagtcaccaaattagattcttcagaagagcatctaattgagatgacagaactcttctcaatgttagtaactaggcctgaagcttttccaaagacactcaacaaggcctttaaagatattgagctccctctcatttggcttgaggaaacaaatgacatcatctgcatgcatggagaacctatgctgcatctgctgggtggggagaggttggatgaaaccttgaccagcagaaaatctgactaaagaattcaatacctccatcaccaaaatgaatagcataggagagagtggatctctctgcctaagtcctctttgatggctaattgaacttccagtctccccattgactagcaccttgggtagttgctgtggatagtaaaatgcagatcatgttttgccacttagatccaaagccaatatgttccataaattcagtaagaaagggccatgaaactgagtaaaatgcctttgaaatgtccaattttagtagacagtaggagtctctcttctactgcagacatctagccatttgctgtactaacagaaaattatcatggatcttgctctctttcacaaaagcactctgattaatggatattaatccaggcagcactgcagctagatgattagccatcgccttagcgattgtgttggaataagtctcgtggtctgtgggaaggacaacagcagtccttgacggtttttgactgcagggatagcagcatctcagtctttttgactgcaaggacaacgtgggacagcagcagcagcatgtcagtcttttgactgcaaggacagcgtgctgcaggcatctccttttcgtttttctagcttttggaggacaacaacttgctgcagttttcttttgactagagtacaacaacacctagtggttagtgcagtttgtaggacaggtagtgcagcttgtaggacagcatattcgcatctctaggaagcatatgctgcagccccttggactataaatatgtatcccaacccttagacgggtatgacatcgtgtattgtttgagaaaataaacagagaatcgccccaacccatagtgtcatcctctggatgagagtaagagtcccgttgcttacaattggtatcaaagtcaagttatcttgtagcctaaacatcttttgctcatctccttcccacgcctctccctatactctgtcggaagcaagagctccaattgttgcttcctctcctgctcggacgagcagcctttcgtctgagacaacctcttccacacgcagcgacccctctatagcacaccatgtccctacgctcggtcacttcgagtgtgcggcgccagcaggaagccgaggtcgtcgcgacacaagaacgcgagcgagcagcagcagcggcaacggcgagggcagcacgactggtggcggcggaactggcagcagcgag

SEQ ID NO: 61002 - DNA, 7185 bp, Zea Mays
attgtagaagggaacaacttaaccctagttggccactgtaaaaataaacccagtgcaaatccaaccactgcccactcgcgtgtttgaccctagttaaaggaaatagtgaccagggggaaaactgaatccatatatgtatcctgagcgagttcttggcttccccactatgtcataccctctctcgacctctgtgaaaaacccttaagccctctctacctctcggtcttgttgaaggggccagaaccttgtgtagacgctgaaagtggtgaccaccctccaaatcttttatcttctcgtggccagtccattcagagagtgtcttcaccggaacgtcgtcatgtatccggtgagcaccgttgaaggctgtgtcaacgtcgaccaacccaatcatagcttctccgagtgaacttcgagcaccttgaagaagaatttgaagtggaagtagaaagggagcctgttcctccatctgaaattcctcccactgagactgtcatcgaaggtcctccggaaggtgccccatttggatttgctgctaactgtaatatcctggtagaagaacccgactctcctcctcaccaaggcaagccccagtgcatttgccacctccttgctgtttttaaacttttatcagttatatgttgcattaggtggtaggagttgaatgattaaacctttgttgcataacttccttgaacaattgattaccatccttgatacctgttttaaaaaggcagatgtgcttagtatgctcatagactaagaacaaaatgttttgatctatgaatcatgtttttacaaagaaaaagaggctggagtgatgaaggtatcaaaggccttgatgacttcatcattttagtagggtacctctgacaggtaccaggttttcaaaaataatttaaggggagaccagacgttgagcaggaaaggtcgcccgtctgtgtcgattaaggaccgttccgattgttggcctgctgatctaggaccctttaactggccacatgcctcatcatgggtaagcttagcctcggctggaccaataccagaaaggccggcccgtaatgggagtggagagatggcgagagtatcgtgtatccacctgacaagatgctggatggtggggtactgagctctcggttggcggggacccgttctgatcttgagaaacccgtgggcgagttgacatatgcaagggttaagtgctacatatgtcgtgtggttggagatcctcagctgagtattaaccgattcggatcgccgaacttctcggatatcaagactggatcactgccctgcatcgtagataacaagtgaaactaaagctgttaaaatgaagctagtgtaggacaagtgaatgctctagattaggcaaatctagactcaggaaaagtacttaacttgtgaagtaaaagtttggcttaaggatccactactagtaagcttttctgcaaaactgagtctttgaaatttggtaagccttaccttgattcccaacaactagcatatccttgagagtctttttctttagtcgggtcagtcttgctgagtatttccatactcagggtttatcccattgttgctgcaggagaaactatcaacacgtatgagttttgttaaactcataatggtgacttttaattgtgtgcattatgtgtgtgctgcgggaagatggttgcttcccagttgatgtaatcagttagcactttaactctacctcgggcatgtaataataaatacttcgtggtttgtaaacttattagcttattaatgtatattatcttattgtaaagacttccactccactcctatttttaaagtttatgttcttgactggttattgtaatatttgcaactttgcgcgaatggtccttggaaatgaacgagtttatcgaaactcggcacctcgagtaagttatctgatccacttacatatctatccgaggccttgagggcaaggattggtgtacgtgggcccgataacttggttgggttgtgacacctggtgtcttggagttcaaagaaacaaatctctgttgccctatccaccgctgaggccgagtatgttgccacaggacaatgttgcgcacaactactttgaatgaggcaaaccctccggaactttggctacaatttgagcaaagtcccactcttatgtgacaatgagagtgcaatccgcatggcggataatcctgttgaacacagccgcactaagcacatagacatccggcatcactttctgagggaccaccagcaaaagggagatatcgaggtgcaccatattaacaccgagaaccagctagtcgatatctttaccaatccattagatgagaaaaccttttgcaggctgcgtagtgagctaaatgtcttagattcgcgtaacttggattgatctatagcatacatgtgttctatgcctttgatcatgttactttatacatttatgtgatttattgcttagttatggtgctcaagttgtgcaagggatccccggacctcataagtccttgtgtgaatgatgcacatatttagggggagatgtgctacaacttgaccctttgagactaacctttgtgtttgagtatacttgatttagtctcaaaggtgaattgaaagggaaaggtgaacttggaccatgcaaagacttccactgcactctggtattcgtgtacttaattccaagttcattcttatgctcttattgcctttttgctcttaattgacatttttggtgaggcaatggggttaaagggccaagaatgatctcgttttggtgcttaatgccaaagggggagaaattaaggccaaagcaaatggatcagctaccacttgtgaattttgaaaacaatagagttagaattttttatttgtccaaaatactcttattacaaaatttagtctcttgtgggggaaaatttatgattatgggaaaaagggggagtttttggcacttgatcaatttcactcttggattatctctctttacgcccaaacaagtgagtttgacttagagataggaaaatgaatttgatttgcaaaaacgaaccaagtggtggcaaagaatgatccaaatatgccaaattttagacaaaaacaattcggtcctcatttgcatcgatgttgcacttatttttgttgccttttgatgtgttgccataaatcaccaaaaagggggagattgaaagggaaatgtgcccttgggcaatttctattatgttttggtgattaagtgcccaacacatttaattaagttcttatatgttaaatgaagagaaaagtgcaaatcaagacacgaggtatgtttctagacttagcacattgtttgaagtactaacatattttgtctaagtgctagaaacaggaaaataaagaattgcaaaagacttggctgtgtgcagccaaagtccagctcggcctggcacaccggactgtctggtgcgccaggctggactccagtgaaaaggtcgctctcgggaaaagttcagcgacgtacgggtataattcatcggactgtccggtggtgcaccggactgtccggtgagccaacggtcgccagcgcaacggtcggctgcgcaatccgcgggcgacgcgtggcccgcgcaaacggtcggcaggggggcaccggattgtccggtgtgcaccggacagtgtccggtgcgccaattggcccggagctgcaatggtcgtatgcgctagcaaaggaaggagatcagcaccggaccgtctacagtgactgtccggtggcgcaccggactgtccggtgcgccactcgacagaaggcaaggatagccttccttgttggcctctaacggttcctagctgccttggggctataaaagggacccctagtcgcacggaggagctacccaagcttacaagaaacattctaagactccaagactccaacttcacgcattcgattctttgagatagtgacttgagctccatttgagttgtgaactccgtgcgttgtgttttgagctcaagttgtgacttgtgtgcgtgattgtgctgtggatttgagtcttgtgtgtgttgctctcccctcccttacttatgtgcttcttttgtgatcattattgtaaaggtgagaggctccaagttgtagagattcctcgcaaacgggagaaagactaagaaaggaaaaaaccgtggtattcaagttgatcatcggatcacttggaaggggttgagtgcaaccctcgtccattgggacgccacaacgtggaagtaggcaagtgttacttggccgaaccacgggataaaaatcacgtgtctcttgtgtgctttctctttgattgtctatgttcacaagagctcgtttcaagctacttagctgttctaacattaataactaagttttgtggctattagtgttgaattttacaggatcacctattcaccccccctctaggtgctctcaatggtatatattgtaaccaaaacgataaaggtcaaacctggagggacatataaatagggtttatgtagcagaactacattatatttcaccccttggcatgcttaccataatttatatttgatctaccagaagtaagaagagtagaaaaatagccatgaaattccacatcaccatagagcttgaagctaaattgggcattaatatgtccttggtctttggcaccagaagagccacaagtcttgaccacaagattttaagtggtggtaatttgtgatagaaatatgaagattttatgaagacctgttgtgttttccctagtcctggtgactccttcgtatgagagtagtactatctgttgttgaagactggtcccagatggatatcgttcttgttttgctcttgccaagcagttttcaccatttacttagtcttagcaatcaggtggtttttcctagataaaacaaattcttggccttgtatgttctattccaaagcttctctttttgctgaataattaagagatcgatattatgctctatagaacaagttggtatataatatgaggagaaaagtttgccccgctggcaacttacatcacaaataattgactattgttataagttctctctcaaaaaatttatacctaaaaatgttgcataacttgaaacccaatttcagaccagtatgagtaattgggtaaaccatgggcaatggtaaaacgagttgggctatacatctctgcattcaaaaattatttgcttagcagcattgccctgatgttgtgcactttactaccattatctatgtacacattttcatatgtgcttgaaagcacaatgcaaccagtgaatgtccttgtgagcgctagacctgatggtcattttccttgttgatctgaagtcaactacttgctcaaaaagacaaatggtgtgcaagagcccctgaagtattttttatggctaacaaagtgttgtgtgtattagtctaaatcttgatgattggctatgtatttggtaatgataacagtaagtttgctgaattataaccacaaagcaccttgttgttacgtgtcttgctagaagttgagactaatccttcatgttgaaggacaaatatgtagtattcatgccactacattaatctaagtccaaagctcactgcataaaacccctatctgtaatgtgcgtaagattttccaaataaatcaccacaatagcatacattggccacaattggatgattgtggttggggattttatctgtatgcttttagaacatctcggcattaggggagataaatcctcatctagtgtaatccctcaatattctataaacgcacaaaagccaaactgaacttgtggtttggtgtgtactcctgtgtatctggagtttgtcagaaatcgttgaggagaaaccatattggtttgaatgcttctacctgatgtagatgtggatatacccgggattaatatcatatccacatttgacttattggcatttgatctattctcggggacgactgcgaatatgatctattggtcttagtcaaagcatatgttttgattacagattcattaattcaccctgatggtgatttgcctcacgaagaggttcatcttgatgatgaagttcctagcaatgcgcgcaatatcattgtgctgcgaatacgaaacaatgaatcttttgtcttgggaaatgacagagatcattattaaatgtgggagacaaatatgttgacacctatcttgcctctctagattgcaaagggatccaaaacaaagtcctaggcatgagtgtttgaagctctcttatcgggtcaatgataaatgcaaccgaggctgaaccaataatcgcaaaatgaaagtcgcgggcttgaagttcagacatttatgggcactgaaataatgtgtggtgaatgcgatggttcaagtggtcttgtgagaaacccatcccacatatgtgttgaataaacaatgttccactatgtaatatacgcaaatggcatgaattaaaatatgcagttaataggattctgaagatccgtcatgagatcctaggaggactcatatcattgaattataaatacgcaacatataaatctcgtattgggcaatacattcctgatgaatgaccactctccagtgtaaagagaatatcttctagttgagattatagttcctaaatggaacctttcccgaagaagtatgtgttgaacacaaaagtttgataacccatataaagggataaagacccatacagacccaaaaaagaataagatgaggtaccaaaggacttgaagttcaccgaataagcacatgtgcattccacgagttttactcatggtattttccactagatgtgaaattacgatattctctaaagccctgatggaagaaacctataaggtttaggtgttactggcaaaatatccccattatgccagaatgacagactataacgatgtatttgatcgatgaagaatccctgatggattatgatctttgatggacttttgttacaccatcgtagatgttgcaatggatgaacgtctagagcgatgtgtcatatttaaaatatgtactattgcaactatattatcccctaagtcctattgaaggacatgttacttgttttgcacaattatgtatagattatggtgtaagatagaaaatgatagcaccccaacctcatccattctcgttattccagatgaacaatgagacatatatcttgaagaatatgcttgagttatgagggataacgatttg

SEQ ID NO: 61003 - DNA, 1861 bp, Zea Mays
cccaattgcaaatgctgacacatgataggaggagcatttctcagtgcggggtgcccatcactgacctcacctcgcactagcttgcttgctagcttttttccatggatcatcgatcgtcgtcttagcagcggcacttgccttgcatttttcatttgccagatctaccccaccgctagtagttgttgtagtactatactacactcctctccttcttggctagctagcaattcaaccagctctctctctctctctcttttgtatgtatgtatatgtgtatataaataaccgtgcacgcagtgtgactagcaagcagtacacagaggatctggtaagcaactaagcaagtgtactgaggacggaggcatcgatccagcgttccagctagcacgcacgcagccagcacccagcacccagcagtagaatctatatatcgtacgcaagtagtggatcgaggcatctatctgcagtccctttcttcttcttcctcttgattgataggtgcgccgaagcttgttttgttgggtggcctttgtctctgtcgtctcgtctcgtctcgtcttccgcccggccgccaccacctgcaggctatactagctagctattaagtccggccaaccaagcagctcgatcaggtcggtcgacggcggggacagttcggagggaggaggcggccggagaccgaaggacgcctaccatcaactcgcggtcctggccgcgctgccgaaaaattaaaggaagaggacgaaggctgaccgatggacgatcgttatcctcatcatcagtcgtcgatggcgacaccggcagcagcgagcaagatgagcaagaagctgcagggcggtggtgaccgtagtagtggcagtagtagtaggggcagcggcaacagtgataagcagcaggtgccggcggcggcgatgaggaagggcccgtggacagaggaggaagacgctcagctggtctgaggcgcaccggcaagagctgccgcctccgctgggtcaactacctccacccggggctccggcgcggccgcatcaccgccgacgaggagcgactcatcctccagctccacgcgcagtggggcagccgctggtcgcgcatcgccaggagcctccccggccgcaccgacaacgagatcaagaacttctggaggacgcgcgccaggaagcagaaggcggcggcgcagcagcagcagcagcagcaggacagccggagcagcaagacggcgacggcgtcggcgttctcagggtcagcgtcgtccgtgactaccaccacgtccagctgctctggctctcctagtccgaccagccgcggctgtggcacggccacgtcatcgtccgctctgaccgagtccgcgctgcggcaaagcggcggcgaagacgaggacgccgagctcgacgaggcgtccaccaccaccaccaccacggcaagccagcgtcaacaccaagacgacgaccaccagcagcagcaccaggagtgctacgcctcggaccacttctggaacgacatcgcggcggcggaggcggccatctacatgttgatcgacggcggctggacagggtccggccccggccatcccgccgccgatccgccttcgtcgccggcgtgggagtactgctctgattactcgctctggaggatcgacgacgacgagtactacgagaagatgctcgactcctcctcctgattcgattatccagccatcacacgcatatgcatatctatcattagcttatttctttcttttttttgtgctgattagtctagcatacagcagctatgagaatccaaagcttcggttcggctttcgttgcatctctttgtataatactgtaacatatctatatatatatatgtatgatatgat

SEQ ID NO: 61004 - DNA, 1455 bp, Zea Mays
gttaaaatttagcccaagatttccataaagccacgacaacccagcttctaaaaataaacagataataaatacctaaagctgtaaaacagacccataggttgtgcctgcaattctctctctactgcaccgatggcaaaatttcctgatgctagttctgtctagaagaaaaaaaaaacattttggaaaactctggtgctactactacttctgtctagctgcatatccactaaaatagtcaaatatatgttgtcggtgatccagctttttatcccgcattgaccttggtgcacagagatgccacgcctctccgtcgtattactttttgtgccgacggaagaacggcagctcctttttttttctctctccctctctcaagataagagtggaaaagtatgtgggagaatgggttcagtaccgcccccagttgttgccggacatccgaaaactttgatgcactgcacacaacaatttgctccactcacagttcattcactatttgttggctatgtttccgccgatatgctgctgtatgctactaatgcttgtgctgtgcctgtgctgcctgagagcacagcacgttttttttggcaggatgtggcagagggctctcctccgtccgctagtgacgcgttggccttccagtgggcagaaggacgggagcccccccgtcgtctcgtctcagactatctacccggcctcccactccgccaaaagctcacgcctggacctcgtgacttctctggagtttatggtgaggtacgtgtgcgacaaggtctttccgggacgacgacagtcaccgcctgcttgtccaccatttaccaccatcttccgcgtgcctgtgcctgtccaccatttaccaagccttgcagatattgccaggaaagcgatacggaggattcggcggaacactggaacgacgacgagcaacgtggccgtggattgagtgataatgtacgggataaggaggatgacgagaagaagaagatatggatttagataagagagagagagagagagagagagagagagagagagagagagagagagtatggtgatgagcaggcaggataaaacaacatggtgctgctgtccacgtcacctttccatgcttccatgtctatccccagatgatgcttgcttggtttactaccgccttcgtcctctctcaaacaggctctcagctgggctgttcagacgatttactctactgcctccatccatccttcgatgaggaccaacccgatccacggtggcgcagcaatgtcgtctagtgattagtgacgggtagaaagaaggttactagtggaaatataaaaaattgacggtcactaactgcatgctggacaagttgaattgctgctaactctctctctctctctctttctcttttgtagtaataaatatatacacacaaatataggagcacgtatcatggtgacgtgcactgttattgtg

SEQ ID NO: 61005 - DNA, 603 bp, Zea Mays
ggccacccattgcgctcggcatccagtgcccttgctcctcttcattggcggttgaggggaactccctccatggacgagcctccttccatgtcaaaactccttccaccgctgctccgccaccatggacgcgtcgtcttctgccatgctcttctactcagtctctagctctccgatcgtgctccctccctcgtgtgtctccatgtccatctggaacccgtcaaccgaagcagtgacatactactcgattaatgctccaaccaggttcggctgccgcccgcctcatcgacgcggcatggccctccacctccatcctcaagcacgccgacgtctaggcgttcttacctgcctccttcacgatccactcttgttgcagcgacaacagtctgtggtggcgttctgctgcaacggcttagctcgtcactgccccggtcacggtcaagaacagatacctcaggatgaggcgcatggaggttgctgcgatgtgttcgtgagaggtctaggtcatcgtatcccagtcaactttgggttgctgaatcgttgtctctttatgatgtaattatttatttattttgtatagaactcctattgtataataaagttgtg

SEQ ID NO: 61006 - DNA, 1710 bp, Zea Mays
agggagagagatgaggtaccggcgctgagtcgctgacgggtggggcccgggtcggtgccgaaggagggggtggggtggtggcgcgtccatcccacgcgactctcccacacaaataccatcaccttcgctaccattgcttcaccatcaccaccaccccgcggctgcagctcagcagctccagacctcaccagaggcacctaccacaccgcccgccgccgatcccgtcacccgtctcctccccgctgcggagcgtctccagccctgcccggtgcccgcccagatggcaaacgcggcgtcagggatggccgtggacgacgactgcaagcgccggttcctggagctcaaggccaagaggacgcaccgcttcatcatctacaggatcgacgagaagaagaagatggtggtggtggagcaggtgggcaagcccgtgctcggctacgacgacttcgccgccagcctccccgccaacgagtgcaggtacgccatcttcgactacgacttcgtcaccgaggagaactgccagaagagcaagatcttcttcatcgcctgttgcatgatgtgtgtgaatgaaggtctcctgacacggcgcgcgtgaggagcaagatgatctacgccagctccaaggagaggttcaagcgggagctggacggcattcaggtggatctccaggccaccgactccgccgaggttggccttgacgtcatccagggccgtgcaagctgaggatgcccagcgatgaactgcccatgccagaggatgtatgagcatcatcagttcagatgagaacttgactgggcgggctatgtaaaaactgcatccaccgcagtgatgaaatcaatctaatcaatctaccacccccttcagcgtgcgtgttcttgctacatatcaacaacagcattatgatggtggaattctggtaatcagaatttcttgatgatccatggcactttttgccttgtgcgacctcaggacctggttgaaggatatgcagaggttgaagtttgagcatgacttctcagcggttgaaaaagacacaaagtccagaacataaaattccagcaaatcaaacatcattaggcagtgtataacttgagttcagaacatccataacttctcagaagagtccaggttaaaccgttaagcaaagccatggactgaggatagatatgtctgacgaccaaaacatacagaacacatagtctgtccaaaaattattgttccaaaacactaggcgagctctcaaacgcacacaacgacgacgaaaaaaaacagcatgctgggtttatttatacacatcccgtccatcatatttacagaactgaggcacgcctctcaggaagcttcggcggtcgagaagtgcatcttagcaacagactcgcgcaagaagctgcttccacagttggcttcctggctacccatgctgtagtccatgatcccggcctcatgttcgctgagatcgtctgctggagactggccaccagtggtgctaacgcctttcggcctaacaagttcacagtgtgtaaaatcaacggaatgcgtcacatgctcacagagacaaaatagcagtaaaaaatacgctagcaaaacatacccgataccaggaacctgcggtgcagatggattctgggcagaactctgttgttggttcttcttcgacttccccttctgcctcttcttctgtttgttcttctccttcttgcggtgctttga

SEQ ID NO: 61007 - DNA, 1887 bp, Zea Mays
atcctcattgccatgttccttctgctcctgatgatgataacgaccaccaccaccaccaccttctccgccatgagccttctcctgcagctggtccttgagcccctcctggtacgtctccacgaaattcttcatcgcgtcggtgtacgtggacgcgcgggccatgtaaatccgccgcagggcaggcttcagcgtctctgcgccacccctagcggcgacagcgaggtcctccagcacagttggctcgctgctcgccttccccttcctgtcactaccagagctggggtggctgccattggacgactgctcctccacgtcctcggctgccttcttgtagtcgttgggcctcagctcagggccgatgtcccggacccatgacgcgccgtacagccgggtggcctccttgaggatgcaccagcgttcatgccatgagagcttgggccgcttcttgatgtgaggagggtccggcagtgacgacgggaaggctatctccttgaggtcataccgcacatagtcatacagcttcctgcacacgactctgagcttcatctccctttgtttgctcccttctgcagcgacttggatctgatagcaagttagtagggggcaccgtgctgaattaatctgtcgacaacaaaggagcaactaaaatgtcatcagtgagtatgccagcgactaaaccctttgcacccaggtcaggatgaagctgctgataaaatagagaagaaaataatgccaaccgaaaactgtaaaatgacagcaaaactagctaatgatctgcttgcttgaacgatgcatggccttggaacagcccacaggctgctgctctgactgctaagttcacctttgggaagaaagcacatttgtcctcaaaagttactttggctgctatatgaatatctcggattcatgctatcttctcagaaattccatccaagcattagatgtgtccctagtttatatgtaactttagctgtgcttgtcagacgcagaaagaactacatgtattttctatgttattagtaaatcggggggagcacccttgtgtatctgagtatcagcttccattatgaacagttgtaccgaattttaaggcatgttttagaatacatgaactaaaaatatttggattgaggaaaacattgcttctttatatgtgacccgccacaggtctgcattgcatacctacaactataatgatagcaaggcaaatgcatcagagtctgtcgaccaactctcacgtcaacaatgcagaaatagagcagctgaaggtggatgagatggaggaggtcaggaggaggcattctgatgttagctagtctgacctgtgaacggagtagcaccatgttaccaaaacaatgcaggattgaggggggaggagagaaaacaatcttttaaggataattgtgctaatacaagagcacagcaaaatggctacagcctttagtacaataatttgagcatgtaaactggcaggaatctaaagcctgaaaatccatttgtgctatgaaactagcaagcaagataagatcatcaaagttcccttgatgaactctggcatcaggtacgcaagaaactgaatgcagttcaaataggaagatgcgttgaggtattacatcaaacagcttgcttacacgagcaagatgcaacaggcctcgcctagccactggccatagagcatcgccttagcatcaacaacggcgtaagaagccctatggccgatctaggatttaatagcgccccgggccgatttcaatatggcaaaactacaaatatacacgatacaaaacataatgtgtcaaatgtacaatacaaaacaaagtcctcaccttaatcctctgttcctcacctgagtcacttcaatctctaaggcgccgagcagcaacacag

SEQ ID NO: 61008 - DNA, 623 bp, Zea Mays
atcctcattgccatgttccttctgctcctgatgatgataacgaccaccaccaccaccaccttctccgccatgagccttctcctgcagctggtccttgagcccctcctggtacgtctccacgaaattcttcatcgcgtcggtgtacgtggacgcgcgggccatgtaaatccgccgcagggcaggcttcagcgtctctgcgccacccctagcggcgacagcgaggtcctccagcacagttggctcgctgctcgccttccccttcctgtcactaccagagctggggtggctgccattggacgactgctcctccacgtcctcggctgccttcttgtagtcgttgggcctcagctcagggccgatgtcccggacccatgacgcgccgtacagccgggtggcctccttgaggatgcaccagcgttcatgccatgagagcttgggccgcttcttgatgtgaggagggtccggcagtgacgacgggaaggctatctccttgaggtcataccgcacatagtcatacagcttcctgcacacgactctgagcttcatctccctttgtttgctcccttctgcagcgacttggatctgagtcacttcaatctctaaggcgccgagcagcaacacag

SEQ ID NO: 61009 - DNA, 643 bp, Zea Mays
atcctcattgccatgttccttctgctcctgatgatgataacgaccaccaccaccaccaccttctccgccatgagccttctcctgcagctggtccttgagcccctcctggtacgtctccacgaaattcttcatcgcgtcggtgtacgtggacgcgcgggccatgtaaatccgccgcagggcaggcttcagcgtctctgcgccacccctagcggcgacagcgaggtcctccagcacagttggctcgctgctcgccttccccttcctgtcactaccagagctggggtggctgccattggacgactgctcctccacgtcctcggctgccttcttgtagtcgttgggcctcagctcagggccgatgtcccggacccatgacgcgccgtacagccgggtggcctccttgaggatgcaccagcgttcatgccatgagagcttgggccgcttcttgatgtgaggagggtccggcagtgacgacgggaaggctatctccttgaggtcataccgcacatagtcatacagcttcctgcacacgactctgagcttcatctccctttgtttgctcccttctgcagcgacttggatcttaatcctctgttcctcacctgagtcacttcaatctctaaggcgccgagcagcaacacag

SEQ ID NO: 61010 - DNA, 1490 bp, Zea Mays
aaccatttccccatttttggtacccggcaggggtactcgtttcggatgatgaacccatccggagccctgatggactcatcatcataagtttgctttcacttttgaatcaaaagcccataaccaatgttacacatcgttcttttaaaaaaacaaatgatttttgagtttctaagtaggactaagcagtaataattttttttaataaaacagggatttaggaattttcaaggaatggtaatgcatcaattgtttatcacacaactcctatcacctaatgcatcatatcaggtgataaagcatttaaaacgcaaggaaggggcaaatgcaccggggcttgccttattacaggaggaaatctgagatcttctattacgataagcagttagatggaatccaccactggatcagcagaactagaacatgctcctttcttgacaaatcacttcttcttggtactctgctctaacacgcggaaagccgatgaagcgagagaaccacatagagaaagtatgccgagcacaacggcttgctgggtatcaggaacagcgagactggcagctagcagctttacaatgacaccgcgagcacgacgaggtcggaagagaggctgtgggtcaaggaaatcgacgacgcgaaggagctcaccagcgaggtcggcggacggcaaagcgtggagttggaagacggtaccaggccggtgagctggaacgtgtgcgatggagcagcgacagatggtcggtcgagcgtgtgaggaagcagctcaaggcacggaagagcagcagcagcgcccaagccagcgtgagaagggagctcgcgtccgggctcagtatctgggagttgagcacaaggtacaaggcgaaggcgagtgctatgcgctatgcgtgagagttcaattggagcacgccgagagagagagagacgtgggagatttctagagagtgtacgtgtcacgtgtgcaccagataaaagagagaacgttgagagatgcagctggaatggataggaaggagcgcttgaattatctagacgagagaaatgatgtggagataaggaagagaataaagaatttcagagagagacgtttcagagagtggacgtctgcaccaaattgtatgccccaaactgatccaagtttcagctatcagcacctgaatcccacacttcttcgacagaacccccatcttaatccccttaaatctcacgattccaaatgataacagtgaaccgatcgtaacataaattgctctctcaacatccttctacatctttgcttcagaattcctagtccaaaaccccacggatttggtactatagacctccaaaattgagcacaaattcacaaaaactcagtttgcagctaactgaaccagagtccagaccatacccaactgacggaggatgtttaggtgcagtttactctcagatttgtacagcattaagcctatctctccttagaaaacttgctcaccttactttggtctccaagtttg

SEQ ID NO: 61011 - DNA, 494 bp, Zea Mays
cgtgaatatgcatagagagataattatatataaatataaagttagggtggggttgaataattgacatatatatgataggtgttttcgttaacaaaatgatgaacgtacaccagtacacattacttgaccacaaatgatcgatagtagtagtaaaccctaacaaagggatcagataaaaaagcagcagaagaagaaacataaaacaagtgaccatgctagcagctataatgaagtagcagctgtagacactagtaatatttgcgcatgatcagcatccaaaccgagcctctcctccctccagagtttcttcttgaaagcaaacattgcaacaagtgcatgcatgctactggtcttttctatatgatcataacaataccatcgatcacacagacagagacactctatctctaggctatatttgtaggaaacgaaccgatacgatcgtagcacgacgtcgtagtagctagctatagcaggacacttgaattgttgag

SEQ ID NO: 61012 - DNA, 1205 bp, Zea Mays
atcctcatcacaggcaacaaggcaccacacctcttcttcttcttcctcctcctcctagcacagctagcgcctgctccccttcgcctgtgatcatgtcttgcagcagcggcaagtgcgactgtggctccagctgctcctgcggcagctcatgcaactgcagcatcaagaccacggtcctcgccgcgccgaccaccaaggccagcgccggcggcttcgaggcggccaccgagggcggcggctgcgactgcaacacctgcaactgcggcaccagctgcggctgctccagctgcggctgctcctgctgcagctgcaactgagctggcccggcccggcgatggcgcacgagagtcgagaggaggaggacgacgacgaggcgtataaatataatagcggcgtccagtaaataagatcctgtcaactgcacccgccattatccatggtcgctcgctcctcgcctgcgtctcctggtcctggggttcgtctgaacgtcctcgcggcttcacgacggcgatgccgcctccgtcgatcctgtccgtctcgtgccggatttaatattagatctatatgcgtgtttttctgcgttattactacatctacatgtgtctgtctgtggtgtgtctctctgacggccccatgcgtcagcgtcactgcttgcttcagttctgcatctcactctgttgaggtgaaaaactgataacatctttgcagtgctagaaaacctgagaacctcatgatatctaagtaactgagccaagagagagagagagagagagagtatctaagtaccttgatccacttggacagcacagttagactctgaaacgatcgttgcataatgcagagtaccctgaaattcgaagcatcgacatgaccagctacagttccggctactgttatgggtttttctcttcgcccctttagataacagaatatcgatatctttataaaggaaataatggaatagtaatgggcaatgctacggcaatttccctactagaacgcaatttcttaaataaatttgaacagttattttttttagtttttaaattgattatttcattaacctacaaaataaaaaaaaacacagcaaagccctgtagtgatatctaactagcccaaaaagaacaaatgtatgagtatcttaatgtgcttggaaatatttttcggcgagagagagagtgagagagctcttaatgtgattttaa

SEQ ID NO: 61013 - DNA, 473 bp, Zea Mays
ctagaatttggccgagcccaattcccgcccagccgcccaggtttagggttagcgctatctggtcgcactccaggccgccgcttctccccgtgcagtctcctccctcccccggccgtgctccaggccaccgccttctcccccatgcagccgcctcctcccgtgcaacctcctccctcccccttgctcagccgctcagctccgcctgtccgccccccgccagccccgcctcctttggcttgctattgctcgcttgttgtccggccgccctgtcccgcactcccgctgtccgcccgtcggcctgtcccactgtccgcttgctgttgctcgcttgttgttgccctgctgtcccgcactcccactgccccgttgttcctcgcttgctgttgcttcagcagttgctcaaacaaacagctttgcgtctgttcctgttcctgttgctcgcttgctgaagagggagtattaacgaacgccgg

SEQ ID NO: 61014 - DNA, 3494 bp, Zea Mays
ctttgtttaaaccgtttaaaagttaaaactcacccatgagtgtttcaacgtttcgtcgttttaataaccttgggtgcgacggcgttcactggcggcgagctgtcattcgaacaaaacaaaagcggtagagttagaaggaaaagttcagtgagcatcacttccacctggtgattagggaacacgaacgcaaggaacggggaacaccttgaggtgtgatgaccacggtggggtggagaagatggctgttgcagtcaccagacacagacacaggaagaacactacggtgcactggagcagatcactaaggcgacgaggagggagatacacaaacttgcagacacgagtaccaccatacccacaatgaacccaggccagaactcaagggcagagaggaacttcatagaataaagtctttagggtagctaaacacaagggcgatgaatctcacccaagggtgtgcacaaaaggataggcaggagggaatcaccttgggataaccatgaggtgctgatatttaccgtatggaactcctaggcccacttacatcttatctcccaccacatcagaagaaactagagcccgtagtggcatcaattcttttttcagatcttcattcaaccaatctctgaagtctgaacccttctctgattgactgcaccttcctctgttcagtccctttttttcacacattctagacaaggacaggccgaccacatttaaaagagcttgctcataacccaaagctttaccaacttgccacagcaacccagggttaaaaacatactgataaaaagttataatgacccaaagttctaccgaacttactgagttctcttgtttcagttaactgaaaccatttcaccgacagtgcagacttgggacacctcacactaacttatgtgcaataccaagccccactcacctcaaggaacttgttcacctagtatcggtctttctctttgctataatactccaaggttagaaacacacacatcacaagctgcagtgccctgaagtagagcacaacaccctgatttcagtttcatttaactgaaactgagcctatatcacacagactgacaggtcatgtttgaggacacattactcacatttctttgttgtaccaggcccaacattccataaggactttgttctacttcctatggtctttgactttactataagatcctcaatccaaaaccttatggactgttcacaaaagggctccaaacttggcaccatacaacaatttcagttttcagaaatgaaccaaattcagttaaagcattgtctgtctgtccaactttgagcaagctttacacctagttccatgtaagtctagggtcaaatagcttaaccaagtttgcactactacaatagctctacaatgttgctataatgaccaataactaaagactcatggtttaaaagttacagtatttcaaagttgaaccaacttcactgaaattcagttttagcttctgaactaaactcggtcaccaacatctgacagttcaactttggacatttgtttctccaatttttgcataggatcaagccaagcccacttaagtaaagttgttcatcatcttatggtcttcgcttcctccatagacacccgaacctaaaaccttatagaatagccacaaaagaaccccaaaacagcacacacaatactaaattcagtttcagtactgttcacaatctgaaactctagaaacctgtgagcaccactttgaaccactctttttcctaggttccaaatgcttctagggtaaagtggcttaagtaacctagtacccctattgtagctcttcaactttgttacggtggccataatccataactctatgaatagagcagtagagagctcaaaagttggaccaaaacactaaacttcagttcttgaattggcactaagtctgaaatccagaaaatctgttagctctactttggaccagtttttctctaagttccaaatagctttagggccatttgacttaaacaaaattacactcctaatatagatctataactttgttataatgaccaccttccaaatgtttatagatcagaagttacataacaccaaagttgactagttgctattatttttcaggaattccaatctgaacccaaactgaacttttacaaattactccaaatttctctacacaacttggaaatctctaaatatgaaagttattcactttcccaagctctacaactttggtatatggacttttagaagatccttaatgaatttaggattccactattgggactaatttagggcttcacatgttcttcactttcttcaagtgttataccaatttgatccttcctccaaaaagcaaaggtattctttgacctaagatctaactttggtttatagagctcgtgtccaaagtgtcattagttgagcagttgtttgctttggttatacaatatttcactttgtctcgacttaggttttaaagttgatccaccacctcaagtgtttcttccacttgactaacacttcaaagtaaagttaatctaggttctaaaacttgtctttagtacttaagactccaagccatcttgtcactttcttaagagatgaccatcacctacttagttcaagcaaaactcttaccctaagtcctatgctttagctcaaaaccatcacactttagaaaacatttaccctagtaaatgcactctaagtgtaagcaagttaatacaaatgtttatgatgacatatcagagttttagttaatgtaacaccagtggtgttacatgtgataagataggtgttggagagagactattactcctctgttccacaaaaagtcgtattagactttcaacaaattcgttcaataattgatgtatgtgttttgtatatgtgtctaaatttattatcatttatttttaatatagacataaaaaatatgatctaaaacgactactaatttggtagagggggagtattaacgaaagtcgagtccttccccaaatctgatggggtgcttctctttttcgaacgtctagcctctgaactctctcggtggcgcttcagagctgctccgcccatcctagaaggcggagcgaatggttgatggcgaagccgcgtctacgaggttgaattttggtggcggtcctagggttcgactggaaggggaaaaggaggcaacgactgaaaacaatgatttgcggaagagatgtgtaccagtgaatatccgcaatgagagacaaggtctaacattttacgcaatcacatccgtgatatgctggactagtaaataatagtttttccttatacctttttgcgtatccgcagtcatgtttggagttgcttgagtcagccttaggctgtccgcggcagatcgtgtaaaatagcgaatttgtacgatagattacactgtttactccctccgttccacaatagaagtcatataagacttttaacaaattcgttcaataattaatatgtatgttttgtatatgtg

SEQ ID NO: 61015 - DNA, 909 bp, Zea Mays
ctagaatttggccgagcccaattcccgcccagccgcccaggtttagggttagcgctatctggtcgcactccaggccgccgcttctccccgtgcagtctcctccctcccccggccgtgctccaggccaccgccttctcccccatgcagccgcctcctcccgtgcaacctcctccctcccccttgctcagccgctcagctccgcctgtccgccccccgccagccccgcctcctttggcttgctattgctcgcttgttgtccggccgccctgtcccgcactcccgctgtccgcccgtcggcctgtcccactgtccgcttgctgttgctcgcttgttgttgccctgctgtcccgcactcccactgccccgttgttcctcgcttgctgttgcttcagcagttgctcaaacaaacagctttgcgtctgttcctgttcctgttgctcgcttgctgaagcctctgaactctctcggtggcgcttcagagctgctccgcccatcctagaaggcggagcgaatggttgatggcgaagccgcgtctacgaggttgaattttggtggcggtcctagggttcgactggaaggggaaaaggaggcaacgactgaaaacaatgatttgcggaagagatgtgtaccagtgaatatccgcaatgagagacaaggtctaacattttacgcaatcacatccgtgatatgctggactagtaaataatagtttttccttatacctttttgcgtatccgcagtcatgtttggagttgcttgagtcagccttaggctgtccgcggcagatcgtgtaaaatagcgaatttgtacgatagattacactgtttactccctccgttccacaatagaagtcatataagacttttaacaaattcgttcaataattaatatgtatgttttgtatatgtg

SEQ ID NO: 61016 - DNA, 758 bp, Zea Mays
agccgatttcgtgtccctgcagccacggccaccgcccaatctccacttctttatcttctccgaggtgagagagcccaggcgatccaattccaccctcgttctcaggcactgtcacacagacacagctgacctgccactgccaggaaagtaggtcgaggatgccccgcagcggcttctcggggtccttcaggtcgcccaagatcgacgtcgtcatcgacatgggaaaaccccttcctcaaccgcaccggtcgacggcttcctcaagatcggcgcccgtcggcgcctgcaaggtgctgccgagagaccttcgagtgcctccacagggggatgtttcgaagcacaaggttgagcatgccctgaggaagatgtgcaaggagggcgcatattggggcactgttgctggagtttatgtgggcatggtgtacggcgtggaaagggtccgtggccgcagtgactggaagaacgcgatgatcgggggcgccttgtccggcgccctgatctccggcgccagcaacagcgacagaggcaaggtcgtcaaggacgccatcaccgccggcgcggtcgccacagccgtcgagttcatcaactgcattacctagccgagcaaggagcaactgcatttgcagtgccattgtcgtgcaaaatatgaataaagtacttgccatgtccagctcataaaccactccacaccttcagtcttcgtttctgaccggcggttttgctttgtgtgaatgccctgtgagtgagagcaagaattc

SEQ ID NO: 61017 - DNA, 1183 bp, Zea Mays
ccgggcccaacccagcgccactctgtaaaatcgcttccagtttgtcttcctccagaaaaaccctacagttcatccctctcgacgcgccgccgccgtctcgccgctgcccacccagattgacggctccaattggcgcccatggcggaagaaaccaacataaaaaaggaggaagaggagttcagcaccggtcctctctcggtgctcatgatgagcgtcaagaataatacccagttctgtgcagcagcagcagcctgaagctcctgcttgaccaaatcataatggccaataatcttctgagcgaagacatgtttattagctgtggttcccaattgtttactaaaacatatccctcagctgtgtttcttatactattttggttcttatcaactgccggaacaacaagaagttgcttggtcgcgtgcgagccttcgatcggcactgcaacatggttcttgagaatgttcgtgagatgtggaccgaggtaccgaagaccggtaaaggcaagaagaaggctctcccggtgaacaaggacaggttcataagcaagatgttcctccgcggggattcggtcatcatcgtcctcaggaacccgaaatgagtaccctgtacacgtagagagtctgtttgctagcagtacgttgtgctattgggtgtaaggtgtatgccaaatgctcaaagcatgggagtgtaagtcgcggcagaattcgctatgtgtgttgatggtgggggattcagcttaaggcaggatgctagggctggattttgcttcttgtagcagacttgaacaggatgcttctttgatgtatcgacagaccccactgcttgaatcaccggttccgatccgtgtatcgcatacatagtgtatgaatggcatggcatagtgtatggaggtgtttgtttgggattatataatctacctagattatataatccaacaaatttagttgttggattatattccctctgttcttttttatttgtcgccgtttagtttaaaaataaaaaataaattagtgagcgacaaataataaagaatggtataatgtgagtgagcatattataatcccaacacacactccttatggcgtgaattgcaacaccaggacaggagtatgtgtctaacatgagtttcggtggtcgagtacctcctcagcacggcaatctctccacatccattgtttta

SEQ ID NO: 61018 - DNA, 1262 bp, Zea Mays
aagtcctgctcatttgtcatttctcatccgccagattcttacaagaagttgaaggagagggcaggcgagtttgtggcatgaggcctagtgaggacaggagagagcaaggtcaaaatcgtaggcggtgacgacgtgctcgtcagcgacataagagaccccgagagcatagctctggcaattgagggcatcgacgcgctcatcatcctcaccagcgcggtcccgaagatgtgtggaagcgcaaggcagaacagtatctagcggactctggtcttctgcacacaattataagagctggcagtttacaagataaagatggtggcttgcgagagttgattgttgggaaggatgatgagatcctgaaaacagaaacaagaactattgccagggccgatgttgcagaagtttgcatacaggccttgctatttgaacaggcaaagtttaaggcatttgatctgtcatcaaaaccagaaggtgaagggacgccaactacagactttaggacacgttttgcacaagttaatagtcgcttctaaagagataatattgttcttgccaacaaattgagggtattcttttataaattgatatgaaatctgtattaaggatgcatgtataatggctaatatagcttggacatgaagagcaagcgttgaagctgtacttcacataccttgattaatagcaatgtcacctatgctcaagcccttcagcaggaggtggcaggaagaagagcatgtctttctctccaggaatgcaagcagccttatatagagataaaagaaaatctttgtacaacaagacttgaggtgccctatggtgttgttacactgaacagtgagcaacaccacccatggggatgtcgacatccaggacgcagacagagaatggcccaggctgtcttcccatcctctctacaatttagccgctcagctctgcagtttggaaggtcgataacagccaaagattgggagcaaagagcgagaccagcctgaccagctcagctggttaggctaccgtgctgctcatgaaggagtttgacaataccatctatatagcatgaagatcaatgtgaataatctgatggatttatatcctaacaataggcctactaatgctttacaaaaatctgttgaccatatagatgaagccataattgttcatccaaatgggaacgatactattacacatgaagttttcgttcacccatatggcaaactacaagagatgcatatacttcagaatgatatcatcctactttcctg

SEQ ID NO: 61019 - DNA, 1329 bp, Zea Mays
ctcaagtcctgctcatttgtcatttctcatccgccagattcttacaagaagttgaaggagagggcaggcgagtttgtggcatgaggcctagtgaggacaggagagagcaaggtcaaaatcgtaggcggtgacgacgtgctcgtcagcgacataagagaccccgagagcatagctctggcaattgagggcatcgacgcgctcatcatcctcaccagcgcggtcccgaagatgtaggtttgatcctaccggagggtgccctgatttaattttgaagaagggagttatcttgagcaggtgtggaagcgcaaggcagaacagtatctagcggactctggtcttctgcacacaattataagagctggcagtttacaagataaagatggtggcttgcgagagttgattgttgggaaggatgatgagatcctgaaaacagaaacaagaactattgccagggccgatgttgcagaagtttgcatacaggccttgctatttgaacaggcaaagtttaaggcatttgatctgtcatcaaaaccagaaggtgaagggacgccaactacagactttaggacacgttttgcacaagttaatagtcgcttctaaagagataatattgttcttgccaacaaattgagggtattcttttataaattgatatgaaatctgtattaaggatgcatgtataatggctaatatagcttggacatgaagagcaagcgttgaagctgtacttcacataccttgattaatagcaatgtcacctatgctcaagcccttcagcaggaggtggcaggaagaagagcatgtctttctctccaggaatgcaagcagccttatatagagataaaagaaaatctttgtacaacaagacttgaggtgccctatggtgttgttacactgaacagtgagcaacaccacccatggggatgtcgacatccaggacgcagacagagaatggcccaggctgtcttcccatcctctctacaatttagccgctcagctctgcagtttggaaggtcgataacagccaaagattgggagcaaagagcgagaccagcctgaccagctcagctggttaggctaccgtgctgctcatgaaggagtttgacaataccatctatatagcatgaagatcaatgtgaataatctgatggatttatatcctaacaataggcctactaatgctttacaaaaatctgttgaccatatagatgaagccataattgttcatccaaatgggaacgatactattacacatgaagttttcgttcacccatatggcaaactacaagagatgcatatacttcagaatgatatcatcctactttcctg

SEQ ID NO: 61020 - DNA, 150 bp, Zea Mays
atgagattaaaacattcagacattaggggcctggattacatgagacaagcattagtacaaggaagaaacagagtcacattacataccaagcagttcaggaaagctgatactaataacttcagcttaactgtgaaaacgaaggcaggctag

SEQ ID NO: 61021 - DNA, 1322 bp, Zea Mays
gcctgccaagcatggtcctttcaggtggagcggagagagtggcatgctgggcatgcatgcttggaatccaagtctcagagtcagaagcaagcagaccaaagcttcaagccttggcatcattccccttttgcgcagcaggcggcggaggcgcgcccccaccacatggacgacgacagcagcatcgacatggaccgcggcagcgacgacttcttctccatcgtggggtactcgccggaggacctgacgcagcacgaccggctcgtcaggctgttcgaggagtgggtggccaagtaccgcaaggcgtacggcagcttcgaggagaagctgcgccggttcgaggtgttcaaggacaacctgcaccacatcgacgaggtgcccgcgtccgtggactggcggaagaagggcgccgtgacggaggtcaagaaccaggggcagtgcggcagctgctgggccttctccacggtggcggccgtggaagggatcaaccagatcgtgacgggcaacctcacgtcgctgtcggagcagcagctggtcgactgcagcaccgacgggaacaacgggtgcagcggcggcgtcatggacaacgccttctcgttcatcgccaccggcgccgggctccgctccgaggaggcgtacccgtacctcatggaggaaggggactgcgacgacagggcccgcgacggcgaggtgctcgtcactatatccgggtacgaggacgtgccggccaacgacgagcaggcgctcgtcaaggccctcgcccaccagcccgtcagcgtcgccatcgaggcgtccgggaggcacttccagttctacagcgggggcgtgttcgatggaccgtgcgggtcggagctggaccacggcgtggcggcggtgggctacggcagcagcaaggggcaggactacatcatcgtcaagaactcgtggggcacccactggggcgagaagggctacatccgcatgaagaggggcaccggcaagccggagggcctctgcggcatcaacaagatggcatcctacccgaccaaggaccattgatggatcatggacgacggagatcatatctatcttcccttccctttcatccgactctttcgatttccatcgtttgcccccttttcctgaatgtgtgtgtttttttttatatattactgtgtcaagtaatttctcgatggatcgatcgaggaagaacgacaaacatgcactcaagcacgagcgcagcaatgtcatctttctcttcatttggtgcgttgaaatgacgaatatcaaataaagtggtttattttttgtcttgctggtgcaaatacatatgcattttttctata

SEQ ID NO: 61022 - DNA, 750 bp, Zea Mays
ctcacgcagaccgccagcatcctcgtaacgtcctcgcccgccatcgtgccgctcacctaggccggacaacgccaagcgtcccttcctgcttcctccttgcccttgtactcaacacatcagcgccgacgacctcgtcctggccttcatcatcagcgtcaagctgctcgcatcactgctccccaccgcaccgagctgctcacgtccctgcttcgtcctccctcgtatttgtgcatgagcagctcctgtacgccgtcattttcagcggcgtggtcgtgtttctccgccggccagactcctcatcgtagcgtctcggttctcctctacaccagcacaccaagccatagtcatgggacttcgtctggtccgcactcgccggcaccggagcacccgcgcctttgcttctgttcccatggccgctcgcctggatgctgttcctagctccacgctgatgctcgccgagccgcttcctgatgcctgctcatgaatttccccaacgccatcatcagtcgctccatccttcatcctgtcggagccgctcaccgtcaacccgctcagccaccttcctgttcctgtcgtcgttcttgcgaatattgagtcgagttgattatggtacgttaaataatcgtgtgatgcgaaagatgagtcaagtcgacctcaagcatgggctactccgcatggtggtgctgatggacgaacccacctaatcaagtgttaggacaaggatgatcgtcaagtggacgtcgtctaaca

SEQ ID NO: 61023 - DNA, 2134 bp, Zea Mays
gctatttctttcagagtgaaaattccatatggatcttggctaaacatgaagccataaatatgcattttagttagggcgatcttcattattttctgacatggctataaacgagcaaacagacttgttcaacaggtgaaaagccaggttcactggctaagattggtgatcctgaagtaaaattatttatagagaaatgcattgctaaagtcactgaaagactttcggcaaatgaactcttaatggatccttttctcctagatgttagtgatgaaaaaatattctatccagtgcatccaaatattaatacaacaggtacgtgactgaattggagatatctcatgttatagatgtagttgcagtaaactttctcgttcccacataactttactttagaataaacatggcagatactggtagtccaaaaccaagctctagtttcagatatgacggagtagcatcatctgccggtcgccatgatcgctcaggtagcatgtcagattcacatccttctgataactatgtacatgacactgtggatccacatgctgcaattggtcgaagtatcacagtcgagagtcaacggaaggatttgaatacaatatttttgaagctgcgcattgctgatccaacaggtcatgcccaaaacatccacttcccctttgatattgaagcggacacttcaatcagtgttgcaactgagatggttgtgcagctcgatctcacagatcaagatgtaacggcaattgcagaaatgatagatgctgaaatacgttcgcatattcctgattgggcagcagaggagtcaattgacaaccaaggggatgaagctgctcactctgagacccatagttcagaaggtgatgagggaacttctgaactgcgtgatgagatcggtgcctcacataacggttttgttcaagaacagcttccctctggacggaagtactggtcagactcacccaggagagacggtgaaatatctcaatcggtggtggaacatcaaattggtgatagtagtgccaatggaataccaaagaggaacaaagtagatgccatgtttgaacgaatatcatcatctgtggacttgtcgaacccatctgcggtcgacagcatgtctagggatgcttctgttggtggcagccctcactctttagacggtgaggaggagcacaattctgatcagcatctggcagcaggtgtcactgagaggttaatagacctgttggctcagcagcaagaggagcttcgtgcgctgcaaaggaagcacaaggcggacatagaggagatgctgaaaatcgtacctgcggaggatcgggaagagaccttaactctatgccacttgaaggcggaacagaaaaacagagccgccgaaccttagataaactgtctcatgtgcatgttcctctgtgtgctgttagatttatacatactcacaccaaggagttgttgtttacactttacagccgttgttgtgcaaaagttggacctctgttgtgcagaagataagtctgaagcctttttcattgttcttttttgacataatggagaagctgggggagtgcttgtctctggaggacctccaattcagtgaccgagcactaaatagtaatcaggttctttttgacataatggagaagctgagtttttgacggcaaagatgaagttcctgcccaccaaatgaaatctgcagatgccactttgatgccgctgcgtgcctgaattaacggttcataaggagtgcctcccttcctttttcttttcttttcttatttgtttcttctgtactttgacttgccaaggatatacatcagtgtttgagctgttccaaacttgcaatgacagactttaaagtgcaattattttccggatcacatggctgcccaagttctcagagctgtgcgcacacacacacacacatatacagatagataaatatatatttctctgaatgcaaacaggcaggatatgcatacagatagatgtatgtatgtatttgttaattgcaagtgtggcgtggaggctgctgaggaagtctccatgcactcccagtgatgaggtagcagcagatctggattctggagtgggcagtggatgataaaacaagcatttgcgcaacacatgcgttgctccagat

SEQ ID NO: 61024 - DNA, 4265 bp, Zea Mays
atcctcgagaggctacgtgagtacgtgactcactctgagtctcgatgaccttcgtctccactctccagcacgcagtcgcagttgtcgtctggggtggtggtggtggtgggccgaggtggagtcgtcggatctcacacacgcaactctctcaagactcaagagaggaaaggttgctttccggccggaaagggaggcgagcgcgagacccctgtgatcccaattaagcgcccagccgcgacggccccaaaacggcaaacctccccagcccgcccgcccgcgccgcccgaccgcgatgccacccacgccgccggagacggagacggagccggaattcgccgaggtcgaccccaccggccgctacgggcggtacacggaggttctcggcaagggcgccttcaagacggtgtatccttccattccccctgggcgtttgacgcctgggtctgattcggggccctttgacttcgcgcgatcgattaaagatcccggctttacgcggtccatgccatgggaggggaccgtttcttaggttctcgccgatttggatcggctccatggtttctgatgcgctcattgctcaaagttccaggcccgatgccactctctctatatatgaatatgatgcctcacatattgcctttttgttgggaatcctgatctcctttcatttaaaatacgtgaccgcattgctctgctgtgactgcctgatgcattgtctccatttcagttcccaattccattttgtaccttctgtcctaggctatcaactcgacattttggtatggcggttacgggcttacagccagggtggttttacttggtgctatcaaatgaagacccacatgtttacccacgggggatggaatattttcttaggttcttggcactttgcccagtgattgcatcgtgccacttggattggctcgatgctttctgatgcgcttgttgtccaaagttcctgccctgatgcctctaggtgcagcctcttggggcctagcatactctgtctaacaatatattgctgttcagtgcaaattctgacattctttcatttgaatacattatcgcattgctgtgctgcgatttctcggtgtgttatcttcttttcagtttcccatttcatttgtacctgatgtcctatgcttattaagttgacattttagtatattgattcaagcctgtggtttgcgatgtgcatgtctgacgcgattattttgctgcccttttctggagtggaaagggataagtgccatcttcttttggataactatcatttatgtcatcatttagtacggtcttaagtaaattgtgtcgttttctcccttttctgtgtgcattacatttatcttcagtatgtatatttttaccattcatattgcttggatacttgaagtaactctgccaattaatcttatgcatgtttatgcatttatcacttggagcactagtttctagctgccggtaattgaacggttttccatccatcacaaacagtgcagttctagaaattgtttatttctagtaagaccaagatcatgtgtgtatgcacttcatttgagagattctcttagtcaatcttgataagaaggcaaatccaacattttctttagacgccttgacttttgcgttatgtccacaactgtttttagcgataatctataatgttaattaacacttatatctgcttcaatgctatccagttgggttccttgatttatattttattggcatagatacaaagcttttgatcaacttgaaggactagaagttgcttggaaccagatcaaagttggagatttacttcggaacaatgatgatttggagaggctgagatcagaagtgcggttgcttaaaaccctcaagcataaaaacataataaagttctacaattcatggcttgacaaaagaagcaacaatataaatttcatcacggaggttttcacatcagggacgttgcgccagtaccggattaagcacaagaaggtagacattagagctttaaagaaatggtcaaggcaaatcttgagtggtcttgtctacctgcacagccatgatccaccagtgatccatagagacttaaaatgtgacaatatattcgtgaatggaaaccagggtgaagtaaagattggagaccttggtttagcgactatcctggataatgcacgttcagctcatagtatcattggtacaccggaattcatggcaccggaactctatgacgaggaatataatgagcttgtagacatctatgcttttgggatgtgtttactggagcttgttacatttgagtacccatattgtgaatgttcaaatgcagcacagatatatagaaaagtatctgatggtgaaaagccaggttcactggctaagattggtgatcctgaagtaaaattatttatagagaaatgcattgctaaagtcactgaaagactttcggcaaatgaactcttaatggatccttttctcctagatgttagtgatgaaaaaatattctatccagtgcatccaaatattaatacaacagaataaacatggcagatactggtagtccaaaaccaagctctagtttcagatatgacggagtagcatcatctgccggtcgccatgatcgctcaggtagcatgtcagattcacatccttctgataactatgtacatgacactgtggatccacatgctgcaattggtcgaagtatcacagtcgagagtcaacggaaggatttgaatacaatatttttgaagctgcgcattgctgatccaacaggtcatgcccaaaacatccacttcccctttgatattgaagcggacacttcaatcagtgttgcaactgagatggttgtgcagctcgatctcacagatcaagatgtaacggcaattgcagaaatgatagatgctgaaatacgttcgcatattcctgattgggcagcagaggagtcaattgacaaccaaggggatgaagctgctcactctgagacccatagttcagaaggtgatgagggaacttctgaactgcgtgatgagatcggtgcctcacataacggttttgttcaagaacagcttccctctggacggaagtactggtcagactcacccaggagagacggtgaaatatctcaatcggtggtggaacatcaaattggtgatagtagtgccaatggaataccaaagaggaacaaagtagatgccatgtttgaacgaatatcatcatctgtggacttgtcgaacccatctgcggtcgacagcatgtctagggatgcttctgttggtggcagccctcactctttagacggtgaggaggagcacaattctgatcagcatctggcagcaggtgtcactgagaggttaatagacctgttggctcagcagcaagaggagcttcgtgcgctgcaaaggaagcacaaggcggacatagaggagatgctgaaaatcgtacctgcggaggatcgggaagagaccttaactctatgccacttgaaggcggaacagaaaaacagagccgccgaaccttagataaactgtctcatgtgcatgttcctctgtgtgctgttagatttatacatactcacaccaaggagttgttgtttacactttacagccgttgttgtgcaaaagttggacctctgttgtgcagaagataagtctgaagcctttttcattgttcttttttgacataatggagaagctgggggagtgcttgtctctggaggacctccaattcagtgaccgagcactaaatagtaatcaggttctttttgacataatggagaagctgagtttttgacggcaaagatgaagttcctgcccaccaaatgaaatctgcagatgccactttgatgccgctgcgtgcctgaattaacggttcataaggagtgcctcccttcctttttcttttcttttcttatttgtttcttctgtactttgacttgccaaggatatacatcagtgtttgagctgttccaaacttgcaatgacagactttaaagtgcaattattttccggatcacatggctgcccaagttctcagagctgtgcgcacacacacacacacatatacagatagataaatatatatttctctgaatgcaaacaggcaggatatgcatacagatagatgtatgtatgtatttgttaattgcaagtgtggcgtggaggctgctgaggaagtctccatgcactcccagtgatgaggtagcagcagatctggattctggagtgggcagtggatgataaaacaagcatttgcgcaacacatgcgttgctccagat

SEQ ID NO: 61025 - DNA, 2837 bp, Zea Mays
ggatgatcctcgagaggctacgtgagtacgtgactcactctgagtctcgatgaccttcgtctccactctccagcacgcagtcgcagttgtcgtctggggtggtggtggtggtgggccgaggtggagtcgtcggatctcacacacgcaactctctcaagactcaagagaggaaaggttgctttccggccggaaagggaggcgagcgcgagacccctgtgatcccaattaagcgcccagccgcgacggccccaaaacggcaaacctccccagcccgcccgcccgcgccgcccgaccgcgatgccacccacgccgccggagacggagacggagccggaattcgccgaggtcgaccccaccggccgctacgggcggtacacggaggttctcggcaagggcgccttcaagacggtatacaaagcttttgatcaacttgaaggactagaagttgcttggaaccagatcaaagttggagatttacttcggaacaatgatgatttggagaggctgagatcagaagtgcggttgcttaaaaccctcaagcataaaaacataataaagttctacaattcatggcttgacaaaagaagcaacaatataaatttcatcacggaggttttcacatcagggacgttgcgccagtaccggattaagcacaagaaggtagacattagagctttaaagaaatggtcaaggcaaatcttgagtggtcttgtctacctgcacagccatgatccaccagtgatccatagagacttaaaatgtgacaatatattcgtgaatggaaaccagggtgaagtaaagattggagaccttggtttagcgactatcctggataatgcacgttcagctcatagtatcattggtacaccggaattcatggcaccggaactctatgacgaggaatataatgagcttggtgaaaagccaggttcactggctaagattggtgatcctgaagtaaaattatttatagagaaatgcattgctaaagtcactgaaagactttcggcaaatgaactcttaatggatccttttctcctagatgttagtgatgaaaaaatattctatccagtgcatccaaatattaatacaacagaataaacatggcagatactggtagtccaaaaccaagctctagtttcagatatgacggagtagcatcatctgccggtcgccatgatcgctcaggtagcatgtcagattcacatccttctgataactatgtacatgacactgtggatccacatgctgcaattggtcgaagtatcacagtcgagagtcaacggaaggatttgaatacaatatttttgaagctgcgcattgctgatccaacaggtcatgcccaaaacatccacttcccctttgatattgaagcggacacttcaatcagtgttgcaactgagatggttgtgcagctcgatctcacagatcaagatgtaacggcaattgcagaaatgatagatgctgaaatacgttcgcatattcctgattgggcagcagaggagtcaattgacaaccaaggggatgaagctgctcactctgagacccatagttcagaaggtgatgagggaacttctgaactgcgtgatgagatcggtgcctcacataacggttttgttcaagaacagcttccctctggacggaagtactggtcagactcacccaggagagacggtgaaatatctcaatcggtggtggaacatcaaattggtgatagtagtgccaatggaataccaaagaggaacaaagtagatgccatgtttgaacgaatatcatcatctgtggacttgtcgaacccatctgcggtcgacagcatgtctagggatgcttctgttggtggcagccctcactctttagacggtgaggaggagcacaattctgatcagcatctggcagcaggtgtcactgagaggttaatagacctgttggctcagcagcaagaggagcttcgtgcgctgcaaaggaagcacaaggcggacatagaggagatgctgaaaatcgtacctgcggaggatcgggaagagaccttaactctatgccacttgaaggcggaacagaaaaacagagccgccgaaccttagataaactgtctcatgtgcatgttcctctgtgtgctgttagatttatacatactcacaccaaggagttgttgtttacactttacagccgttgttgtgcaaaagttggacctctgttgtgcagaagataagtctgaagcctttttcattgttcttttttgacataatggagaagctgggggagtgcttgtctctggaggacctccaattcagtgaccgagcactaaatagtaatcaggttctttttgacataatggagaagctgagtttttgacggcaaagatgaagttcctgcccaccaaatgaaatctgcagatgccactttgatgccgctgcgtgcctgaattaacggttcataaggagtgcctcccttcctttttcttttcttttcttatttgtttcttctgtactttgacttgccaaggatatacatcagtgtttgagctgttccaaacttgcaatgacagactttaaagtgcaattattttccggatcacatggctgcccaagttctcagagctgtgcgcacacacacacacacatatacagatagataaatatatatttctctgaatgcaaacaggcaggatatgcatacagatagatgtatgtatgtatttgttaattgcaagtgtggcgtggaggctgctgaggaagtctccatgcactcccagtgatgaggtagcagcagatctggattctggagtgggcagtggatgataaaacaagcatttgcgcaacacatgcgttgctccagat

SEQ ID NO: 61026 - DNA, 3024 bp, Zea Mays
gttaatattgttgaattccgttgcaggatacagaatgccataaatgctggtatatccaggaaaaaatcatacataggaacctggatgatcctcgagaggctacgtgagtacgtgactcactctgagtctcgatgaccttcgtctccactctccagcacgcagtcgcagttgtcgtctggggtggtggtggtggtgggccgaggtggagtcgtcggatctcacacacgcaactctctcaagactcaagagaggaaaggttgctttccggccggaaagggaggcgagcgcgagacccctgtgatcccaattaagcgcccagccgcgacggccccaaaacggcaaacctccccagcccgcccgcccgcgccgcccgaccgcgatgccacccacgccgccggagacggagacggagccggaattcgccgaggtcgaccccaccggccgctacgggcggtacacggaggttctcggcaagggcgccttcaagacggtatacaaagcttttgatcaacttgaaggactagaagttgcttggaaccagatcaaagttggagatttacttcggaacaatgatgatttggagaggctgagatcagaagtgcggttgcttaaaaccctcaagcataaaaacataataaagttctacaattcatggcttgacaaaagaagcaacaatataaatttcatcacggaggttttcacatcagggacgttgcgccagtaccggattaagcacaagaaggtagacattagagctttaaagaaatggtcaaggcaaatcttgagtggtcttgtctacctgcacagccatgatccaccagtgatccatagagacttaaaatgtgacaatatattcgtgaatggaaaccagggtgaagtaaagattggagaccttggtttagcgactatcctggataatgcacgttcagctcatagtatcattggtacaccggaattcatggcaccggaactctatgacgaggaatataatgagcttgtagacatctatgcttttgggatgtgtttactggagcttgttacatttgagtacccatattgtgaatgttcaaatgcagcacagatatatagaaaagtatctgatggtgaaaagccaggttcactggctaagattggtgatcctgaagtaaaattatttatagagaaatgcattgctaaagtcactgaaagactttcggcaaatgaactcttaatggatccttttctcctagatgttagtgatgaaaaaatattctatccagtgcatccaaatattaatacaacagaataaacatggcagatactggtagtccaaaaccaagctctagtttcagatatgacggagtagcatcatctgccggtcgccatgatcgctcaggtagcatgtcagattcacatccttctgataactatgtacatgacactgtggatccacatgctgcaattggtcgaagtatcacagtcgagagtcaacggaaggatttgaatacaatatttttgaagctgcgcattgctgatccaacaggtcatgcccaaaacatccacttcccctttgatattgaagcggacacttcaatcagtgttgcaactgagatggttgtgcagctcgatctcacagatcaagatgtaacggcaattgcagaaatgatagatgctgaaatacgttcgcatattcctgattgggcagcagaggagtcaattgacaaccaaggggatgaagctgctcactctgagacccatagttcagaaggtgatgagggaacttctgaactgcgtgatgagatcggtgcctcacataacggttttgttcaagaacagcttccctctggacggaagtactggtcagactcacccaggagagacggtgaaatatctcaatcggtggtggaacatcaaattggtgatagtagtgccaatggaataccaaagaggaacaaagtagatgccatgtttgaacgaatatcatcatctgtggacttgtcgaacccatctgcggtcgacagcatgtctagggatgcttctgttggtggcagccctcactctttagacggtgaggaggagcacaattctgatcagcatctggcagcaggtgtcactgagaggttaatagacctgttggctcagcagcaagaggagcttcgtgcgctgcaaaggaagcacaaggcggacatagaggagatgctgaaaatcgtacctgcggaggatcgggaagagaccttaactctatgccacttgaaggcggaacagaaaaacagagccgccgaaccttagataaactgtctcatgtgcatgttcctctgtgtgctgttagatttatacatactcacaccaaggagttgttgtttacactttacagccgttgttgtgcaaaagttggacctctgttgtgcagaagataagtctgaagcctttttcattgttcttttttgacataatggagaagctgggggagtgcttgtctctggaggacctccaattcagtgaccgagcactaaatagtaatcaggttctttttgacataatggagaagctgagtttttgacggcaaagatgaagttcctgcccaccaaatgaaatctgcagatgccactttgatgccgctgcgtgcctgaattaacggttcataaggagtgcctcccttcctttttcttttcttttcttatttgtttcttctgtactttgacttgccaaggatatacatcagtgtttgagctgttccaaacttgcaatgacagactttaaagtgcaattattttccggatcacatggctgcccaagttctcagagctgtgcgcacacacacacacacatatacagatagataaatatatatttctctgaatgcaaacaggcaggatatgcatacagatagatgtatgtatgtatttgttaattgcaagtgtggcgtggaggctgctgaggaagtctccatgcactcccagtgatgaggtagcagcagatctggattctggagtgggcagtggatgataaaacaagcatttgcgcaacacatgcgttgctccagat

SEQ ID NO: 61027 - DNA, 1937 bp, Zea Mays
ctgccttcctggcctggcctagctcctctcctctcctccggcttgattgatcgatcgatcgatcgatccagccagccatccacccatcccttccaagtttccaactgacattgccgcgccgcgcaggcgcagcgcacgacttccgccctcccccaccctccgcctcacgcatataaacgcgcgcgcctgcctcccctgcccccgcctgcctgcccacgcgctccgctcctcgccccctcctcttcccacgccgccgccgtacccacgggcagggggcacggctggtggctcatcgctcggcccgctccccctccgtcgcaaccggaacataccagcaccggcgctgcggtattattcagctccgtccgccggccggcgcggacggacgccaggcttccttcctgtctgcataacaaagccgccgccattatgatctccacatatgatgcttagcatttgtcgctcgcagctgtattgctcctctagctgcatccttgtactagagcatggcgaagctcgcatctattgctcgcagtatgcttagattcccaaacggaagcatgaggcttgttatggtaacggttattggagcagtccttggctttttcattgggatttcattcccttcggtcagcataacaaaggatagctttatttcgtacattgaagacaaagacgctggactcacgacccaagctatactcaatcatgcttggacttctgccagaaacgcaaggggaaatggtaccgaaccgacttcaaacagtaccttaaagatttatgtcccaacgaaccccaagggtgcagaggggctagcaccaggtatcgttgtatcagagtctgacttccatttgcgcaggttatggggagacccaagtgaggacctgcctttcaaaccaaagtaccttgttacctttactgttggagttgagcagaaagcaaatataaacagagctgtgaagaagttttctgacaattttgctattctgttattccactatgatggccgggtgagtgagtgggatgaatttgagtggtcccagcgagctatccatattagtgtcaggaaacaaactaaatggtggtatgccaagagattcctgcatcctgatattgtggcagcttatgagtacatattcatttgggatgaggaccttggggttgaacattttaatgcagaggagtacatcaaacttgttaagaagcataacttggacatctctcaacctggattagagcctgatcgggggttaacatggcagatgaccaaaagaagaggtgacagtgaggttcacaaggacacagaggagaggcctggctggtgctctgaccctcatcttccaccgtgtgctgcttttgttgaaataatggctccagtcttctcaagagatgcatggagatgtgtgtggcatatgattcagaacgacttggttcatggttggggcttggattttgcgctcaggaaatgtgtggagcctgctcatgaaaagattggagttgtcgattcgcagtggatcgttcaccaagtggttccttctctggggaaccaggggcagtcagaaaacggaagggcgcggtgcaggaaggaatggggcatgttccagaccaggatggcggaggcggagaaggcgtattacaagatgatgggcatcacccctccaaactccacgcgtgtctagccgcgcctctcttcttggttttccatccccgccaccctgacctttgtggtggcgggtgagctgatgatactatactatagcactacttgattatagggagttagagatggtgggtgtagctgcttttgatggagaggtccttctgtaagtaaatgcgaggcgaaactgtgatgagaaaacatgtacacgaggatgattacctgatgatgatgatgatgatctatctattataaaaaacatatataccgttaccgagca

SEQ ID NO: 61028 - DNA, 1974 bp, Zea Mays
cctgtcgtctccaactttcccttggtttggcttcctgccttcctggcctggcctagctcctctcctctcctccggcttgattgatcgatcgatcgatcgatccagccagccatccacccatcccttccaagtttccaactgacattgccgcgccgcgcaggcgcagcgcacgacttccgccctcccccaccctccgcctcacgcatataaacgcgcgcgcctgcctcccctgcccccgcctgcctgcccacgcgctccgctcctcgccccctcctcttcccacgccgccgccgtacccacgggcagggggcacggctggtggctcatcgctcggcccgctccccctccgtcgcaaccggaacataccagcaccggcgctgcggtattattcagctccgtccgccggccggcgcggacggacgccaggcttccttcctgtctgcataacaaagccgccgccattatgatctccacatatgatgcttagcatttgtcgctcgcagctgtattgctcctctagctgcatccttgtactagagcatggcgaagctcgcatctattgctcgcagattcccaaacggaagcatgaggcttgttatggtaacggttattggagcagtccttggctttttcattgggatttcattcccttcggtcagcataacaaagcttcactttccagatagctttatttcgtacattgaagacaaagacgctggactcacgacccaagctatactcaatcatgcttggacttctgccagaaacgcaaggggaaatggtaccgaaccgacttcaaacagtaccttaaagatttatgtcccaacgaaccccaagggtgcagaggggctagcaccaggtatcgttgtatcagagtctgacttccatttgcgcaggttatggggagacccaagtgaggacctgcctttcaaaccaaagtaccttgttacctttactgttggagttgagcagaaagcaaatataaacagagctgtgaagaagttttctgacaattttgctattctgttattccactatgatggccgggtgagtgagtgggatgaatttgagtggtcccagcgagctatccatattagtgtcaggaaacaaactaaatggtggtatgccaagagattcctgcatcctgatattgtggcagcttatgagtacatattcatttgggatgaggaccttggggttgaacattttaatgcagaggagtacatcaaacttgttaagaagcataacttggacatctctcaacctggattagagcctgatcgggggttaacatggcagatgaccaaaagaagaggtgacagtgaggttcacaaggacacagaggagaggcctggctggtgctctgaccctcatcttccaccgtgtgctgcttttgttgaaataatggctccagtcttctcaagagatgcatggagatgtgtgtggcatatgattcagaacgacttggttcatggttggggcttggattttgcgctcaggaaatgtgtggagcctgctcatgaaaagattggagttgtcgattcgcagtggatcgttcaccaagtggttccttctctggggaaccaggggcagtcagaaaacggaagggcgcggtgcaggaaggaatggggcatgttccagaccaggatggcggaggcggagaaggcgtattacaagatgatgggcatcacccctccaaactccacgcgtgtctagccgcgcctctcttcttggttttccatccccgccaccctgacctttgtggtggcgggtgagctgatgatactatactatagcactacttgattatagggagttagagatggtgggtgtagctgcttttgatggagaggtccttctgtaagtaaatgcgaggcgaaactgtgatgagaaaacatgtacacgaggatgattacctgatgatgatgatgatgatctatctattataaaaaacatatataccgttaccgagca

SEQ ID NO: 61029 - DNA, 1971 bp, Zea Mays
gacggccccgtcgagggcgcaagttgctgcggttggttcgttgggtggcgtccctctcctttctccctgtcgtctccaactttcccttggtttggcttcctgccttcctggcctggcctagctcctctcctctcctccggcttgattgatcgatcgatcgatcgatccagccagccatccacccatcccttccaagtttccaactgacattgccgcgccgcgcaggcgcagcgcacgacttccgccctcccccaccctccgcctcacgcatataaacgcgcgcgcctgcctcccctgcccccgcctgcctgcccacgcgctccgctcctcgccccctcctcttcccacgccgccgccgtacccacgggcagggggcacggctggtggctcatcgctcggcccgctccccctccgtcgcaaccggaacataccagcaccggcgctgcggtattattcagctccgtccgccggccggcgcggacggacgccagctgtattgctcctctagctgcatccttgtactagagcatggcgaagctcgcatctattgctcgcagtatgcttagattcccaaacggaagcatgaggcttgttatggtaacggttattggagcagtccttggctttttcattgggatttcattcccttcggtcagcataacaaagcttcactttccagatagctttatttcgtacattgaagacaaagacgctggactcacgacccaagctatactcaatcatgcttggacttctgccagaaacgcaaggggaaatggtaccgaaccgacttcaaacagtaccttaaagatttatgtcccaacgaaccccaagggtgcagaggggctagcaccaggtatcgttgtatcagagtctgacttccatttgcgcaggttatggggagacccaagtgaggacctgcctttcaaaccaaagtaccttgttacctttactgttggagttgagcagaaagcaaatataaacagagctgtgaagaagttttctgacaattttgctattctgttattccactatgatggccgggtgagtgagtgggatgaatttgagtggtcccagcgagctatccatattagtgtcaggaaacaaactaaatggtggtatgccaagagattcctgcatcctgatattgtggcagcttatgagtacatattcatttgggatgaggaccttggggttgaacattttaatgcagaggagtacatcaaacttgttaagaagcataacttggacatctctcaacctggattagagcctgatcgggggttaacatggcagatgaccaaaagaagaggtgacagtgaggttcacaaggacacagaggagaggcctggctggtgctctgaccctcatcttccaccgtgtgctgcttttgttgaaataatggctccagtcttctcaagagatgcatggagatgtgtgtggcatatgattcagaacgacttggttcatggttggggcttggattttgcgctcaggaaatgtgtggagcctgctcatgaaaagattggagttgtcgattcgcagtggatcgttcaccaagtggttccttctctggggaaccaggggcagtcagaaaacggaagggcgcggtgcaggaaggaatggggcatgttccagaccaggatggcggaggcggagaaggcgtattacaagatgatgggcatcacccctccaaactccacgcgtgtctagccgcgcctctcttcttggttttccatccccgccaccctgacctttgtggtggcgggtgagctgatgatactatactatagcactacttgattatagggagttagagatggtgggtgtagctgcttttgatggagaggtccttctgtaagtaaatgcgaggcgaaactgtgatgagaaaacatgtacacgaggatgattacctgatgatgatgatgatgatctatctattataaaaaacatatataccgttaccgagca

SEQ ID NO: 61030 - DNA, 1878 bp, Zea Mays
cccgcccgtgcagacgcagagacacgaatgcctcctcgagcgggagccatggcggcggcggcggcgagggcaagggcggcgctgctgccctcctccccctccccatcgccgctgttccgcctcccgcgccgcttcctttcactcaccgcgactcgctaccctctctactacgacctcatcgtgcatcgccccgcggaccccaatccccccaaatcctccgccgccggggccgaccggcagccgcagccagcccccgaagagcagacgctcgaccgcgcaaagcgccggtacctccgcaagcgccgcagccgcctactccccgaccctgacgccaccaccaccactaagccctcctccttgtcgtcggagttcgtcgagctcaggccggaggtggtggacttcccgcgcctgcacgcgcgcgaggaggcgctctacttccacgacaccttcgcaatgccgtgggagaaggacaagcactaccgcatgctctaccgcctcgagaagaagtacttcccccaccagtcgctcgacaacgcgttcgtctccgccgacgccgccccggcctccgacgccgacagggggctcgtattctttgacgacgagaagaaggaaaacgagggagaggagcgggcggtcagtgacaagggcgccaacaaaggggaggtgctggagaggaaggtggaggatttcttcaggtctctcaagaagggtcccggccaagtcgacaccaaagccaagagaccgggaacggagccgcagcagcaggtgaagcgcgaagtgcggagggaggaggagcggccgcagccgtacctcgtcactaggaccacggagctgccgccgaggtgggacggccctgctgggaccgtcgtgctcatcgacaagcccaaaggatggacttcgtttactgtctgtggaaagttacggcgcttggtgaaagtacaaaaggttggacatgctggaactctggacccaatggcaactggattgttgattgtttgtgtaggaaaagcaaccaaaatagttgacagctaccaaggaatggttaagggctatagcggtgttttccgacttggagaagccacatcaacctgggatgcagattcaccaattatccagagggaaccatgggaacacatcaaagatgaaaatattagaaaggcagcagcatcattcatgggtgagatatggcaagttcctccaatgttttctgccattaaggttggcggtgaaaagatgtatgacaaagcaaggaagggtgaaacagtagagctttcaccaagacgtatatcgatataccaatttgatattgagcgcagtttggaagacagacagaatttgatatttcgagttacttgctcaaaaggaacatacattcggtccctatgtgcggacttgggtaaagcacttggaaggtgaatactcggtcaatgatgcttggaacttcgatgagcttgaagaacaaatcaccaaggggtatttatgagcatgccagtgagccgagctaggttatatgcggcttgcaaccagtggcatccatgctgccatgtcagtcccaaagctgtcaacgtgggcttcagcgaagagttgcaaatccagttcagttcatcctcaaccttttgtcatatagaggaacacgaagctccgttagttgtatgtgtgttgtgggtttcaattgatctcagtattgaatcgattttggcagtattgatgtataccattgttggtcaggtcttttgattgccttgccatgtaattttgctgggagcatattaaatttataatctaaagactgtgttaaaagtagcgaaatttataatctaatgacgaacacaagctggcgttaagtccacccctttttcttctctagaccctcgacgc

SEQ ID NO: 61031 - DNA, 2045 bp, Zea Mays
cctacatctataccgtcggctgcagatccaacgtcaggactgccgcgcgactcggctctcgcttcccctatcgatagcgagcggcccgcccgtgcagacgcagagacacgaatgcctcctcgagcgggagccatggcggcggcggcggcgagggcaagggcggcgctgctgccctcctccccctccccatcgccgctgttccgcctcccgcgccgcttcctttcactcaccgcgactcgctaccctctctactacgacctcatcgtgcatcgccccgcggaccccaatccccccaaatcctccgccgccggggccgaccggcagccgcagccagcccccgaagagcagacgctcgaccgcgcaaagcgccggtacctccgcaagcgccgcagccgcctactccccgaccctgacgccaccaccaccactaagccctcctccttgtcgtcggagttcgtcgagctcaggccggaggtggtggacttcccgcgcctgcacgcgcgcgaggaggcgctctacttccacgacaccttcgcaatgccgtgggagaaggacaagcactaccgcatgctctaccgcctcgagaagaagtacttcccccaccagtcgctcgacaacgcgttcgtctccgccgacgccgccccggcctccgacgccgacagggggctcgtattctttgacgacgagaagaaggaaaacgagggagaggagcgggcggtcagtgacaagggcgccaacaaaggggaggtgctggagaggaaggtggaggatttcttcaggtctctcaagaagggtcccggccaagtcgacaccaaagccaagagaccgggaacggagccgcagcagcaggtgaagcgcgaagtgcggagggaggaggagcggccgcagccgtacctcgtcactaggaccacggagctgccgccgaggtgggacggccctgctgggaccgtcgtgctcatcgacaagcccaaaggatggacttcgtttactgtctgtggaaagttacggcgcttggtgaaagtacaaaagcccttagcattaagtacatgttttgcaatatttgtgtggtctcaggttggacatgctggaactctggacccaatggcaactggattgttgattgtttgtgtaggaaaagcaaccaaaatagttgacagctaccaaggaatggttaagggctatagcggtgttttccgacttggagaagccacatcaacctgggatgcagattcaccaattatccagagggaaccatgggaacacatcaaagatgaaaatattagaaaggcagcagcatcattcatgggtgagatatggcaagttcctccaatgttttctgccattaaggttggcggtgaaaagatgtatgacaaagcaaggaagggtgaaacagtagagctttcaccaagacgtatatcgatataccaatttgatattgagcgcagtttggaagacagacagaatttgatatttcgagttacttgctcaaaaggaacatacattcggtccctatgtgcggacttgggtaaagcacttggaagctgtgctcatttaactgccttgcggagagactcgataggtgaatactcggtcaatgatgcttggaacttcgatgagcttgaagaacaaatcaccaaggggtatttatgagcatgccagtgagccgagctaggttatatgcggcttgcaaccagtggcatccatgctgccatgtcagtcccaaagctgtcaacgtgggcttcagcgaagagttgcaaatccagttcagttcatcctcaaccttttgtcatatagaggaacacgaagctccgttagttgtatgtgtgttgtgggtttcaattgatctcagtattgaatcgattttggcagtattgatgtataccattgttggtcaggtcttttgattgccttgccatgtaattttgctgggagcatattaaatttataatctaaagactgtgttaaaagtagcgaaatttataatctaatgacgaacacaagctggcgttaagtccacccctttttcttctctagaccctcgacgc

SEQ ID NO: 61032 - DNA, 1991 bp, Zea Mays
cctacatctataccgtcggctgcagatccaacgtcaggactgccgcgcgactcggctctcgcttcccctatcgatagcgagcggcccgcccgtgcagacgcagagacacgaatgcctcctcgagcgggagccatggcggcggcggcggcgagggcaagggcggcgctgctgccctcctccccctccccatcgccgctgttccgcctcccgcgccgcttcctttcactcaccgcgactcgctaccctctctactacgacctcatcgtgcatcgccccgcggaccccaatccccccaaatcctccgccgccggggccgaccggcagccgcagccagcccccgaagagcagacgctcgaccgcgcaaagcgccggtacctccgcaagcgccgcagccgcctactccccgaccctgacgccaccaccaccactaagccctcctccttgtcgtcggagttcgtcgagctcaggccggaggtggtggacttcccgcgcctgcacgcgcgcgaggaggcgctctacttccacgacaccttcgcaatgccgtgggagaaggacaagcactaccgcatgctctaccgcctcgagaagaagtacttcccccaccagtcgctcgacaacgcgttcgtctccgccgacgccgccccggcctccgacgccgacagggggctcgtattctttgacgacgagaagaaggaaaacgagggagaggagcgggcggtcagtgacaagggcgccaacaaaggggaggtgctggagaggaaggtggaggatttcttcaggtctctcaagaagggtcccggccaagtcgacaccaaagccaagagaccgggaacggagccgcagcagcaggtgaagcgcgaagtgcggagggaggaggagcggccgcagccgtacctcgtcactaggaccacggagctgccgccgaggtgggacggccctgctgggaccgtcgtgctcatcgacaagcccaaaggatggacttcgtttactgtctgtggaaagttacggcgcttggtgaaagttggacatgctggaactctggacccaatggcaactggattgttgattgtttgtgtaggaaaagcaaccaaaatagttgacagctaccaaggaatggttaagggctatagcggtgttttccgacttggagaagccacatcaacctgggatgcagattcaccaattatccagagggaaccatgggaacacatcaaagatgaaaatattagaaaggcagcagcatcattcatgggtgagatatggcaagttcctccaatgttttctgccattaaggttggcggtgaaaagatgtatgacaaagcaaggaagggtgaaacagtagagctttcaccaagacgtatatcgatataccaatttgatattgagcgcagtttggaagacagacagaatttgatatttcgagttacttgctcaaaaggaacatacattcggtccctatgtgcggacttgggtaaagcacttggaagctgtgctcatttaactgccttgcggagagactcgataggtgaatactcggtcaatgatgcttggaacttcgatgagcttgaagaacaaatcaccaaggggtatttatgagcatgccagtgagccgagctaggttatatgcggcttgcaaccagtggcatccatgctgccatgtcagtcccaaagctgtcaacgtgggcttcagcgaagagttgcaaatccagttcagttcatcctcaaccttttgtcatatagaggaacacgaagctccgttagttgtatgtgtgttgtgggtttcaattgatctcagtattgaatcgattttggcagtattgatgtataccattgttggtcaggtcttttgattgccttgccatgtaattttgctgggagcatattaaatttataatctaaagactgtgttaaaagtagcgaaatttataatctaatgacgaacacaagctggcgttaagtccacccctttttcttctctagaccctcgacgc

SEQ ID NO: 61033 - DNA, 2414 bp, Zea Mays
cccctccccccgttcccctagttgaatcccacctcttaccgaggttgtaagaggatgggtacagaaactccaaggacaaccccagagtgttagatgtagaagcccccaagcctgaacccaccacggagatcctcttcctctgcagctacgagaactgcggcaagacctttgttgatgtcagcgcgctccgcaagcatgctagcgtgcacaacgagaagcagtatatatgcaacgagcccaactgtgggaagaaatttgttgatagctccaagttgaagaggcattatcttacccacacaggacaaaaggattttgtctgtccacatccaggctgtggtaaggccttctcattggattttaacctacggtcacacctaaaaacacatgcattggagaattatcacatatgccctttcccagcatgtggcaaaagatttacaagtgacttcaaactaggagcacatgtcaagtcacatgaaaagactggaactcctattgcagtgcagcatgcgccagcgccaccagcagaaaaaccgcgtgtcgccccaaagcctccgactccagcaaccacaagctatgctgatcggccatatgtctgcccctatgaaggttgtgacaaagcatacattcacagttacaaattgaaccttcatctaaaaactcagcaccctgaacacggtcaagaggaaaacggtaaggtcggtgcttctggtgggcagcatgctgcgaacgaacacacttaccagtataactatgccgaggttggcgagattgcaccaaaccccaaaaggagcaagacgaatcatgggcacaaggtccactcatccaaagcctacaatgccaaggtttcgagagcaatgccttctgacattggcgtcaggaaccagtggccaggtaaagctacgtaccaagatgatagtgaagagacggaagaagatggaggcaacaacattgaagatggctggagatatggcaacaatgatgacgatgaggaaacaccagatgaagattgacctttatttaggtttggatatgtagatatatgagggtgatctgttgtcctttagtttcaatgcagtcatggggaagttcaagctttaaccttaggtagtagttcattcagatggtgcatggatatattgtactcagttacctgctcctaaatgctttcactcccctatcttccagagccacatgtattttagatagtttggatatgtttgccttggaataaattttcatttgaaatgttagtatgttactcaactaaattgtttttatcagatgaactaggtagttgaaaaaaaatacaaatccaggtagacatgcagtttagccataacaaacatgttttgcttacaacaatctgctcatttttttcctggcaaatcactcggtgtatcaaaaactttagagctatgtagttgaaagactaatcaacacgcagtttaaccatgagcaagctttgtttaattattacagtctacgagtacttattcaggcagatcactctgaggttgtgcctactgttgggcgctgccagcttgaccttgttggtagctgccactgccagcaggagtaagcacagccagctcatgcttcctaccgttcttgagctctgcagcttcctccatggagatggcatacgagctggcgatgacggcggccggcaagtcgctcaggacggagttcttcccggcgacgtggctgaccatggtgtcagggttcgtctcgaaggcgatgtactggaagccttctccctgcgccttggtggcgacgaggtagccctggggtacgatgagcagctgccccgcacggagcacgtcgtcgaacaccgtggtcccgttgtcgctggcgacctggacccttgcactgcccctgatgccgtacatggcgctgtgggcgttgaagttccagaacggcgacatgatggcgtcctggtacaggtctacccgcaccgcgctcatctgtacgaggttgaggacggggaacttgtggctggtgaggcgtgtgatcctcccagccccagggctgtagacgtcggcctggtccagccgttcgacgctgtgcctcacctccatggcgcagacgttgtgcctgtcgacgtcgcgctggcacgtttggtactggacttgtgacgatgggaacgaaaacgacgacgacgacggcgacggattcagctggtgaaagccgtgctccggctccacgcggacgatctcgcctcgctggtcacgccggctctgcagcttctcggcgacgtgcatgctgacgcccagggcttcgctcaggaaccgggcgtcgatccctttgaagatgttctcggcgaagtggggctgccccttgctgaagcccccagccagcaagaatttctgcgaatcgcacaacgacgacagagattcattagtcgagtttta

SEQ ID NO: 61034 - DNA, 830 bp, Zea Mays
cgcagatccaagcggagaagctgcgtcgtggcctgaccctgtccgtcctctccggtcggcgagagcaagaagagatcccgcgccgtcctcttctccacctccacctccacccatggcggcctccaccttcagcggcgacgagacggcgcccttcttcggcttcctcggcgccgccgccgcgctcgtcttctcctgcatgggcgccgcctacgggacggccaagagcggcgtcggcgtcgcctccatgggcgtcatgcgccccgagctcgtcatgaagtccatcgtccccgtcgtcatggcgggagtactcggcatctacggcctcatcatcgccgtcatcatctccaccgggatcaaccccaaggccaagccctacttcctcttcgacggctacgcgcacctctcctccggactcgcctgcggcctcgctggcctcgctgccggcatggccatcggcatcgtcggagacgccggagttagaagctcttgctctgtacggtctcatcgtcggtatcattctctcatcccgtgcaggccaatctcgcgccgattagaaggcttgatatacgccacactgagtcatctgccattgtattcaaagtgttcttttctcggtgaacaatgtgagggatcatgttgagcctgttccacctttgtaacattatattgctattatgtgaagacaaacctagctagctgttgcagttatgctgttgtacttgtatttgtttgaaaataataggcagcgagccccggatgtgatgaataataagcaagctggactagttgttaatgttttttctttaatgtggattggttttgttatgtgt

SEQ ID NO: 61035 - DNA, 776 bp, Zea Mays
cctcatacaaaagaatcctattaacaactcaaataatctgggtaaacaaacagtactactcagattatataatcgagattatataatccagattatataatcctccaaaaataatccagattatataatccatgggggtaaacaataaggccctaagaaggcagcttccttcctctttccttcccccttgcatctctggcgctaacgtgagcatcgaagccaacacgctgccagagttgccgtcgacgtcgattctgacccacactgctggcgcaacttcaagggtggatcgaggagggtcgtcgggggagccgaagtgagtcggtgggacgtttgtgttggtgtggctagtcggggtgccagaattcctcaacggacttcttcctcctccaccggaccgccgatctccacgattggggtacctcgaagcgccgatcgctgcagtgaggtcacgagtcacctgaggatcacccaggtacctagaatctcaagtcccaggcaagttgtacccttgaccacttctattacccaataatgttctttaatatcacatattcatgcataggtttaattttgatgggacccaataggtcaccctagtctgattatcttttaccttgtttacccgtgaatcacttgggtagttttgctattgctttatatggttttgagttaaatattacattatgtccatgttctaattattctgttattttatttatgttcatgtcaagatcattatattattttaattggaacatggagcttaacttgag

SEQ ID NO: 61036 - DNA, 1470 bp, Zea Mays
cccctcccctctcggctgcttgctgcggcggcgcgtcggcccacgggtgaagaggggagagaaatggctgatggtgaggacatccagcctcttgtctgcgacaatggcaccggaatggtcaaggctggttttgccggcgatgatgcaccaagggctgtattccctagcatcgttgggcgtcctcgtcacaccggtgtcatggtagggatggggcagaaggatgcatatgttggtgatgaggctcctttgaacccaaaggccaacagggagaagatgacccagattatgttcgagactttcaatgttcctgccatgtacgttgcaattcaagcagtcctgtcactctatgctagtggccgtactactggtattgttctcgattctggtgatggtgtgagccatactgtgcccatttatgaaggatatgcccttcctcatgctattctacgtctggatcttgctggtcgggacctcaccgactcgctcatgaaaattctcactgagaggggttattccttcacaacctccgccgagcgagaaattgtaagggacatcaaggagaagcttgcgtatatagctcttgactacgagcaagagttggagactgccaagaacagctcctcagttgaaaagagctatgagctacctgatggccaagtaatcaccatcggtgcagagagattcaggtgccccgaggtcctcttccagccatccatgattggtatggaggctgctggaatccatgagacaacatacaattcaatcatgaagtgtgatgtggatatcaggaaggacctctacggcaacattgtgctcagtggaggttcgactatgttccccggtatcgctgatcgtatgagcaaggagatcacttcccttgcaccaagcagcatgaagatcaaggtcgtcgcaccacctgagaggaagtacagtgtctggataggagggtcgatcctagcctcgctcagcactttccaacagatgtggatatccaaggaggagtatgatgagtctggcccggcaatcgtccacaggaagtgcttctaggttccgcaagttcctcattgttatctagtctcaagttatgcccccgtcatttctcgagatatgtgtggcagatttgcctgcgacgtttattttcatcggacctgagtcttctcggggttagcagctacctttgaatgttgtggctccctgtgcgagcgtgctgtgtcgtatcacctggtttgtgagattagttgttgtcaaacttgcttggtttgattggttgtgcgtttaagagctgatagttatatacatatattgctttgctataccgccgctatatctatgtagcctttatgtatgtatctggattctgaaatgcaagaatgaacttcgagcagcctttgtgttgccgatattttgtggtgccgttattgaacagtgtgccaactgaagattatacgaccgtggaagcctggtttggat

SEQ ID NO: 61037 - DNA, 1808 bp, Zea Mays
agtcaaggagaccgtgcctacgcttttcttctccctccattcattcacacaccacacctcccgaactccgaactacaagtttcgcttctcgtcgcgacgactgggcgagaccgccgccgccgccgccgcctgagaaatggctgatggtgaggacatccagcctcttgtctgcgacaatggcactggaatggtcaaggctggttttgctggcgacgatgcaccaagggctgttttccctagtattgttggccgtcctcgccacactggtgttatggtagggatgggacagaaggatgcgtatgttggcgacgaggcacagtccaagagaggtattctcacgctcaagtatccgatcgagcatggtattgtgagcaactgggatgacatggagaaaatctggcatcacactttctacaacgagcttcgtgttgccccagaggagcaccctgtgttgctcactgaggctcctttgaacccaaaggccaacagggagaagatgacccagattatgttcgagactttcaatgttcctgccatgtacgttgcaattcaagcagtgctgtcactctatgccagtggacgtactactggtattgttctcgactctggtgatggtgtgagtcacactgtgcccatttatgaaggatatgcccttccccatgccattcttcgtctggatcttgctggtcgggacctcacagactccctcatgaaaattctcactgagaggggttattccttcacaacctctgccgagcgagaaattgtgagggacatcaaggagaagcttgcatatatagctcttgactatgagcaagagttggagactgccaagaacagctcctcagttgaaaagagctatgagctgcctgatggccaagtaatcaccatcggcgcagagagattcaggtgccccgaggtcctcttccagccatccatgattggtatggaggctgctggaatccatgagacaacatacaattcaatcatgaagtgtgatgtggatatcaggaaggacctctacggcaacattgtgctcagtggaggttcgactatgttccccggtatcgctgatcggatgagcaaggagatcacttcccttgcaccaagcagcatgaagatcaaggaaggacctctacggcaacattgtgctcagtggaggttcgactatgttccccggtatcgctgatcgtatgagcaaggagatcacttcccttgcaccaagcagcatgaagatcaaggtcgtcgcaccacctgagaggaagtacagtgtctggataggagggtcgatcctagcctcgctcagcactttccaacagatgtggatatccaaggaggagtatgatgagtctggcccggcaatcgtccacaggaagtgcttctaggttccgcaagttcctcattgttatctagtctcaagttatgcccccgtcatttctcgagatatgtgtggcagatttgcctgcgacgtttattttcatcggacctgagtcttctcggggttagcagctacctttgaatgttgtggctccctgtgcgagcgtgctgtgtcgtatcacctggtttgtgagattagttgttgtcaaacttgcttggtttgattggttgtgcgtttaagagctgatagttatatacatatattgctttgctataccgccgctatatctatgtagcctttatgtatgtatctggattctgaaatgcaagaatgaacttcgagcagcctttgtgttgccgatattttgtggtgccgttattgaacagtgtgccaactgaagattatacgaccgtggaagcctggtttggat

SEQ ID NO: 61038 - DNA, 1956 bp, Zea Mays
agtcaaggagaccgtgcctacgcttttcttctccctccattcattcacacaccacacctcccgaactccgaactacaagtttcgcttctcgtcgcgacgactgggcgagaccgccgccgccgccgccgcctgagttctttagaaatggctgatggtgaggacatccagcctcttgtctgcgacaatggcactggaatggtcaaggctggttttgctggcgacgatgcaccaagggctgttttccctagtattgttggccgtcctcgccacactggtgttatggtagggatgggacagaaggatgcgtatgttggcgacgaggcacagtccaagagaggtattctcacgctcaagtatccgatcgagcatggtattgtgagcaactgggatgacatggagaaaatctggcatcacactttctacaacgagcttcgtgttgccccagaggagcaccctgtgttgctcactgaggctcctttgaacccaaaggccaacagggagaagatgacccagattatgttcgagactttcaatgttcctgccatgtacgttgcaattcaagcagtgctgtcactctatgccagtggacgtactactggtattgttctcgactctggtgatggtgtgagtcacactgtgcccatttatgaaggatatgcccttccccatgccattcttcgtctggatcttgctggtcgggacctcacagactccctcatgaaaattctcactgagaggggttattccttcacaacctctgccgagcgagaaattgtgagggacatcaaggagaagcttgcatatatagctcttgactatgagcaagagttggagactgccaagaacagctcctcagttgaaaagagctatgagctgcctgatggccaagtaatcaccatcggcgcagagagattcaggtgccccgaggtcctcttccagccatccatgattggtatggaggctgctggaatccatgagacaacatacaattcaatcatgaagtgtgatgtggatatcaggaaggacctctacggcaacattgtgctcagtggaggttcgactatgttccccggtatcgctgatcggatgagcaaggagatcacttcccttgcaccaagcagcatgaagatcaaggtcgtcgcgccacctgagaggaagtacagtgtctggataggagggtcgatcctagcctcgctcagcactttccaacagatgtggatatcaaaggaggagtacgatgagtctggcccggcaattgttcacaggaagtgcttctaggtttctgccaagttcgtcaagtgcttttagggttcgactatgttccccggtatcgctgatcgtatgagcaaggagatcacttcccttgcaccaagcagcatgaagatcaaggtcgtcgcaccacctgagaggaagtacagtgtctggataggagggtcgatcctagcctcgctcagcactttccaacagatgtggatatccaaggaggagtatgatgagtctggcccggcaatcgtccacaggaagtgcttctaggttccgcaagttcctcattgttatctagtctcaagttatgcccccgtcatttctcgagatatgtgtggcagatttgcctgcgacgtttattttcatcggacctgagtcttctcggggttagcagctacctttgaatgttgtggctccctgtgcgagcgtgctgtgtcgtatcacctggtttgtgagattagttgttgtcaaacttgcttggtttgattggttgtgcgtttaagagctgatagttatatacatatattgctttgctataccgccgctatatctatgtagcctttatgtatgtatctggattctgaaatgcaagaatgaacttcgagcagcctttgtgttgccgatattttgtggtgccgttattgaacagtgtgccaactgaagattatacgaccgtggaagcctggtttggat

SEQ ID NO: 61039 - DNA, 1784 bp, Zea Mays
agtcaaggagaccgtgcctacgcttttcttctccctccattcattcacacaccacacctcccgaactccgaactacaagtttcgcttctcgtcgcgacgactgggcgagaccgccgccgccgccgccgcctgagaaatggctgatggtgaggacatccagcctcttgtctgcgacaatggcactggaatggtcaaggctggttttgctggcgacgatgcaccaagggctgttttccctagtattgttggccgtcctcgccacactggtgttatggtagggatgggacagaaggatgcgtatgttggcgacgaggcacagtccaagagaggtattctcacgctcaagtatccgatcgagcatggtattgtgagcaactgggatgacatggagaaaatctggcatcacactttctacaacgagcttcgtgttgccccagaggagcaccctgtgttgctcactgaggctcctttgaacccaaaggccaacagggagaagatgacccagattatgttcgagactttcaatgttcctgccatgtacgttgcaattcaagcagtgctgtcactctatgccagtggacgtactactggtattgttctcgactctggtgatggtgtgagtcacactgtgcccatttatgaaggatatgcccttccccatgccattcttcgtctggatcttgctggtcgggacctcacagactccctcatgaaaattctcactgagaggggttattccttcacaacctctgccgagcgagaaattgtgagggacatcaaggagaagcttgcatatatagctcttgactatgagcaagagttggagactgccaagaacagctcctcagttgaaaagagctatgagctgcctgatggccaagtaatcaccatcggcgcagagagattcaggtgccccgaggtcctcttccagccatccatgattggtatggaggctgctggaatccatgagacaacatacaattcaatcatgaagtgtgatgtggatatcaggaaggacctctacggcaacattgtgctcagtggaggttcgactatgttccccggtatcgctgatcggatgagcaaggagatcacttcccttgcaccaagcagcatgaagatcaaggtcgtcgcgccacctgagaggaagtacagtgtctggataggagggtcgatcctagcctcgctcagcactttccaacagatgtggatatcaaaggaggagtacgatgagtctggcccggcaattgttcacaggaaggtcgatcctagcctcgctcagcactttccaacagatgtggatatccaaggaggagtatgatgagtctggcccggcaatcgtccacaggaagtgcttctaggttccgcaagttcctcattgttatctagtctcaagttatgcccccgtcatttctcgagatatgtgtggcagatttgcctgcgacgtttattttcatcggacctgagtcttctcggggttagcagctacctttgaatgttgtggctccctgtgcgagcgtgctgtgtcgtatcacctggtttgtgagattagttgttgtcaaacttgcttggtttgattggttgtgcgtttaagagctgatagttatatacatatattgctttgctataccgccgctatatctatgtagcctttatgtatgtatctggattctgaaatgcaagaatgaacttcgagcagcctttgtgttgccgatattttgtggtgccgttattgaacagtgtgccaactgaagattatacgaccgtggaagcctggtttggat

SEQ ID NO: 61040 - DNA, 4265 bp, Zea Mays
cgaaaagtagactccaatttcccctttcctcttccgtctcgctcatctaatcgccctcctcttcttcccctttttgcttcctctccacgagcgcgcgagcgcgacgacgtcagcaacaacgcagactaccccgcagtcgccgagggagcaattccgcccccaattggccgccggaacccttcttccttcccctcccacggagtcgctgccgcgctcagatagcccagccgagccggcgacgacgaggacaggaccctagccctaataatccggtcccccacatggcggggaccttccgcgagggcgcggggccgggggacgcccatgcgcccccgcccacgcctacgccgcccctctcgcagttcctcgcgctggatgcgctcccgtcctggggctccgaccccaagcagccgcactggcgccaccccgagctccgccgggcgctcgcctccgacgaccaagccgacgagctcaggcggatccgtgccagcgtccaggactccgcgggcaaggccaaggagaaggtcaggtcgctgcacgaggcaatccagaagctcgacaagtacaagaacattgtcacccgcaaacgccagcgcgccacagaggcgtcggccgcgcccgacaagctgggccctgccggcgcctcctcctccggcgcgctcaggatgggcgcacagaacaactctgctgtccttagcaagcgcgtgcgctcgtcgctcgccgatgcccgggtggaagggcgtggtagtgttcctacaaggcaaggccctttgattagtactgagaaaaattcacctctagagaaggaaaagagcagcgcaagaatatctgctacagtttctggcctttctgatgacaaattgcggggtctatctactggcagtgaagggtgggaaaaaaagatgaagcgtaagcgctctgttggaacaatgctcagcagaggcagtgatgtggatcgagatgtcaaatccgcgggccagcatagaccagccaatgaagtacgcccacggtctagtgatggccttgggtatagacatggagtttcggccggagcactagtaggtaacaagttggatggcacttctcagcagaataacattgtatcccgcattctgtccaagtcagatgccgattatgtggctcagccaaatgaaagaagagaacgtcatcctggagttgaaaaagaaaggaccacattaaaaggaaacaaggcaaattcttctgatgatatgcaaaacgtaagcttaaacccattgcccaaggctaaagcatgcagggcaccaagaactagttcacttgctatgaactcgtcttctaatttccaacgttcaactggaggaagtgatgagtgggaagaaacaccttacccaaataaagcctcgcctttgggaggcatgacaaatcgcaaacgttccacacattcaaatgcttcctcacctcctattgcctgggttgggcaacgcccacagaagatgtcaaggacaagaagagcaaatgttgtttctccagtgtcaaattttgatgaagcgttatctgaaggatcaccacttgacactgccactagatcggcacctatagagtctggcagtgtcttgctgacaaagaacacatcaacaaccaaaatggataacatctcatctcctgctgggttgtcagaaagtgagggatcggctgtgaatgaaagcaagtccaaggagaaagccatgcatagtggtgaagtcgggaacgagggtgcaaatgcagcccataatgcaatgggattgatattttcatcaaataaaaataggattcctttgaaagaggagcttgaagatggcagtattcgtcgtcaagggaggagtggaaggggagctatgcatgtcaaggggtgttctcccataccaaaagaaaaactggacactgcagaaacaagaaagccaacaaaaggtggaagacctggatctgaaaagaacgagagtaagttggggcggccaccaatgaaaaaagcctctgaccgtaaagcttcatcctggcattcacaagctctaaatagtgatattacagacataacaggtgaaccagaagatgaccaagaggagcttttagctgctgttaatgctgctcgcagcgctattgttagtgcctattctggtcctttttggaagaaaatggagcccatgctaacttttatgagctcagaaaatttatctttcttaaaaaaccagatcaaccttgttgaagagcttgaagtgagcatgtcctgcatgtctgacggtgaacatgatattatagcatcagttggtcacagaagaatgtcaaagatggaggagcattcatctcagggactggttccatctaatttttctccctcatctcagcaaagtaaaactaatggagtcggagaaaaaggattagtcggctgtttctctcatggtgacgaaagtcgtactggaccacaaaagctggaagctgataaatggtttaatgaaatggctccaatgacacacagactcctttcggctttaattatggaagatgacctacctgattccaatggggtgcaaagagatatacttgttgaatttccaaatagccacaatccttacactgtcaacagatacttagaaaatgaacttcaagctagtgccataacatctaattttgggctgagcgtggatttcgtgcactcaaacagtacttctgtggtacatcagagcatgtgcaatggttttacagcttcaagcaatttcattaattcaaacagtgaaaattcagttcatagtgagaatttatcagacggactaaattttacagtatacccagaaagtggccctttgcatgacttgataccactgactccacggcaatgtcaaaatccagggaaagatttccctttgtctccatatgagtatcaatatgggcagatgtctatggaagataagattttaattgagctgcaaagtattggcatttgtccagagacagtgccaaagctagatgacggagaagatgaggacattaataaaatgatttcagagctgaggaaaaggctgcatgatcaggtgaaccagaagaaatgcagattacataagctagataaatcaattcaagatacaaagaatattgaggagaggagcttggagcaacatgctatgaacaaattggttgaaagagcatacagaaaactcaagggtgggcggattggctctagtcacaaggctggtgtcagtaaatctgccaacaaagctgcaaaacagctagccttggcttttgccaaacgcactcttgttcgatgccacaaatttgatgaaacagggaaaagctgcttcagcgagccttctctttggagtatcctgtctgcacccttgccaagcagtgattcaaaatgcacagagggtgtagagaggctgaagcatcaaaagcttgacagaactccattcgaccaaggtggtgcaaaatggaaaaaggtcgacagggaacgggaccacaacagggatgcatccgcgaagggctccggattgaaatcgggacgtcattcatcaggtggtagcggcaggagcggcgagcgcaaaaacaagacaaagccaaagcaaaagcttgcacagctatcaacctcggggaacgtgctgggtagagtcgttgagccattttcgtctccaacagtgcaggagccccctgaacctgcaagcgagaaaaagacccagcatccaactaggggtgcttccagcagcgctgcccagcggcttaccgtggacgctggactgccagtgttgcctgggttagatgacatattggacgtcccggaagggcttgacgggcagggcaacgatatcagctcgtggtttacggatggccttgacgactcgttgcaagacattgatctttctggcgccctggaaatcccagacgatgacctcacccagctgggatttatgtaaggagaaggaagcaatcgttgtttgtcctgtgcatatacatgtctttccttcacctaatgtatggtagcgctgatccattgatctccctgccacaacctggtaggtcagaggttgtaatctgtaattaggctgttggattcgtgtcgatattcagtgtctgctggcatggactggatagttgcagatgaggcgaggtagcagcaacaagaacatgctgagatttgttaatgttatcctgtagtttgtgcttctgcttcctggattatcctgtcggaatccgacagtacgtgtctttgaaaagctcgtcctttgcatgcctaagatttgttgcggaaggagacaagtaac

SEQ ID NO: 61041 - DNA, 505 bp, Zea Mays
ttttgtttttgtgatccactgcccatgtatcaagaaggcaaactagattctgatgtatgcatattaaaattgccgatatcaaataaatcatccatgagttgtcctagagtttccagtgtgaaggatatgcattgaatcaattttctatgtttttcagaatgatggacaaggtacaccaccacgacaataggatttttttacaccctggctatcttgttttaattcatcctttctgcgctccaattattttgaatgcatatggtctgcaaatggagaatttgctattgctcaatgaagtggcggcatgctccaaaatcctagtgagacctctgcacctttggtcagatcccaggcctaggatgtccatgttgtgtgtatgtaccaacagctaaaatgtaaacacgacattatcatagttgagtacatgaataattatctattatatcttattgtaaaatctgaaatagttcttctgtagatggttagcttgcattttatgctacaa

SEQ ID NO: 61042 - DNA, 1735 bp, Zea Mays
ctcttttgcgggaggcgaggcatctcgccgaacaccttcccgctcggtcgttcacagcccccggctcgtgtcgtctgactgactgtgagtctgtgacgtcgctgccagtaaaccacataccaaccattgaacatcttctgtggccagccggcatccgtgcagccgccagcaccagcaggccatgacatggcaccatgtttgagctgacagctgactagctgagcgtgccgccttgccgtgtcggggagctgagctgagcctagagacgccaaacggaatggcgaaagcgaccggccgcgcggcgggcagcaggagctgcatcgagaggctgcctgcgccccgcgcccaatcctcttcctaaatcctaatcccctccgcctcatccccttcaaccccacgtctctctcgccgaaggctccggcctcgtcgggatccggtgctggattgacgcaatggcgccgctccacgccgcgctgccgccgccctcctccgccgccgctcaccaccacgcggcagccccgcctgtcttcctcgcccgctcgccgtaccacccccgcagggcggcggcctcctgcccgctcgccgtcgctgccgctccctcgtcgagaaaagcgttcttgtcgtgcccgctgctgggccactggaccacggccgcgcctcttccgcctcaacgagctccagctgtcggacgccgagaaggcccggatataccacttctacatccccgtcttcctctggtgcgaggacgaggtcatggtgcacagagccaggtacaacgacggcgatgacatcccgccattggtgatcggggtcagcgctccccaaggaagtgggaagacgactcttgtgttcgcacttgattatctttttcgggttgctggtaggaattctgccacattgtctatagacgacttctatctgacagcaaaagaacagaatgaattgagggacagaaatcctgcaaatgctcttttagagttccgcgggaatgctggaagccacgatctccaactctcagtggaaacactcgagtcactgatcaagctaacgaaggaaggtatgaagatgaaggttccacggtatgacaagtctgcgtttgggggaaggggtgaccgggctgatccttctgtatggccagaggttgaagggcccttagaggttgttctgttcgaaggatggatgcttggatttaaacctcttccaaatgaagttgtgaaagaagtggatccacagctggaggtggttaacaagaaccttgaagcatactctgatgcttgggacaggttcatccagtcatggattgttattaaaataagagaacccggtagcgtttaccagtggagactgcagaggtcgctatgagagcagatggaaagcctggaatgtctgatgaggaggttatggattttgtatcacgctacctaccggcataccatgcatatctgccaacactgtacaaagaggggccgaatggttcgaatccagatcatctgctggtcatcgacatagacgaaaataggaaccctatctgtggtggatcatgggacatctcatgtttgtgaaactacttttatgatgggccgtcaaacaccactggcctcttgttgccctacactctggtagtgtaaatctgtgaattccatgtaaatatgaatttcgcttcttaaggcactttttaatctggcatggtctttagcttgaacatcggccataagtttcttatgatatatgtcgg

SEQ ID NO: 61043 - DNA, 1936 bp, Zea Mays
ctcttttgcgggaggcgaggcatctcgccgaacaccttcccgctcggtcgttcacagcccccggctcgtgtcgtctgactgactgtgagtctgtgacgtcgctgccagtaaaccacataccaaccattgaacatcttctgtggccagccggcatccgtgcagccgccagcaccagcaggccatgacatggcaccatgtttgagctgacagctgactagctgagcgtgccgccttgccgtgtcggggagctgagctgagcctagagacgccaaacggaatggcgaaagcgaccggccgcgcggcgggcagcaggagctgcatcgagaggctgcctgcgccccgcgcccaatcctcttcctaaatcctaatcccctccgcctcatccccttcaaccccacgtctctctcgccgaaggctccggcctcgtcgggatccggtgctggattgacgcaatggcgccgctccacgccgcgctgccgccgccctcctccgccgccgctcaccaccacgcggcagccccgcctgtcttcctcgcccgctcgccgtaccacccccgcagggcggcggcctcctgcccgctcgccgtcgctgccgctccctcgtcgagaaaagcgttcttgtcgtgcccgctgctgggccactggaccacggccgcgcctcttccgcctcaacgagctccagctgtcggacgccgagaaggcccggatataccacttctacatccccgtcttcctctggtgcgaggacgaggtcatggtgcacagagccaggtacaacgacggcgatgacatcccgccattggtgatcggggtcagcgctccccaaggaagtgggaagacgactcttgtgttcgcacttgattatctttttcgggttgctggtaggaattctgccacattgtctatagacgacttctatctgacagcaaaagaacagaatgaattgagggacagaaatcctgcaaatgctcttttagagttccgcgggaatgctggaagccacgatctccaactctcagtggaaacactcgagtcactgatcaagctaacgaaggaaggtatgaagatgaaggttccacggtatgacaaggtaaaaggttgcagttaacgttcctctagctgatgcttgtagctgatcagctgcatgattgatacatgtcatgtccatgtagtctgcgtttgggggaaggggtgaccgggctgatccttctgtatggccagaggttgaagggcccttagaggttgttctgttcgaaggatggatgcttggatttaaacctcttccaaatgaagttgtgaaagaagtggatccacagctggaggtggttaacaagaaccttgaagcatactctgatgcttgggacaggttcatccagtcatggattgttattaaaataagagaacccggtagcgtttaccagtggagactgcagtgtttggattgtcaggcagaggtcgctatgagagcagatggaaagcctggaatgtctgatgaggaggtgtgttctctgacaaagctactcactattttagaacaatccctctgttatcctagtaaccttggagccttactgatggttctgtcatgtggtttcttcggttatggattttgtatcacgctacctaccggcataccatgcatatctgccaacactgtacaaagaggggccgaatggttcgaatccagatcatctgctggtcatcgacatagacgaaaataggaaccctatctgtggtggatcatgggacatctcatgtttgtgaaactacttttatgatgggccgtcaaacaccactggcctcttgttgccctacactctggtagtgtaaatctgtgaattccatgtaaatatgaatttcgcttcttaaggcactttttaatctggcatggtctttagcttgaacatcggccataagtttcttatgatatatgtcgg

SEQ ID NO: 61044 - DNA, 1735 bp, Zea Mays
ctcttttgcgggaggcgaggcatctcgccgaacaccttcccgctcggtcgttcacagcccccggctcgtgtcgtctgactgactgtgagtctgtgacgtcgctgccagtaaaccacataccaaccattgaacatcttctgtggccagccggcatccgtgcagccgccagcaccagcaggccatgacatggcaccatgtttgagctgacagctgactagctgagcgtgccgccttgccgtgtcggggagctgagctgagcctagagacgccaaacggaatggcgaaagcgaccggccgcgcggcgggcagcaggagctgcatcgagaggctgcctgcgccccgcgcccaatcctcttcctaaatcctaatcccctccgcctcatccccttcaaccccacgtctctctcgccgaaggctccggcctcgtcgggatccggtgctggattgacgcaatggcgccgctccacgccgcgctgccgccgccctcctccgccgccgctcaccaccacgcggcagccccgcctgtcttcctcgcccgctcgccgtaccacccccgcagggcggcggcctcctgcccgctcgccgtcgctgccgctccctcgtcgagaaaagcgttcttgtcgtgcccgctgctgggccactggaccacggccgcgcctcttccgcctcaacgagctccagctgtcggacgccgagaaggcccggatataccacttctacatccccgtcttcctctggtgcgaggacgaggtcatggtgcacagagccaggtacaacgacggcgatgacatcccgccattggtgatcggggtcagcgctccccaaggaagtgggaagacgactcttgtgttcgcacttgattatctttttcgggttgctggaattctgccacattgtctatagacgacttctatctgacagcaaaagaacagaatgaattgagggacagaaatcctgcaaatgctcttttagagttccgcgggaatgctggaagccacgatctccaactctcagtggaaacactcgagtcactgatcaagctaacgaaggaaggtatgaagatgaaggttccacggtatgacaagtctgcgtttgggggaaggggtgaccgggctgatccttctgtatggccagaggttgaagggcccttagaggttgttctgttcgaaggatggatgcttggatttaaacctcttccaaatgaagttgtgaaagaagtggatccacagctggaggtggttaacaagaaccttgaagcatactctgatgcttgggacaggttcatccagtcatggattgttattaaaataagagaacccggtagcgtttaccagtggagactgcaggcagaggtcgctatgagagcagatggaaagcctggaatgtctgatgaggaggttatggattttgtatcacgctacctaccggcataccatgcatatctgccaacactgtacaaagaggggccgaatggttcgaatccagatcatctgctggtcatcgacatagacgaaaataggaaccctatctgtggtggatcatgggacatctcatgtttgtgaaactacttttatgatgggccgtcaaacaccactggcctcttgttgccctacactctggtagtgtaaatctgtgaattccatgtaaatatgaatttcgcttcttaaggcactttttaatctggcatggtctttagcttgaacatcggccataagtttcttatgatatatgtcgg

SEQ ID NO: 61045 - DNA, 214 bp, Zea Mays
atgtcagcagatcggcatgaaatgctgtcgagaagggagaaggccacaaacttcaaaccagactatgatattgatatccatatgaaggtcttagctatgagtgggcaagaatccagtattcttacaggctacaaactgaagtgctgatacggtggtaggaaatgagatgatgatgggtatttttggtgcttcatttgcatgtccagtaccatag

SEQ ID NO: 61046 - DNA, 1568 bp, Zea Mays
ttgacagagcacaatggtctcatcctaatgttttcatcacatttgaatgaacactaaagaaagctgcttgatgcgtggtgcaggatgaactggaatcccttttggatgactctggacatttgcggacacttgctttcttgtatggcagcaaaggaatgtgctccaaagccctttctatatggcgtgtactggcaaggaattatagtgcaggtggcagacattgatcaagatctagcgattgcagttttaacatctgagacgagggaaaatcaactctcaccaggttgttgcttctgttgatgcagaaaaggttgtgattcatcaaagatatttgcagtggttgattgagggtcagggctgcgatgatcctcactatcacacatcatatgctctttcactggccaaatctgcaattgaagcagttgatatggagtctaaatatagagggaaagatgatagtgaaattgattctgatgcacagtttgtttattcagtaagagaaagcttgcaattgtttctgcaagcttcagacctgtatgacccagaagatgtgctcgatgtgatagcagaatcagagctatggctggaaaaggcaatattgtataggaagatgggccaagagaatattgtacttcagatactagcattgaagctggaggatagtgaagctgctgagcagtattgcgcagagattggtcgagatgatgcttatattcagcttttgggcttgtatttggaccctcaaaacgggaaggagcctatgtttacagcagctgtacgacttcttcataatcatggtgaatcgttggaccccatacaagtattggagaaattatctcctgatatgcctctccagctggcatcagacacaattttacggacactgagggcccgagtgcaccatcatcgtcaaggacagatagtccataatctatcacgtgcgacaaacctggacgtgcggttgacaagactggaggagagatcgaggcatgtgcagctaaccgatgagagtatctgcgactcctgtcgagctcgcctcggcaccaagctatttgctatgtacccaaatgactcggttgtttgctacaggtgctatcgatcccagcaaggtgaatcttcatcagggcatggtcgtagcatgaggaaagatgttatattcaaacagagctggcttgtaagtagatagatagcgaggaaggaatgaagagtggtgatcttgaggccagcatttggctgtggctgctctgaaatgggcaccaagtttttttgtctggatgggctctctggaaacttgaacagggtgttgtatattctttttgaggccaatgaatgaatatatacaaatacaagcatacagcataccggaggatgtctagtctgttcttccgtttttttttgtactttagtttttttgtcaaaattttatattcacacctgtagtgggactattaccgtatgcgtcaaggttatacggctcggtgctgtaagtcatggcactgaagtagtattatgtggtgtggacgatacaagtcatggcaccgaagtattatgtcataaatggtgtggag

SEQ ID NO: 61047 - DNA, 3343 bp, Zea Mays
ccagcaagcagtgcgaagttagtcgccggccggcagcgtccccctcgccccccaagtccctagtggttgacactgacagaggtctgcagagactagcggcgatggcgccaccctgccccgaaccctaaccccactccaccaccggccatgggatcccagccgccggcctcccgcgcggccctggagcacctcgctacgcttgaccccgccgcactcgccggcctccctgtctcctccccgctcaccgtccgctccgccgccgtctccgcccacctgctctatctcggcaccggcggcggcaagctgctcctcttctccctgcaggatccctccactcctgagttcctccgcctcctccccatcggcgccaccctacccgtctctgctatcgtcccgctcccctccgtcgcccgcctcctcgtcctcgctgacggcctcctcctcctcgccgacccgctcctctcgcgccccgtccgccgcctcggctccctgcgcagcgtcaccgccgtcgccgcccgccgcgtcgtcctcgcggacccatcatcatgctccgtcgccatctccgtcgggaagaagctgctccgtgtcgacttcacgctgcacgacgccgacgagctggatgtacagacgcgcgagatcgcctcagtcgagggggtcaaggcgctcgcttgggtcgacgattctgtcttcgttgccactgccactgggtactccctctactcgagcaccaatggtcagggtgtggatatattctcgctcccagaatccgccggtcacccaagggtgaagccgctctctggaggtgacgaggtgatgctcctggtcgacaatgtcggtgttgtggtcgatagatttggccagcccgttggaagcagcttggtgttcagcaccacgcccgactacatagctgaggtattcccctatgtgattgttgctggggactccaaggtcgatgtgtacaggaggaggaacgctgcacacctacagaccattccggttgccaggactggtcaaggcgttctgattgtggctggggatgatgatgggatagacacggagctagttgtgatcgctacaacttataaggtaacgtaggtcttttgctaccgtaaagtatctgcattggagcagattaaggcatctttacgaagaaagaactacaaggaagctatttctttgctagaagagtttgagtcggacggtgaaatctcaaaggatatgatctcctttgtccatgctcaacttggttttttattgtttttcgacttgcgtttcgaggatgctgtgaatcatttcttgctatcggagactatgcagccatcagaagtatttccattcattatgcgggatcctaaccgttggtcagatctggtgccaagaaagcggtattggggtttgcaccctccccctaagccccttgaagaatttattgatgatggactggtaacagttcaacaggcattgtttctgaaaaaggcaggtgtggatacagttgtggatgaagatttcctttcaaacccaccaagtagagctgatcttttggaactagcgatcagaaatattatcaggtacctttgtgcatcgcggatgaagaatctaccttctccagagatggaaggagttgatactcttctgatgtatctttatagagcacttcatcttgttgatgacatgtataatctcgcatcttctcagaatagctgtattgtggatgaactggaatcccttttggatgactctggacatttgcggacacttgctttcttgtatggcagcaaaggaatgtgctccaaagccctttctatatggcgtgtactggcaaggaattatagtgcaggtttgtggaaggatctgtctgagaatgattcttgtggaactttggttactaaaaggtctggcgaggaaattgccgctgtagaagcagccaagatcctcaaagcattatctgatgaggaccttgttctggaacatcttggatgggtggcagacattgatcaagatctagcgattgcagttttaacatctgagacgagggaaaatcaactctcaccagaaaaggttgttgcttctgttgatgcagaaaaggttgtgattcatcaaagatatttgcagtggttgattgagggtcagggctgcgatgatcctcactatcacacatcatatgctctttcactggccaaatctgcaattgaagcagttgatatggagtctaaatatagagggaaagatgatagtgaaattgattctgatgcacagtttgtttattcagtaagagaaagcttgcaattgtttctgcaagcttcagacctgtatgacccagaagatgtgctcgatgtgatagcagaatcagagctatggctggaaaaggcaatattgtataggaagatgggccaagagaatattgtacttcagatactagcattgaagctggaggatagtgaagctgctgagcagtattgcgcagagattggtcgagatgatgcttatattcagcttttgggcttgtatttggaccctcaaaacgggaaggagcctatgtttacagcagctgtacgacttcttcataatcatggtgaatcgttggaccccatacaagtattggagaaattatctcctgatatgcctctccagctggcatcagacacaattttacggacactgagggcccgagtgcaccatcatcgtcaaggacagatagtccataatctatcacgtgcgacaaacctggacgtgcggttgacaagactggaggagagatcgaggcatgtgcagctaaccgatgagagtatctgcgactcctgtcgagctcgcctcggcaccaagctatttgctatgtacccaaatgactcggttgtttgctacaggtgctatcgatcccagcaaggtgaatcttcatcagggcatggtcgtagcatgaggaaagatgttatattcaaacagagctggcttgtaagtagatagatagcgaggaaggaatgaagagtggtgatcttgaggccagcatttggctgtggctgctctgaaatgggcaccaagtttttttgtctggatgggctctctggaaacttgaacagggtgttgtatattctttttgaggccaatgaatgaatatatacaaatacaagcatacagcataccggaggatgtctagtctgttcttccgtttttttttgtactttagtttttttgtcaaaattttatattcacacctgtagtgggactattaccgtatgcgtcaaggttatacggctcggtgctgtaagtcatggcactgaagtagtattatgtggtgtggacgatacaagtcatggcaccgaagtattatgtcataaatggtgtggag

SEQ ID NO: 61048 - DNA, 3440 bp, Zea Mays
gaataacttttttttttacgtgcttttgatctgcaacagcaggtatgctgttggtttgtatcgcagtcagtttctgaagtcctgaagtcgtcttctccacctcgaagcaaaccagcaagcagtgcgaagttagtcgccggccggcagcgtccccctcgccccccaagtccctagtggttgacactgacagaggtctgcagagactagcggcgatggcgccaccctgccccgaaccctaaccccactccaccaccggccatgggatcccagccgccggcctcccgcgcggccctggagcacctcgctacgcttgaccccgccgcactcgccggcctccctgtctcctccccgctcaccgtccgctccgccgccgtctccgcccacctgctctatctcggcaccggcggcggcaagctgctcctcttctccctgcaggatccctccactcctgagttcctccgcctcctccccatcggcgccaccctacccgtctctgctatcgtcccgctcccctccgtcgcccgcctcctcgtcctcgctgacggcctcctcctcctcgccgacccgctcctctcgcgccccgtccgccgcctcggctccctgcgcagcgtcaccgccgtcgccgcccgccgcgtcgtcctcgcggacccatcatcatgctccgtcgccatctccgtcgggaagaagctgctccgtgtcgacttcacgctgcacgacgccgacgagctggatgtacagacgcgcgagatcgcctcagtcgagggggtcaaggcgctcgcttgggtcgacgattctgtcttcgttgccactgccactgggtactccctctactcgagcaccaatggtcagggtgtggatatattctcgctcccagaatccgccggtcacccaagggtgaagccgctctctggaggtgacgaggtgatgctcctggtcgacaatgtcggtgttgtggtcgatagatttggccagcccgttggaagcagcttggtgttcagcaccacgcccgactacatagctgaggtattcccctatgtgattgttgctggggactccaaggtcgatgtgtacaggaggaggaacgctgcacacctacagaccattccggttgccaggactggtcaaggcgttctgattgtggctggggatgatgatgggatagacacggagctagttgtgatcgctacaacttataaggtcttttgctaccgtaaagtatctgcattggagcagattaaggcatctttacgaagaaagaactacaaggaagctatttctttgctagaagagtttgagtcggacggtgaaatctcaaaggatatgatctcctttgtccatgctcaacttggttttttattgtttttcgacttgcgtttcgaggatgctgtgaatcatttcttgctatcggagactatgcagccatcagaagtatttccattcattatgcgggatcctaaccgttggtcagatctggtgccaagaaagcggtattggggtttgcaccctccccctaagccccttgaagaatttattgatgatggactggtaacagttcaacaggcattgtttctgaaaaaggcaggtgtggatacagttgtggatgaagatttcctttcaaacccaccaagtagagctgatcttttggaactagcgatcagaaatattatcaggtacctttgtgcatcgcggatgaagaatctaccttctccagagatggaaggagttgatactcttctgatgtatctttatagagcacttcatcttgttgatgacatgtataatctcgcatcttctcagaatagctgtattgtggatgaactggaatcccttttggatgactctggacatttgcggacacttgctttcttgtatggcagcaaaggaatgtgctccaaagccctttctatatggcgtgtactggcaaggaattatagtgcaggtttgtggaaggatctgtctgagaatgattcttgtggaactttggttactaaaaggtctggcgaggaaattgccgctgtagaagcagccaagatcctcaaagcattatctgatgaggaccttgttctggaacatcttggatgggtggcagacattgatcaagatctagcgattgcagttttaacatctgagacgagggaaaatcaactctcaccaggttgttgcttctgttgatgcagaaaaggttgtgattcatcaaagatatttgcagtggttgattgagggtcagggctgcgatgatcctcactatcacacatcatatgctctttcactggccaaatctgcaattgaagcagttgatatggagtctaaatatagagggaaagatgatagtgaaattgattctgatgcacagtttgtttattcagtaagagaaagcttgcaattgtttctgcaagcttcagacctgtatgacccagaagatgtgctcgatgtgatagcagaatcagagctatggctggaaaaggcaatattgtataggaagatgggccaagagaatattgtacttcagatactagcattgaagctggaggatagtgaagctgctgagcagtattgcgcagagattggtcgagatgatgcttatattcagcttttgggcttgtatttggaccctcaaaacgggaaggagcctatgtttacagcagctgtacgacttcttcataatcatggtgaatcgttggaccccatacaagtattggagaaattatctcctgatatgcctctccagctggcatcagacacaattttacggacactgagggcccgagtgcaccatcatcgtcaaggacagatagtccataatctatcacgtgcgacaaacctggacgtgcggttgacaagactggaggagagatcgaggcatgtgcagctaaccgatgagagtatctgcgactcctgtcgagctcgcctcggcaccaagctatttgctatgtacccaaatgactcggttgtttgctacaggtgctatcgatcccagcaaggtgaatcttcatcagggcatggtcgtagcatgaggaaagatgttatattcaaacagagctggcttgtaagtagatagatagcgaggaaggaatgaagagtggtgatcttgaggccagcatttggctgtggctgctctgaaatgggcaccaagtttttttgtctggatgggctctctggaaacttgaacagggtgttgtatattctttttgaggccaatgaatgaatatatacaaatacaagcatacagcataccggaggatgtctagtctgttcttccgtttttttttgtactttagtttttttgtcaaaattttatattcacacctgtagtgggactattaccgtatgcgtcaaggttatacggctcggtgctgtaagtcatggcactgaagtagtattatgtggtgtggacgatacaagtcatggcaccgaagtattatgtcataaatggtgtggag

SEQ ID NO: 61049 - DNA, 3446 bp, Zea Mays
cgaataacttttttttttacgtgcttttgatctgcaacagcaggtatgctgttggtttgtatcgcagtcagtttctgaagtcctgaagtcgtcttctccacctcgaagcaaaccagcaagcagtgcgaagttagtcgccggccggcagcgtccccctcgccccccaagtccctagtggttgacactgacagaggtctgcagagactagcggcgatggcgccaccctgccccgaaccctaaccccactccaccaccggccatgggatcccagccgccggcctcccgcgcggccctggagcacctcgctacgcttgaccccgccgcactcgccggcctccctgtctcctccccgctcaccgtccgctccgccgccgtctccgcccacctgctctatctcggcaccggcggcggcaagctgctcctcttctccctgcaggatccctccactcctgagttcctccgcctcctccccatcggcgccaccctacccgtctctgctatcgtcccgctcccctccgtcgcccgcctcctcgtcctcgctgacggcctcctcctcctcgccgacccgctcctctcgcgccccgtccgccgcctcggctccctgcgcagcgtcaccgccgtcgccgcccgccgcgtcgtcctcgcggacccatcatcatgctccgtcgccatctccgtcgggaagaagctgctccgtgtcgacttcacgctgcacgacgccgacgagctggatgtacagacgcgcgagatcgcctcagtcgagggggtcaaggcgctcgcttgggtcgacgattctgtcttcgttgccactgccactgggtactccctctactcgagcaccaatggtcagggtgtggatatattctcgctcccagaatccgccggtcacccaagggtgaagccgctctctggaggtgacgaggtgatgctcctggtcgacaatgtcggtgttgtggtcgatagatttggccagcccgttggaagcagcttggtgttcagcaccacgcccgactacatagctgaggtattcccctatgtgattgttgctggggactccaaggtcgatgtgtacaggaggaggaacgctgcacacctacagaccattccggttgccaggactggtcaaggcgttctgattgtggctggggatgatgatgggatagacacggagctagttgtgatcgctacaacttataaggtcttttgctaccgtaaagtatctgcattggagcagattaaggcatctttacgaagaaagaactacaaggaagctatttctttgctagaagagtttgagtcggacggtgaaatctcaaaggatatgatctcctttgtccatgctcaacttggttttttattgtttttcgacttgcgtttcgaggatgctgtgaatcatttcttgctatcggagactatgcagccatcagaagtatttccattcattatgcgggatcctaaccgttggtcagatctggtgccaagaaagcggtattggggtttgcaccctccccctaagccccttgaagaatttattgatgatggactggtaacagttcaacaggcattgtttctgaaaaaggcaggtgtggatacagttgtggatgaagatttcctttcaaacccaccaagtagagctgatcttttggaactagcgatcagaaatattatcaggtacctttgtgcatcgcggatgaagaatctaccttctccagagatggaaggagttgatactcttctgatgtatctttatagagcacttcatcttgttgatgacatgtataatctcgcatcttctcagaatagctgtattgtggatgaactggaatcccttttggatgactctggacatttgcggacacttgctttcttgtatggcagcaaaggaatgtgctccaaagccctttctatatggcgtgtactggcaaggaattatagtgcaggtttgtggaaggatctgtctgagaatgattcttgtggaactttggttactaaaaggtctggcgaggaaattgccgctgtagaagcagccaagatcctcaaagcattatctgatgaggaccttgttctggaacatcttggatgggtggcagacattgatcaagatctagcgattgcagttttaacatctgagacgagggaaaatcaactctcaccagaaaaggttgttgcttctgttgatgcagaaaaggttgtgattcatcaaagatatttgcagtggttgattgagggtcagggctgcgatgatcctcactatcacacatcatatgctctttcactggccaaatctgcaattgaagcagttgatatggagtctaaatatagagggaaagatgatagtgaaattgattctgatgcacagtttgtttattcagtaagagaaagcttgcaattgtttctgcaagcttcagacctgtatgacccagaagatgtgctcgatgtgatagcagaatcagagctatggctggaaaaggcaatattgtataggaagatgggccaagagaatattgtacttcagatactagcattgaagctggaggatagtgaagctgctgagcagtattgcgcagagattggtcgagatgatgcttatattcagcttttgggcttgtatttggaccctcaaaacgggaaggagcctatgtttacagcagctgtacgacttcttcataatcatggtgaatcgttggaccccatacaagtattggagaaattatctcctgatatgcctctccagctggcatcagacacaattttacggacactgagggcccgagtgcaccatcatcgtcaaggacagatagtccataatctatcacgtgcgacaaacctggacgtgcggttgacaagactggaggagagatcgaggcatgtgcagctaaccgatgagagtatctgcgactcctgtcgagctcgcctcggcaccaagctatttgctatgtacccaaatgactcggttgtttgctacaggtgctatcgatcccagcaaggtgaatcttcatcagggcatggtcgtagcatgaggaaagatgttatattcaaacagagctggcttgtaagtagatagatagcgaggaaggaatgaagagtggtgatcttgaggccagcatttggctgtggctgctctgaaatgggcaccaagtttttttgtctggatgggctctctggaaacttgaacagggtgttgtatattctttttgaggccaatgaatgaatatatacaaatacaagcatacagcataccggaggatgtctagtctgttcttccgtttttttttgtactttagtttttttgtcaaaattttatattcacacctgtagtgggactattaccgtatgcgtcaaggttatacggctcggtgctgtaagtcatggcactgaagtagtattatgtggtgtggacgatacaagtcatggcaccgaagtattatgtcataaatggtgtggag

SEQ ID NO: 61050 - DNA, 1386 bp, Zea Mays
tcatacgttttgaaaaaaaaaacagagttacacagcccactttcattttaggtgcattgtttatttcctagaaagagatcacatttagggtaccattggagcgttttgttgtccatgtgttcaacttcttcatgcggtgacaaacctgtcctttcaaggtaatgtacatggtttgggagtggaagccttgcagatgctcactcagatggtgctcagcaatgaagaagagctcaagatcaaatatttcaaggatgactccctgaacagactttgcccagttgatgtttttttgaaggcaatgctggatgttccatttgtgttcaagagagtagatgccatgctttacattgccagcttctatttggagatcaatcggctgagaatgtcgtatgctactcttgagggggcttgccaggagatgagaagcagcaggctgttccacaaagtccttgaggctgttgtgaatttcggcaatttcatgagcaccaattcggggtctccaagttcaaaaggcttggagccaaacactgttctgaagatagctgatgtgaaaggagctgatgggaaggctgctctcatgcagttcattgtccaggaaattgtgaaacctgaaggatatgatgtgatgcagcatggttcaggtgcatgcaagatgagcacaaacactctgcagtgtgatgccgagtgcaggaagcatggccttgaggttgttgccaaacttgcagcccagctgagcaacaccaagaaagccgcctccattgacataaaaaggctgagccaaagcgtgtcagagcttggaatggggcttgggaaggtccacgacgtggtgaggctgaacagcatggttacatctgttgatagcgctcggcgtttccacaatagcatgagcacatttctaaggcacgcccgaggaggagatcctgaagctccagtcccaggagagcatctgcttgtcatcagtgaaggagatggcggagtggttttattggggagtcagtcaacgatgaagctcacatgttcagaatctttgctggagtgaaggagttcctagctatgctcgatcatatctgcaaggaggctggggaggtgagcagcaacaattgggtcggcgcgacaacggcgagctggatggctgcacccatggggatgatgccttaagccgctggagctgtcttggcaaaatctgtagctaccctttttgtagaatatttcatatcaagctatttggactagtatggttcctagtattagcagtagatgagaacgatgttatggtatgttaagccgaagcctctctctatataaatatatctggataatgtatgctggacacccgtctattgtaaagtttactgttactggtaatggggttttgccgtccttttc

SEQ ID NO: 61051 - DNA, 582 bp, Zea Mays
gcaaggtaccggtgggaaaagcatatatggacgcactttcaaagatgagaacttcaaattggttcacactggacctggagtggtcagcatggctaatgctggaccgaacaccaacggcagccagtttttcatttgcactgtcaagacgccttggttggatggaaggcatgtcgtgtttggccaggtcgtggaagggatggatattgtaaggctgatcgagtcacaggagactgacagaggtgaccgtccgaagaagaaagtagtcatcagcgagtgcggggagcttccagtggtctaagcgttactcatctgttgtccgtttcacttctgacggatgacgatatccccccccccccccccccccccccccatcccatgtgctaattatagagaatatttcgaattcaagtaaggtcccaaatctgaggcatactgttgctgccctgctggaataaatgtgctactttcccctgccttgttaagggaaagggttttgttcacgatgttaccttgtaaccttgtacttatgtttcatacttggaatgaaggttcatggaacaaaaatattctgctgcattgcat

SEQ ID NO: 61052 - DNA, 1302 bp, Zea Mays
gtttgttagagaaacctcatatttgggttccctctttcctctaaaatgggtatcgtatttgaatcactcgttgaagagtttaggtacacccaaggagccaaacataattttcatgatatgtggaggttcgtatgtaagagaaattagctttgcctttcttatctatccgtccgcaagaccgcaacaccaccccattctccagcaacgagacaacaaatctcctcctcttcctctccgtatccgcatcagtccatcaccttcaatggcggcggcggcggctgctgccacctccttcaccaccctcgccgtcgcgcgttcggcggggcagcggtccctccttgcctccaaggccgcaccttcgccgctcctctccctccgtggcgcccgcatcccctcgcaggccgtctccttctccgggggccttgcggcgtcgccctctcacagccgcgcgcgcttcgctacatccgccagcgccgagcccaaggaagcagatcttcagtctaaaatcaccaataaggtgtattttgacataagcattgggaaccctgtggggaagaatgttgggaggattgtcatcggcttgtatggggatgatgttccacaaacagcagagaactttcgtgctctttgcactggagagaaagggtttggatacaagggatccagtttccaccgtgtcatcagcgactttatgatccagggcggagattttgacaagggcaatggtaccggtgggaaaagcatatatggacgcactttcaaagatgagaacttcaaattggttcacactggacctggagtggtcagcatggctaatgctggaccgaacaccaacggcagccagtttttcatttgcactgtcaagacgccttggttggatggaaggcatgtcgtgtttggccaggtcgtggaagggatggatattgtaaggctgatcgagtcacaggagactgacagaggtgaccgtccgaagaagaaagtagtcatcagcgagtgcggggagcttccagtggtctaagcgttactcatctgttgtccgtttcacttctgacggatgacgatatccccccccccccccccccccccccccatcccatgtgctaattatagagaatatttcgaattcaagtaaggtcccaaatctgaggcatactgttgctgccctgctggaataaatgtgctactttcccctgccttgttaagggaaagggttttgttcacgatgttaccttgtaaccttgtacttatgtttcatacttggaatgaaggttcatggaacaaaaatattctgctgcattgcat

SEQ ID NO: 61053 - DNA, 731 bp, Zea Mays
gtccgcaagaccgcaacaccaccccattctccagcaacgagacaacaaatctcctcctcttcctctccgtatccgcatcagtccatcaccttcaatggcggcggcggcggctgctgccacctccttcaccaccctcgccgtcgcgcgttcggcggggcagcggtccctccttgcctccaaggccgcaccttcgccgctcctctccctccgtggcgcccgcatcccctcgcaggccgtctccttctccgggggccttgcggcgtcgccctctcacagccgcgcgcgcttcgctacatccgccagcgccgagcccaaggaagcagatcttcagtctaaaatcaccaataaggtgtattttgacataagcattgggaaccctgtggggaagaatgttgggaggattgtcatcggcttgtatggggatgatgttccacaaacagcagagaactttcgtgctctttgcactggagagaaagggtttggatacaagggatccagtttccaccgtgtcatcagcgactttatgatccagggcggagattttgacaagggcaatggtaccggtgggaaaagcatatatggacgcactttcaaagatgagaacttcaaattggttcacactggacctggagtggtcagcatggctaatgctggaccgaacaccaacggcagccagtttttcatttgcactgtcaagcaccaaagctaacccagaactggtaatgactggt

SEQ ID NO: 61054 - DNA, 2157 bp, Zea Mays
cacctccgcctctcgctccacttcctctccccaccactccgccatcattcccccgctcggcccgcgaaaccgtaccctgagaccactccctccgccgccatgccggacctcccctgcgacggcgatggcgtctgcatggtctgccgcgtcacctccccgccggaggtcgacctcctccattgctccacctgcgccacgccctggcactccccgtgcctctccaaggctcccgccctggccgacgccgccagctggagctgccccgactgctccctggtattgccggccagtctacgcatggggctcaatcagtagccctctccggagggtatgaagatgatgaagaccatggggagtggtttctttacactggaagcggcgggagggacctaagtggtaacaagcgaacaaacaaggagcagtcatctgatcagaaatttgagaagctgaatgctgctttacgcattagttgcttgaagggctaccctgttagggttgtacggtcgcacaaagagaagcgatcctcgtatgctcctgaatctggtgtgaggtatgatggggtttacagaattgagaagtgttggaggaagattggtattcagggtaagttcaaggtctgcaggtatctctttgtacgctgtgacaatgaaccagctccttggaccagcgatgatcatggtgaccgtccgagacccttgccaaagataaaggagctacaaggtgcaactgatataacagagaggaaagggcgtccttcatgggattatgatgagaaagatggctggaaatggatggtgcctccgccagtcagcaagaggcctgttctctctggtgatcctgagaccgacaagctaatccggaaagcaacaaagcgtgctcatttatctgttgctgaaaggctgcttaaagagtttggttgttctatctgccgggcggtgattaaagagccacttacaacaccatgtgctcacaacttctgcaagacttgtttgcttggtgcatatgatagccagtcctctatgagggaaagaagccgtggtggtcggactctaagggcacagaagattgtgaagacgtgcccttcctgccctactgacatctgcgacttcttagaaaatccccagatcaaccgagaaatgatggagttgattgagtccttgcaacgcaaggctgttgaagaaggcaagatggctgcaggtgatgccgaggaatctggtgatggtgactcggaggaaaatggtggtgctttggtgaagggagaagatgatagcaatttgaacgaggaaggtcaagacggtgtagacgctgatggttctgtgaagattgtggttgaaatggagggtgcaaaagatgataaaaagtcaaagatgggcgcggctgaagtggtggatgtgttagttgaagatgctgctgcgaaacagccgaagaagcgcacggctgatgaagatgctgctgcgaaacagacgaagcacaaggctgatgctgagactggtggcaagagggtgaagagcagtgctgcagtggaagaggttgatgtgtgcgtcactcctatgaaacggaccaggaagagtggtgatatgcatgatgacggcaacggcagccctgctgtgagcagcggccgcagggtgactcggagcagtgtgaatgccacgggagctgatgacagtccagcgaggaggaccagaagccgtggcagagcatgctgaaggtagtgggtgctgggcgccctcttttttgggtgtggaacctttgctgtgcgcagtgttgcagccatttcttttggtttgggggagaccgacctgctacaggttcctagagagaaacaagatagctgatgttcttgcaaaaaaaaagcaagacgggcaactaccccaaatccatgccttttctctaggggcttcattctccaacctgtaatatctagcatgtgttttgaaacttggattgttcggggcaacatgaccccccatctttgtaacatgtttatgatgtaataaatcttgaatttgaaaaacaaaagaggacatggaatgaaccagcacaccagaatctgaggtttgagagaaattgcacaaagacaaggcattcaaacatttgggctcacaccgtggacacatgacacgcacataaacgagatcaaacatagcaagaagaacc

SEQ ID NO: 61055 - DNA, 3367 bp, Zea Mays
gtccacccagccatctctctctagccgccagccatctcctatcccaacgctagcttcttttcccagccacaacatgtgagctcctcctcttaagccgttgccatctccctcctcggccacctctaccggccccctctacttcctggctcccaagcttcagccatggagcacgacccctccttgcctctctgtagcgtcaggacctcctccgagctcgacaaggatgtgctgtgtctcccccagtaccgaccatgtcgagctccggtgaccccttcccacagcacagcaggccgacgcccctgcatatgctcctccaccggggttctcctccagcagcacttccccgtagcgtgagcttcgtcgagccgttgctcccttcgtccccagcttcggcagccgagctccaaccagggacgtctagcgcccaggacgtacggccccctgctcctctatccacgacgcagagcccctccatcctgttcctggcagcgaaagcccagcccctgcggcaagctacctgctcaatagagtgctaagccgctcgtcggatatgcgcagctcctgcgcgacgtcacaaacatcggtgaaactttgctgcccttaagcccttgtgtttgataaaatgttaaaactagtatatatagttgcttgcagctcattgtcaatgctgcgcttcgtgtattgcgtgttcgacgaaaatcccaagcctatggacagcacatgtgcaactcaaatccgctcggctaggttgtttgatgtatattttactcattgtgatttagttgatgatgtgtttgtatatgtggggtgatgggaaaaataaaagaaatgtgtcgtttgatagtaaggattaagttaaaatgtagtttatggtgtgaagagtgcgtggataaatatgtatgtcattgtgtggttgaatagttgatgcgaataatgagttaataaaaatcccttggtgtcacttgtttttaattgcttttgtttggacggtgaagttagtaattcgaatgatggctttagtacttcgaacgcttagttgatatgttatatcaatgttgatttgtgttgctttcgcttgtatgtcaaagtgatacttcgctttaacattcgtcactacctagtgagtggttaaatattgtgttgatcagctagaggtcctatacgagtgtcgtcactgtccaaaaattatttgggagtgaatagtgtcgctacgtcagtttttgttggaatcagagagtgactcgatgaaatatgcatacgagtgctttaggtctctaggtgtttaagttgtagcatcatggagttctatgcaatgtgataatgttctatgtgttaagtcaaaggaagatgtgatgtttaattatgtgtcaagcaagttaatctagtaggatgatttagagaacgagacaaataatatgtagaagctatgtatgaactaaaacagactagttgttgttttgggctgcatgtactgtttttgccgtgtcgtttgtttgagaaactaaattatgttttctgtagaaatgtcatatagaaaagttgtatatagctttattatcttgcttgtgttaaaatttgacagccataggtcttatattttaggagttatgcttctcccaaattcgataacacaacatgtctataatttgtccagattttaaagattgaactggttgaccaaattaaacctagaatcagctctttgtaatcataaagaagttgtaacacatttcataatcttttcagaaagttatggatcactatttttggtggtctgaatcttcagttatagctgtttaaagtcagaagactcaatctgttcaaacctggacagctacaccttatttgtattgtttgaatttgttaagtattaaattggcctatgatgattacaaatgttttgtagatcattttattagctttccagaaagtcttagttcgcctattttggatgtctaaatctctggttatggctaaattaagtacgcttaaatgcttaagtctgcttagaccttcaaagtcaagtgatttcctgtcacctgcaaggtacttgtgcttaccttatgcttgatttggataaagtcattggggaatatcaatgaataatatgaagttaatatgagaacggaccggatgaagataaggaaacacaaggcatggaggtcttggtgtctacttatacccgtctgtatcgattaagggccgtaccgttgtggtccctcgagtcatgttgaacttatccctatacacttagttggccggataactcgttctgaccgtgaagccagaatactattccagccaaattcgaccttgtggtgcacctactggtgtggttgagtgacggggacacgatgagatgacccatggtggatggtgaaagggaaatagtctcaatatttcctataatcgattttggtgtttgacgaccatcataaaccttgtggactaaccagtttgcccagctgatcatttcacaggtgcataagtttatctacaactattctaaatcgactgtcctgaatatcgtagattattccggacaggagaagctttttgaaaaaacacctaagcgcggaccgtccgggcccttgcggcggaccgtccgcgacaccaaagtgagtctcggacaggaacattacaaaaacacaagtttacactacggaccgtccgatggagaagcgagtaccgtccgggaccaagcgcggatcgtctggcctcagacgcggaccgtccggtcggtaaaaactagaaaaacccgaaagtgacgggttcggtaaaatgtatttttagcgtcctcgcagaccatctggggtgcacgaccggaccgtccgcgactgctttatctgacatctgacgacgcattaaatgctttatagccgttgatatagccgttactgctgatcgttgcaattttagttgttgatgtgcaggggtggaccgtccggaccaggggcgcggaccgtccgctttcgacagaaagggagcaacggctaggaattggttgagggctataaatacaaccccaaccacctccattcagaacatccaagcacttcaatccttcacattcaatacaagagctagcaatccattcaaagacacaatcaaagcttccaatatctctaagttccacaattgagacaagtgatcattagtgattagtgacttgagagagagagagagtgatctgtgtgttatttgacgcttttctcgcttggcttttgcaatcgtgctttcttattttccgattcttattctcaagtgacttgtaatcaaagcaagagacaccaagtgtgtagtggtccttgcggggtctaagtgacccgttaattaaggagaaagctcactcggtctaggtgaccgt

SEQ ID NO: 61056 - DNA, 1730 bp, Zea Mays
  misc_feature (1729)..(1730): n is a, c, g, or t
ccagtatcatctaaagtttgagaacttcattttcgcaagtaaattttatttctcttgggaaaatgatttttttaaaataaggttgtcaaactcgtcctaatatgttgcgtttccgtttttcctttcttgtatttggaagtgaagtggaatgaggcagcacagcctgctcctacagccgatgagatgaggtgattgaggtccgtccaggacaaaaaagcgaaacgactccttcagttccgtcccgttcgtgacgacctccggtcccgggagggggagggggagggggagggagaggcgaggtcatggcctccggcaccggctccggccagccgcaacccgcagcagctgatgctgacccgggagccggcgacaacaagctcgtcttcgagacgccgctgcagccgcagcccgtgagggaggactacgtcgagaacgccgtcaagttcctctcccacccaaaggtcaggggctcccccgtcgtctacagacgatccttcctcgagaagaagggcctcaccacacaggagatcgacgaggccctacgaagagtccctgatcctgaacccatcactacggctaccgcttctccacagcagcaggttggcagccagaatcaatcagctggggcgcaaacttatgcgccagcgcgatctatgcacccagcaaccgctggccctgtcgtccgaccccggttcagctggctcaagtcttggatccgcaacgtcgtagcacaaggtgatggcgctgaaggcaaccaacttaagcacaggattgatgaggaaacggctgaggctgtaaaggcttctgcttcagctgtttctgctattgccaaaacaaaccagcagctgcttgcttcaaaggatgaagaaaagaagatactcgtgacattaacacaagctctagattcccaagccaaggagttaaaatccttgaccgagtcaatcaatcgtaccagggaacccataaacattaccagagacgataggttttctcagcaccgcccactggaagaccatgtccctcctgttacgaggaatggggcaattaacagttcatggagatcttctcagcaaactaacatgtatggtgtgtcacatggtgactttggttccgcaaggtctgcttcattcgtgccagcacctgctgaacctacagctggatcattttcaagatcttgtgccgagtgtggccattggaagaacaggaactcttatagcgtgctacggttgctcgtcacctctatcagctaccctggaggctttcctgttcttgctcttggtcgtgttgctagtgtcttgcatagtgtataatcttagtgaggtgtgttgttggtgtgtgtgtgttgtgtgtgcatggtttgagtgcgtgcttatgcagctgccttttatctctttaatgaaaaaatgacaagctctccaagaaaaaacttgaccattaactaataagattacaataactgaactttaaaagatactgacattcctttcaaactgtctatatagaggctcatattattgacaaaggtagtccttttagtgtgtgtgagcgcgtgtgcgtgtgttggttattacatcttatcagtatacatgttgctcaatctccaaatacatgcatttgtggtatgtgcatatggttaccatattttgttctatagtgttctttattgatcagttgaaagttattcaacttgatcacgctgcaaccgatttctttaatcttgtggaactcnn

SEQ ID NO: 61057 - DNA, 2690 bp, Zea Mays
ctctgctcgtatttttgtccgtaccgagctccctcgccttcaatcccctggccgtcgcgcccctcaaatcgcccggccgtgcgcttgccttcaagctcactctccggtgtcgtgcagcgcggctcggctcgacgacatggagagtctcgtcctcgcctcctcctcctactccccttcgcgagctcagcgccctccctagccatgccgagctccttgcatgcagccgcgcgctcctctactcggccttgtccttgtcttcttccctgcgcgacctaccgatgctccctccccagctgcgtttgtagtcgtcgagcatgtcagctgtcgtgggcttgcctcaccggctgtagtctccaatcttcgcctcgacatcgtcgttccttgtactcaacacggggtttgccgttggtctctgctacaacatcggctcgtcgtggcctggtcgagttttcctcagcgttgcgccagtcgtgcaaatcttttcatcgcgtgaggacctcgccatcgtcccacccgctctcgtcgtcgtgaagattattcagcatcgcttggtctcgatggtcagttgatctgcataggtggtggtttggttatgagtggagttcgatagaagcagaaaatgaagtttgtgtgaggctctcctggtgctcgatgaaacgcctcacccacaaaagcatcatcgttttcggaaacctttgcattgattggtaataatgtgctggctcgccactcctattaattaatctaatggattggataatataatattcgcaatgattctcttgtatgtcatatagtaatgtgatagagtataatatttttaaatcgatgcctcgtgtgatgtgtctagtatactgcttccttgatgcttgcgcaaaatcttgttgattaagaaattaattaacttgttgtcatccttagtctgattattcggtgtccgaagttagtaaatcgagatattataattagtttgtaggatacgcaagtgagtctagaaaagaagtttagacaattaaataaattgcttctatccatcctatgaatgttttagtggtaggcgttttgtgtattgctcgtgtcaaatgatgattgttattccgagtgtctaaacataagtaatataaataagccggttacaactaaaacttaaaaacttcgtagtgaatagtgcacgcaaatactttaaatatgtaatcctcttcggtatggcgataattagtcgtgtgctattcctatctatacgcatttatgtgcatcatgaatttcaattaggtacgataattgatcacgtgatgcggagaaccagagctgagtcgatcacaagaggatggaaagcatgagctactccacaaggtgatgttgatggacgaacctgcctgatcaagtgttagtacaaggacgatcgtcaagtggtcgtcgtctaacaaacactaacgtagtgtttataccaggcaagccccggtgcatttgccacctccttgctattttaaaatcttttatcaccttgtttgatgcattaggtgataggagttgtgtgctaaacaattgatgcatttccttccttggaaaattgattacccttccttgataccctttttgaatagaattttatgatgcatagccttgctttagcaaacaaaaatgttttgtttaaaaacaaaagtgatgcttcagtgggtggcaatgttttcaaaaagaaaaacttgtgatggtggatccattagggccttgatgggttcaacatctggaaaagatgtacctctgccaggtaccaaactttgggtttgaaatgataaagctgagactggacgggtggcttgcacgagaaaagagtctcggtgtagtgtctccgtctgagtcgattaaggaccttgtcgatgtaggcctgatgattgaggaccttttaactggtcacatgcctcatcatgggtaagctttgcctcgggtagactaataccagaataggacaacacgcaatgggagtggagagatggcgagagtagcgtgtaccctccgtggcaagaggctggacggtggtgtatctgtgctctcggttggcgtgaacccaatctggtcttaagaaccccggtggtgagttgacatatgcaagggttaagtgctacatatgtcgtgtgattggagatccccagctgggtattaatcgattcggatcgccgttacttctcggacatgaagacttggtcactgacttacacgtagcaatccagtgaactgaagggatgataaaaagacgactagtataggccaagtgatggaactaggacagaaagaactctagatgcaggtaactttactaacctgacaagtaaaaatggatttttaaggatccacttatagtaagcttttctgcaaatagagtccttgattcttgataagccttgccttgaatccttttgaaaccagcatacccttgagagtcttttctttagtcaggtaagtcttgctgagtacttgcgtacttagggttttattcccattgttgctgtaggttacgaatcacttgattgtgattagtgttaagcgccggtgggcacggccttcttataagtctaagtaacccttctatacttcttactggggatggtcacttgagctagcatatatttaaaaagtataaataatttatcacatttcaaagtttattctttgaaccattttttaatgactcc

SEQ ID NO: 61058 - DNA, 835 bp, Zea Mays
tgacataaccatacggaattcatgttttgttagagcttattactggccggaaacctgttgatgcatcaagaccaatgggtgacgagagcctcgtcgagtgggctcggccattgctctctcgagccctggacacaggcgatttggaagggttggttgaccccaggctcgagatgaagttggacgaggtggagatgttccgcatggtcgaggccgctgcagcctgcatccggcactcggcgtcaaggaggcccaggatgagccaggttgtgcgggttctcgagagctcagcggacatcgacctgaccaatggtgttcagcctgggcaaagccagctcttcaacgtggccaacgcggcggagatacggatgttccgccggatggtagccggcgcgcaagacgacgacagctctgacttgacacagtacgattggagcaggggtagcgacgctgccccgggctccaggatcttgtaacgatgaccacattgtggtttctgaattctgactctgcctgcagtacttgttctgtagggagagggatggaattcagttcaaagtttgttccctgaccggccgggtcttattctttaggaaaaaacaaagtgatgtgttgtgttgtgtgtagagaagattgcactcctaggtttggtgtgaaggaagaggtttgcagttcattcagatttttaggcagtcaaggacaaggacgtggaaattgaagcaattgttgttacttgaatgaaacacgtgacatgcaaggttcaccatatcgaacggctaatctagcttaccgatcggtttattggtaattggcgctggcgggtaacgctgtatcggtg

SEQ ID NO: 61059 - DNA, 1803 bp, Zea Mays
ggcagtggtccaagtccaacgaccggaccggacggaccccggcggccggcacccagcggcagcggaaggggaatcatcgtccactcgcaactccttcctggcccctcccactcaccgctggacacttccatcaatctctttcccccttcccttggattcgtttcagctactgaaactgaacgcgggcagtggcaggcaggatcagccgagccgagttccatttccgccaccgtcccttccccctctgcccctcgttcctcgtcttctcgtccgcaagtcaagtcccttcccccttccgcccctcgtcaaagcaagcaagcaaaagtggtgcggtgccatcagagtgaatctgcaaatgtaggatggtcagctgatccttctgtccacaccaactatagcgccgggagccccaggctgaaacaatgcttgtctgatatcagcatgggcaactccaggttcttctcatatgatgagctgtatcagatcactgatggtttctcagctcagaggctgctaggggaaggaggctttgggtcggtgtacaagggccgcctgccagattataaagatgtcgccgttaaacgactaaaggatggcggcggacaaggggagcgcgagttccaggccgaagtggagataattagtcgcgtgcaccaccgccatttggtttctcttgtgggatactgcatttccaatgaccaaaggttacttgtatacgactttgtttctaataacacgctgcattatcatcttcacggacacggaatgcctgtgttagaatggtccgcacgggttaaaattgctgcaggtgctgctcgtggaattgcttacctacacgaagattgccatccgaggataattcatcgagacatcaagtcctcaaacattttgttggataacaatttcgaagcaaaggttgctgactttggtcttgcgaggctggctttggatgctgtaacccatgtgacaacccgtgttatgggaacatttgggtacatggctccagagtatgcatcgagtggcaaactgactgagagatcagatgtgttctcttttggtgtagttttgttagagcttattactggccggaaacctgttgatgcatcaagaccaatgggtgacgagagcctcgtcgagtgggctcggccattgctctctcgagccctggacacaggcgatttggaagggttggttgaccccaggctcgagatgaagttggacgaggtggagatgttccgcatggtcgaggccgctgcagcctgcatccggcactcggcgtcaaggaggcccaggatgagccaggttgtgcgggttctcgagagctcagcggacatcgacctgaccaatggtgttcagcctgggcaaagccagctcttcaacgtggccaacgcggcggagatacggatgttccgccggatggtagccggcgcgcaagacgacgacagctctgacttgacacagtacgattggagcaggggtagcgacgctgccccgggctccaggatcttgtaacgatgaccacattgtggtttctgaattctgactctgcctgcagtacttgttctgtagggagagggatggaattcagttcaaagtttgttccctgaccggtttggtgtgaaggaagaggtttgcagttcattcagatttttaggcagtcaaggacaaggacgtggaaattgaagcaattgttgttacttgaatgaaacacgtgacatgcaaggttcaccatatcgaacggctaatctagcttaccgatcggtttattggtaattggcgctggcgggtaacgctgtatcggtg

SEQ ID NO: 61060 - DNA, 2430 bp, Zea Mays
ggcagtggtccaagtccaacgaccggaccggacggaccccggcggccggcacccagcggcagcggaaggggaatcatcgtccactcgcaactccttcctggcccctcccactcaccgctggacacttccatcaatctctttcccccttcccttggattcgtttcagctactgaaactgaacgcgggcagtggcaggcaggatcagccgagccgagttccatttccgccaccgtcccttccccctctgcccctcgttcctcgtcttctcgtccgcaagtcaagtcccttcccccttccgcccctccagcagcatccaccggatggccatgtccagcgacaccgccgccacgacggggacatgcaccaagcccaaccccaaccaccgcctcccactctcaatagcctgattgattcatggcctccgcccccaccaccgcctcttctccgctaccggcgtcctcgcggcccactgccacaccgcccgacaccgctgccacgcccccgcccctcacctctcccgcacccgccgctcctccaccctcctcccactcccactcccactcccagccgtcgcctgggcctcctcaacacacagcctcgccgccgccgcgggcggctgctgctcctccaaggccgccgctgctctcgccccctccaacgtccccgacgccgtctgccgctccgacgccctcgccatctccgccagcgtccccggcccctgcaccacctccttttagcgctcctccgccgtcagcacgaccactgcctacgcctgccatcgcagtcgacccggccaggggcaagaacccaagttggaacaagtcgtccagcccgggtgcgccgtccaggagcccatccgccccctttggcggccttggtaatggtgttgtagccatcgccgctgcggtggtcgccctgctccttcttagcctcctagtcacagcagtttggttcaaccgcaagcgcaagaggaagcagatgagtggttacagagctggtctcatgtcgcctttttcttcgcagcaaccttcggggacctgaaatactttgtttctgcatctagcttaatacagcatgcagctctttggaatagctagcaacacggccactgataccatatcccgcttccttcagaggctgctaggggaaggaggctttgggtcggtgtacaagggccgcctgccagattataaagatgtcgccgttaaacgactaaaggatggcggcggacaaggggagcgcgagttccaggccgaagtggagataattagtcgcgtgcaccaccgccatttggtttctcttgtgggatactgcatttccaatgaccaaaggttacttgtatacgactttgtttctaataacacgctgcattatcatcttcacggacacggaatgcctgtgttagaatggtccgcacgggttaaaattgctgcaggtgctgctcgtggaattgcttacctacacgaagattgccatccgaggataattcatcgagacatcaagtcctcaaacattttgttggataacaatttcgaagcaaaggttgctgactttggtcttgcgaggctggctttggatgctgtaacccatgtgacaacccgtgttatgggaacatttgggtacatggctccagagtatgcatcgagtggcaaactgactgagagatcagatgtgttctcttttggtgtagttttgttagagcttattactggccggaaacctgttgatgcatcaagaccaatgggtgacgagagcctcgtcgagtgggctcggccattgctctctcgagccctggacacaggcgatttggaagggttggttgaccccaggctcgagatgaagttggacgaggtggagatgttccgcatggtcgaggccgctgcagcctgcatccggcactcggcgtcaaggaggcccaggatgagccaggttgtgcgggttctcgagagctcagcggacatcgacctgaccaatggtgttcagcctgggcaaagccagctcttcaacgtggccaacgcggcggagatacggatgttccgccggatggtagccggcgcgcaagacgacgacagctctgacttgacacagtacgattggagcaggggtagcgacgctgccccgggctccaggatcttgtaacgatgaccacattgtggtttctgaattctgactctgcctgcagtacttgttctgtagggagagggatggaattcagttcaaagtttgttccctgaccggtttggtgtgaaggaagaggtttgcagttcattcagatttttaggcagtcaaggacaaggacgtggaaattgaagcaattgttgttacttgaatgaaacacgtgacatgcaaggttcaccatatcgaacggctaatctagcttaccgatcggtttattggtaattggcgctggcgggtaacgctgtatcggtg

SEQ ID NO: 61061 - DNA, 2490 bp, Zea Mays
ggcagtggtccaagtccaacgaccggaccggacggaccccggcggccggcacccagcggcagcggaaggggaatcatcgtccactcgcaactccttcctggcccctcccactcaccgctggacacttccatcaatctctttcccccttcccttggattcgtttcagctactgaaactgaacgcgggcagtggcaggcaggatcagccgagccgagttccatttccgccaccgtcccttccccctctgcccctcgttcctcgtcttctctatttgcttggcttggcttgcttttggttcaacttccacaccattcattcatttcttggatttctttggtggcgtccgcaagtcaagtcccttcccccttccgcccctcgtcaaagcaagcaagcaaaagtggtgcggtgccatcagagtaagcaagctccccattttccctattcctatactactactagtagctgcagcagcatccaccggatggccatgtccagcgacaccgccgccacgacggggacatgcaccaagcccaaccccaaccaccgcctcccactctcaatagcctgattgattcatggcctccgcccccaccaccgcctcttctccgctaccggcgtcctcgcggcccactgccacaccgcccgacaccgctgccacgcccccgcccctcacctctcccgcacccgccgctcctccaccctcctcccactcccactcccactcccagccgtcgcctgggcctcctcaacacacagcctcgccgccgccgcgggcggctgctgctcctccaaggccgccgctgctctcgccccctccaacgtccccgacgccgtctgccgctccgacgccctcgccatctccgccagcgtccccggcccctgcaccacctccttttagcgctcctccgccgtcagcacgaccactgcctacgcctgccatcgcagtcgacccggccaggggcaagaacccaagttggaacaagtcgtccagcccgggtgcgccgtccaggagcccatccgccccctttggcggccttggtaatggtgttgtagccatcgccgctgcggtggtcgccctgctccttcttagcctcctagtcacagcagtttggttcaaccgcaagcgcaagaggaagcagatgagtggttacagagctggtctcatgtcgcctttttcttcgcagcaaccttcggaggctgctaggggaaggaggctttgggtcggtgtacaagggccgcctgccagattataaagatgtcgccgttaaacgactaaaggatggcggcggacaaggggagcgcgagttccaggccgaagtggagataattagtcgcgtgcaccaccgccatttggtttctcttgtgggatactgcatttccaatgaccaaaggttacttgtatacgactttgtttctaataacacgctgcattatcatcttcacggacacggaatgcctgtgttagaatggtccgcacgggttaaaattgctgcaggtgctgctcgtggaattgcttacctacacgaagattgccatccgaggataattcatcgagacatcaagtcctcaaacattttgttggataacaatttcgaagcaaaggttgctgactttggtcttgcgaggctggctttggatgctgtaacccatgtgacaacccgtgttatgggaacatttgggtacatggctccagagtatgcatcgagtggcaaactgactgagagatcagatgtgttctcttttggtgtagttttgttagagcttattactggccggaaacctgttgatgcatcaagaccaatgggtgacgagagcctcgtcgagtgggctcggccattgctctctcgagccctggacacaggcgatttggaagggttggttgaccccaggctcgagatgaagttggacgaggtggagatgttccgcatggtcgaggccgctgcagcctgcatccggcactcggcgtcaaggaggcccaggatgagccaggttgtgcgggttctcgagagctcagcggacatcgacctgaccaatggtgttcagcctgggcaaagccagctcttcaacgtggccaacgcggcggagatacggatgttccgccggatggtagccggcgcgcaagacgacgacagctctgacttgacacagtacgattggagcaggggtagcgacgctgccccgggctccaggatcttgtaacgatgaccacattgtggtttctgaattctgactctgcctgcagtacttgttctgtagggagagggatggaattcagttcaaagtttgttccctgaccggtttggtgtgaaggaagaggtttgcagttcattcagatttttaggcagtcaaggacaaggacgtggaaattgaagcaattgttgttacttgaatgaaacacgtgacatgcaaggttcaccatatcgaacggctaatctagcttaccgatcggtttattggtaattggcgctggcgggtaacgctgtatcggtg

SEQ ID NO: 61062 - DNA, 4765 bp, Zea Mays
atttgattcagtctccccctggctgccaaacgcggccgggccatgccatcccttcttcttggtctctgcgcggagctttccaagcaacaagaaagctgttgctcctcctaatctcctatcctgttgtactaagcaaagcatatattgaccacgcacgaacagagcgaccaatccccctgtcccctcccttccccttttatttgcgtgttcctttccttccctctcctctccatctcatctgggtttccgtttgtcagctcagccgagctcctttagttttttttttcacttagggattcaattgatttgatttgattttgattcaaggcggcagccagcagcagtagcagctacttcttctccatttgtaaccgcagcagggatttccagtataacacaatacaatacaatggccggcgaagatgacggcaacgccaccaacggccggcggcggcggcggaggtccgccgtgcgcctcagcaagctctacagctatgcgtgcggccgccggcccagcgtggccgacgaccactccgtgtccaggataggaggccccggcttctccagggtggtcacggtcaacgccggcggcggcgagccttcagcggctgcagctgacctgctgcagcagcagcagcagcagatggcctccagcaactccatctccaccaccaagtacaacctcttcaccttcctgcccaagtccctcttcgagcagttccgccgcgtcgccaacatctacttcctcctctccgccgggcatcgcctacagccccctcgccgcctacagctcctccagcgccattgcgccgcttgtcatcgtcctcgtcgccaccatgatcaaggaggcaatcgaagactggaggaggaaccagcaggacacggaggtgaacaacaggaagactcaggtcttccaggtcaacaacatcggcggcggcggcggcttccgcgatgccaaatggaaggacatccgcgtgggcgacatcgtcaaggtccacaaggacgaattcttcccggctgacctcgtcctgctctcctctagctacgacgacgccatctgctacgtggagaccatgaacctggacggcgagaccaacctgaagctgaagcagtccctggaggccacctccgcctcgctgccgccggacgacggcgccagcttcggggccttccggggcgccgtcgtgcggtgcgaggaccccaacgcgcacctctacaccttcgtcgggaacatcgagatggacggccggcagcaccccctgtcgccgcagcagctcctgctcagggactccaagctccgcaacaccgacttcgtgtacggcgtcgtcgtgttcacggggcaggacaccaaggtgatgcagaactccatgaaggtcccgtccaagcggagcaacgtggagaagaagatggaccgggtcatgtacctcctcctcttctcgctcatcgtcatctcggtcgtcagctccgtcttcttcggcatcgccaccagagaccacggcaggaccatgaggagatggtaccttaggcccgacgacactgagatctactacgacccgaaacggccagcggtggcagcggtgctccacttcttcacggccataatgctctacggctacttcatccccatctccctgtacatctccatcgagatcgtgaagctgctgcaggcgctgttcatcaaccacgacatccacatgtaccacgaggagacggacacgccagcccacgccaggacgtccaacctcaacgaggagctgggccaggtcgacaccatcctcacggacaaaaccggcactctcacctgcaactccatggagttcatcaaatgctccatcgccggaaccgcgtatggccgtggcgtcacggaggtcgagcgagcaatggcgaggaagaaaggctccgccgccgccgctgacaatacagacaaggccaaaaacaacggcattcagcagcagcagcatttcctgtcgtcgtcgtcgtctgatgataatgatgatggtgacaacaacagtaaaccagcagccaccaagggattcaacttcgtggacgagcgtgtcatgggcggcaactgggttcaccagccccgctccgacgccatcgagatgttcttccggctgctggcggtctgccacacgtgcatacccgaggtcgaccaagagtcgggcaagatctcgtacgaggcagagtctcctgacgaggctgccttcgtcgtcgcggcacgggagctcggcttcacgttctacaaacgcacgcagacaggcgtttatctgcgcgagctagatccctcgtccgggaaacaggttgacaggtcatataggatcttgaatgtcctcgagttcaacagtgcgcggaagcggatgtcagtgatagttaaggacgaggagggcaaactgtttctgttcaccaaaggagctgacaacgtgatgttcgagaggctgtcaggatcggggagcgcgcacagagacgtgacccagcagcacataaacgagtatgccgacgctggcctgagaacgctggtgctcgcgtaccgcgagctgaaggcggatgagtatgcgcacttcgacaggcagttcgcggcggctaagaactccgtcagcgctgacagggacgaaaagatcgacgaggctgcggacctggtggagagggaccttctcctcctcggcgctaccgctgtcgaggacaagctgcagaacggggtgcctgagtgcatcgacaagctcgcccaggccggcatcaagatttgggtgctgactggcgacaagatggagaccgccatcaatatcgggtacgcctgtagtctgttaaggcaagggatgaagcaaatcaccatcactctggagacagcagacatcgctgcgttggagaaaggcagcgacaaggccgccttaaccaaggcatcgaaagatagcgtggcgcggcaaataaacgaggggaagaagctcgtgaatgcgtcttctggcgagtccttcgcgttgatcattgatgggaggtcgcttacgtatgcgctggaggacgacgcaaaggacatgttcctggatcttgcagttggctgtggatcagtcatctgctgccgctcttcacccaagcagaaagctctcgtaaccaggcttgtcaaaacgggaacgggtaaggtcacattggcgatcggcgatggcgccaacgacgtgggcatgatccaggaggcggatatcggtgttgggatcagcggcgctgaagggatgcaggctgtgatggcaagcgatgtttccatcgcccagttccgcttcctggagcgtctgctactcgtccatgggcattggtgctatagcaggatctcatcgatgatctgctacttcttctacaagaacatcacgttcggtgtgaccctgttcctgtacgacgcctacacgtccttctcgggccagcctctgtacaacgactgggcaatggcgagcttcaacgtcttcttcacgtcgctgcccgtggtcgccatgggcgtgttcgaccaagacgtgtctgctagattctgtctcaagttcccgatgctgtaccaggaggggcctcaggaccttctgttccagtggcgaaggatcatcgggtggatggtgaacggcgtggccagcgccgtgatcatcttcttcctgtgcacggcgtcgctgcagcaccaggcgttccgcagcggcggggaggtggcggacatggcgacgctgggcgccaccgcgtacacgtgcatcgtgtgggccgtgaacctgcagatgtacatcacggtgagctacttcacgctggtgcagcacgtgtgcatctggctcagcgtcggcctctggtacgtgttcctcccggtgtacggcgccatcgcgcccagcttctcgaccacctactacatggtgttcgtggaggcgctggcgggggcgccgtcctactgggtggtcaccctgctggtgtccgccgcctccctcgtcccctacttcacctacgccgtcgtcaagtcgtggttcttcccggactaccacaacaggatccagtggctgcggcacagggagagggcccaaggcccacccggacccggagaccagcgccgacgtggagctcagccaggtcctgcgccagttctccgtccgctccaccggcgtcggcgtgtcggcccggcgcgatgccacggccgtgctccgtcgcctcaaacagcacgacgcagcgtgcggactattcgcagtcaccacccaccccaggtgtcgcagtcgtcgtcgcagcagatcgatgagcgaaagcattcgttagagtctatacatacaaacatagatgtaaatacagtagtacacactacacaggaggaaggaaaaacatgcaagctagtgtcaactcaacaactagcatgagggccagtttttttttttttttttgaagtagctacaaatgatgtacattatttggaaggaaaaggatggatggggccatggggggagggataaagttttagtttcattctttagttttttttcttcctttgattaaacacaggacttgctctttcttcatggatctcaaggatccagatatttcaggtttttcaggatattagtggatctttctgtgcattattgggacggtgtgtgaaccacatggatacggtgtatgaacccaactcacatgaatcacgaggcaacgaccggtaatgaagtggaacagatgacatcacatgaatcacgagacaaatgaaatgaatggaaagccggctgcgcttcctaaattgacctgactgtcatcatgatgatgaagaagtaaacatttc

SEQ ID NO: 61063 - DNA, 3334 bp, Zea Mays
ctcactatgaagctatgcgggtcccacttgtaagctgtcaggtccacctgtaagaggcttttgacggatggaatagcgccgtgaggggatttttgagtgggttgtgaagataggaggacaaaactgagtagagaatttgggcgggggtaaatctgagcaagacgtcgagactagtgggtgaaatgtaaatgtcccttgaatcaacgccacgagcacctaatcttatctccttccaccgcttcctcaatcctcatcctgagccgcatcgttctggaggatttccaaagcgccttctccctgctcgctctattccccatcgtgccccttgagcttggagctcgagcgccaccagggtcacgccccttccttatccctcgtcggacccgtcgagcagagcccgacgccctggctgagctggtctagctcgcgccctcttccaatttgaccttccctgctcggtctggcatggaggtcagccaccagaaatcgtgcgccaaccttgcccttctcaaccgtcgaccatgtgaagccatggagccgtcgttcttagccccggctccccaagtccggccaggaacttcccagcgcctccctctctgctcctgtgctcggagcccagtactccacctcgccggggtcgacctcccctcgcccttatcctctggccgtcatcctggtcgccggttgagtcccctcatggatgtcgttgcccaggtgctgagtctcctcccctcgacatgcttaacagcgtcgttgtatcggactccgctatcgaaccgcgccactgattcaactcgccatcgacacagcgccgaacctttgcctctgccccatcgtcattctgctcgacgctggttcctcctccgattcccattccctgcttggtttcttgccattcgtgccactcggccaacgtgccagaatgtgttgcctccctccgttcgttgccatgatggccatcctcgttgcgacaggctggtcaccccggcgctgccatccctactcgaaatcctccctcttcgaagcttgctggtcgctgttccatgctgttcctaatagctcagattctgctcagctcgcccccatggcacatcagtcctgcttgattagtgttggctggtcctccttggcgttgttccgtgtagatccttgaccccgttcaccttcagccccaccgtgttcacctccctgcgttgtcgcgaactcgccgttgccattcgcctagggtgaagtccatgtcatctccctgccctggtgcacaccgtcgcgcttctgtgatctgggccaacacacctagccaatggagcccgtccgcatgtcactgttccgcttcccacgccgaggtgggttatcctggaagtttagatgaaggaagtgaagatcaacacgacattactagatgtttgatgaattgtgtggatcggatccgtcattagtttggtgagctattgtctaaaaatgagtagtatcgttaagctgatttcaactaaaacaaatgctaggctatttgataatgctttattcgtagaccaaatagtgtgatgtcttatttagttggcgtgctatgtatagtaaccaaggataattgtttagatagtgactttgtttctatccatatgttagtcttaggtgttcgatagtggtgaatctaattgagtgaatcttttcgtattatactttagctaaggaagacatggcctatatatagtctattgttgttggatgatttagttaggtatgattaactaaaaggtcatgattattgtagagctagcagtatctagtgcctgcacatatgagttgtgatgccttgttttaagtgtttaattctcttttatgtagtattatgttaaagtgtgctattcctctgtatgctcattcatgtgcatctcacatatcatataggtacgctaatgatcaaaatgcgaaggccagggtctaggttgatcccaaatggtgcaaaggatggtctactctgagaggcgatgtcggcggaccaatctagcagatgaatcaagtaccaggatggcagatgctcaccaagtgatcgtcatctaacaacactgacttagtgtttattccagacaagccccggtgcatttgccacctctttgctgttttaaaacttttatcactaatatgttgcattaggcggtaggagttaaatgattaaacctttgttacataacttccttgaactattgattatcatccttgataccagatttgaaaagcaagatgtgcttagtatgcttatagacaaggaacaaaatgttttgatacatgaatcatgtttttacaaagaaaaagaggttggaatgatgaaggtatcaaaggccttgatgacttcatcatttcagaaggctacctctgacaggtaccaggttttcagaaatagtttaatttgagaccagacgttgagcaggaaagatcgcccgtctttgtcgcttaaggaccgcatgattgttggcctgctgatctaggaccttttaactgaccacatgcctcatcatgggtaagcttagcctcggctggaccaataccagaaaggtcggcccgcaatgggagtggagagatggcaagagtatcgtgtgtccacctggcaagaggctggaaggtggggtactgagctctcggttggcggggacccgttctggtcttgagaaacccagtggcgagttgacatatgccagggttaagtgctacatatgtcgtgtggttagagatccccagctgggtattaatcgattcggatcgccgaacttcgcggatatgaagactagatcttcaatcctcattgtagataacaagcgaaactaaatctgctaaaatgatgctagtgtaggacaactgaatgctctagattaggcaaatctagattcagaaaaagtacttaacttgtgtagtaaaattttggcataaggatccactactagtaagcttttctacaaaactgagtctttgaattttgataagctttgccttgattcccaacaaaccagcatacccttgagagtcttttctttagtcgggtaagtcttgatgagtaattgcgtactcaggattttattccatgttttttttcaggttataattttgttctgttggggatggtgctaagtgttggtgggctcgaccttctcatatgcataagtatatctcatctataacttctttattgaggattgtcacttaagctaacatgtatttttaaatttacaaatattttataacatttcaaattgtaattcttttggatcactttattttgtaatcactccgatgatgtataataaaatcttgatgtaacttgtaatcattttgtataaagaat

SEQ ID NO: 61064 - DNA, 2869 bp, Zea Mays
ctcactatgaagctatgcgggtcccacttgtaagctgtcaggtccacctgtaagaggcttttgacggatggaatagcgccgtgaggggatttttgagtgggttgtgaagataggaggacaaaactgagtagagaatttgggcgggggtaaatctgagcaagacgtcgagactagtgggtgaaatgtaaatgtcccttgaatcaacgccacgagcacctaatcttatctccttccaccgcttcctcaatcctcatcctgagccgcatcgttctggaggatttccaaagcgccttctccctgctcgctctattccccatcgtgccccttgagcttggagctcgagcgccaccagggtcacgccccttccttatccctcgtcggacccgtcgagcagagcccgacgccctggctgagctggtctagctcgcgccctcttccaatttgaccttccctgctcggtctggcatggaggtcagccaccagaaatcgtgcgccaaccttgcccttctcaaccgtcgaccatgtgaagccatggagccgtcgttcttagccccggctccccaagtccggccaggaacttcccagcgcctccctctctgctcctgtgctcggagcccagtactccacctcgccggggtcgacctcccctcgcccttatcctctggccgtcatcctggtcgccggttgagtcccctcatggatgtcgttgcccaggtgctgagtctcctcccctcgacatgcttaacagcgtcgttgtatcggactccgctatcgaaccgcgccactgattcaactcgccatcgacacagcgccgaacctttgcctctgccccatcgtcattctgctcgacgctggttcctcctccgattcccattccctgcttggtttcttgccattcgtgccactcggccaacgtgccagaatgtgttgcctccctccgttcgttgccatgatggccatcctcgttgcgacaggctggtcaccccggcgctgccatccctactcgaaatcctccctcttcgaagcttgctggtcgctgttccatgctgttcctaatagctcagattctgctcagctcgcccccatggcacatcagtcctgcttgattagtgttggctggtcctccttggcgttgttccgtgtagatccttgaccccgttcaccttcagccccaccgtgttcacctccctgcgttgtcgcgaactcgccgttgccattcgcctagggtgaagtccatgtcatctccctgccctggtgcacaccgtcgcgcttctgtgatctgggccaacacacctagccaatggagcccgtccgcatgtcactgttccgcttcccacgccgaggtgggttatcctggaagtttagatgaaggaagtgaagatcaacacgacattactagatgtttgatgaattgtgtggatcggatccgtcattagtttggtacgctaatgatcaaaatgcgaaggccagggtctaggttgatcccaaatggtgcaaaggatggtctactctgagaggcgatgtcggcggaccaatctagcagatgaatcaagtaccaggatggcagatgctcaccaagtgatcgtcatctaacaacactgacttagtgtttattccagacaagccccggtgcatttgccacctctttgctgttttaaaacttttatcactaatatgttgcattaggcggtaggagttaaatgattaaacctttgttacataacttccttgaactattgattatcatccttgataccagatttgaaaagcaagatgtgcttagtatgcttatagacaaggaacaaaatgttttgatacatgaatcatgtttttacaaagaaaaagaggttggaatgatgaaggtatcaaaggccttgatgacttcatcatttcagaaggctacctctgacaggtaccaggttttcagaaatagtttaatttgagaccagacgttgagcaggaaagatcgcccgtctttgtcgcttaaggaccgcatgattgttggcctgctgatctaggaccttttaactgaccacatgcctcatcatgggtaagcttagcctcggctggaccaataccagaaaggtcggcccgcaatgggagtggagagatggcaagagtatcgtgtgtccacctggcaagaggctggaaggtggggtactgagctctcggttggcggggacccgttctggtcttgagaaacccagtggcgagttgacatatgccagggttaagtgctacatatgtcgtgtggttagagatccccagctgggtattaatcgattcggatcgccgaacttcgcggatatgaagactagatcttcaatcctcattgtagataacaagcgaaactaaatctgctaaaatgatgctagtgtaggacaactgaatgctctagattaggcaaatctagattcagaaaaagtacttaacttgtgtagtaaaattttggcataaggatccactactagtaagcttttctacaaaactgagtctttgaattttgataagctttgccttgattcccaacaaaccagcatacccttgagagtcttttctttagtcgggtaagtcttgatgagtaattgcgtactcaggattttattccatgttttttttcaggttataattttgttctgttggggatggtgctaagtgttggtgggctcgaccttctcatatgcataagtatatctcatctataacttctttattgaggattgtcacttaagctaacatgtatttttaaatttacaaatattttataacatttcaaattgtaattcttttggatcactttattttgtaatcactccgatgatgtataataaaatcttgatgtaacttgtaatcattttgtataaagaat

SEQ ID NO: 61065 - DNA, 2476 bp, Zea Mays
atccatgccgtccatcggatcagatcgtcttctcccgcgctagggtttagcatcggtccccaatggcgtccccgccgccgccacgttcgccaaggtgcccgcgctgaacgggatcttccgccaggcggtgcgggcgctgcatgtcttagtgcgcatcgagctcaacgcacccgtcaaattggggaagagggatgctggtgaaaccggtgaggggaaggaggaggcactggtggtgctggccacacagctcgctagagcagtgcaggcactcagcaagctgagcattgcccgggcacggctctgtgcggagagtattgctgatgctgagcttcgggagaagcttactggtggcgttagcgttgatgatttgaaggggatgcttgacaatgttttgattgattcagatgccgtatcagtcttgaagggggtgtacaaccacttgctcaagttcagggactttcttgcctgggaagcagctgtggccatggcagtaattgaagcagacagttcaattgagaagccacaagctgctgttgagaatgaagcagccagtgtaactgagaagccactggctggtggggacaaagcaaagggtgacaagaagagcaagaagaagaaaactttgggtaagggtacttctgctgtgctcatgctgcttagggaccatgtgacaaatggaagtactgttgctgccatgaattctgcgtcggttgcagagtgggcaacctctctgtcattgctatttgatcccaaatgtccaggattggagtcacttgtggagaaggtgaaggagattgttgagagcaatgaagtgaggagattgcctaaaattccaaagggtacacgcgactttggtaaagagcaaatggcgataagggagcgagcattttcaattataactagtgtattcaagatgcatggtgctactgcgcttgatacacccgtatttgagctgagagaaacccttatgggaaaatatggtgaagactcaaagttgatatatgacttagctgatcagggtggtgagctttgctctttgcggtatgatctgactgttccatttgcccgttatgttgccatgaatagcattagtgcattaaagagataccaaatagcgaaagtatataggagagataatccatctaagggaagataccgagaattctaccaatgtgactttgacattgctggtgtatatgaacctatggaaccggattttgaggtcataaaagttctgactgaattgctgaatcagctggatataggcacatatgagataaaattaaatcacagaaagttgcttgatggtatgttggagatttgtggtgtgccccctcaaaagttcagaacagtttgctcgagtattgacaaactggacaagcaaacattcgaacaggtgaagaaggaactggttgatgagaaaggtatatcaaatgaaactgcggatgaaattggcaatttagtgaagactaggggccccccgttggaagttttgatggagttgagaaaggagggcagcaagtttatgaataatgtagggtctgttgctgcactgaatgagctggagatattattcaaagctctggataaagcaaatgcaataagcaagataacttttgatttaagtttggccaggggccttgattactacactggtgtcatatatgaagccgttttcaagggtgcagctcaggttggctccatagcggctggtggtcggtacgacaaccttgtgggtatgtttagtgggaagcaaatccctgctgttggtgtgagccttggaattgagagagtctttgcaatcatggagcagcaggagaaagaaagaaatgagatccggcctacagagacagaggtgctggtgtcaattctgggaaaggaccttaccctagctgccgagctcgtgagcgagctgtggaatgctgggataaaggcagagttcaagctcactaccagggtggcgaaccacatcaagtatgccttgcaatcaagcattccgtggatggtgctagtcggcgagtctgagctgcagaaaggaactgtaaagttgaaggacgttgaagccaaccaggaagaagaggttgataggaaggattttgttcgagagttgaagaagagattgagtaaatcctaagaggaaaattttaggcgttgatatcatcttttgacacccatttgacgcaaactcaattagggggagaatgacattacatcattataatttaaactgacgtgaatgtttcagtccggttggcatagggccacttgttatgttcataaggtcattcgaatcccctgagtcccaatgcattatgctgatgaatcaggctgcagacatattgtgaattatattctttttgtactaccttgaggaatgaaaagtttttgtcctcacatgtaatttggaacaaagccagcaacctgtatttttattgcatttattattttaaaataaaaaaccgacattgaatctcgc

SEQ ID NO: 61066 - DNA, 2394 bp, Zea Mays
acgaataatacagcctacaatgcacaccgtttttctgcaacagacagcgcatccatgccgtccatcggatcagatcgtcttctcccgcgctagggtttagcatcggtccccaatggcgtccccgccgccgccacgttcgccaaggtgcccgcgctgaacgggatcttccgccaggcggtgcgggcgctgcatgtcttagtgcgcatcgagctcaacgcacccgtcaaattggggaagagggatgctggtgaaaccggtgaggggaaggaggaggcactggtggtgctggccacacagctcgctagagcagtgcaggcactcagcaagctgagcattgcccgggcacggctctgtgcggagagtattgctgatgctgagcttcgggagaagcttactggtggcgttagcgttgatgatttgaaggggatgcttgacaatgttttgattgattcagatgccgtatcagtcttgaagggggtgtacaaccacttgctcaagttcagggactttcttgcctgggaagcagctgtggccatggcagtaattgaagcagacagttcaattgagaagccacaagctgctgttgagaatgaagcagccagtgtaactgagaagccactggctggtggggacaaagcaaagggtgacaagaagagcaagaagaagaaaactttgggattggagtcacttgtggagaaggtgaaggagattgttgagagcaatgaagtgaggagattgcctaaaattccaaagggtacacgcgactttggtaaagagcaaatggcgataagggagcgagcattttcaattataactagtgtattcaagatgcatggtgctactgcgcttgatacacccgtatttgagctgagagaaacccttatgggaaaatatggtgaagactcaaagttgatatatgacttagctgatcagggtggtgagctttgctctttgcggtatgatctgactgttccatttgcccgttatgttgccatgaatagcattagtgcattaaagagataccaaatagcgaaagtatataggagagataatccatctaagggaagataccgagaattctaccaatgtgactttgacattgctggtgtatatgaacctatggaaccggattttgaggtcataaaagttctgactgaattgctgaatcagctggatataggcacatatgagataaaattaaatcacagaaagttgcttgatggtatgttggagatttgtggtgtgccccctcaaaagttcagaacagtttgctcgagtattgacaaactggacaagcaaacattcgaacaggtgaagaaggaactggttgatgagaaaggtatatcaaatgaaactgcggatgaaattggcaatttagtgaagactaggggccccccgttggaagttttgatggagttgagaaaggagggcagcaagtttatgaataatgtagggtctgttgctgcactgaatgagctggagatattattcaaagctctggataaagcaaatgcaataagcaagataacttttgatttaagtttggccaggggccttgattactacactggtgtcatatatgaagccgttttcaagggtgcagctcaggttggctccatagcggctggtggtcggtacgacaaccttgtgggtatgtttagtgggaagcaaatccctgctgttggtgtgagccttggaattgagagagtctttgcaatcatggagcagcaggagaaagaaagaaatgagaagatccggcctacagagacagaggtgctggtgtcaattctgggaaaggaccttaccctagctgccgagctcgtgagcgagctgtggaatgctgggataaaggcagagttcaagctcactaccagggtggcgaaccacatcaagtatgccttgcaatcaagcattccgtggatggtgctagtcggcgagtctgagctgcagaaaggaactgtaaagttgaaggacgttgaagccaaccaggaagaagaggttgataggaaggattttgttcgagagttgaagaagagattgagtaaatcctaagaggaaaattttaggcgttgatatcatcttttgacacccatttgacgcaaactcaattagggggagaatgacattacatcattataatttaaactgacgtgaatgtttcagtccggttggcatagggccacttgttatgttcataaggtcattcgaatcccctgagtcccaatgcattatgctgatgaatcaggctgcagacatattgtgaattatattctttttgtactaccttgaggaatgaaaagtttttgtcctcacatgtaatttggaacaaagccagcaacctgtatttttattgcatttattattttaaaataaaaaaccgacattgaatctcgc

SEQ ID NO: 61067 - DNA, 4557 bp, Zea Mays
taaaacgggcataacttttcgctcggtgctccgtttgagctcaaatttttacagcagattcctgactccattctggggtgacccaaacttgattaggtaccttggagaggaccagcaaggacttgggaaaggccaaggtgttgaggaagagcagcaagtgcgtccacaacaggaaggagatcaagtccgagtcgggtgcgacgctaactcgggttccaggaccagtctgcactaaaatggacacctaagacatctggactttgattgcgacagactagatatggttggaaagataacgagattatctaaccaacccaactggttccaccctaaaattcatccggagtcaacgggaatcgtcgaaacaactcagcgttcagattctgttttggtgctgcgacaccgtctgttgggccgttgggccgtgtatcgcgtcggagcccattaggggcgagtccagggctacgcacgccctaatactctatttattcagcagccgccgccacatttaggtttgggttttgcttagatcaattctgtcatcgaacagtgtcgtcgtcatcggcttgtgagaccccctcccgtagtcaatacaattttggttgcgtttctttcctgttcttgcttgtgttcttgattgcgcttgcagggataagtcttcgtggcgacgtcattcgtgtgtcacgggtgataaccaacggagccgtggtgtagtgattgcgaggaaccgtttgttcggagccttggatcatcaacgtcgagatctccactcaatcaaattatcgtatctcacggaagatcaggctgcgtctactatcaattggtattagatttctaggttgcccgtgaggtataattctacctttagattagttttgtttcgtcccatagtccacaaaaaaccaaaaaaattacgatcagtttattccgacctaaaaccatcgccttagcctttgcacaattcagttttagagtccgcagttctgagttcgtgttctagttgagtttggttgctggattagatttgttttggttcagtttgattgtatccatccgcttccatcctacaaaaccgaccctatctacaaaatagatcctatctctacaaccgaccctatccacaaaacagatcctatctctacaaccgatcctattcacaaaatagatcctatctctacaatcgacaatatccacaaaacatatcctatctctaaaaccgaccatatccacaaaacagatcctatatctaaaccgaccatatccaggaaacaaatcctatatctaaaactgacccggtgctccatagccgtcgactcagttcctgccgatttgtgcctttgaaaaccataacttgaggtaccttccataaaacgggcataacttttcgctcggtgctccgtttgagctcaaatttttacagcagattcctgacttcattctggggtgacccaaacttgattaggtgccttggagaggaccagcaaggacttgggaaaggccaaggtgttcaggaggagcagcaagggcgtccacaacaggaaggagatcaagtccgagtcggctgcgactctatctcgggttccaggaccagtctgcactaaaatggacgcccaagatgcatccggacaccgattgcgatggactggatatgattggaaagataacgagattatctaaccaacccaactggttccaccctaaaattcatccggagtcaacgagaatcgtcgaaacaagtcagcgttcagattctgttttggtgctgcgacaccgtctgttgggccgttaggccgtgtatcgcgtcggagcccattaggggcgagtctagggctatgcacgccctaatactctatttattcatcagtcgccaccacatttaggtttgggttttgcttagatcaattctgtcatcgaacagtgtcgccgtcatcggcttgtgagaccccctcccgtaatcaatacaattttggttgcgtttctttcctgttcttgcttgtgttcttgattgcgtttgcaggaataagccttcgtggcgaggtccttcgtgtgtcacgggtgataaccaacggagccgtggtgtagtgattgcgaggaagcgttcgctcggagccttggatcatcaacgtcgagatctccactcaatccaattatcgtatctcacggaagatcggccgcgtctactatcaattggtatcagatttccaggttgcccgtgaggtataattctacctttagattagttttgtttcgtcccatagtccagaaaaagccaaaacaaattacgatcagtttattccgacctaaaaccatcgccttagcctttgcacaattcagttttagagtccgcagttctgagttcgtgttctagttgtgtatggttgctggattagatttgttttggtttagtttgattgtatccatccgcttccatcctacaaaaccgaccctatctacaaaacaaatcctatctctacaaccgaccctatccacaaaacagatcctatctctacaaccgatcctattcacaaaatagatcttatctctacaaccgacaatatccacaaaacatatcctatctctaaaaccgaccatatccacaaaacagatgctatatctaaaccgaccatatctagaaaacaaatcctatctctaaaactgaccctgtgctccatagccgtcgcttcggttcctgccgatttgtgcctttgaaaaccattacttgaggtaccttccataaaacgggcataacttttcgctcggtgctccgtttgagctcaaatttttacagcagattcctgactccattctggggtgacccaaacttgattaggtaccttggagaggaccagcaaggacttgggtaagaccaaggtgttgaggaggagcagcaagggcgtccacaacaggaaggagatcaagtccgagtcggctgcgactctatctcgggttccaggaccagtctgcactaaaatggacgcccaagatgcatccggacttcgattgcgatggactggatatggttggaaagataacgagattatttaaccaacccaactggttccaccctaaaattcatccggagtcaacgtgaatcatcgaaacaattaagcgttcagattctgttttggtgctgcgacaccgtctgttgggccgttgggccgtgtatcgcgtcggagcccattaggggcgagtccagggctacgcacgccctaatactctatttattcaatagcctccgccacatttaggtttgggttttgcttagatcaattctgtcatcgaacagtgtcgccgtcatcggcttgtgagaccccctcccgtaatcaatacaattttggttgcgtttctttcctgttcttgcttgtgttcttgattgcgcttgcagggataagccttcgtggcgaggtcattcgtgtgttacgggtgataaccaacggagccgtggtgtagtgattgcgagaaaccattcgctcggagccttggatcatcaacgccgagatctccactcaatcaaattatcgtatctcacggaagatcgggctgcgtctactatcaattggtatcagatttccaggttgcccgtgaggtataattctacctttagattagttttgtttcgtcccatagtccacaaaaagccaaaaaaattacgatctgtttattccgacctaaaaccatcgccttagcctttgcacaattcagttttagagtctgcagttctgagttcgtgttctagttgagtttggttgctggattagatttcttttggttcagtttgattgtatccatccgcttccattttacaaaaccgaccctatctacaaaacagatcctatctctacaaccgactctaaaactgatcaagtccacaacaggaaggagatcaagtccgagtcggctgcgactctatctcgggttccaggaccagtctgcactaaaatggacgcccaagatgcatccggactccaattgcaacggactagatatggttggaaagataacgagattatctaaccaacccaactggttccaccctaaaattcatccggagtcaacgggaatcgtcgaaacatgtcagcgttcagattcttttttggtgctgcaacaccgtctgttgggccgttgggccgtgtatcgcgtcggagcccattaggggcgagtccagggctacgcacgccctaatactctatttattcagcagccgccgccacatttaggtttgggttttgcttagaccaattctgtcatcgaacagtgtcgtcgtcatcggcttttgagaccccctcccataatcaatacaattttggttgcgtttctttcctgttcttgcttgtgttcttgattgcgcttgcagggataagccttcgtggcgaggtcattcgtgtgtcacgggtgataaccaacggagccgtggtgtagtgattgcgaggaaccgttcgctcggagccttggatcatcaacatcgagatctccactcaatcaaattatcgtatctcacggaagatcgggccacgtctactatcaattggtatcagatttccaggttgctcgtgaggt

SEQ ID NO: 61068 - DNA, 1684 bp, Zea Mays
tctatttattcagcagccgccgccacatttaggtttgggttttgcttagatcaattctgtcatcgaacagtgtcgtcgtcatcagcttgtgagaccccctcccgtaatcaatacaattttggttgcgtttctttcctgttcttgcttgtgttcttgattgcgcttgcagggataagtcttcgtggcgaggtcattcgtgtgtcacgggtgataaccaacggagccgtggtgtagtgattgcgaggaaccgttcgctcggagccttggatcatcaacatcgagatctccactcaatcaaattatcgtatctcacggaagatcgggccgcgtctactatcaattggtatcagatttccaggttgcccgtgaggtataattctacctttagattagttttgtttcgtcccatagtccacaaaaagccaaaaaaaataattacgatcagtttattccgacctaaaaccatcgccttagcctttgcacaattcagttttagagtccacagttctgagttcgtgttctagttgagtttggttgctggattagatttgttttggttcagtttgattgtatccatccgcttccatcctacaaaaccgaccctatctacaaaacagatcctatctctacaaccgaccctatccacaaaacagatcctatctctacaaccgatcctattcacaaaatagatcctatctctacaaccgacaatatccacaaaacatatcctatctctaaaaccgaccatatccacaaaacagatcctatatctaaaccgaccatatccagaaaacaaatcctatctctaaaactgaccctgtgctccatagccgtcgcttcggttcctgccgatttgtgcctttgaaaaccataacttgaggtaccttccataaaacgggcataacttttcgctcggtgctccgtttgagctcaaatttttacagcagattcctgactccattctggggtgacccaaacttgattaggtaccttggagaggaccaacaaggacttgggaaaggccaaggtgttgaagaggagcagcaagggcatccacaacaggaaggagatcaagtccgagtcgggtgcgactctatctcggtttccaggaccagtctgcactaaaatggacacccaagatgcatccaaacttcgattgcgacggactagatatggttggaaagataacgagattatctaaccaacccaactggttccaccctaaaattcatccggagtcaacgggaatcgttgaaacaacttagcgttcagattctgttttggtgctgcgacactgtctgttgggcgttgggccgtgtatcgcgtcgaagcccattagcggcgagtccagggctacgcacgccctaatactctatttgttcagcagccgccgccacatttaggtttgggttttgcttagatcaattctgtcatcgaacagtgtcgccgtcatcggcttgtgagaccccctcccgtaatcaatacaattttggttgcgtttctttcctgttcttgcttgtgttcttgattgcgcttgcagtgataagtcttcgtggcgaggtcattcgtgtgtcacgggtgataaccaacggagccgtggtgtagtgattgcgaggaaccgttcgctcggagccttggatcatcaacatcgagatctccactcaatcaaattatcgtatctcac

SEQ ID NO: 61069 - DNA, 2072 bp, Zea Mays
aagtaaatagtacacatctcactaagttagtgaactaaattggttaaggtctaatacgtagcttagcttaatccacacttagcaatgcagttatatgttcgaagaaaccaaatgataatgtcatgtctttgcctttctgctaatactactaagtaaccaacgtcattaaagtagtacaatttgtaattgtgaataaactatctcctcatgtgtgttctctggggtgtaagcttgcagtagaaggttgtgaatgattgtaaaacccgattaatcaactattcttcttaactaagtctgtctatgtgtaagtcatcgtaaattatgcgtacttaactagtttaataataagtaactaatgaatgataaaagtgaacgtggcgaatgcttgtacttatgatgtcgtgtttgctatagaaaattataggaagtgtttgttgttttccagtgatgattgactatgtatgcccgatgacgtatagataactagcgcttgcgtacagttgtcgcggtgtcttacaatttaatgtttagttcgctaccgtccattttgggattatcttgtgatatattttatcatattcatacatatgcatcctgcatctcatttaggaccgagagatgacgatcgtgcaagtgatgtggtgccaaccacaagatgtagttggtggacgatctgaagagatgatggacttaaccagtggatgctcgccaagcgagtatcccccagcaaacactgtcaaagtgttaaattaaaggcaagccccggttttatgcataaccgtttatatatgctattttactacacttaatgtttgtaggcttgtactgtgcacttaagtgtaggagttgtctgaaaccctagttgcatgaacttaggattccttttgagatggatactagtatgctaggtcgagtagttgctttatttaactaggatctcggtagaagacgagtgatttttctagcactcgcgcgagatcaggaattgggttgtacccactttcatatcatcatgatactagtctgtggacaacaatccatggggattggttgtctacgagatggaaaaattggaataaggattaacgtgcggatacctgtgtcaagcgttttaacgtactaaacacataccgagaaatatggtaaatcggtaagcctagtacctgattgaacctggcagtagactttgcccctcacgcgacctgagacgtggtctcccattccggttatggtgggtacaagtgcggtcactgcacgacggcagtcggggtcagtgaggcattgtacgccaaggcggtgagccctgatctgctgacggggaatcgatggggacggttgatgtgtgtggggacggagtgcccctacatgtcgtgtgtttaggtttaccttgcaaggataaaaactcgattcgaatcgtctgcttctcgcagctaatgagactgcttgatccattgtactgcattgagtaacaagtggaaatgtgacgagttgacacaagatgttgactgctaaatatgtttgataccatgtatgagtagatagtacacatttagtcttaagagagtcacacttaaacttgacaaagctaaaacttgatttttttagactcagctagtgcttttggcaaccaaaccccacagccagacaactgcatgtctagaggtagaggagtagactcctcacaccgggtaagtctagctgagtattagtatactcagccttgcttgtggcacaattttttgcaggtactctttaggatgatttgttgctggtgtgagttggccttcatccctgccaccgggatagacggtcgagagggttattgcttctgcaggagaggaccaggaggagtagcgtggccaggcttcgccatgttactcgggttttctccgttagttatttccgctgcattaaaatttatggttattatttctgaaactccgataatgtaatcactaatggtacttattaaatttgtggtattatgttttattgtatttctttgtgcctcaccttcgagtgagctagtggtattcgatcctggtaagtggctttatcggactagatccgag

SEQ ID NO: 61070 - DNA, 1715 bp, Zea Mays
agttattcaggatcacctattcaccccccctctaggtgctctcacccctccccaaccagccatttcctctccctccctctccccacgccactctctctactccctccctctctctatctccctctctctagctccccatgcagcagcagcccccctcccatggagctggcgaccgagccctcccaagatccactctcaccttggcaagctctcccatggtgtctccccctcctctacggcagtaaggtgtaggaccgagagatgacgatcgtgcaagtgatgtggtgccaaccacaagatgtagttggtggacgatctgaagagatgatggacttaaccagtggatgctcgccaagcgagtatcccccagcaaacactgtcaaagtgttaaattaaaggcaagccccggttttatgcataaccgtttatatatgctattttactacacttaatgtttgtaggcttgtactgtgcacttaagtgtaggagttgtctgaaaccctagttgcatgaacttaggattccttttgagatggatactagtatgctaggtcgagtagttgctttatttaactaggatctcggtagaagacgagtgatttttctagcactcgcgcgagatcaggaattgggttgtacccactttcatatcatcatgatactagtctgtggacaacaatccatggggattggttgtctacgagatggaaaaattggaataaggattaacgtgcggatacctgtgtcaagcgttttaacgtactaaacacataccgagaaatatggtaaatcggtaagcctagtacctgattgaacctggcagtagactttgcccctcacgcgacctgagacgtggtctcccattccggttatggtgggtacaagtgcggtcactgcacgacggcagtcggggtcagtgaggcattgtacgccaaggcggtgagccctgatctgctgacggggaatcgatggggacggttgatgtgtgtggggacggagtgcccctacatgtcgtgtgtttaggtttaccttgcaaggataaaaactcgattcgaatcgtctgcttctcgcagctaatgagactgcttgatccattgtactgcattgagtaacaagtggaaatgtgacgagttgacacaagatgttgactgctaaatatgtttgataccatgtatgagtagatagtacacatttagtcttaagagagtcacacttaaacttgacaaagctaaaacttgatttttttagactcagctagtgcttttggcaaccaaaccccacagccagacaactgcatgtctagaggtagaggagtagactcctcacaccgggtaagtctagctgagtattagtatactcagccttgcttgtggcacaattttttgcaggtactctttaggatgatttgttgctggtgtgagttggccttcatccctgccaccgggatagacggtcgagagggttattgcttctgcaggagaggaccaggaggagtagcgtggccaggcttcgccatgttactcgggttttctccgttagttatttccgctgcattaaaatttatggttattatttctgaaactccgataatgtaatcactaatggtacttattaaatttgtggtattatgttttattgtatttctttgtgcctcaccttcgagtgagctagtggtattcgatcctggtaagtggctttatcggactagatccgag

SEQ ID NO: 61071 - DNA, 3953 bp, Zea Mays
ctggtatccaaaggggtctacctttgacttggttggatactcagactccgactatgctggatgtaaggtcgataggaagagtacatcggggacgtgccagttcttaggaaggtccctggtgtcatggaattctaagaaacaaacttccgttgccctatccaccgctgaggccgagtatgttgccgcaggacagtgttgcgcgcaactactttggatgaggcaaaccctccgggactttggctacaatctgagcaaagtcccactcctatgtgataatgagagtgctatccgcatggcggaaaatcctatcgagcacagccgcacaaagcacatagacatccggcatcactttttgagagaccaccagcaaaagggagatatcgaagtgtttcatgtcagcaccgagaaccagctagccgatatcttcactaaacctctagatgagaagaccttttgcaggttgcgtagtgagctaaatgtcttagattcgcggaacctggattgaattgtagcatacatgtatttatgcttttgatcatgttcctttttgcattttgttgctcaagttgtacaaacactccctggacctcacaagtctgttgcaaagtgatgcacatgttaagggggagatgtgttacaacttgaccctttgagactaaccatgtgtttgagtttgatgatttagtctcaaaggaggcttgaaagggaaaaggtggacttggaccatgaaagacttccactgcactccgatgagagggtaacttattccaagtccatctcatgaactcttattgccatttgctcttaattgaagattttggtgaggcaatggggttatagagccaagattgatcccgttttggtgcttgatgccaaagggggagaaaataaaggccaaagtgataaaatggatcatctaccacttgagagattttgaaaattttgaaaatagtagaatagtagaatacagtttttgttttgtcaaaagcttttgtctcttattgtctctattgtcaaaagttggtttcttttggggagaagtattgattatgggatttacggggagtttttgaaatctttgatcaatctcgtttggaatgactctctttaggcctcaacatgtgtggttgacatagaaatagagatttgagtttgatttgcaaaaacaaaccaagtggtggcaaaggatgatccatatatgccaaaattgaatcaaaaccaatttgagtttttatttgaagtgattttgcacttgttctagttgctttatgtggtgttggcataaatcaccaaaaagggggagattgaaagggaaatgtgcctttgggccatttctaagtattttggtgattaagtgccaacacaagtgcttaaatgtaaatcaatgcccatggatgaacaaagtgcaaatcttcaacaaaggtatgtttctaagtcttagtacattggttttgtgtactaatatatttgtctaagtgttagaaacagaaagaagaagagaagagaaggcttggttgtgtgcagccaaggggctgcttcggtctagggcaccggagtgtccggtggtgcaccggacagtgtccggtgcgccaggccgcctcggccgaagaggctgctctcgggtttttctccggcgacttcggataaaattcaccggactgtccggtgtgcaccggactgtccggtgagccaacggtcggccgggccaacggtcggccgcgtgatcggcgcgcgacacgtggccgagccaacggtcggagggaagcaccggactgtccggtgtgcaccggactgtccggtgcgccagatctgcaacggtcggcaacggtcggcaacggtcggcttcgccaattaaggaaaggaatcgggcaccggacactatccggtgtgcaccggactgtccggtgcgcccgacgacagaaggcaaggatagccttccagatgtgttctcaacggctcctagctgccttggggctataaaagggacccctaggcgcatggaggaggacaccaagcattcctacaacctttctaagcaccaagacattgatctagcgcattcgattcattgtgatagcatatagagctcttgtggagttgtgtactctttgagttgtgttgcgagctcttattgctgcttgtgtgcgtgttgctctgatcttttgaagtcttgtgtgcgtcgctcattccctcccttgctccgtgattctctgtgaacatcttttgtaagggcgagaggctccaaattgtggagattcctcgcaagcgggattgagaaaagaaaagcaagaacaccgtggtattcaagttgatcattggatcacttgagaggagttgagtgcaactctcgtccgttgggacgccacaacgtggaagtaggcaagttttgtacttggccgaaccacgggataaccaccgtgtcatctctgtgattgatttcttgtggttattgtgttttgactcctctctagccacttggccataattgtgctaacacttaacaagtttttgtggcttaagttttgaagttattcaggatcacctattcaccccccctctaggtgctctcacccctccccaaccagccatttcctctccctccctctccccacgccactctctctactccctccctctctctatctccctctctctagctccccatgcagcagcagcccccctcccatggagctggcgaccgagccctcccaagatccactctcaccttggcaagctctcccatggtgtctccccctcctctacggcagtaaggtgtaggtgagctccgggtcaagaacttatgtgctgaaatttcagattcttgcactttcttctaaaatctataactcgagtttgggagctcctaaaatagtaagacttgctttgttagcttccatatgaaatgtcctacctattagatctgtaatatgacctgttttagtagacgtttttgtctgtgcaaattaaatcttaaaaagaggtttagagaataaacgaacttgcttctctccatagttttcattataaaaatccaaaaatgatcaaacttgttttgttagttagatgttgtcatactctatctaagaaaaatataaaacttgtaggttgttcactgttttcttggtgtgttaatttaaacatgttaaatagaaaaaagatggttgttttggttgttatttttagatctgtagctctagtgctccaaatggattcaaatttttacagtagactcttgttgtgatgcttggtgactggtaaatatttcatgaattgttgtgcatgtatgattaagttagtgatttaacttgtttaatgcaccttaagtagttttaaatgatttaaaaataatgtataaatgaaaaaaatggaaaatggtgttctactgtccttgcatggtattatagtagcctaagaaaactcaatatggtaatgcatctacagagaataattagttttagatttaacttgctctcacatgctttattgcattgacaatttattacttttgtattaaataaaatataaaacctgggcatgtgaaatttatacattagtcataaattgttattacttatgcctcataaaaattccagccccaaattagatagtttcatatggtgctaagataacaccccttttataattacaagggttagtgaaaaattaggagaaaacaaaatcatgcatgtttcatgtaatgcttgagttacaccttaaaactaattagagatttaatggttatgttatggtgtcctaaagataaatattagtagtacttcatcgtagttttgtgtgatgtcggacatgcgtgttgaaatgcttaatttggtgaatgcgtttgttaattatgtggtaactctagcgcaagaaatgacttggataaaaattagtaagtcgacttattggtcctcaaatgattatttcaactctaataaatagtaaagtgttagaac

SEQ ID NO: 61072 - DNA, 1067 bp, Zea Mays
cgacgttgtatttgatgagactaatggctctccaagagagcaagttgttgattgtgatgatgtagatgaagaagatgttccaacggccgctatgcgcaccatggcgattggtgatgtgcgaccacaggaacacttggagcaagatcagccttcttcctcaaccatagtgcatcccccaacccaagatgacgaacaggtacctcaagtggaggcgggtgatcaagggggagcacaagatgatcatgtgatggaggaaaaagcgcaaccggcacctccaacccaagttcgagcaatgattcaaagggatcatcccgtcgaccaaattctgggtgacatcagcaagggagtaactactcgctctcgattagttaatttttgtgagcattactcttttgtctcctctattgagcctttcagggtagaggaggccttgctagatccggactgggtgttggccatgcaggaggagctcaacaacttcaagagaaatgaagtttggacgctggtgcctcgttccgaagcaaaatgttgtgggaaccaagtggggtgtttccgcaacaaacaggacgagcacggggtggtgacgagaaacaaggctcgacttgtggcaaaaggctatgcccaagtcgcaggtttggattttgaggagacttttgctcctgtggctaggctagagtcaattcgaatcttgctagcatatgccgctcaccattctttcaggttgtaccaaatggatgtgaagagcgcttacctcaacgggccaatcaaggaggaggtgtacgtggagcaaccccctggcttcgaggatgaacggtaccccgaccacgtgtgtaagctctctaaggcgctctatggacttaagcaagccccaagagcatggtatgaatgccttagagatttcttaattgctaatgctttcaaggttgggaaagccgatccaactcttttcactaagacatgtgatggtgatttgttcgtgtgccaaatttatgtcgatgacataatatttggttctactaaccaaaagtcttgtgaagagtttagcagggtgatgacgcaaaaattcg

SEQ ID NO: 61073 - DNA, 653 bp, Zea Mays
catcgccgcttagcacatgtggggatgaagaaccttcacaagcttctaaagggagaacacgtgataggtctaactaatgttcaattcgaaaaagatagatcttgtgcagcttgtcaagcagggaaacaggtgggaggctctcatcacaccaaaaatgtgatgacgacatcaagacccttggagatgctgcatatggacctttttggacccgtcgcctatctgagcataggaggaagtaagtatggtttagttattgttgatgacttttcccgcttcacttgggtgttctttttgcaggaaaagtccgaaacccaagggaccctcaaacgcttcctcaggagatctcaaaatgagtttgagctcaaagtgaagaagataaggagcgacaacgggtccgagttcaagaatcttcaagtggaggaattccttgaagaagaagggatcaagcatgagttctccgctccctacacaccacaacaaaatggtgtggtagagaggaagaacaggacgctcatcgacatggcgaggactatgcttggagagttcaagacccccgagcgtttttggtcggaagccgtgaacacggcttgccacgccatcaacagggtctaccttcatcgcctcctcaagaagacgtcatatgagctactaac

SEQ ID NO: 61074 - DNA, 5114 bp, Zea Mays
cttgcaaggataaaaactcgattcgaatcgtctgcttctcgcagctaatgagactgcttgatccattgtactgcattgagtaacaagtggaaatgtgacgagttgacacaagatgttgactgctaaatatgtttgataccatgtatgagtagatagtacacatttagtcttaagagagtcacacttaaacttgacaaagctaaaacttgatttttttagactcatctagtgcttttggcaaccaaaccccacagccagacagctgcatgtctaaaggtagaggagtagactcctcacaccgggtaagtctagctgagtattagtatactcagccttgcttgtggcacaattttttgcaggtactctttaggatgatttgttgctggtgtgacttggccttcatccctgccaccgggatagacggtcgagagggttattgcttccgcaggagaggaccaggaggagtagcgtggccaggcttcgccatgttactcgggttttctccgttagttatttccgctgcattaaaatttatggttattatttctgaaactccgataatgtaatcactaatggtacttattaaatttgtggtattatgttttattgtatttctctgtgcctcaccttcgagtgagctagtggtattcgatcctggtaagtggctttatcggactagatccgagggactgacgggttattcctgtttaagtgtgttgctgcccttaagggtgcgacttgggcacttaagctggaataattcgggcggttccgccacagctggtatcggagcgaataccatcacagagaagtcaataagtcatgattaccaaccttttctaaagtaaaacttgcttagaaaccaaagttggataaatcgtcaggacgatgagaatagacctaggacgtgaagccctaggaatagatgggtagctaggtggctagttatataggccataaaggctattactactactattaggatgctttagaagcatccgaaaaaaaaattagttaggtctgagaagacgactagaatgagcatgcatcatgattgtcgcattataattgtctcttgtgcatcaacatgcttctctcacctttattccaagaataagaaattgtgaataatgtgttgtattgctatgaactgcaaaaaactgtcttacctcgtgtcagattggtaagtcttgttaggtcgcgttatgtgtttctcttgtctttgctatctaggtggcattgcaattgttcaaccctttttgccaataaaaaaattgttgtctgttttgcccataaaaagacccctccaaacaaccttgagtttagcaagtgaaacctctaaaacaaattcattcttgtgttggtgttttctaacccttgtgtgttttaccctgaagttgcacctacacaacttgtagacccccataacttaacagctagccaaactgaaacttccttaagcacgtggttatgtcaaaaaaacatcgtttgtgtctagttgcgcaaaccatgaccaagccatgtttctttccataaatccttgcccctaaaacttcatagcatttctgttaatcatcctagctgatcctgtttgcatacctctcctttcacctggatctggtaatctttttccatgcgaatcatgttgtggctttatcatccgaatccctggatcctttaatgattctaccctattatctggttatctgctataacccgttctcaagtatcggatgttgatttgcttaaaatctctcatttctggtcattctcatacccccttctccgagggtcatgacgcttgttttatcaacttatctctaaatggcatatccatttggttcaatggatttgattgttgtccttggttctctcatgtctctaaaagctcatcaatcttgatctcatggttagttcctcctcattaagtatcgtatcaatctttggctgacaatccccgcgatgatcataaaatagttctctaagttgaagaaaattctcatgtgatgctcttttgccaacaatctttacttcaacttcagtcacattttctaagccatattctcaagagctccatctatctgtgctatgtgaatttcttattggttgcgtttggtaatgatgtcatgactaacgactgatggtgccgcgacgagaccgagagcctactatggtgcacacatggttgagctgctcggtacgcgctggtatcgcggttaatagttgtgatccattataagactacaccgatgtgctatcttttgtggacactttcagaatgatcgctgcattttgtctcgatatgtcgcgatattctactcaaatctatcttcagtatcttgtcagatcccatctcattaatttgcatctacctctatcgtgggagttacatgcttctccacccttaaatattctcattcgaatctcgggacgagattctttttaaggggggaaggctgtgacaccccaggtgtcaatttcgtattatgtcgggagattaatcctaatctcagatgctcagtaaaaatttctatttctcgatcgtgcctatctctgtttatcaggctttctcttggaagttcaccgaattcagagttaatcgattgcgagaaacaaccaattttggagcgtgttaaaacttttaattctcggaactaatgcagactcgaagatcattctcgaattataaatctcatctgaagctctttaaaatcaaactctcgacgactgttatctgatctgagcccgaatctaattccacgaaacttcgatctatgttcgaccattttatccgggtccgtattctccaacgagatactcaggatgtcaccttctaattaattcttatccgactcggccaaatatctctatgtccgaatggaactcaaaacccgcatcgacagtgctttttaaaatgtcatgattcgccttctccgactaaaaatccaaagccgatcaaaagtttgagagaaacattgtttctaaaacagtgcacgagaaaatttcaaagtggaaatctccaatgcgttgtcctcaaataaattcttattcgacttggcttaatccctctctgtccgatccaatttcaaaaatcaacatcggcgatgatttttaaatatcgcgatttgtctctattaatcatagatccgaaagctagtcagtctcaagtcattttgatttcctaatcgtacgtggacaaatttttcgagcgacactgaaaaattaaattcttggactaactttttttttctcattcctcggactctcgttcgccagacgccggttctccctgttctccacaccggcaaatcccacgggagatttttctccctttgaacaatttacttagcctagaaggaaccccctttcttctcctataagcaacaaattttgcttgtcatctaagcaacctttgcttctcttgtaagcaaccccttgcttcacttctaagcaatcaaaccagccccttttcttctcctttaaatcccccatgcccccttgaaagggaaatgtgcctttgggccatttctaagtattttggtgattaagtgccaacacaagtgcttaaatgtaaatcaatgcccatggatgaacaaagtgcaaatcttcaacaaaggtatgtttctaagtcttagtacattggttttgtgtactaatatatttgtctaagtgttagaaacagaaagaagaagagaagagaaggcttggctgtgtgcagccaaggggctgcttcggtctagggcaccggactgtccggtggtgcaccggacagtgtccggtggtgcaccggacagtgtccggtgcgccaggccgcctcggccgaagaggccgctctcgggtttttctccggcgacttcggctaaaattcaccggactgtccggtgtgcaccggactgtccggtgagccaacggtcggccgggccaacggtcggccgcgtgatcggcgcgcgacacgtggccgagccaacggtcggagggaagcaccggactgtccggtgtgcaccggactgtccggtgcgccagatctgcaacggtcggcaacggtcggcaacggtcggcttcgccaattaaggaaaggaatcgggcaccggacactgtccggtgtgcaccggactgtccggtgcgcccgacgacagaaggcaaggatagccttccagatgtgttctcaacggctcctagctgccttggggctataaaagggacccctgggcgcatggaggaggacaccaagcattcctacaacctttctaagcaccaagacattgatctagcgcattcgattcattgtgatagcatatagagctcttgtggagttgtgtactctttgagttgtgttgcgagctcttattgctgcttgtgtgtgtgttgctctgatcttttgaagtcttgtgtgcgtcgctcattccctcccttgctccgtgattctctgtgaacatcttttgtaagggcgagaggctccaaattgtggagattcctcgcaagcgggattgagaaaagaaaagcaagaacaccgtggtattcaagttgatcattggatcacttgagaggagttgagtgcaactctcgtccgttgggacgccacaacgtggaagtaggcaagttttgtacttggccgaaccacgggataaccaccgtgtcatctctgtgattgatttcttgtggttattgtgttttgactcctctctagccacttggctataattgtgctaacacttaacaagtttttgtggcttaagttttgaagttattcaggatcacctattcacccccctctaggtgctctcaattggtatcggagccgttctcttcaagaaagggactaaccgcccgaagagatggatcctaaggggaagggaattgtgatcaacgacaaggagaaggagtccttcgtcaacgagccaagggatgacaagtccaacgactcgggctcgggccacaggcgcaaagatgggaagaagaagaagacaaggcgcatcaaggagatcatctactacgacgatagtgatgaatctacttcttcccaaaaggatggtgacaacgactacaaaaagacggtcaattcgaacttttcatttgattattctcgtattcaacatagttcgaattcgcatttg

SEQ ID NO: 61075 - DNA, 2528 bp, Zea Mays
actctgatttttttggccgccgctctgttgattttttgggcgcgtggtgcttatctcccagcacaccgtgcccagcctctgtcttccacctccgtctgttgtccctctcccttatctccttctagccgcgcctgctcctttccagcgacttcctctccatcttcttggcgctcggccgcccctctctagtctccagcgcccagcgcgcgtgcctggctagccccagctcggaccgagccatttccgcccgtccacgttcctccctgctcgcgcccatctccctgagctccgtgcgcgcgtgctccctacccagccagcgctcctcccctccccatccatggccatcgcgcccttcttccctgcccctcccatgctgcccctgtttccccaagccgcgtgctccttcctgctgccgcgtccatggcgcccagccgagcccctcttccatggtcgctgtcctctgctttcctttctcagcctccaccccgtcaggtcgcgcgctgacctcgagctctagccatgagcgtcggcgtcttctatctctattcctccctcaactccaccatgccgtgaagtttccctgcgcgcatcgagctccctacgcctaccattctagcaactctggcgtcaacgctccctgttcttgttgcttagagtgctccagcatctcgccaccatggcctttgccattcggcgatccaaactatgtacctatgtgtgtggaatcgcagcagagcaattgggtgtcagggagggtgacagctccgtgcatcgcttgtgtggtgctcgacgtaatggcggaattagaaatcatagctgtgctcgtggccttcgagttggattaaattactggaatcaccgaaaagtgtggggaagaagtgtagtccaatacgacacccgcaaagtacttgacaaattgtctaaacctgggatcgtcgccgtttccgtaaattccgtgtcgatctggttatggtgatctgacttgctattccctcttatatgattgaacgaattggatagatatattggttgtgataattatcttgttattgagcaggtgcgttgtagttgtattaaatgtttgttgaactgcctcattatttacggtgatgtagttgtgttcgtatagatatatggtatttatattcgtacgataaagtttaggttcgaggtgcggcgtaggcagagtgtgtattggctctacagatgtcatgtgttgctaggacaagtaaattagtaacataaagaataaatttagcatttaaatcgttttgtcgtttagtgttgtcagtagtaatttttgataaatcttgtttgcatagcaaagtcgattcattgctctggctgcgggttgttccttcgcaacggacccagcctcgccttgcagccgcgaacatcatcgtctctggctcttttgctaatatgtgccatcaaccattgtcgttcttgtgatttcagatcgatctgatcttagtaagttaaattattattcctattagttggattgatgagcatagtgagtagatatcgtaattgtcagtatcgatctggttgttttaaatattaaagctaagaccgggcgggtggcttgcacgagaaggaagtctcggtgtagtgcctccgtctgagtcgattaaggaccgtaccaatgtaggcttcatgattgaggaaaactagccacatgcctcgtcatgggtacgttttgcctcgggcagactaataccagaaaggccaacacgcaaagggagtggagagatggcgagagtagcgtgtaccctccgtggcaagaggctggatggtggtgtatctgtgctctcggttggcgtgaacccggtctggtcttaagaaactcggttgcgagttgacatatgcaagggttaagtgctacatatgtcgtgtggtttgagatccccagctgggtattaatcgattcggatcgccgttacttctcggatatgaagacttggtcattgccctacatgtagctatctagtgaactgaagggatgataaaaagacggctagtataggccaagtgtttgaacaaggatagaaagaactctagatacaggtaactttaattaacctgacaaataaaaatggatttttaaggatccactcatagtaagcttttctgcaaacagagtccttgattcttgataagccttaccttgaatccttttaaaaccagcatacccttgagagtattttctttagtcgggtaagtcttgctgagtacttgcgtacttagggttttattcccattgttgttgtaggttacgagtcacttgattgtgattggtgttaatcgctggtgggcatggcctttgattttgttatctgataagtcatatgtgctagaagtagatgaagttacttgtaatgagtcaactgaatgatgtgttgcatggtctggtgtatcaacaaattttgaagatgagcaactctcaggattgtcccttcttttgcacaaggttgttggttcataatcgattgactaagctggtattacgaattgtttgagaaaag

SEQ ID NO: 61076 - DNA, 1984 bp, Zea Mays
ttctttgaccatgccattggtatcaacgttccaaggtcccgcttcctaccagttaaggcgacataagatttgcagctagtacaggattgtatgctatgctgaataaaattgagtatgtgatgtgctctctatgcgtctaaatgaaaacttctatttttgctttgcagtctgatctatataccttggttgatggctttgttacacgtaattcagccagaacaaatccatcaaacccctcaattgaacttggtcctgagttcaagaaggttgggagcttccttggtcgcttcaagtccatacctagcattgttgagcttgacagcttgaaggtttccggtgatgtttggttcggttctagaattgtactgaaggtacatcttcctaagttacaaaacagctataacattcatattggagtctttggttaatggggcaaacaaggcatctagacgaactgaacatggcaggaccccaagtgttctcgttctgctaccaacaagagagctggccaatcaggtgcacgctgactttgagttttatggtgcaacatttgggctctctgcatgttgtgtgtatgggggatcaccttatcatcctcaagaaatggcattgagaagaggtgtggatattgttgttggaactcctggtcgtgtcaaggatttcattgttaaaggaactctcaatttgaaatgcttgaaattctgtgtccttgatgaagctgatgagatgctaaacatgggttttgttgatgatgtcgagctcattcttggcaaggtagaagatgctaccaaagtacagacgcttctgttcaatgccactctgccagattgggtgaataaggaaaacagttgatcttgtcggtaatgagaaactgaaggccagtgcatctgttaagcaccttgctcttccttgtaacaaggcagcaagggcacaagttattctagacattatccgatgttatagccaggatgtactaccccatagatggttgtttttcagtatgctgtttgatttccaatgacttcgctaaacttttctgtgcttcagtggaggtcgaaccatcatcttcactgagacgaaggattctgcatcacagctttctggtttgatttctggatcccgtgccttgcatggagatgtagcgcaagcgcagcgtgaagtatgtgaattcttcttcgatttaataaccttcgcaatcatttgattttcaggtaatactggtgttgctgtcatgctttatgagcccagatataagcacagtgtcagcagactagaaagggagtctgggttaaatttgagcatatctctgtgccacaacccactgatgtagcacaatctgctggcagtgaagctgcagatgccattgcgagtgtgtcagacagtgttattcctatcttcaggcagcaagcagagcagttgctaagctcttccagtctgtctgcagctgacttgcttgccaaagcacttgcaaaggcagttggttacacggccataaagaaaagatcattgttatcttccttggaggattacagtacactacatcttcaaactggcagaccgatgtggtcacctgggtttgctataacattccggtgatcgtatttcttcgtcgtcggggtcatatttgttcccattggtgttatcttcagtttgacgtcggcaacgtggtcatggtgaccggcgggaggaacaccgagcgtgtaggagtgatcaagaactgggagaagcacaagggcatcttcgaggtcatcgacgtgctacttggagttttttgcatgctatgtctagttttctcctatttgttgtacaggaaaacatagaatggaattcaaatttggtggtcgcaaaagtgtggagacttgattcatatacagttaagcttaacattagtgcaaatagttgtattttagtttagatttagagtacacttatgtatgccttgtttgacaatgcttatttatgatatattgaagggtacttattt

SEQ ID NO: 61077 - DNA, 3884 bp, Zea Mays
tccacttttggaactggggaaaaattttagggaattaacatcgaattgggtcatggctcctaggtgaggacatggcctagctttgggttcatgcaaacaaactacccgcattctaccaacacacaagcacagaaacaaacacaagtcgcacaagcggtcaaactaagaagaaccacaggccacataaacacatgtctaaaggacacaataaacaaatctagaaatttcttataggacagtaatgcttcacacattttccaattatttattatcggaataaagacgagagaagcatgttcgttcataatcaccaattattagaataaaggtgagagaagcatatttttgcgtaaacaaccaacacgaagcaacaatcaggatgcatgctcgtcctattcgtcctcacgaattttgccaacataatgtggcaatagcgttctatatcggtggcatatctacgttctctctcggtatattgctagtcgtcagctacacatacgagttcgaagttagtgtacctaaagaaaattctatcacagcccagttcccaatgatgcaattcacacatgacagtttatctcagtatatactccatatatttctatatggaggccagctcttcattaagcgtcgagccacacataggcgccgctgccacactttaaccatagggcagctcattatggtaactcaccttcttacctgagtgtaggtgtgtcgttgcaaatacattacacttctcagtattcccatgtctgtatgcccacacacatccagggggtactgaatcccggaaaagtaattactccacatcgcagccttcatatatacatatgtgtaacatgtatataatcaagcgctttttatactctcccaagaccgacgtttgttcggtcatgctctcacatctcaccttacctgagcgtcgatccattcaaaactgaatggcctaaaaaataacattacacatgtatgcattacccttcccaggttgtgggttagtattctgaactaagccacctaatagtccttaatttagggcttaacagaggatgtcgctagcattatagtttttaaaatatgtttttcaaaaccaaaaatgtgtttagttgaaaatagattttccaaaaccaaaattttgttttgaaaatacgtatgtgaccgtatcatacttaatcaagctccgataccagctgtcacagaacctcccaagttatcgggcccacatgcacctgtccttgtctcaaagacctcatatggctatgcatgtgcaccaaacaacttaacaggatttgtccgagtgcctcgaggaccccggataaacgacttaccaccaagatcgcaggattaagtaaacacaaatcacacacaaacatttgcagcggaaaatctttattacaaaatggttacaagttacaacatttacaagttataacaagattacaatatatatcatcggagtgattacaaaagaaagtgattcaaaaaaattacaatttaaaatgtataaaacatttataggttttcaaatacatgctagcttaagtgacaatcctcaataaagaagctaaagatgggatatacttatataagaaggccgagcccaccggcacttagcaccatccacaacggaacaaacttataacctgaaaaacaatagggaaaaaaccctgagtacgcaattactcagcaagacttacccgactaaagaaaagactctcaagggtatgctggtttattgggaatcaaggtaaagcttatcaaatttcaaagactcatttttgcagaaaagcttactagtagtggatccttatgccaagcttttacttcaccagttaagtacttttcctgaatctagattttcctaatctagatcattcacttgtcctacactagattcattttagcagctttagtttcacttgttatctacgatgagggttgaagatccagtcttcatatccgagaagttcgacgatctgaatcgattaatacccagctggggatctccaaccacacgacatatgtagcactaaacccttgcatatgtcaactcgccaccgggtttctcaagaccagaacgggttcacgcgacccgagagcacagcactccaccgtccagccattggcctagttggtacacgttactctcgccatggtgcccgccatgtttccgagagtacagcaccccaccttccagtctcttgccacggagggtacaagctactctcgccatctctccgctcccagtgcgtgtgagctgttctggtattggtccgaccgaggcaaaacttacccatgatgaggcatgtggccagttaaagggtcctagatcaacaggccaacaatcagaacagtccttaagcgacacaaacgggcgacctttcctgctcagcatctggtctagatttattccaaccattctcccatttttggtacccggcaggggtactcttttccgaatgatgaacccactccggccgaaggggaatcatcaccataagtttgctttgatttttgaaacaaaaagcccataacagtgttccacattgttctttttttaaacaaacgatttttcagtttctaagcagggataagcgttatcagttctttttataaaacaggtatcaaggaatagtaatcgaataccaaggaatggcaatgcatcaattatttcatcactcaactcctatcacctaagcagcatataagtgataaaagttttataacaacaaggaggtggcaaatgcaccggggcttgcctgggataacactaggttagtgtggttagatgacgaccacttggtgagcatcttccgtcctagcacttgatcagatcatccattccgctggttcgttcaccagcatcattttgagatcaactcggctcttgtcctccgcatcacgtgtaacgaaccataactaaaccaaactcgaaatcacgagatcgacgatgatttttggttcgaaccttctaccgaacatttagcaaacgtcgaacgggcctcacttcttcatcatcggtcccgagggtttctctcatcgctgtgcaaagacttgcgggtcacgtatggaaaataatgaactccagttcaaacctcccatcaaacatctggtgcgcgtcgaggacataggtctgccccgtcgtgctgctgctcgcacagagacagagaggggcgagcagagatggctagggagttgggcgagctcggacctagggaacagaggcatggccatgagaactagctggagcagggacgaacgccagcgacgagaacgaagcggcagccgtccaacgcaggggagatgggatgccagccaccaacagagagagggggaaacagaggcaaccgaatttggacaggggcgagctccatggcggctagagggagtgagctgagggaggggcggcgtccatgggagggacaggagcagggacgccgagctttgaaccgatggagggagatcaggaaaagaaggggcagcgacctccatggctgagtagtcgagggcgctggccaaggtaatcacgcagggagcggcgacggagaagacacctcgtggaggagatggcagccagcgctggagataggaacgactggaagaggcgagcaccatggttggcggcgcccatggctgaagggcgagatggggatggaggagcagaggaagcatcggccacctgcaaagaaggaagggggcatcgtcctcagggctaggagctgcggtgaggaagatggctggtgtggggaggaaatggtgcagcaggccgaagccaacagcgtcctgcgctcgatggggatgtgggcaccgtgaagataagcctggaagcttgagcggtagagaagaaaaatatagattttctttttttcgattgaattgac

SEQ ID NO: 61078 - DNA, 938 bp, Zea Mays
atttaatatctggccagtgttcatatgattactggatcaaaatgatttgaacagaaagcgtgtccgaattaatatttttgtcacacctagcaattgcaaaccaaagaacctctcctgcccaatgccgtctaataatacagtattccacaacaaatgccacgtggcttagtagatcggaatgcacacacacaagagacagtatacatacacgcacatcacagcgaaatgcacacaagagtagtaaggctacccgcagtgatatactgtaaagaagacgccaccaatataaggctaggtatagagtaaaattttactacagtggaatattctatatgtagctgtaaacttatggggggcaaacaaaacgctatttacagcgtcgatgtttttttactctatcagtccacacgtccatggagcaggtacggtgccgagcgccatcagccggtgtggcgtgccgagcgccatcagccggtgtggcagtaggggacaaaaaaaagatatataatatatgtggtgattggtatagagttgatgtatggagtaaatatgactgcagtagattatgatatagggtagagaatcttgatgatgaggatagaatatttcttttaaagtagaaatttagagtagaaatttagagtagaatgagtgtggataggctaaaaacaagaaagggtacatgcatgtgttgcggtagagcaaagtagctagaaagcgtcattcagattcagtaatacagacgaaacactgcacacgcgagaaagaagcagaggagggtgcacaagatggatcgaacatgaacatgcgtgaatagcgacggcgggctggttctcgactctggtgacctcagagcatcttgtagttgacgacggcgaggatgacggcccagaccttcctgtgcggtggccatcgaggcggaggcggagtcgaagtcg

SEQ ID NO: 61079 - DNA, 540 bp, Zea Mays
cgcgcctcgccccccttacaccgagtgctgggcccacttatcaagacctccgtcaacgcagcgggcgctcccatcttctcgctgacaaatggacccgggtgccagtcgttgttggggccgtcaccggcgcactccgcactgcgcgtgggcatgccaaagcaccgggggaatccccgagattctgttgacgccccgcccaggatctgttggccgctcgctgtgaccccacgaccatataactgttgctttgaatcgttcatggatgtgttcgacggagtctggactcaagaagaaaccagctggtgagggagtagactggatctgccgccgtgattactcgctcacacgacttcacagtggctggtgttggttgggagtggtccttcggggaacgggagtttttctgggaagcctcgggcaccggaggaagccttgaccgtcgctaattcctcactgacgactcgcgccgactgggggaccgcacattgccgtagccacgaaaattcacgccattgcttgagacgagcaagctactatgga

SEQ ID NO: 61080 - DNA, 2847 bp, Zea Mays
ctactcttcagtattcgacggagtaatcttgccctagccgccaccactccaccaggtgcccctcgcgtcctccatcctcgccccgcacggtactacaggagtatgtgaggtggctatcaagtgatcacgatctcatattctccttctccaagtttgtcagctttaaggaatagcaggcatttggtgtctgctttggctggacgatggcctacagtgatataagcatctcattaactgatacacccagcccaggtggggttggcagaggcccaacaaattagggttgtccggagcccaacagttcattaagcacacttaactcagggaaaggcccaatcaccccaaaagactagtccaatgagggaagggtgactcccttttaaagtggcttcctcttcccaagttaagcgaggtgggataattctgaggctcacacggtcaccatccgactacaattgggccaactaggccaattacgtctttgctaacgagtaatagtggaggatgtactcatcattaacctttttgctagaagcatctcgttaaccttttttgtgtaacctgtgatataagcagggcatgtcctcttacatgatttttttcattccctatccagtcaacatctattttcctgacctatgatgacgactcaaggaggattgccaccgacaagcaatgaagctaatctgtgcaccaatgacaatggtagccaacttggtactcggattgtggacgagattatggctgggaagaacgtcttctttgatcttcctgacaagttgactggtgagatatggaccttgaaattccattgcatgggagcacaacctagaaaagagattgtcacattaaatattgataaagcttatgttgccttttacaacgtggtgtacataaaatcaaaacttggatattctgaaagggatttcttgttttacaagaaacgatgtggcattgatcgatctaggctagtggcacttgattacatccaccaagaagaggccatgatatctgataatgtggacgagagaaaaataagttttgtgctcacaaaagatccacccagtgatctagaggtaagcataactcccatcaagcgtccaaggcagcagacaaatgttgatgaagaaaatatagaagtgttaattgatgcatataaggagtggcttgcaatactacaacatgataatccagaaacggataacgatggagtcttcaaaaaggaggggcgtggtacccttaagggtatagtagcagctaccaagcgaatcaagaacggcgatcacaaacttaagattgaattttcatctaagcttggaggtcctgtaggaccaaacactcgcacgtttgtggatgaaatcgtattgtttacaaagaaaaaggcaccactcattggagtgaaaaagtggaaagatatagagctcaatgttagatcttctatagcatctcacgtattgagaaggtgggagtttccaagaaatgaggacgcgcgtgaaaagatatggtctattgccaaggagaggtacaaaggatggcgatcagcattaagctcaacatacaaggcatacaacaattatgctgaaaggatgaaaaacaagcctaaagatagagacccagaaactggtatagaaccaactgatctaaccctttggatgagtactcattgtaaaaatggtgaatggtcggaagaggcttcacgtggtatttatgagaagacaactaagaaaattgttgagaaagtatatcaagatgatagatttgatctgacgagagaagaggaaaatgctattttccaaacatcattcaaggaaacaacaggatgcaaggcaaacaggcttcatggtcatgggtacctatcaagatatccaacaagaagtcaagtgatggattcaaaattcctcgacaagctcgtgcaacggctgcaaccaaccaaaagaacattgaactcgaaacccaggtccaactattaaatgaaaaacttgcgagtgaggttgcagaatgggaaagaatagtgcaagaaaaaatgcaagcactacaagaagaagaaagaaaaaggcaagtacttagagaagaaatgaggaacgaaatggttgttgcccttactgcagcacaacaggccaaccgagaaagcatcactctagtcgatcctcctttagtgatcccaactgaaactcctgaactcatcccagctgatcctcttgcaccaacaccaagaagtgaaaacaatgtttgtactccagacacaaacaacaagaaagacaatgtgccagcgaactatattagctcttacgctctaaggaatgctgtgacaagacgtgtgcaggcaaggggcaacaaaagaagtgaatgtgtatggaatgcaaatgttcatgtattttggtcatatatactatagtatgaaattcttttgatagttttgttttttaatcttgaatatggttataggtacaatctataagtgcaagcgagaaataaggtagatcatcttaagaagttctatcaaagcatgtttaaggttcgttgtcatcgcgatatcgttgtcatgtaaccatcacttgcatcaatggaggagatggaggggtacacggtggaccaaaaaagcttccactcatttgctagtgttgagtagtttattacctatgttatcacaatccaagctagcatgaggatgttgtgattgtgagctgttttgtcaaattaatttgtatttggtcactgtttatttggtgcaacctatttgttacaaaatggtatggatatagttaatatatgaggcaagagacaaatattatggttgtcaattttggttctgacgttacatatgcgaaatataattctttttgcgtg

SEQ ID NO: 61081 - DNA, 1981 bp, Zea Mays
ccctatccagtcaacatctattttcctgacctatgatgacgactcaaggaggattgccaccgacaagcaatgaagctaatctgtgcaccaatgacaatggtagccaacttggtactcggattgtggacgagattatggctgggaagaacgtcttctttgatcttcctgacaagttgactggtgagatatggaccttgaaattccattgcatgggagcacaacctagaaaagagattgtcacattaaatattgataaagcttatgttgccttttacaacgtggtgtacataaaatcaaaacttggatattctgaaagggatttcttgttttacaagaaacgatgtggcattgatcgatctaggctagtggcacttgattacatccaccaagaagaggccatgatatctgataatgtggacgagagaaaaataagttttgtgctcacaaaagatccacccagtgatctagaggtaagcataactcccatcaagcgtccaaggcagcagacaaatgttgatgaagaaaatatagaagtgttaattgatgcatataaggagtggcttgcaatactacaacatgataatccagaaacggataacgatggagtcttcaaaaaggaggggcgtggtacccttaagggtatagtagcagctaccaagcgaatcaagaacggcgatcacaaacttaagattgaattttcatctaagcttggaggtcctgtaggaccaaacactcgcacgtttgtggatgaaatcgtattgtttacaaagaaaaaggcaccactcattggagtgaaaaagtggaaagatatagagctcaatgttagatcttctatagcatctcacgtattgagaaggtgggagtttccaagaaatgaggacgcgcgtgaaaagatatggtctattgccaaggagaggtacaaaggatggcgatcagcattaagctcaacatacaaggcatacaacaattatgctgaaaggatgaaaaacaagcctaaagatgtagacatcgtcgagtggcattaccttatgctgtattttggatctgagaaattccacgttcgatagcatttcctttacaatgattcacacttgcataatatcgatgattctagcattttatttattaattcatttacaactgttattattttgtagaaaataagtagtcggaactcagaaaaccgtcagaaacgaagaacaaagcatataatgggttctagaactttttcccataagctttgatcagagagacccagaaactggtatagaaccaactgatctaaccctttggatgagtactcattgtaaaaatggtgaatggtcggaagaggcttcacgtggtatttatgagaagacaactaagaaaattgttgagaaagtatatcaagatgatagatttgatctgacgagagaagaggaaaatgctattttccaaacatcattcaaggaaacaacaggatgcaaggcaaacaggcttcatggtcatgggtacctatcaagatatccaacaagaagtcaagtgatggattcaaaattcctcgacaagctcgtgcaacggctgcaaccaaccaaaagaacattgaactcgaaacccaggtccaactattaaatgaaaaacttgcgagtgaggttgcagaatgggaaagaatagtgcaagaaaaaatgcaagcactacaagaagaagaaagaaaaaggcaagtacttagagaagaaatgaggaacgaaatggttgttgcccttactgcagcacaacaggccaaccgagaaagcatcactctagtcgatcctcctttagtgatcccaactgaaactcctgaactcatcccagctgatcctcttgcaccaacaccaagaagtgaaaacaatgtttgtactccagacacaaacaacaagaaagacaatgtgccagcgaactatattagctcttacgctctaaggaatgctgtgacaagacgtgtgcaggcaaggggcaacaaaag

SEQ ID NO: 61082 - DNA, 2953 bp, Zea Mays
ggcccagtagcccccgaactaaggatccatccaatactgcttacttcatatctcctaacccaaatggattttcgacttctgcatttcaatgggaatttgggcatcaaccggattttacttaaggaaaaaaatcgctatccttccgcctgctcaaagtgagtagttggaagttcctgtaagcatcttcccatgaattgacgtatataagcgtagttatcaggtacgccgtgagctggattctatccccgaggatagagattgatgggtaatagttttgatagaaaactcgtatgttaagttctctagttgatgtgatgcggctcgattcatcattgctctcacatcaatgttttcggttccctttttactctcccattttcatagagaaagatgttctgattcagttctctctgaaaaggaggggcccttagggacacagtagtaccatttccattgtgcgaaaggtcgtgtcctggtagcctctctgctgtagacggtctcattggtaaattcttccatttctgaaattgtcaaatcgagattgtgtgggtgttcagtctactctaccgctcatgaaaagatttcgttgggtagaaccaagtctcttttgggagcagattgtatttgattttatatagttactccatgatgatgatgactagatggagttccactgatatgaagagaagaaatagaatattggctaatatggtgccaattcgtaatttaagtttacctgattattatgaatatgaagaagaataccatccagtttcaagagaggcaaccagaggggtctgtatactcctacgaatagacagatatttatcttcaattggaaggagcattcaagaccgtgaggttctacgcgatttctgccaacggttactctttccccaacgcgaggctgggcacagcttttccgaaatatatgatgatatacgagcgcatggggtagaagcaagtcgattgggtcagcctctaagagatctgtacgatgagatggaaaggaacggcgagatagtaaataacggctcaatcattatccctggaggcggcggaccagtaacagaaagcccattggatcaatttggaattcacccaattctggatctgaatattggcaagtactatgtctcattcacaaatctatccttgtctatgctactcactctcggtttggtcctacttctggtttttgttgttacgaaaaaaggagggggaaagtcagtgccaaatgcatttcaatccttggtggagcttatttatgatttcgtgccgaacctggtaaacgaacaaataggtggtctttccggaaatgtgaaacacaagtttttcccttgcatctcggtcacttttactttttcgttatttcgtaatccccagggacatccggataaggggactgagagagtagatatgggacttttcctcataaaagcctatataggtgggtggtatgataatctttcaaagatgggaaattccaatgattctttccgttttgtcgagccctgctttggtctctggtttgatggttgtctcgacttctccgctatgatcttcccagtagttcatataggagctattgccgtttcattcctattcgtggttatgatgttcaatattcaaatagcggagattcacgaagaagtattgcgctatttaccagtgagtggtattattggactgatcttttggtgggaaatgttcttcattttagataatgaaaccattccattactaccaacccacagaaatacgacctctctgaaatatacggtttatgccggaaaggtacgaagttggactaatttggaaacattgggcaatttactttatacctactattccgtttggtttttggtttctagtctgattttattagtagctatgattggggctatagtacttactatgcataggactacaaaggtgaaaagacaggatgtattccgacgaaatgccttggattctaggaggactactattcatattcagaacagaaggttcttctcccacaaaggggatgacgcacctgtcccccccgctgatccggaatccatttaatctgatttggcagagagaatagaaaggatttataggcgggccggggaggagcaatctttagtagaagccgggactacgccaagggaacttgtagataacgtcctgccagagggggcggagctaccgcttctacaagaaacctgggttcagtttgtacgggacgagtcacacagcgagttttgggtagagatcgattcgataatctgctaaggaaatatgggcacgcggcgcgcggtgagcccgacacccccgatcccgatgctcgagcctgatgcccctcaatcaggaggaggcgactcagcggggagcacgggggaagaaaattgtccgggggcggggaaggaaagtaggaacctccgaaggcccgcccgagtcaaggaagcgcaaaagttattctgattctgattccgggggggatgatgggagtgaccctgctccggatccttctcctttcttttgattttgactaaaatgagaggtggagaaattgagttcttttgagcagcgttgtctgtagtagagtagctttttttttcttttacagaaagaaggcgaggcccacctgccttctctaggtactttacttggaaaggtgtcaccgccttccttcttctctaggtactttacttggaaaggtaggtgcgggaaagaagagcggagtggaggcgtgaagaaggttaagagaagcaagccaaaggaaagaaaaagcaacttgatacaatattgaagataaacactcaggaaagcactgggtcaactgactccactagccagcttctgcttcagaacttacttcaaagaggctgacttagcacttagcataatgcttttgttccggtgcataaaagtaagtgagcaggtgggtgagtccaaaggtttttcc

SEQ ID NO: 61083 - DNA, 1454 bp, Zea Mays
aaacgtgattcagcttttctgaatttttagaagacgcatattcctctcagttttggacccttctaattattaattcctaaactttggtggatgatcattacaccaaatataaagagttattattggagaaccattcttattaagcattgatttcctgtcattacttagaactggaagaaaatcgtcctccaattccctctgttttgcaagttggaaactgaaacttgtgtcagttttgggggccagggttcaacatgctcgcctatgtctcagccatcctcatcccttttgttttctagagcatgtctatctccatggaatatccccaccgcctactcttcttcttatcccaagagctaccgtattctttttctctcatacggatagagatagctggaaggagaatttcctcacgtatctctccctctgttctgtgcaaccggccacgtactgaagctcttcctcacgccacctctgcatctcattcacgtcatttatttcccacgtattcagctcctggaaacttccttcacaagatgcgttgaacaccctgggaatcacccacgccacccatctcaccactgcaccactgcgcgcttcgtactgctggccgggctgctccagcaccaggaacgctcgctcctgctcgtcgacgttagattttcccagacgcgcgagctccccagcaactccaacacgttgctcgcctcgctcagtcttcaagccatcgtgtcgctggttctagccaaagtcgggcgcgttctttccttcgccaggcagcgcctccagtcgtcgtttcttttccacggctgcacgctcaccgactcaagcgcttggccatggagctcagtttcgtgtgtgcctgtgctgggtcgccgggtcacgtgctcatccgttttgatgccgtgcacgctccggcttgtggaactcgccggcgtcgtcatctactactagacctcacagtgcatcggcgctctcgatatcgtcctgagttcactccgcgtgctgcgacgtctcgctcacctcctcgccaagccgtcgtcgccctcgcggttatcgggtcgattcgatcagggtaagctgatctattattcccgctagttaaatctggtaaaactagaaaaatcatgattgttgtgtttagtgaattatagatgtctagtgctttcgtaggattgtgttgatgtcttgccgctaaatatttgattctcttttttgtatcatccggttactttatgctcatacatgtgcattgtgcatcttatgaggtacgataattaatcaagtaagacgaaggaaaagagtcaagtcgataccaagcgcgggctaatccgcaggatgatgctgatgaacgaaccggaagatggataatctgaacgagtgccaagccaatggatgctcgtcaagtggtcgcctaacaaacactaacctagtgttacccaggcaagccccgg

SEQ ID NO: 61084 - DNA, 4582 bp, Zea Mays
gacatatgcaagggttaagtgctacatatgtcgtgtggttagagatcctcagctgagtaaatcgattcggatcgccgttatatccccggagagtggagacttgatcgctgccctgcgacctaagtcaggatgtaaaccttatgaataaaaatgatgttgtattgatgagatggtaaaattagactagatgcaaccagagtctattaatatttaatctggcgttaaaatattgaaagtaaggactcactttagtaagctatttctgcaaaagtatctaagttgattcttgctaagagcctctccttgattcctaaatccagcatatccttgagagtcttttctttagtcggttaagtcttgctgagtaattccgtactcagggttttattccctgttgtttttcaggttatagttttgtgttgttgatgatggtgttaagtgccggtgggctcgaccttcttataagtctaagtaactcttctatacttcttattgaggatggtcacttaagctagcatatatttcaaaactacaaataatttataacagttcaaagttacttctttgaatcactttttgtaatcactccgatcatttacattgtaaaacttgatgtaacttgtaaaatttggtaataagatttccgctgcaaaatgttggtgtgtgtgatttgtgttacttaatcttgcgatcctggttgtaagtggtttatctggggtccttgggacactcggacagatcctgttaagttatctggtgcacatgcatagccgtctgaggtctttgagacaaggacaggtgcatgtgggcctaataacttgggaggttctgccacagctggtatcggagcaggattaagtttatacggtcacatacgtattttaaaaacaaagttttggttttagaaaacctattttcaactaaacacgttgtttggttttgaaaaacagttttgaaaaaactataatgctagcgacatcctcttttaagccctaaactaaggactatcgggtggcttatttaaaaaccataacccacaatcgggtggtattgcatacatgtgtattgttatttttgaggccattcagttctgaatggatcgacgctcaggtaaggtgagatgtgagagcatgaccgaacaaacgtcggtctagggaagtgcttaattgtggcgcttgattatatacatgttccacatatgtatatatgaaggctgcgatgtggagtaaatactttttttgggaatgtaattcagtaccccatgatatgtacgggtatatagacatgggaatactgagaagtgtaatgtacttgtaacgacgcacctacgctcaggtaagaaggtgagttaccataatgggttgccctatggttaaagtgtggcaacagcgcctatgcgtggctcgacgcttaatgatgagctagcctcaatatagcaatatatggagtataaactgtgataaactgtcatgtgtgaactgcatcatgggaaaaatgggctgtgatggaattttctgcaggtatactaacctcgaaaacgtatgtgtagctgacgactagtaaaatatcgagagtcgtaagtatgccactgatatagaacgttattgccacattatgttggcaaaatcagtgaggacgcataagacgagcatgcatcctgattgttgcatcgtgtttgtcacctatatatccaaaatgcttctctcatctttattccagtaaccagtgattttacctaatatggtgtaatgttgtattataaacttcaatgaaatagctatcctccattctttaggtaacctatttaggtgttatatatgtgtttgctctggtgcttgatgtactgatagaaggttagtagtttgtttgcttaaacccaaaattaggccatgttcttatttagtgaaccatgacccaaagctgttttttccgttatcactccatgaccaaacacataaaaataaatgcttagataatttccttgttagacataaagtgtacccgggcttaaaacgagaatcttgagttatatctccttccaaaaccgtgtccttgtttggttgatgcaagctgatgtcccttatccagttttgcctcttcttaaggatcatgtcgttattttatcaacctaacttaggaaaggactgcccaatctttttcttgaatttgatgcctttggtttcctcatatctatcaaaggcatatcaacttaatcttatgattattttccctccgtatctagtcagatactaatccctgaccttgtaatctctgcgatgggcatagaaatatgcttggactgaagtaacagtctcccatcatactcctttcatcaagtttaggttttggctatatcgtgttcatttcatcgggccatgatctatttggctctctacttgtaaccattcttataggtggggtatctctttgtatattgtcacccttgcttactctaatggtgtggcgcgagatttcttattgattacatctggtaatggtgttatgactaaaatcgatggcaccgcgatgaaacccagagcctcctgtgggtgatcagcacatggttgcgctacttggcacgcgctggtatcaccgttagtagtcataatccattatgagactacatcgatatgttatctctgcacaaattgttcttaccacgtgagattcattattggtgccagttttgtaatggtgtcatggttaaggacttatggtaccgcggcgaaactgagagccccttgtgaatgtacacgcaaggttctgctgcttggcgcataccgatatcgaagtctctagtcatgattgttatagaattacacttgtgtgttatcttccgtggatatcttccttgaaaagatttctatgttgtttgtcatgtgatcaagcaacatctatcatctctgttggatcaaaagggcatacccctttcatgtgtggtctcttttccttgactttgatggtgacttcacacatacacgttccctttgcatcctttgtgtaaaggtgaagccttggagctttttagtgttggaaagcagctaattagctctcaaaatgcagattgattttccctgctgctgagatgcaggagttttttcattcactctcttattaatccctatattccttaaccaagttgataattcatctcgcatgaagaaacggatgaacaacctgaccaaatggatttctacccaagtgcatgatctcttgttaattaaagtgaactctcaacccttgtcttaccgatggtactgagaggacttgctcaatgtcaaaggtagttcaacaagttggttttactaacttgtaactgctttgtgaacaaaggttgagtttagaaatcgtcttatcgagttgtctaaactcactttagttcagcctatcctgaagaaaaacttggtgaagatcaagtgaaggatatgaacatatgcgcagatcttgtgccatattggtttagattatgagcatatgcatcttaactttaccttgttggccgaggtatttttgccatcctcagctaactgttaacagcctaaccacaactctagtcatgccttgatcgcctcgtgtgtgcttttccagcatgtgtgatcaagtcgagccatgcctagtgcttgataaaatggactggttgcaaagcccgcatctatagatcccttcgctagtgatttttctagtctctatcatttttcttggacttggattttctggctggccatgggtcaactgtgatgttattcgacattcacacccgcctcgtgtgctgtgaacttaccgtgaccccttgttgcgtttgggtaaagtcgcatatctgccgctcgcccaacagactcaaatagtacagtgtcatcagaaaaagcaaactgcacatggaaccttatgtgttcctctggcagacatcgtctctattggtggacatttctaaattagcttagggcaatgcatgttatgtccactagagaaaccatattctgagacactcgactttgcttggagctgttttatggttaccgctgatatgggcaagagttatattattctctactcttaaaagtctttcgttctgaatgtcgggacaagattcttttaaggggggagggttgtaacaccccatgtgtttatcgtctgctcgaccacgagtgcggaccttaacacgtgatagcgatgaataaaatggacactaaattttaattatctcgcaaaggttcgagtttggtgccattttcatttcgataatctatgtaattaaaaggggttcacaggttttgtcgttatttaacaattaagcagaccgaggtaattagaaccgaaccgagtaaaatgcttaattcagttttgaatcagatttgaagtatgctgaaaataatatcaacttgctgtttttgggtcctcataacttttgatctataaacagttttgatgcggacatcaacaccaacacgagcacatctacaccagcagcaccttctccagcccaggcgccaccccttccacctgggccagtgactcgggcccgtgcaagagaattgaactacatcatgttgttaaagaacgaaggcccggaagaatagacgac

SEQ ID NO: 61085 - DNA, 404 bp, Zea Mays
ctcactttagtaagttatttctgcaaaagtatctaagttgattcttgctaagagcctctccttgattcctaaatccagcatatccttgagagtcttttctttagtcggttaagtcttgctgagtaattccgtactcagggttttattccctattgtttttcaggttatagttttgtgttgttgatgatggtgttaagtgccggtgggctcgaccttcttataagtctaagtaactcttctatacttcttattgaggatggtcacttaagctagcatatatttcaaaactacaaataatttataacagttcaaagttacttctttgaatcactttttgtaatcactccgatcatttacattgtaaaacttgatgtaacttgtaaaatttggtaataagatttccg

SEQ ID NO: 61086 - DNA, 855 bp, Zea Mays
ccgaccctatagagtgtaaaactggtatactagccgtgctcaatgtcatgagcagctcggaccctcacatgattaacttatggaattaaattcaatttgtcatttgcatcgcattgggattattttattattacttttatttattattactatggtttggtatttactcacacttagtaactgctaataaaattttgaccaacttataaaagcaatgctcaacttcaacctttattttgttgatcagccttacacttcacatgaactcccacctttggtgagttcatgcatattatttcccacaacttgttgagctatgaacgtatgtgagctcacccttgctatctcacacaccccccacaggagaagaataggtggttcaagaggagccacccaacgaggagtacgactttatctaggtggcgtctcccaatcagctttgtggcgccaagaaaataagatttagttcgttttatatttatcatttattttgtaagacttccgctatgtaataaatacatttatgatatttatgacatttatctctatgcactctataattatatgtgttgttcttccttggcgaacatatgagatgcacccgactttatcccttaaaaccgggtgtgacagaagtggtatcggaggaaatgttgactgtaggacgaaacctagatagaaatggacaatacccttacctacttaccttactctgattgtttctatactcatcttgatcctctctcaccttctattgttctactctaattactcttaccttttctattctaagacaaggaggattacacactttggaatcctacatttatgacccctaaagagataggagaccca

SEQ ID NO: 61087 - DNA, 1322 bp, Zea Mays
gtcttttccccctttgagtcggtgtcgtccttggtcttcgtcaccatatcaacccaaagctttcgggcaatagcttcgacgcttactcctatcaccttcgggttgctcctttacaccacgtgtacttttgccattagagaaggtcatttatccgggagccgaaacctcctgtaataatctatatcatactgaaaacatatggttagtcacgttttttaggaccttcggaagaggaaggcccccaacagatggtatcttcatgcatagatatgctggatgaagtattgcttcaaaggaatttaatgtcccttgaccaatgattgcattgtagggatattccatatcaataatgtcaaaaacaacttgctttgtccttgtgttatgaacataaccgaaggtgattggcattgttatcctctcgagtgccactatctgccatcctccaaagccacacaaggggtgtgttgcatcatatatttttatcatcctgctcctgcatctgcctaaaagcttttgcaaagatgatatatgttgcacttcctgtgtctaaaaggatgttgtgcaccaggaaccccttgatgacacaagatatgaccattgcatcattatgagggtagtccttgagctgaaggtcttcctgggagaaggtgattggtacatgagaccacttagacttgatgaagggtccctgcactccaacatgttgtacccttctttgtgcctccttcttctgcttcttattagctggttcaaacttgaatggcctatggttgggagcaccaacttcgtagccgaaggtgccacggcttgggttccttccgaagccattgtcacggaagtgagttcaccggaggtgggcgccaatattggtcacttgttctcaaatgttgtgaatcaagaacaaggcaacacaaaattattaaggaccttcgtcctcagaagcattgcctcttttcggatttaatgatcatcggacgaaggtcgtgaaggacatgccttcatcatttcatgggcaaataagaatacataaagacgaagaatatagttcattaattcattcacatttatatttcataatatacacatgaatattaacagagttatatattacattggtaccttcggcttactcgaagatgctgatgcggagtgaatacaaaaaaacagcgtgaacagtacaagaatactgttcacctatttataggcacgggacgcagcccgggtaaaagtacatttatgacctttaacatttgtccataattgtcggggaccataattaggggtaccctcaagacgcctaattctcagctggtaacccccat

SEQ ID NO: 61088 - DNA, 1367 bp, Zea Mays
attgggagcatggtgggatcttactgcaaagttccctataatgctctcttcatcctaaggaacacagaacaatcctaaggatggaagtatttaactcgcgacttgggctaggaacaggtgatgctttgcccgggtcaattaaggattggatgtgtatgtaggcctgtatgatcaaggactatcttaactggccacatgccctggaaatgggacagggtaagcttgaacccgactattccatacgtgaaaagacaactgcacactgggcgtgggagatggtgggagtagcgtgtaccctcctggctggaggctggatggaggagtactgtgctcccgggtagcgcggaccggttcacgttgtggaggatctgtgggaacggttgacatatgcaagggttaagtgctacatatgtcgtgtggttagagatcctcagctgagtaaatcgattcggatcgccgttatatccccggagagtggagacttgatcgctgccctgcaacctaagtcaggatgtaaaccttatgaataaaaatgatgttgtattgatgagatggtaaaattagactagatgcaaccagagtctattaatatttaatctggcgttaaaatattgaaagtaaggactcactttagtaagctatttctgcaaaagtatctaagttgattcttgctaagagcctctccttgattcctaaatccagcatatccttgagagtcttttctttagtcggttaagtcttgctgagtaattccatactcagggttttattccctgttgtttttcaggttatagttttgtgttgttgatgatggtgttaagtgccggtgggctcgaccttcttataagtctaagtaactcttctatacttcttattgaggatggtcacttaagctagcatatatttcaaaactacaaataatttataacatttcaaagttacttctttgaatcactttttgtaatcactccgatcatttacattgtaaaacttgatgtaacttgtaaaatttggtaataagatttccactgcaaaatgttggtgtgtgtgatttgtgttacttaatcttgcgatcctggttgtaagtggtttatctggggtccttgtgacactcggacggatcctgttaagttatctggtgcacatgcatagccgtctgaggtctttgagataaggacaggtgcatgtgggcctaataacttgggaggttctgccacagcgcgcgcccctcagtcgatagagccgaagtgaccgcagtcacttcgccgctccactgaccggcctgacaagaggacagcgccgcctgcgtcgctctgactgttgtgccgctcacagagtgaggctgacagcagtcaagtccggctccg

SEQ ID NO: 61089 - DNA, 1667 bp, Zea Mays
gttgtttgtcatgtgatcaagcaacatctatcatctctgttggatcaaaagggcatacccctttcatgtgtggtctcttttccttgactttgatggtgacttcacacatacacgttccctttgcatcctttgtgtaaaggtgaagccttggagctttttagtgttggaaagcagctaattagctctcaaaatgcagattgattttccctgctgctgagatgcaggagttttttcattcactctcttattaatccctatattccttaaccaagttgataattcatctcgcatgaagaaacggatgaacaacctgaccaaatagatttctacccaagtgcatgatctcttgttaattaaagtgaactctcaacccttgtcttaccgatggtactgagaggacttgctcaatgtcaaaggtagttcaacaagttggttttactaacttgtaactgctttgtgaacaaaggttgagtttagaaatcgtcttatcgagttgtctaaactcactttagttcagcctatcctgaagaaaaacttggtgaagatcaagtgaaggatatgaacatatgcgcagatcttgtgccatattggtttagattatgagcatatgcatcttaactttaccttgttggccgaggtatttttgccatcctcagctaactgttaacagcctaaccacaactctagtcatgccttgatcgcctcgtgtgtgcttttccagcatgtgtgatcaagtcgagccatgcctagtgcttgataaaatggactggttgcaaagcccgcatctatagatcccttcgctagtgatttttctagtctctatcatttttcttggacttggattttctggctggccatgggtcaactgtgatgttattcgacattcacacccgcctcgtgtgctgtgaacttaccgtgaccccttgttggtaaacttctttctgtgtgttttacccaagacgttgcatctggttccgtttgggtaaagtcgcatatctaccgctcgcccaacagactcaaatagtacagtgtcatcagaaaaagcaaactgcacatggaaccttatgtgttcctctggcagacatcgtctctattggtggacatttctaaattagcttagggcaatgcatgttatgtccactagagaaaccatattctgagacactcgactttgcttggagctgttttatggttaccgctgatatgggcaagagttatattattctctactcttaaaagtctttcgttctgaatgtcgggacgagattcttttaaggggggagggttgtaacaccccatgtgtttatcgtctgctcgaccacgagtgcggaccttaacacgtgatagcgatgaataaaatggacactaaattttaattatctcgcaaaggttcgagtttggtgccattttcatttcgataatctatgtaattaaaaggggttcacaggttttgtcgttatttaacaattaagcagaccgaggtaattagaaccgaaccgagtaaaatgcttaattcagttttgaatcagatttgaagtatgctgaaaataatatcaactagctgtttttgggtcctcataacttttgatctataaacagtttgaaggtggacattataacaaggttgtagagctatactagggatacaaatttgcttaggcaacctg

SEQ ID NO: 61090 - DNA, 1698 bp, Zea Mays
aaacttgtgtcagttttgggggccagggttcaacatgctcgcctatgtctcagccatcctcatcccttttgttttctagagcatgtctatctccatggaatatccccaccgcctactcttcttcttatcccaagagctaccgtattctttttctctcatacggatagagatagctggaaggagaatttcctcacgtatctctccctcggttctgtgcaaccggccacgtactgaagctcttcctcacgccacctctgcatctcattcacgtcatttatttcccacgtattcagctcctggaaacttccttcacaagatgcgttgaacaccctgggaatcacccacgccacccatctcaccactgcaccactgcgcgcttcatactgctggccgggctgctccagcaccaggaacgctcgctcctgctcgtcgacgttagattttcccagacgcgcgagctccccagcaactccaacacgttgctcgcctcgctcagtcttcaagccatcgtgccgctggttctagccaaagtggggcgcgttctttccttcgccaggcagcgcctccagtcgtcgtttcttttccacggctgcacgctcaccgactcaagcgcttggccatggagctcggtttcgtgtgtgcctgtgctgggtcaccaggtcacgtgctcgtccgttttgatgtcgtgcacgctccggcttgtggaactcgccagcgttgtcagctactactagacctcacagtggtactatgatgccgccgtggagacgtctactatgccatctattctctgttgtctcgctacacctgattgtcatcctcgtccttgtctcgatctcgctacggcagcatcggcgctctcgatatcgtcctgagttcactccgcgtgctgcgacgtctcgctcacctcctcgccaagccgtcgtcgccctcgcggttatcgggtcgattcgatcagggtaagctgatctattattcccgctagttaaatctggtaaaactagaaaaatcgtgattgttgtgtttagtgagttatagatgtctagtgctttcgtaggattgtgtcgatgtcttgccgctaaatatttgattctcttttttgtatcatccggttactttatgctcatacatgtgcattgtgcatcttatgatgtacgataattaatcaagtaagacgaaggaaaagagtcaagtcgataccaagcgcgggctaatccgcaggatgatgctgatgaacgaaccggaagatggatctgaacgagtgccaagccaatggatgctcgtcatgtggtcggctaacaaacactaacctagtgttactcaggcaagccccggtgcatgcaaccccttttttgtgtttttaaattatttttacacactttaagtctagtgaatgtgcattaggtttataggagttgcttggaaaccctttaatgcattggctaccttgaaatcctttccttttttagatacttctggtgaagtatcaaaatataatttacaaaaaatgcttagccctgcttataagcagatagagtttgtcctttgcacttatgcctagctcaggtttatcctgaggaaggatgatttctatctgcaagaatattttcattgggagcatggtgggatcttactgcaaagttccctataatgctctcttcatcctaaggaacacagaacaatcctaaggatggaagt

SEQ ID NO: 61091 - DNA, 4325 bp, Zea Mays
gtttttacatcagcttgagatgtttgccaaatgtgtgaaggattacgggattagtattgaccctttaggtttggtactttgagtgcatcatatgatagaatgaaatgtaagtttctgaactacaatagatgaagacttatattatgtgtaggttaaccttactagttggatatttttcttagttgagattctgaatgaagtatagtgacatgggttaagcaaatattgtgttgttgttgggctgccagtgctctatgtagagttttggcatttctttgatgaactgtgtcgcgcaagattttattggcttcttattggctttattgctccattagttctgttgattttctcccttttggtggggtccaaagtatgttagattacatgattatcttttcattatggcaagaacaaggtttaggaagattaggagttttgtttcaatagaactacttgttttgtggtgctgtgaggtgaggtgtttgatcttcttatacattcatctggtgtggatgtttcaccattgacttaaaatgaattgttgaagttggtaaaggttgtgcttagtgcatattaccccttcataaaagagtgtcgttttaagacattgatgctgatgtatggctgcatccaaattcgatgttgtgaaatcgtagtgttgattgcatctatgacttggtttgagcttcattacatgttggttcatgcttgatgtcaggttgtgtagtttccttagacaattagtccaaggtagaagttcttgtgttaattaagaacaataatggacccatgtttcgaatggtggtgctatatggggtaccttgagtgttttgcttggagtggtcaaattcgaggacgaattctttttaaggggggtagagtgtaatatcccaaaaaaatattgaccaaaagttgatcttcggtgcgtggatgagggaaagagttgtgggccattagatgcaaagtcaggagacatctgaggcgtcgtttctttctcccacaaaaccctagtggtcgccccctccctttttcacttttcttggccgccaacccccccttttccccacccttggccgcccctcccccttccccttgcagccgccctccactgcttcctcctccctctagatctcccccacgcagcaaggatcaagaagaggaggagcaagatggattgaagaggaagagaggatcaaggagatgttctatccccatttcttgcagattttcttggggaaaccctaggtaagtatgggatccttgttcctccctataattatgtgcttttggaggttgtggatcatgtggattgaaggattagagtttggattagatcactacaacacaaacacccctatagcaacgcatacattgcaacaaaatggtttatgcgttgcacgaaattaggtgccaacggatgctagcaacacaaatatttatatgttgcaagaaaatcaactagcaacatttaccatgcgttgcaagtgtcatccgtagaatatccaaattacctggcaacgtttgtcatgtgttgcaagggtcattcgtagtatttatgtcacctaacaacatttgtcatgcgttgcaagtgtcatccatagtatttgtgttacctacaaacgcttatcatgcgttgcaagcattatatgcagtatttatgtaaattagtatattggttttaatacttacaaagtactcccttcgtcacaatttataaatcgtttgatttttccaacaccaagtttgacttactcgtcttattcaaaaaaatcataatttctatttgtttttattgtggtttaattttttttccatattttcataattttttaataggacgaggtggtcaaatttggtgtgaaaaaccaaacaacctataaattgagattgggggagtatttttattagttctagtaattcgaaaaaatattactagtatttcttatgtttctgcctttccatgtttctataccatctttatgtatccaatgtgatttctctctattattttgtagagtctagtaaaagcttgtaatcccacggtatattaatcgtggagcaaattaaagctgcctgagatggtacatgtctcctctaaaatacggaccataagattgctcgccaatggtacatgtctccctcatccatcccactcccacgatagggtgtgcgaccgtgcgatgcttcaagacgccatagtgcccaggccggcgtgaggagccccaaacccaatctcctccccctccccgctgctcgtctccctcgctcctcatacgtcgttgtgctgctcaggccaccgaaccccaatctccccccaacccgccgtcatgctgatggctcagatccaccacggctccgagcggaacttaatccccctcccccaagagaccaccacctcggcacgagcagtccggcatggcaggagggcccagcgcgcccgccttacagaggcgctgaggctgaagatggatcaggtgccaattccgctcatcgagtattccaagaatttgctacattcgaaatactcctcaagaagagaaatccaaggttcgtgcttctccaaacaacttagggccttcgaaatactcctcaaattgttttaggttcttccatacggtggccatctcttgttgcttatgagccttctatttctgcagcaatgctctactcatggtaggaaagaggaattaaatagtcaaacatcagtactgggtgatgatattaatgcacagccagagatctcaatggtactgattatgatcctaacaacattgatatacacatgagtttgaattatgtaggcatttcatgcgatttctcgtctgaacgcaaccatcaacacacgctgttggaatggaatctaggttgatcgcatcggaaggctgggacaatccataaacatcacagctcttattgtatggaataatagggtggttcatgctttggatgaaattgagatactggtgagatataaacagataccaatgtctgatactcacgatcccccctcctcacgccaagcaccaatagttgttcatgctatatattttagtttgtagtcctgcctgatctatggcgatttctttctgccaggctttagaacacatgtcacttgcatattcctttggggttgggtgatcaccgcctttggggtattgtggtggcagaggcaagggatcggaggaccattggttcttgttctgccttatagtcatgtacatcttgtgattgcagagcttatcaacatgagcggagccagccagacataattaccaggatgatgggttcttccacttcgtttcagttgtctaggtgataaatacgaaagaaatttcacgggccaaccctgtgagcttgatatccagtattcacaaatttgttccagctctaacactaattcttctatttcacttcatttttaaacaaccagactttaagttatatttggcctgatattcgttggctagtgcaacttcatttgtagtgagggaccagcagctgtatagtgattcatgtgtatcatggagctatgttctcatcttatgaaataaaaagcttcattttttgttctctcatttgacatgtttgtttgtttcatcatgataagaaaatgatcctcaactccggctaatccatatcttgtctgcaggtccaagtagttcatttcgtgagttatccaaagttgcgccgcaaagatgagtactgctaatcgctaccaacacatcaagtcaactaagcctgttgtaggtcatagtaggtcctgtaggtgcttttaaacgggtctgtcattgttgctattgccattgttcagggggagcaagatgatgatgatttccaggatctgcatgaaagctacagaaaaggagctacaaaacaaaatttgttatgttcaagtgcaacttggttcatccttgtggctacctcacaattcaatgatggtttacacttacatattcataaagagttggagaaataaaaacaagaatatttcttagtgatattacttggtattgacccaaatcagaaagttgaggccgtgagttaggtaaagaatttttgatgctgggtgttggtcttgtatctgtgcccaatgaactactggtatggccatatgtcaacttcaaggttattggagatgttggcgacaatctaatagtgcagcattcaacttgtgttcaaaagcagaaaagaaatgatcccacaagttgaagaacaatatggggattcatttttagtttggaaggatgtgatggcttggattggaatgactgctttgcttctagttttagttggttcatcggcaatgagtatgacttagtaggagt

SEQ ID NO: 61092 - DNA, 1194 bp, Zea Mays
ctcagcttaaatcattctaagattgtttacaattctgtcatctatttgacatgagggctagagggtggtcttggagcaagaaaagtgttgagtccaggcgcattatggtacgactgagactgagttgggcaggagcaagcggttggattggcctgactcttcaagaccaaagatactcggcttcctcttcatcaagtcacgaaattcgacccaaagattagttagctgcaccaaaactagagtagggccaagcaaagcctaggatgaatctctcttctagtctagcttccgcttacactgaagcttccactcccatatgggcaagaagagctccttctctttttgccaaagcaaagactcgcctttcttcttttctggcgggatatgaagacggaagcatgaggactgagatgaatagcccatcctttagtgagctgctgaaagacgtgctgttagccaacgcgagtcatcagtatgcagggaatagggtaggttagcatatataaaggacgtgagattgaagcaagaaaatctcttccttcccctttctatgcaagcctgattagctaatggagacagaagggagtcattttccctatactatagagcgatagacagaaccaaggcgaatctctctgttaggcatgatgactacgtcatgttttcttttgctggaaagcatccactcggccttcttccccagtctaccactgatggcagactaatccctcaatatgaaaacaatatcgaagcgaggacagagtctttgatctctgttttcgaaccttttgctcaaccgtgaaaggctttgaccattcccaagaaaaaaaagcaaaatctatcatccaatttgatctctaagatagacaaagtctggttcaccaaagagccttatcctacgtcactgcctcgtcaacctgacttccatctcctgacatcggtacttgttttctagtttgcccaggaaaagtggaattgaaacctgccgcacgcgttcaatagtatgcgcagctgctggtctttcacttggaatggaacaggtatatctctttggcccggggaatcccaaacaaaatgtcgtcggcgtatcgcgcatagtagatcctgagtgaccattagcagccagccagtgccataccaactctgcctcaccagccagcgagcgtaagaatggagcgagcgagcctgcaacta

SEQ ID NO: 61093 - DNA, 297 bp, Zea Mays
tccccctccttactgtacgtgcgactctcaccgcatacggctcgcacaaagactcaaaaatccatcccgagctttttattccacctctcctctccaatcctcgatcaaacctctacttcaatgaaccacgtcgcgttctttatctttctcactcgtcgtttcattggtcttttattggtcattgattgtttagtctcgtggaagcaaccgatgctttggtcattcgactccttgatgccagtctgtgcttgctgtcatgctggcaaaagcgggggtttcggccggttttacctacta

SEQ ID NO: 61094 - DNA, 1305 bp, Zea Mays
gaaaaattcctcttctcccaccagcagccgccgcatagggatcctggcctccaccatccgccaagcacctcccatccattgtcttcaacctctagctcgtgagcccctctcttctctgatccatggtgcagccctctgctccttttccttgtgggtgctggcttcctcctccagcgaccagcactagggagcaccaccccttcccttccccaggaacgacgagctcctctctactcccagcaacttccatggccgtcggcccctacgagctccctgctccacgcgccctcagccatggcgcacgacccctgctcctccatggccgccaatcatcagccgttcggcactccggaccatccatggcatgcgacccctccacgccggtgtcgagctccaccatccgctcctctaccacccatctcccacacggtatgctagacatggaacacatggacatgaacgacgtggtgttggagacaaacccgaagatgatggaccgatcaaggggacgttcatcaagcagatgtcatctaaccaaaaacactaacctagtgtttgattccaagcaagccctgacatctaattaccatggtttgcaataattgttttattcgcctaccatcctatgattgttgcattaggttgcaggagttgtttggaaacaattgctgcatttatctttgattacctttggttatcgctatccttgtcacctgggtaaattacttaaatgcttaggcctgcttagacgataaaagtcgggtgatttcttgtcacctgcaaggtacttgtgcttaccttatgcttgatttgggtaaagtcatcgtgaaatatcaatgaataatatgaaggttaatatgagactagacgagatgcagataaggaaacacaaggcatgtaggtcttggttaatatgagactagttgtggtccctcgagtcatattgaacgcatgcctaatcacttagttggccggataactcgtttcgaccgcgaagccagagtattattccagttggattcgacctctcttggtgcacctattggtgtgggtgaggagccatagggacacgatgagatgacccatggttatggcggcgacatgaccctctagtagttgggcggtccctggatatggtggctccttttgaatctatgacgatccggactgtttctggaatatgtatggtggtgatcgtatcctacgaagtattatgggtatggtttgtgttaggaataccccgccagttggttagtaatcgattcgaatcgacatcgctcctggatagtgagcacttgacttgag

SEQ ID NO: 61095 - DNA, 462 bp, Zea Mays
attgagcccaagcactgcttccaggtccccttacgcaccttagagctagcgcgaaccgaccaatttctttgagaaactccagagtatcttcttcccctcgccgtcttcagctcggtcgtgggagacatctccgtagccaggtgatgaaactgctgagttttgctgcttctactcgaaggttgtcccaaagcaggaagaagaaaactaagaactacctatggaaggtgtttgccttcccgctatgtaataaggttaagcactcgaacccagttatgtaataatgactctttctatattgtacttatgaatgtaaattaagttattgtaaccctttatgctttactccggtgatgtgtaatgtttgcgttatgggatgaacgctcttgggcgatgtgaaggagatacagaaaactggacctatcgagccattggacgcacctgcacgactatctgaggtcttca

SEQ ID NO: 61096 - DNA, 1108 bp, Zea Mays
cccaagcactgcttccaggtccccttacgcaccttagagctagcgcgaaccgaccaatttctttgagaaactccagagtatcttcttcccctcgccgtcttcagctcggtcgtgggagacatctccgtagccaggtaagatagggctagtattctttcaattatgccttgttctgactccctctggtgctatccggaatactccgccgtctggcatctcgatgtggcgacctctctattctttgttcaagccatcccactactgttcctgactcctggtgagttcttaatgcttgccatgcctgctaattgaattctaacgcatcgtgtctccgggaccgagcccagcaaacctcagtgtccgccatgaacatgagtaaccaaggccgtgggctgacataactcaattatccgtggggtaggggtcggttaggctcggagatggggcttgtgtgtcacaccggattgaagggataaaaccgggtgcattttatatgtgcgccaagaaaaaacaacacatataataacagagtgcatacagataaatatcataaatatcataaatgtacttattacatagcggaagtcttataaaataaatgataaaaataaaacgaactaaatattatttccctagcgtcataaagcttactgtgagatcccacctagatcaaatcgaactcctcgttatgcgactcctcttcgaccacctgttcttctcctgtggggggtgtgagtcctaagggtgagctcacatatgttcatcgcttaacaagttgtgaggaataatgtgcacgaactcaccaaaggtgagaattcatgtgaagtgtaaggctgatcaataaaataaaggttgaaactgagcattgcttttataaattgatcaaaattttattaacagttactaagtgtaagtaaataccaaaccatagtaataataaataaaagtaataataaataatcccaatgcgacgcaaatggcaaattgaatttaatttcataaattaatcaagtgagtgtccgggctgctcatgaccatgagcacggctagtataccagttttacacctctaccaagaaagcgaggcagagttttcactacgaggcctt

SEQ ID NO: 61097 - DNA, 225 bp, Zea Mays
tcagaactatggagaagaacaggtggttcaagtggagccacacattgtggagttcgatttgatctaggtggcatctccctgttgactttctggcgccaaggatggattttagttcgatttatatttatattttattttgtaagacttccgctatgtaataagtactctgattatattgtgacatttatctctatacactctgtattatatgtgttgttttctttg

SEQ ID NO: 61098 - DNA, 67 bp, Zea Mays
atcacgtagccgctgcaacgcgttgaccggatcatctttgctcagaactatgcagtgaggtcgcgag

SEQ ID NO: 61099 - DNA, 1857 bp, Zea Mays
cgcgccgagcgcttctccttcgcccaggcccgcgtagcttcctggtgctgagcccctccccctccacactgctcgctcggggtccatctcccagttcatggacgcgcccagcttctctgcttcgtgcacgcgcctgttccaatgtcgcgtgcttcctccctgctcgcccctccctccctctgtccacttgcgcatagccgcgcccctggctcttctgttggtcgcgcggccgtttcctgctccctgcgcgcacgagctcggcgtccatcttgctcacccctgctcccgcttggaattcccatggccggcgtacggcttcgtgttcgcccaatctccctgctcgcgagtttcttcctcccgaacgccgtcagcttgccgcgtccctagtccggctccagctcgccggtgtgcgtcctgctccttacgcgtccagcgccgtgcgcgtcttcctccctagtgctggagcttcctctgcgagccgagtctcttccagccgtgtgcctagtccccagctccttccctgcaattcccagtttcctctgctcgctcgccgtgcgcgcgcccagctgaagtcccctgtgcgcgtgcctgcgcgcagctcgtgccctgctcgcccctctgctcgtcgagcttgccgtccgcaccgagttcgcccgggtcgcaagcctgtgtgtcctcgccgcgcctactgctcgctgggtcaagccccatgttgtcgcgtccctattttcgtttgtcgtgccacgccgtcatcacttctgtcgcgagctaatcagtcactgttatcttgaccacgtcaccacgcgactttggtcatgttcatcgaattcgtcaacgctctattgccgattcgactgtcgtcgatggtgatagcttcgcgtgttgtcgagcccgtcgttttctctttctagtgctcgtgcggtttcctgctcgcctgcgcgccctctcggcttgcttggtcttaatccccatcgcgtcgtcaatcttgccggttatcgtcgttcgtcgtcgacctcgcttggccctatatcattatgggtaagctttgcctcgggcagactaataccagaataagataacacgcaatgggagtggagagatggcgagagtagcgtgtacccatcgtggcaagaggctgtacggtggtgtatttgtgctctcggttgttgtcaacctgatctggtcttaagaaccccggtggcgagttgacatatgcaagggttaagtgctacatatgttatgtgattagagatcctcagctgagtattaatcgattcggatcacggttacttctcggacatgaagaattggtcactgccctacacgtagcaatccagtgaactaaagggatgataaaaagatggctagtataggccaagtgcttgaactaggatagaaagaactctagatgcagataactttacttaacatgacaagtaaaaatggattttaaggatccacttttagtaagcatttctgcaaaacagagtctttgattcttgataagccataccttcaatccctctagccagcataccattgagagtcttttctttagtcgggtaagtcttgctgagtaattccgtactcagagttttattccctgttgtttttcaggttatagttttgtgctgctgatgatggtgttaagtgttggtgggctcggccttcttataagtctaagtaactcttctatacttcttattgaggatggtcactcgagctagcatatatttcaaacttataaataatttataacatttcaaagtttatttctttgaatcacttttgtaatcactccgatcatgtacattgtaaaacttgatgtaacatgtaaaatttggtaataagatttcc

SEQ ID NO: 61100 - DNA, 2087 bp, Zea Mays
aagcttggattcgttttcgttcatgcatttgacaagagaaacctgtggcacaagatgcctgttctgatcggtttactgtacctgaacacccgtcggaccctcctcgaaaaatacaacctgctagctgttgggagttctcatggtgctctgattgaccccaaggatcagttcatgtaccgcaccggagatggcaagtacaatgaccccgataatgctgaggctggtagccaatacacattttttgggagaaacatgaagccggttgatcaagagtatgagttgatgagcccagatccatttgttgtggcgacaaagctgttagccaggagagaatacaaggacacaggaaaacagttcaatatactagcagctgcatggatacagttcatggttcatgactggatggatcatatggaggataccaaacagattgaaatcacagctccaaacgaagtggccaataagtgcccactcaaatcattcaagttctatgccacaaaagaactgcctacgaattctgatggaacaataaagactggttactacaatgtccgcacagcttggtgggacgggagtgcaatatatggtaataatgataaaaaggcagaaaagctcaggacttatgttgatggaaaactagtgatcggagatgacggtcttcttttgcatgaggagaatggtgtggcattattgggcgatgtccgcaacagttgggttggggtttcgatcttacaagctctttttgttaaggaacacaatgcagtgtgtgatgcaataaaggaagaacatcccaacctatcagacgaagaattatatcgatatgctagattggtcacttctgctgtcattgcaaaggttcacactattgattggactgtggagcttctcaagactaagaccatgagagctggaatgcgcgcaaattggtatggtttattgggtaagaaaataaaagatacatttggtcacataggaggaccggcattaggtgggcttgtgggattgaagaagccgatcaaccatggcgtaccttattctttgactgaagagtttactagtgtttacagaatgcactccctattaccaagcactcttaagctcagggatccgaccggccaacccgatgcaaataattccccaccgtacttgaaagacgtcgatattggagagttggttggtctcaagggggaaggacaactatcgaaaataggctttgaaatggaaatattatcaatgggatatcaagcttgtggtgcacttgaactatggaactacccaagtttcttcagggacctcataccacaaaatttggatggtaccaatcgatctgacaggatcgaccttgctgccctagaagagatagggagagaagtgtaccgaggtacaatgagttcaggagaagactatttctgattccaataaaatgctgggaggatctgacaagtgacaaggacgcaattgaagccataagagcaatatatggagacgatgtagagaaattggatcttcttgttggtcttatggcagagaaaaaaatcaaggggtttgccataagcgaaacagcattcaacattttcattttaatggcatcgaggagactggaagcagatcgattttttacaagcaatttcaatgagaaaacatacacaaagaaggggatgcaatgggtcaaaacaactgaaggcctacgggatgtgatcaaccggcactaccctgaaatcagtgccaagtggatgaagtcctctagtgctttctctgtgtgggatgcagactactagtgcaaaaataaagcccccctgccatattttcaatttgtcaagttttatgaagtattatttgtttacagaatgatggtgtttgttcagtgcaaataaatatacttaatataaatatgtcattgtaatatatgtaataggattcattgttgaatgacacaagttgtatgcttatttttttacaatttattgtacattattatttgttcattgtaattaaatatggctgggaaaataagtaggaggagaccatatgacatctaccttcaatcttctccgagattacatctttcttttggttttggtcaacaa

SEQ ID NO: 61101 - DNA, 2375 bp, Zea Mays
ctcctctctgctgattccatggagcatcagccgatctcctctcctgcgactcgcctccctcacggcgccctccatgctcctctctctctcatctctgcaacttggacggccagcatggagcttgccccagccctctccctcttggttctctgctggtcgcgctcctctccatgggcgcccaggtctcttccccatggtggccgaccctatgcccagctcgcccccatgtccgaattccgaaggcagccgtctctactccccttgccatggcgacctcgccttcactgcatctatttcttctccaagccgacgtcgtctccctctatctttctctctgctgcagcgcctagcgccctcattttcccagccatggacaacaatgtccctctactccttccccatggctatgcacctctctgtagcagcacgttcgcaacgccgtcgaccctcgggtaattgggatgaagtggaatgtttcagcacatcatccaccaggtgttcggtgaaaggtccaagccaaaagtcgttgtcattttagaatatatcgagtcgattcgaatttggtacattaattgatcaccaattacgaaggacacgggatggattaatctcaagtgaagttgatgaatgaacctgaagctggataatctgatcgagtgctagattgggagatactcgccaaatgagtgtcatctagcaacactgtcagtaccctagaacaggggtacccgttactacagtatgaaggcacggcgtccacacggctatctttagtcgcgcagtgaacaacacccaacccctccacgtgggtggctccggggccgccacgtggccagaggagacgatatactccaaggtggcgacagtgggtccggacccccacgggaaagtgctagacccctggatgcacagcccggacttcctagcggggttcaagacctcgaaaggtacaaaccagaccaccgggacgggtcccagacccctcaggaggggaccgggctactcacagtagggccccaggattctaaggaaaagaatacccaggcctcaatcaaggccaggcgtgtaacacctcaggtgttaccatggccagagcacatctatgcactgatgactgtgatcacatgtggtagaaacttgagaagaacataagaaccttggagaccatgtgttaatcaagattgttaatgacctaagagcatcactcaagcttttgtgcacttactaccttgggcaagaggagagtaaaccctagacctctcttgaaccctatctcccaaaaccatggttgagagggggagagaataagcaaatgtgcaaatcatgagttaatctttaaccaaactttaagtaactttataaccagcaaatatgggaaggaaatgttgcaaaaagaccccttgagaaaccccaaatcccttccttaagtagagaaagagctagagctctcaaattccctctaagtcaaaaactacacctaatctaaagatcaaccgtgttcaccttgaagatggcatcaaaaccacctaagttctataccaaaaatgtggcatatcacctagggcacccactggaaaaagttgagcccgagaccttgacgtttgacatgccttggcattgtttttgtcgcgaggtgggcagagagacatacctgatttggcgtccaatgatctccctacctagggcatatctgacatggcgactcacggatgagagacaaccctaggtgccaggaaaagactcgcgccggatttttgccaagattcgcacgtttgtgacttgggcgagctgtggaacatgggcagaagaaaacctacacgtgttcgacgcgctctgtgcacgccagagcacgcccgtgcgcgccccgcgtcgcgccaaaggccagccgacgccatggcccgcgcccacgcctataaagcccactcaggcgtcgaccatacccttccacgcacgctcaacctcaccggagctcaaactcaccgtcggttgcccgtgcacggcgtgtccgcggccacccgagcccctgccgccgtagaccggccaaccaagcctttcccgaccccgtccagccctcggagaagactgagcacacctctgtgaagctccccgagcgaggaatcgaagtctgcttcgccgaagaggccagtccacggtcgccggagttcacaaccccgccggagtgcgtggaccgggtaatccactgaaccatttttcgattccttgtgcacacagtctctacatcatctcgtgaagctcaccgtgccaatggattgaactagatcgccgtgatttggccggcacacccaccgccgacgaggacacccgcctgcgcacgtggaccgtgcgattccagccatccccgccgtcgagccgta

SEQ ID NO: 61102 - DNA, 2433 bp, Zea Mays
atccagacaccgctcaagctcatctcagccttatccccaagttgcctcctctctgctgattccatggagcatcagccgatctcctctcctgcgactcgcctccctcacggcgccctccatgctcctctctctctcatctctgcaacttggacggccagcatggagcttgccccagccctctccctcttggttctctgctggtcgcgctcctctccatgggcgcccaggtctcttccccatggtggccgaccctatgcccagctcgcccccatgtccgaattccgaaggcagccgtctctactccccttgccatggcgacctcgccttcactgcatctatttcttctccaagccgacgtcgtctccctctatctttctctctgctgcagcgcctagcgccctcattttcccagccatggacaacaatgtccctctactccttccccatggctatgcacctctctgtagcagcacgttcgcaacgccgtcgaccctcggtatggcacttagggtaattgggatgaagtggaatgtttcagcacatcatccaccaggtgttcggtgaaaggtccaagccaaaagtcgttgtcattttagaatatatcgagtcgattcgaatttggtacattaattgatcaccaattacgaaggacacgggatggattaatctcaagtgaagttgatgaatgaacctgaagctggataatctgatcgagtgctagattgggagatactcgccaaatgagtgtcatctagcaacactgtcagtaccctagaacaggggtacccgttactacagtatgaaggcacggcgtccacacggctatctttagtcgcgcagtgaacaacacccaacccctccacgtgggtggctccggggccgccacgtggccagaggagacgatatactccaaggtggcgacagtgggtccggacccccacgggaaagtgctagacccctggatgcacagcccggacttcctagcggggttcaagacctcgaaaggtacaaaccagaccaccgggacgggtcccagacccctcaggaggggaccgggctactcacagtagggccccaggattctaaggaaaagaatacccaggcctcaatcaaggccaggcgtgtaacacctcaggtgttaccatggccagagcacatctatgcactgatgactgtgatcacatgtggtagaaacttgagaagaacataagaaccttggagaccatgtgttaatcaagattgttaatgacctaagagcatcactcaagcttttgtgcacttactaccttgggcaagaggagagtaaaccctagacctctcttgaaccctatctcccaaaaccatggttgagagggggagagaataagcaaatgtgcaaatcatgagttaatctttaaccaaactttaagtaactttataaccagcaaatatgggaaggaaatgttgcaaaaagaccccttgagaaaccccaaatcccttccttaagtagagaaagagctagagctctcaaattccctctaagtcaaaaactacacctaatctaaagatcaaccgtgttcaccttgaagatggcatcaaaaccacctaagttctataccaaaaatgtggcatatcacctagggcacccactggaaaaagttgagcccgagaccttgacgtttgacatgccttggcattgtttttgtcgcgaggtgggcagagagacatacctgatttggcgtccaatgatctccctacctagggcatatctgacatggcgactcacggatgagagacaaccctaggtgccaggaaaagactcgcgccggatttttgccaagattcgcacgtttgtgacttgggcgagctgtggaacatgggcagaagaaaacctacacgtgttcgacgcgctctgtgcacgccagagcacgcccgtgcgcgccccgcgtcgcgccaaaggccagccgacgccatggcccgcgcccacgcctataaagcccactcaggcgtcgaccatacccttccacgcacgctcaacctcaccggagctcaaactcaccgtcggttgcccgtgcacggcgtgtccgcggccacccgagcccctgccgccgtagaccggccaaccaagcctttcccgaccccgtccagccctcggagaagactgagcacacctctgtgaagctccccgagcgaggaatcgaagtctgcttcgccgaagaggccagtccacggtcgccggagttcacaaccccgccggagtgcgtggaccgggtaatccactgaaccatttttcgattccttgtgcacacagtctctacatcatctcgtgaagctcaccgtgccaatggattgaactagatcgccgtgatttggccggcacacccaccgccgacgaggacacccgcctgcgcacgtggaccgtgcgattccagccatccccgccgtcgagccgta

SEQ ID NO: 61103 - DNA, 4377 bp, Zea Mays
cctagggatattcttcaccgccctcctctcttcttatctccagccgttcctatcctgtccacttcctagaaaattcctagccgctcgtgcaatctccggcacgcagccttggacatcgcctcatctcctcagctgctcgccctgtctacgcgccaggcgacgtaaccagtagcctctgctcgctggcgtcgtgctcctctgctgaattcgacgctccgctgtcctgcgagctcaaccgcgccgaactgccaagccagtggccgacatgctctgtcctcactgtccctgctcgttcccctgctgcaagttgtcgggcaacctgcagctcggacttcaccatcggctctttgcgtgctccgctgcaccagatcgccgcgtcaccgtgaagctacatgccttgccttgcgttgcctttcgctgctgctgtagccgagtcgtcatcgcccaagtgctgagcgctctgaacttgccaccgttctgcagccctgccgtcgactctctactcgtctcgctatgttgtcatagttcactatcctcgtcctcgccgtctaccttgccgctcctcgcgctcaacaagctgtcacgcttggcgtgtttcctccgtgtgacctcacgcgttcctctcgcttcatccggaagctagtcgtgtggtagagcaggtatggttatttggttcgaacatatgtgtggatgcgggataaattctaagagaaataggttcttgttgtggtcggctgccgttagagccatcgtccgatatcttatgtttgtgcgtgtggatcggcgaagaaagaaactagtttgtgtaaaaaatgaagtttcgggcaattttttgcctgatgcttggtgtgttaccggagtcgatttcgtcactattttggcgaatcttcactcggctttggtattgcatagggttagattttcttggagtatattttgatttgattggagcgtattcggttagtcgtcgattatctgcgtaattagaaatacatttttcgtcagttgtcaattatccacttaattagaagtatcttaccatggaataaataacttaatagaagtgttggggacttgttctcaactgctataaattaaaaacaaggcaacacaaaaaatgggttaaaggttaatacccttcgtccttcgaaacattatttctctgaggatataacgatcttcggacgaatgtcatgaaggacataccttcatgatcatagtatacttagatgaaaggcgaagcatatgaaacatgggaaacaacatgaataattgaatgatgttataatatacatttattgttatttaatcatgaatgaatataaacaatattgaattacattatatacctttgccttgacagaaggtgaaagtacaagcgtgatgtaagaatgaataccagtcagcgtgaacagtacatggatactgttcatctatttataggcacagggcgcaacctgtgtggatttacatttgtgtcctttacaaccggttacaatcataacacaaattatcatgggccaattggtcttttcatctttaagtcggtgcatttgaaggtacgctacgaagctccctgattggtagcttcggcactgcttctgttttgatcttctgaaggtgtttcttctcacaggaccttcgacgacgaagcagacccccaacagtagcccattcacgatgccagatcgtttttcgtaacgagctcgacccgtgaaaaattctcttaggcttcggaaatgccgaaggtccgaaaaacaccttccctgagctcgttgtcgagaaacgattaaatattccgagtgcgaggtggtcccaccatacgacgggtacgcgcgatctagtgattcaccttctcgcgcaatgtggtccaccgttcagtgggtgcgggcgactgttcagcgggtgcgagcggcttgacgattcaccttcccacctgcatcactatataaacagacgggtaggtataaagttaccatagcatttattactattgcactgttgtgttgctgaaaaatttgaccatagccgaagcttattcatcgtattctcaatcagagcatcgtcttggtttagcttcatcataagagggagcttcggcaaaattgcaaaaagtcatcaacttcgtcaaaaccgtaagaaattcagtatcaaatagccagagtgcgttcaactgctagagttacacgtgacggagaggaggccgaagctgccaagactgccccaatcttcgaagtaatgaggcaatctggactggttgtgacatagggtgcttctgacgaaggtgcacctgctgcagaagctgaacaggctgacattgaagagggtagtgctgatgaagaagatgtagattataacaccatcatgccatccaaacccagccacttggactttggaaagtctactatctctgaggctgatatgcccatgatgataaagcaaaggctacttcggggaagccgagaagaggctgattcgttttggcggggaagaaaccactctgaagccagaaaatgatgaggtggtagttttcagaagtttcttcaaagtaggattgaggtttcttttgcatgaaatgattggggatgtttttgaagattttgaaatttatcttcatcagctaactcctaacgctatcgttaggctcatcgtatttatctgggctctccgaagccaaggagtagacccgcttgccgaagctttctgccgggtgcacgagcttcattatcagatgaaggctagagaagatgggctacacgagaattttggctgttacaactttgcttaccgcaaagatatgaagactccagtgatcatctatcgcaccaaatggccaaccggttgggaaaatgagtggttctatgttaaggttgatgagaaaaaggagaagatagttcagagcccactggacctaaccttcgggttaactaggcccctgtgcgacatgctgcaagggtcaccatgccgagaagctgtgggcgaattctgagttgtgtctgagcatatcggtactagagatttggtgcaggaatacttagccaatagagtatttccgacgttaaaggaatggaatatgccgaagcttaaaggagaaaagaaaaagaatgaacttgttcgactgccctatcacttcaagttcaagaaacatttcaaagagccttgccaagaatggttggaaatgattgaagctatgtgtaatgaaattttgggcaactatactaagaaagaagatcagttgatgaccgcggccttcggcacccaaccgaaatgaaggctgaaccgagtaatggatgccctgaaatttgaataccctgactatgaacggttaagcaagggtgccgaatggccaaagcgaaaaagagttgtcagtgttatgaagaggcaagctgctagaatgatagaagaagatgagaaagctttgaaaaagaaaaaatccagccctaagccgaaggtggctgttccgaagaaaagaaaagttgcggctgcgaagccaaaaacaactgatatagaggaagaaattccttcaacgcctcttgctgctgacgtggaggaaattttaaagctaatgaccgaatctttacctctcaagctaagtccactagggccacaactgatgaagcttttacagaagaaggaggagcccacggcaatcaagaagcctgttgaaaaaaggcgaaggattattactgttattgatgctattgaagaaacgccaccgtcggcttcagcgtcaaaaacaccaactgtcgaagctgctcccaccgaagctacaactgccgaagttgcggcggccgaagccacaaatcttgagagcgcattttttgttattgataagatgattttggatatggccacggaagaaactgttgcaactgccgaggaaaccctagccacagtgcttggaaaaggggagaaggtgtttaacaaagagaagaagattaccgaagatattttggaggaagaggacttcaattttcaaaacatgattggtcaagagttatctaagactgaaaaagaggagctaagagattatgctatatcttgcggctaccagccaggagcgttgctcttcggtggcgttgacgaagagagcttaggatgcctccgggaccggactagagcgaaggttgtcagcactctatcgaagattgttggctttctgaagcttgaggccgacctcagtagataccggcggcaacatatcgccgatagcttgttttattctaattttaaggtaaagttcttaccttaactttttattgttttcgagatgaaggttacttctgatgaaggttattttttcagagtctactactaagtaaaaccttgaggatgcaacaagacctcgaggacaagaaaaatgagattataattgag

SEQ ID NO: 61104 - DNA, 3271 bp, Zea Mays
gagttggtgtgtctccctataaaaataaaccggaaaaaactcaccaaactgaaactagtaggggactaggtctagagaaaggagagacacaatcggccggaagagcgattgatttctcccgccgccgccgccccgtctcttcctcgtccgccgctgcgcccgccgcgcacaagaggagggtttcagtgttagggttctacccccgcctgcgctggtatcagcagccaaatgagaatgcttgctgtgtttgattgatcgtcagatccttacttacaacccaccagattgtatcaggtcttgtggtacctgccacctcaaagtcacgacagatggccgcaaataacaacccttggagggtccctatgccaccgctgctcaatgttcgagctggttttggcgatacaagtctcttctcaacctcactgcctgttcttcctcatgaaaagtgatgacgcttcggccaaaatgaaagtgcttgctgatgatcctgatgagaaagactacaagttcgattttgatcttcgacagatagatgacttgttgcctgatgaagatgagtttttcgcggggatcactgatgaaactgagcccatcgggcaaacaaataccacagaggaattggaggagtttgatgtctttggcaatggagggggcatggagctggatattgaccctgtggagaccatcacagttagttttgcaaattcaagtattgtggacggggctagaggcaatggcatcaacccttttggtgtcccaaacactgtaggaactgtggctggggagcacccatttggagagcacccttccaggaccttgttcgtaaggaacatcaatagcaacgtcgaggactctgaactgcgatctttgtttgagcaatatggggatatccgtaccctttacactgcaacaaagcataggggctttgtaatgatatcttatttcgacatcagagctgcacggaatgcaatgcgcgcattgcagaacaaacctctgaggaggagaaagctggacattcatttttccatcccaaaggagaatccatctgacaaagatttaaaccagggaactcttgttatttttaacttggatccatcggtttctaatgaagaggttcgccagatttttggggcatatggggaagtaaaggagataagagagacaccaaacaagaaacatcataagtttatagagttctatgatgtaagagcagcagaggctgctcttcggtcactgaataaaagtgagatagctggaaaacgaatcaagttggaaccaagtcgtcctggtggaacacgcagaaacttgatgcagcagctcggtcacgatttggaccaagaggagcccagaagctacagacatcctcatgttggttcacctattgctaactctcctccaggggcatgggctcactatagtagtccaacagataacaatatgctgcaagctttcactaggtctccaactggaaatggaatgagtcctatcggaatgccttcactgatctcaaatgctccaaagattgctccaattggcaaggatagcaatcggtctaaatatgatcaagtcttctcaaatggtaaccagtcactgggagctgcatttcagcactcccactcatatcaagatcacaacagtgaacagatgagttctagtcctgggactttatcagggccccagtttctctggggaagtccaaagccatattcagaacattcaaaatcccctatttggcgtccaccagcaaacggacctgcattgtcatccagtagtcgcactcagggccaaggattcttgtacagtagccgtcaggcttcattatttggttctttagatcagcaccatcatcatgttggctctgccccttcaggtgctccattcgagaaccattttggctttttatcagaatcgccagagacatcttatatgaagcaactcaagtttgggaacatgggtaatgttggtattggtagaaacgggggaggcctcatgctgggcatggctagtcatgcttctgtgaatcctggttcttctctgattggaagtctgacagataacgtatcttctagcttcagaccgatattgtcaccgagattgggacaggcattttacactaatcctccataccatgggcctggtacattcggacttgacagctccattgaccatgcccgtaaccgcagagttgacagcagtgtgttgcaagctgatagcaagaggcagtatctgcttgacttggagaagattcgcagaggtgatgatactcggacaacattgatgattaagaacatcccgaacaaatatacatctaagatgctcctggctgcaattgatgagcttcacaaaggaatttatgacttcttctacctgccaattgatttcaagaacaaatgcaatgttggatatgcgttcattaacatggtatcaccggtgcacattatatccttctaccaggcttttaatggtaagaaatgggagaagttcaacagtgagaaggtagcatctttggcttatgctagaattcaaggacggtctgcactgatatcacattttcaaaattcaagtttgatgaatgaggataagaggtgccgccccattctttttaatcccaatggtcaggactctgtgaatcaggaagcattcccaattaatggtatatgcatccacatgcccctggaagatgattgccttgacaatgaagaaaacaagagtctgaacgagaagacaggagagaactctactgatatcgctgggagtttgtgactgtcggccatgatagcaaacatgatcagaatggccacatatataaatctaactgtctagagagtatccacctccaaattgtataaaaactgatgaaggttgatggttaggcgttgaattttgtggtctttcggttttagttgcaacagatgtggcccctggaagcggaagcgaaagcgagggagcttcgaaccggagctgggcgcttgcttgtcgaatccccctcactctttacagatgtggggatgagcaaccgctgctgctcatagttgtgcttgcttttggttgcttgctgtaaaaaggtgaactgaactgaagaaatttagccaaactgtacagtttagaacttttgtgcatattttgcattctagtatgttaatgtgtatgggtggagcagtagttcagagatcctttttttctgcgtgagatctttttcttaatgcaatatcggggctgtcatactcaggtcgaatttttctctctatcctaaaataagtgttgcgcgaga

SEQ ID NO: 61105 - DNA, 3286 bp, Zea Mays
gagttggtgtgtctccctataaaaataaaccggaaaaaactcaccaaactgaaactagtaggggactaggtctagagaaaggagagacacaatcggccggaagagcgattgatttctcccgccgccgccgccccgtctcttcctcgtccgccgctgcgcccgccgcgcacaagaggagggtttcagtgttagggttctacccccgcctgcgctggtatcagcagccaaatgagaatgcttgctgtgtttgattgatcgtcagatccttacttacaacccaccaggtcttgtggtacctgccacctcaaagtcacgacagatggccgcaaataacaacccttggagggtccctatgccaccgctgctcaatgttcgagctggttttggcgatacaagtctcttctcaacctcactgcctgttcttcctcatgaaaagttgatcttttctcattcttctcatggtaccccatcaaaggatgacgcttcggccaaaatgaaagtgcttgctgatgatcctgatgagaaagactacaagttcgattttgatcttcgacagatagatgacttgttgcctgatgaagatgagtttttcgcggggatcactgatgaaactgagcccatcgggcaaacaaataccacagaggaattggaggagtttgatgtctttggcaatggagggggcatggagctggatattgaccctgtggagaccatcacagttagttttgcaaattcaagtattgtggacggggctagaggcaatggcatcaacccttttggtgtcccaaacactgtaggaactgtggctggggagcacccatttggagagcacccttccaggaccttgttcgtaaggaacatcaatagcaacgtcgaggactctgaactgcgatctttgtttgagcaatatggggatatccgtaccctttacactgcaacaaagcataggggctttgtaatgatatcttatttcgacatcagagctgcacggaatgcaatgcgcgcattgcagaacaaacctctgaggaggagaaagctggacattcatttttccatcccaaaggagaatccatctgacaaagatttaaaccagggaactcttgttatttttaacttggatccatcggtttctaatgaagaggttcgccagatttttggggcatatggggaagtaaaggagataagagagacaccaaacaagaaacatcataagtttatagagttctatgatgtaagagcagcagaggctgctcttcggtcactgaataaaagtgagatagctggaaaacgaatcaagttggaaccaagtcgtcctggtggaacacgcagaaacttgatgcagcagctcggtcacgatttggaccaagaggagcccagaagctacagacatcctcatgttggttcacctattgctaactctcctccaggggcatgggctcactatagtagtccaacagataacaatatgctgcaagctttcactaggtctccaactggaaatggaatgagtcctatcggaatgccttcactgatctcaaatgctccaaagattgctccaattggcaaggatagcaatcggtctaaatatgatcaagtcttctcaaatggtaaccagtcactgggagctgcatttcagcactcccactcatatcaagatcacaacagtgaacagatgagttctagtcctgggactttatcagggccccagtttctctggggaagtccaaagccatattcagaacattcaaaatcccctatttggcgtccaccagcaaacggacctgcattgtcatccagtagtcgcactcagggccaaggattcttgtacagtagccgtcaggcttcattatttggttctttagatcagcaccatcatcatgttggctctgccccttcaggtgctccattcgagaaccattttggctttttatcagaatcgccagagacatcttatatgaagcaactcaagtttgggaacatgggtaatgttggtattggtagaaacgggggaggcctcatgctgggcatggctagtcatgcttctgtgaatcctggttcttctctgattggaagtctgacagataacgtatcttctagcttcagaccgatattgtcaccgagattgggacaggcattttacactaatcctccataccatgggcctggtacattcggacttgacagctccattgaccatgcccgtaaccgcagagttgacagcagtgtgttgcaagctgatagcaagaggcagtatctgcttgacttggagaagattcgcagaggtgatgatactcggacaacattgatgattaagaacatcccgaacaaatgctcctggctgcaattgatgagcttcacaaaggaatttatgacttcttctacctgccaattgatttcaagaacaaatgcaatgttggatatgcgttcattaacatggtatcaccggtgcacattatatccttctaccaggcttttaatggtaagaaatgggagaagttcaacagtgagaaggtagcatctttggcttatgctagaattcaaggacggtctgcactgatatcacattttcaaaattcaagtttgatgaatgaggataagaggtgccgccccattctttttaatcccaatggtcaggactctgtgaatcaggaagcattcccaattaatggtatatgcatccacatgcccctggaagatgattgccttgacaatgaagaaaacaagagtctgaacgagaagacaggagagaactctactgatatcgctgggagtttgtgactgtcggccatgatagcaaacatgatcagaatggccacatatataaatctaactgtctagagagtatccacctccaaattgtataaaaactgatgaaggttgatggttaggcgttgaattttgtggtctttcggttttagttgcaacagatgtggcccctggaagcggaagcgaaagcgagggagcttcgaaccggagctgggcgcttgcttgtcgaatccccctcactctttacagatgtggggatgagcaaccgctgctgctcatagttgtgcttgcttttggttgcttgctgtaaaaaggtgaactgaactgaagaaatttagccaaactgtacagtttagaacttttgtgcatattttgcattctagtatgttaatgtgtatgggtggagcagtagttcagagatcctttttttctgcgtgagatctttttcttaatgcaatatcggggctgtcatactcaggtcgaatttttctctctatcctaaaataagtgttgcgcgaga

SEQ ID NO: 61106 - DNA, 3378 bp, Zea Mays
ttctttttaaccttccgctttcactgagagataatcaattatatagtaataattataatactctgatgtattatttattataatagttatagtggtctgtctgctccttctccttgtgagttggtgtgtctccctataaaaataaaccggaaaaaactcaccaaactgaaactagtaggggactaggtctagagaaaggagagacacaatcggccggaagagcgattgatttctcccgccgccgccgccccgtctcttcctcgtccgccgctgcgcccgccgcgcacaagaggagggtttcagtgttagggttctacccccgcctgcgctggtatcagcagccaaatgagaatgcttgctgtgtttgattgatcgtcagatccttacttacaacccaccaggtcttgtggtacctgccacctcaaagtcacgacagatggccgcaaataacaacccttggagggtccctatgccaccgctgctcaatgttcgagctggttttggcgatacaagtctcttctcaacctcactgcctgttcttcctcatgaaaagtgatgacgcttcggccaaaatgaaagtgcttgctgatgatcctgatgagaaagactacaagttcgattttgatcttcgacagatagatgacttgttgcctgatgaagatgagtttttcgcggggatcactgatgaaactgagcccatcgggcaaacaaataccacagaggaattggaggagtttgatgtctttggcaatggagggggcatggagctggatattgaccctgtggagaccatcacagttagttttgcaaattcaagtattgtggacggggctagaggcaatggcatcaacccttttggtgtcccaaacactgtaggaactgtggctggggagcacccatttggagagcacccttccaggaccttgttcgtaaggaacatcaatagcaacgtcgaggactctgaactgcgatctttgtttgagcaatatggggatatccgtaccctttacactgcaacaaagcataggggctttgtaatgatatcttatttcgacatcagagctgcacggaatgcaatgcgcgcattgcagaacaaacctctgaggaggagaaagctggacattcatttttccatcccaaaggagaatccatctgacaaagatttaaaccagggaactcttgttatttttaacttggatccatcggtttctaatgaagaggttcgccagatttttggggcatatggggaagtaaaggagataagagagacaccaaacaagaaacatcataagtttatagagttctatgatgtaagagcagcagaggctgctcttcggtcactgaataaaagtgagatagctggaaaacgaatcaagttggaaccaagtcgtcctggtggaacacgcagaaacttgatgcagcagctcggtcacgatttggaccaagaggagcccagaagctacagacatcctcatgttggttcacctattgctaactctcctccaggggcatgggctcactatagtagtccaacagataacaatatgctgcaagctttcactaggtctccaactggaaatggaatgagtcctatcggaatgccttcactgatctcaaatgctccaaagattgctccaattggcaaggatagcaatcggtctaaatatgatcaagtcttctcaaatggtaaccagtcactgggagctgcatttcagcactcccactcatatcaagatcacaacagtgaacagatgagttctagtcctgggactttatcagggccccagtttctctggggaagtccaaagccatattcagaacattcaaaatcccctatttggcgtccaccagcaaacggacctgcattgtcatccagtagtcgcactcagggccaaggattcttgtacagtagccgtcaggcttcattatttggttctttagatcagcaccatcatcatgttggctctgccccttcaggtgctccattcgagaaccattttggctttttatcagaatcgccagagacatcttatatgaagcaactcaagtttgggaacatgggtaatgttggtattggtagaaacgggggaggcctcatgctgggcatggctagtcatgcttctgtgaatcctggttcttctctgattggaagtctgacagataacgtatcttctagcttcagaccgatattgtcaccgagattgggacaggcattttacactaatcctccataccatgggcctggtacattcggacttgacagctccattgaccatgcccgtaaccgcagagttgacagcagtgtgttgcaagctgatagcaagaggcagtatctgcttgacttggagaagattcgcagaggtgatgatactcggacaacattgatgattaagaacatcccgaacaaatatacatctaagatgctcctggctgcaattgatgagcttcacaaaggaatttatgacttcttctacctgccaattgatttcaagaacaaatgcaatgttggatatgcgttcattaacatggtatcaccggtgcacattatatccttctaccaggcttttaatggtaagaaatgggagaagttcaacagtgagaaggtagcatctttggcttatgctagaattcaaggacggtctgcactgatatcacattttcaaaattcaagtttgatgaatgaggataagaggtgccgccccattctttttaatcccaatggtcaggactctgtgaatcaggaagcattcccaattaatggtatatgcatccacatgcccctggaagatgattgccttgacaatgaagaaaacaagagtctgaacgagaagacaggagagaactctactgatatcgctgggagtttgtgactgtcggccatgatagcaaacatgatcagaatggccacatatataaatctaactgtctagagagtatccacctccaaattgtataaaaactgatgaaggttgatggttaggcgttgaattttgtggtctttcggttttagttgcaacagatgtggcccctggaagcggaagcgaaagcgagggagcttcgaaccggagctgggcgcttgcttgtcgaatccccctcactctttacagatgtggggatgagcaaccgctgctgctcatagttgtgcttgcttttggttgcttgctgtaaaaaggtgaactgaactgaagaaatttagccaaactgtacagtttagaacttttgtgcatattttgcattctagtatgttaatgtgtatgggtggagcagtagttcagagatcctttttttctgcgtgagatctttttcttaatgcaatatcggggctgtcatactcaggtcgaatttttctctctatcctaaaataagtgttgcgcgaga

SEQ ID NO: 61107 - DNA, 2711 bp, Zea Mays
gagagagagggtcctgcgttcccttcttctgctgcggcggcggaggctctttcagttccatccatcttctccctcgtggctctccttcctctctcccgtagtcccgccgaccccccgcgccggccaaggaaatcaagcgaactctaatggctaaagaacaggatggatcccccaaggtgcgccacccagaattccaaaggatgcgcgtaactctcaccataggtgtcattggcctctgtgtcacagcatacattcttggtgcttggcaaggtacctcgaacggcattagttcccccttaataagtaccagaacccagtgcaaagatcccgtgcgatcatctggtgctcgcctggatttccaagcccaccaccaggtgggcttcaatgaatcggcgcttgctgtggagaaattcccaccttgccagctcaagtacagtgagtataccccttgccaagatccaaggaaagctaggaagttcccaaagaaaatgatgcagtacagggagcggcactgcccaaagaaagaagacatgctccggtgcttgatccctgcgcctccaaactatagcaaccccttccagtggccaaaaagtcgcgactatgcttggttcaataacattcctcatcgggagctcagtattgagaaggctgttcagaactggattcatgtcgagggagacctgcttagattccctggaggtggcactatgttcccacatggtgccgatgcttatattgatgacataaatgcccttgtaccattaaatgaaggcaacatccgaactgcgcttgatactggatgtggagttgcaagctggggtgcttatcttatgaataggaacatcatcaccatgtcttttgcgccaagggattcacatgaggcacaggtacagtttgcattagagcggggggtaccagccatgattggagtgatggggactgagagaatcccatatccggctagagcatttgacatggcacactgctcgagatgtttgatcccatggaataagcttgatggtgtctatctaattgaagtagacagggttcttaggcctgggggctactggatcctctctgggcctccaatccattggaagaggcactaccagggctgggagaggacagaaggagacctgaagcaagagcaagatgagattgaggacttggcgaaacggctctgctggaagaaggtcgtagagaaaggtgatcttgctatatggcagaaatctatcaaccacgtagaatgtgttgacagtaggaaggtttatgatgctccgcagatttgtaagagcaatgatgtggattctgcttggtacaagaaaatggacacttgcatatctcctctcccagatgtgaagagtgaagatgaagttgctggcggagtccttgagacatggcccaaaagagcatttgctgtccccccaagagtaatccgcggttcagttccaggcctcacccctgagaagttccaagaggataacaaggtgtggtcagagagagtggatcactacaagaaattgattccaccactgggcaaaagacgatacaggaatgtgatggacatgaatgcggggataggtggctttgcagctgcattgatgaagtaccctctttgggtgatgaatgttgtgccttcaggcttggcccatgacaccctgggtgttatttacgaacgagggtttattggcacgtaccatgattggtgtgaggctttctcaacgtacccgaggacctacgacctcatccatgctgataaagttttcagcagttaccaggacaggtgtgacataacgtacatcctactggagatggaccgaattctaaggcctgaggggactgtgatcatcagggacaacgtagaggtgttggtgaaggtacaagctatcactggaggcatgaggtggaagagccaaatcatggaccatgagtccggtccattcaacactgacaagatcctagtggctgtcaagacttactggaccgggaagctcgtgcaaaaacaataatcgtcgccttgttactgtttttcgtctgcgaaaatgtaggcatgacttgcctgtcagttctgtcttcattgccatttttttatcctaacttcaggatatctgtatataggaggcatgtgaaccatgtagctggaattggtatcaaacatcattagccacgtagcgtatgtgacacattgcaatggtgtataagatgttcactcatatatttggtgtgatattgcaatctaataacatgatgcttggtgtgaaaaaaggagattgtaattgacaacatgttcctgtcaaaaatacgatgacaaggttgtggtacagacgaattctgaagattatactatggccaagtgctgtgaaaaaagagagacgaattctgagagccaagggctgtgataaaaactgtgtgaattgcagatagtgtctccatgcagatgtgtgctgagataatccatttaaccatcaaaactactaaatgagggctccagtctcagtaggaagcccaggcggctgcttcagggaatgagagacctggaggagcaggagctgatgcaccaccctgatcaatgataccgaagtgtgctaggaccttcgcgaggaggacgcctgcgacgtacgacagtccggagctgctgaatccaatggacaggtagtagaggagggttgtgaggtatgtcctatgcctcttaacatgtgccttcccgattg

SEQ ID NO: 61108 - DNA, 3226 bp, Zea Mays
cgggccggaccggcccaatcgaagttttacgagccaaaacgtgaaagtgtcgtccagccagccacgtggctccggcagggcagagcgtttatccaactcggctctcagcgactgcccaccaccaccactgaggattcctcttccggcggcggcggcggcggcagcgatgctcctcctgcgcgccaacgcgctcgccgccgtaccggtgtccttctccataacgccggcggcctcctatagctgcttcccctggccgtcttcatccaccactgccgcgagctgctccgtcggctcctctgccaggctcgacgccgccgtgcagtacgacccgctccgccccggctccgatgcgtgggcccatcccgacggcatggtcaccgcggagggtgacgaggagaaacagcgctatgacacggagggggagtccaacgactgggaaggggaagggccccaaggatcatcagaccccgagggcatcaacgtgccgcgccagcgctacatcgccgtccccaaggaggccctcctcgatgctgtcctctcgcagttcgcgtccgacgacgacgacgccgcggacttcaagcgctgcgccagatgcttggacgccatccttcacgccgagcacaagaggatgctcgaggagatgcgcacctcctacatgctcacgcaacgccaccgggacgaggaagaggagcaggatgacactgacaccgcctcgggctcggactacgtcaacggcaaagccggctccggatttttcggcatcacccaactggatggcacgttgttccttactagaagcgtggacttgagaactctgctcggattgaccccagaccccgattcccagaccagagttgcttttgcaactcaatttcagcgctcattcatgaccctactacgcaatgctcagtttgaagaactctccgcacaagatctgctcttgacatatgccctaaataacgattacctgctcacgctgcccatttatgtcgactggaagaaggctgctcaatctaatgcaataatattcaggcgtggatacgcgactgagaggcagaaaggcctcctgttggttgagaaacttgattacttgcaatcaaaactcttgcagaatgtctttttcagcctctccaaacccttgaaaaagccagggaaatggcttaatgagttcctggcaggctttgaaaagatcaacagataaccagggatttcagatctggatagacaaactgagactatggcttaaagagcaaacttatgcagataattcactgctgttgatagaaagctcttcatgggacaagcttagttctgatcagttacctgatgcagatgttcctatttggatcgctgcacaaagggcagtctctcgttatgaaggaattttgtcacctgttggtcctcgtggaagactgttaagaagattgcttaaatggactggactaataccttctctgccagaagcaacgataaaatccaacaatgaaactaaacatcttgaaggacatgtgaggccaaactttctaccaagaattacccttgctaatatatgggaacctgcaagcagagaatcttgcaataacaatatctgggagatggtgaaagcttcttttcgtattctgtttgggaggtctactcttcagcattccaggagttaatactactttacactgatgaagttgttccaagtgaaacgaaggacgagatggttccgctgcaactgaaaatttatgagaggattccgatcccagatttgccagtagttttcccccacaagaaattgtccttccgcatcctagatacagtaaggctagatattgctactgtaataggtcagctttttcttcttgatatagttgctggtactgcactcgtcatacttgttttccgtgtagcactgggctacaaacagacccgggataggtaccagcttctggtgaataaaaccctctatgagaagacattggcaagtgggttcggctcggtttacttccttctcgatgcttctgagcaacagcagtacaaagaagcacttttggcatatgccatgttgctctgcagaaagaagtatgaggtatggggcatgttcacctttgatagataccgtagctgccacattactgactactccactacctctgtggcccttttgtaggtctcatctcgtgcaagcataagagatgcatgcgagcagtttatgcacgagaaattcgaggcaaagattgagatgccgatcgacaaggcaatggagacactgctgcggttggggctggtgattgagcttcccactgatggtgggtcgagcgtgattggtctcccatgctcggaggcatacaggatcctgaaaagccgttgggacggcttgctggaacaagatacagaacaagagctccagagcatagggcaacgtctaggcagtgttagggtcttctaccgggtctggacattggtccgaacgaacagcttgaacatcgagtcatcggttaccgtcgagcaagagaggatcgcggtcaagtcagtcggggtcaagaaagagtttgatggtgacagggtttgtatgtttgcctttttggtagctagcaagactcatctcggcgtggtccatacagaggatgtgtttcaagaagtgaaaccgatccacagctctgcgcttgacgggcacaatgtctgtgttttcgcatacggccagaccgggacagggaagacctacacaatggataaaaaccaaccttttgatatcggttcatatggggagaaaatccttgacacactttcatcaagaactaacaatgcaagaattgcatcttttagtgagattgttagtggcaaaccaaagtatgagattgccagaacgttctctgccattctccagctggtgaccggcagaagtgttgatctggagaaaggacaagccacgaatgagttggtgtcttacacaacagagaatccattccatgtaaggatcatagggtcccaaccggaggccagaagtgggggcacactttgcccaaaagatggtcaagtccccactacaaaatgcaggaaagacaatgagtcctccgtggcacaacatgagtgccccaagaagtcgttgcgtaaaaatggcaagattccagtcaaggcatcgacaaggttgacaaaccgagcttgttggtcggccatgcaatcttataacctcttgaagtggcacaagaaagctcatatagctacagttaaagcacggtaa

SEQ ID NO: 61109 - DNA, 2666 bp, Zea Mays
cgggccggaccggcccaatcgaagttttacgagccaaaacgtgaaagtgtcgtccagccagccacgtggctccggcagggcagagcgtttatccaactcggctctcagcgactgcccaccaccaccactgaggattcctcttccggcggcggcggcggcggcagcgatgctcctcctgcgcgccaacgcgctcgccgccgtaccggtgtccttctccataacgccggcggcctcctatagctgcttcccctggccgtcttcatccaccactgccgcgagctgctccgtcggctcctctgccaggctcgacgccgccgtgcagtacgacccgctccgccccggctccgatgcgtgggcccatcccgacggcatggtcaccgcggagggtgacgaggagaaacagcgctatgacacggagggggagtccaacgactgggaaggggaagggccccaaggatcatcagaccccgagggcatcaacgtgccgcgccagcgctacatcgccgtccccaaggaggccctcctcgatgctgtcctctcgcagttcgcgtccgacgacgacgacgccgcggacttcaagcgctgcgccagatgcttggacgccatccttcacgccgagcacaagaggatgctcgaggagatgcgcacctcctacatgctcacgcaacgccaccgggacgaggaagaggagcaggatgacactgacaccgcctcgggctcggactacgtcaacggcaaagccggctccggatttttcggcatcacccaactggatggcacgttgttccttactagaagcgtggacttgagaactctgctcggattgaccccagaccccgattcccagaccagagttgcttttgcaactcaatttcagcgctcattcatgaccctactacgcaatgctcagtttgaagaactctccgcacaagatctgctcttgacatatgccctaaataacgattacctgctcacgctgcccatttatgtcgactggaagaaggctgctcaatctaatgcaataatattcaggcgtggatacgcgactgagaggcagaaaggcctcctgttggttgagaaacttgattacttgcaatcaaaactcttgcagaatgtctttttcagcctctccaaacccttgaaaaagccagggaaatggcttaatgaggctttgaaaagatcaacagataaccagggatttcagatctggatagacaaactgagactatggcttaaagagcaaacttatgcagataattcactgctgttgatagaaagctcttcatgggacaagcttagttctgatcagttacctgatgcagatgttcctatttggatcgctgcacaaagggcagtctctcgttatgaaggaattttgtcacctgttggtcctcgtggaagactgttaagaagattgcttaaatggactggactaataccttctctgccagaagcaacgataaaatccaacaatgaaactaaacatcttgaaggacatgtgaggccaaactttctaccaagaattacccttgctaatatatgggaacctgcaagcagagaatcttgcaataacaatatctgggagatggtgaaagcttcttttcgtattctgtttgggaggtctactcttcaggaaccagcattccaggagttaatactactttacactgatgaagttgttccaagtgaaacgaaggacgagatggttccgctgcaactgaaaatttatgagaggattccgatcccagatttgccagtagttttcccccacaagaaattgtccttccgcatcctagatacagtaaggctagatattgctactgtaataggtctattggcatatgtggtgaactacaaatttgagagtttagcctcatctccgtcagctttttcttcttgatatagttgctggtactgcactcgtcatacttgttttccgtgtagcactgggctacaaacagacccgggataggtaccagcttctggtgaataaaaccctctatgagaagacattggcaagtgggttcggctcggtttacttccttctcgatgcttctgagcaacagcagtacaaagaagcacttttggcatatgccatgttgctctgcagaaagaagtatgaggtctcatctcgtgcaagcataagagatgcatgcgagcagtttatgcacgagaaattcgaggcaaagattgagatgccgatcgacaaggcaatggagacactgctgcggttggggctggtgattgagcttcccactgatggtgggtcgagcgtgattggtctcccatgctcggaggcatacaggatcctgaaaagccgttgggacggcttgctggaacaagatacagaacaaggctgattagaacgagacatgtacgttggtggcttggagtggagtgggatgggatgccgtgctggtacatactcgacgcgtcggcaaagctcactcttgtttgtatgtatacgtaccagttgttgcagcaagtgtatatgtgctagctacgtgcatgtataatcgtgatctagtttgttgtacacaaacgattgcagtgtatgtatatgggagcacatgtttttttcggaagactagccatgtgtctgtaagtttttctatttgtaagttggtttccatttataaatatagagcataaacactgttctgtta

SEQ ID NO: 61110 - DNA, 2676 bp, Zea Mays
cgggccggaccggcccaatcgaagttttacgagccaaaacgtgaaagtgtcgtccagccagccacgtggctccggcagggcagagcgtttatccaactcggctctcagcgactgcccaccaccaccactgaggattcctcttccggcggcggcggcggcggcagcgatgctcctcctgcgcgccaacgcgctcgccgccgtaccggtgtccttctccataacgccggcggcctcctatagctgcttcccctggccgtcttcatccaccactgccgcgagctgctccgtcggctcctctgccaggctcgacgccgccgtgcagtacgacccgctccgccccggctccgatgcgtgggcccatcccgacggcatggtcaccgcggagggtgacgaggagaaacagcgctatgacacggagggggagtccaacgactgggaaggggaagggccccaaggatcatcagaccccgagggcatcaacgtgccgcgccagcgctacatcgccgtccccaaggaggccctcctcgatgctgtcctctcgcagttcgcgtccgacgacgacgacgccgcggacttcaagcgctgcgccagatgcttggacgccatccttcacgccgagcacaagaggatgctcgaggagatgcgcacctcctacatgctcacgcaacgccaccgggacgaggaagaggagcaggatgacactgacaccgcctcgggctcggactacgtcaacggcaaagccggctccggatttttcggcatcacccaactggatggcacgttgttccttactagaagcgtggacttgagaactctgctcggattgaccccagaccccgattcccagaccagagttgcttttgcaactcaatttcagcgctcattcatgaccctactacgcaatgctcagtttgaagaactctccgcacaagatctgctcttgacatatgccctaaataacgattacctgctcacgctgcccatttatgtcgactggaagaaggctgctcaatctaatgcaataatattcaggcgtggatacgcgactgagaggcagaaaggcctcctgttggttgagaaacttgattacttgcaatcaaaactcttgcagaatgtctttttcagcctctccaaacccttgaaaaagccagggaaatggcttaatgagttcctggcaggctttgaaaagatcaacagataaccagggatttcagatctggatagacaaactgagactatggcttaaagagcaaacttatgcagataattcactgctgttgatagaaagctcttcatgggacaagcttagttctgatcagttacctgatgcagatgttcctatttggatcgctgcacaaagggcagtctctcgttatgaaggaattttgtcacctgttggtcctcgtggaagactgttaagaagattgcttaaatggactggactaataccttctctgccagaagcaacgataaaatccaacaatgaaactaaacatcttgaaggacatgtgaggccaaactttctaccaagaattacccttgctaatatatgggaacctgcaagcagagaatcttgcaataacaatatctgggagatggtgaaagcttcttttcgtattctgtttgggaggtctactcttcaggaaccagcattccaggagttaatactactttacactgatgaagttgttccaagtgaaacgaaggacgagatggttccgctgcaactgaaaatttatgagaggattccgatcccagatttgccagtagttttcccccacaagaaattgtccttccgcatcctagatacagtaaggctagatattgctactgtaataggtctattggcatatgtggtgaactacaaatttgagagtttagcctcatctccgtcagctttttcttcttgatatagttgctggtactgcactcgtcatacttgttttccgtgtagcactgggctacaaacagacccgggataggtaccagcttctggtgaataaaaccctctatgagaagacattggcaagtgggttcggctcggtttacttccttctcgatgcttctgagcaacagcagtacaaagaagcacttttggcatatgccatgttgctctgcagaaagaagtatgaggtctcatctcgtgcaagcataagagatgcatgcgagcagtttatgcacgagaaattcgaggcaaagattgagatgccgatcgacaaggcaatggagacactgctgcggttggggctggtgattgagcttcccactgatggtgggtcgagcgtgattggtctcccatgctcggaggcatacaggatcctgaaaagccgttgggacggcttgctggaacaagatacagaacaaggctgattagaacgagacatgtacgttggtggcttggagtggagtgggatgggatgccgtgctggtacatactcgacgcgtcggcaaagctcactcttgtttgtatgtatacgtaccagttgttgcagcaagtgtatatgtgctagctacgtgcatgtataatcgtgatctagtttgttgtacacaaacgattgcagtgtatgtatatgggagcacatgtttttttcggaagactagccatgtgtctgtaagtttttctatttgtaagttggtttccatttataaatatagagcataaacactgttctgtta

SEQ ID NO: 61111 - DNA, 2614 bp, Zea Mays
cgggccggaccggcccaatcgaagttttacgagccaaaacgtgaaagtgtcgtccagccagccacgtggctccggcagggcagagcgtttatccaactcggctctcagcgactgcccaccaccaccactgaggattcctcttccggcggcggcggcggcggcagcgatgctcctcctgcgcgccaacgcgctcgccgccgtaccggtgtccttctccataacgccggcggcctcctatagctgcttcccctggccgtcttcatccaccactgccgcgagctgctccgtcggctcctctgccaggctcgacgccgccgtgcagtacgacccgctccgccccggctccgatgcgtgggcccatcccgacggcatggtcaccgcggagggtgacgaggagaaacagcgctatgacacggagggggagtccaacgactgggaaggggaagggccccaaggatcatcagaccccgagggcatcaacgtgccgcgccagcgctacatcgccgtccccaaggaggccctcctcgatgctgtcctctcgcagttcgcgtccgacgacgacgacgccgcggacttcaagcgctgcgccagatgcttggacgccatccttcacgccgagcacaagaggatgctcgaggagatgcgcacctcctacatgctcacgcaacgccaccgggacgaggaagaggagcaggatgacactgacaccgcctcgggctcggactacgtcaacggcaaagccggctccggatttttcggcatcacccaactggatggcacgttgttccttactagaagcgtggacttgagaactctgctcggattgaccccagaccccgattcccagaccagagttgcttttgcaactcaatttcagcgctcattcatgaccctactacgcaatgctcagtttgaagaactctccgcacaagatctgctcttgacatatgccctaaataacgattacctgctcacgctgcccatttatgtcgactggaagaaggctgctcaatctaatgcaataatattcaggcgtggatacgcgactgagaggcagaaaggcctcctgttggttgagaaacttgattacttgcaatcaaaactcttgcagaatgtctttttcagcctctccaaacccttgaaaaagccagggaaatggcttaatgaggctttgaaaagatcaacagataaccagggatttcagatctggatagacaaactgagactatggcttaaagagcaaacttatgcagataattcactgctgttgatagaaagctcttcatgggacaagcttagttctgatcagttacctgatgcagatgttcctatttggatcgctgcacaaagggcagtctctcgttatgaaggaattttgtcacctgttggtcctcgtggaagactgttaagaagattgcttaaatggactggactaataccttctctgccagaagcaacgataaaatccaacaatgaaactaaacatcttgaaggacatgtgaggccaaactttctaccaagaattacccttgctaatatatgggaacctgcaagcagagaatcttgcaataacaatatctgggagatggtgaaagcttcttttcgtattctgtttgggaggtctactcttcaggaaccagcattccaggagttaatactactttacactgatgaagttgttccaagtgaaacgaaggacgagatggttccgctgcaactgaaaatttatgagaggattccgatcccagatttgccagtagttttcccccacaagaaattgtccttccgcatcctagatacagtaaggctagatattgctactgtaataggtcagctttttcttcttgatatagttgctggtactgcactcgtcatacttgttttccgtgtagcactgggctacaaacagacccgggataggtaccagcttctggtgaataaaaccctctatgagaagacattggcaagtgggttcggctcggtttacttccttctcgatgcttctgagcaacagcagtacaaagaagcacttttggcatatgccatgttgctctgcagaaagaagtatgaggtctcatctcgtgcaagcataagagatgcatgcgagcagtttatgcacgagaaattcgaggcaaagattgagatgccgatcgacaaggcaatggagacactgctgcggttggggctggtgattgagcttcccactgatggtgggtcgagcgtgattggtctcccatgctcggaggcatacaggatcctgaaaagccgttgggacggcttgctggaacaagatacagaacaaggctgattagaacgagacatgtacgttggtggcttggagtggagtgggatgggatgccgtgctggtacatactcgacgcgtcggcaaagctcactcttgtttgtatgtatacgtaccagttgttgcagcaagtgtatatgtgctagctacgtgcatgtataatcgtgatctagtttgttgtacacaaacgattgcagtgtatgtatatgggagcacatgtttttttcggaagactagccatgtgtctgtaagtttttctatttgtaagttggtttccatttataaatatagagcataaacactgttctgtta

SEQ ID NO: 61112 - DNA, 2624 bp, Zea Mays
cgggccggaccggcccaatcgaagttttacgagccaaaacgtgaaagtgtcgtccagccagccacgtggctccggcagggcagagcgtttatccaactcggctctcagcgactgcccaccaccaccactgaggattcctcttccggcggcggcggcggcggcagcgatgctcctcctgcgcgccaacgcgctcgccgccgtaccggtgtccttctccataacgccggcggcctcctatagctgcttcccctggccgtcttcatccaccactgccgcgagctgctccgtcggctcctctgccaggctcgacgccgccgtgcagtacgacccgctccgccccggctccgatgcgtgggcccatcccgacggcatggtcaccgcggagggtgacgaggagaaacagcgctatgacacggagggggagtccaacgactgggaaggggaagggccccaaggatcatcagaccccgagggcatcaacgtgccgcgccagcgctacatcgccgtccccaaggaggccctcctcgatgctgtcctctcgcagttcgcgtccgacgacgacgacgccgcggacttcaagcgctgcgccagatgcttggacgccatccttcacgccgagcacaagaggatgctcgaggagatgcgcacctcctacatgctcacgcaacgccaccgggacgaggaagaggagcaggatgacactgacaccgcctcgggctcggactacgtcaacggcaaagccggctccggatttttcggcatcacccaactggatggcacgttgttccttactagaagcgtggacttgagaactctgctcggattgaccccagaccccgattcccagaccagagttgcttttgcaactcaatttcagcgctcattcatgaccctactacgcaatgctcagtttgaagaactctccgcacaagatctgctcttgacatatgccctaaataacgattacctgctcacgctgcccatttatgtcgactggaagaaggctgctcaatctaatgcaataatattcaggcgtggatacgcgactgagaggcagaaaggcctcctgttggttgagaaacttgattacttgcaatcaaaactcttgcagaatgtctttttcagcctctccaaacccttgaaaaagccagggaaatggcttaatgagttcctggcaggctttgaaaagatcaacagataaccagggatttcagatctggatagacaaactgagactatggcttaaagagcaaacttatgcagataattcactgctgttgatagaaagctcttcatgggacaagcttagttctgatcagttacctgatgcagatgttcctatttggatcgctgcacaaagggcagtctctcgttatgaaggaattttgtcacctgttggtcctcgtggaagactgttaagaagattgcttaaatggactggactaataccttctctgccagaagcaacgataaaatccaacaatgaaactaaacatcttgaaggacatgtgaggccaaactttctaccaagaattacccttgctaatatatgggaacctgcaagcagagaatcttgcaataacaatatctgggagatggtgaaagcttcttttcgtattctgtttgggaggtctactcttcaggaaccagcattccaggagttaatactactttacactgatgaagttgttccaagtgaaacgaaggacgagatggttccgctgcaactgaaaatttatgagaggattccgatcccagatttgccagtagttttcccccacaagaaattgtccttccgcatcctagatacagtaaggctagatattgctactgtaataggtcagctttttcttcttgatatagttgctggtactgcactcgtcatacttgttttccgtgtagcactgggctacaaacagacccgggataggtaccagcttctggtgaataaaaccctctatgagaagacattggcaagtgggttcggctcggtttacttccttctcgatgcttctgagcaacagcagtacaaagaagcacttttggcatatgccatgttgctctgcagaaagaagtatgaggtctcatctcgtgcaagcataagagatgcatgcgagcagtttatgcacgagaaattcgaggcaaagattgagatgccgatcgacaaggcaatggagacactgctgcggttggggctggtgattgagcttcccactgatggtgggtcgagcgtgattggtctcccatgctcggaggcatacaggatcctgaaaagccgttgggacggcttgctggaacaagatacagaacaaggctgattagaacgagacatgtacgttggtggcttggagtggagtgggatgggatgccgtgctggtacatactcgacgcgtcggcaaagctcactcttgtttgtatgtatacgtaccagttgttgcagcaagtgtatatgtgctagctacgtgcatgtataatcgtgatctagtttgttgtacacaaacgattgcagtgtatgtatatgggagcacatgtttttttcggaagactagccatgtgtctgtaagtttttctatttgtaagttggtttccatttataaatatagagcataaacactgttctgtta

SEQ ID NO: 61113 - DNA, 2486 bp, Zea Mays
cgggccggaccggcccaatcgaagttttacgagccaaaacgtgaaagtgtcgtccagccagccacgtggctccggcagggcagagcgtttatccaactcggctctcagcgactgcccaccaccaccactgaggattcctcttccggcggcggcggcggcggcagcgatgctcctcctgcgcgccaacgcgctcgccgccgtaccggtgtccttctccataacgccggcggcctcctatagctgcttcccctggccgtcttcatccaccactgccgcgagctgctccgtcggctcctctgccaggctcgacgccgccgtgcagtacgacccgctccgccccggctccgatgcgtgggcccatcccgacggcatggtcaccgcggagggtgacgaggagaaacagcgctatgacacggagggggagtccaacgactgggaaggggaagggccccaaggatcatcagaccccgagggcatcaacgtgccgcgccagcgctacatcgccgtccccaaggaggccctcctcgatgctgtcctctcgcagttcgcgtccgacgacgacgacgccgcggacttcaagcgctgcgccagatgcttggacgccatccttcacgccgagcacaagaggatgctcgaggagatgcgcacctcctacatgctcacgcaacgccaccgggacgaggaagaggagcaggatgacactgacaccgcctcgggctcggactacgtcaacggcaaagccggctccggatttttcggcatcacccaactggatggcacgttgttccttactagaagcgtggacttgagaactctgctcggattgaccccagaccccgattcccagaccaggcgtggatacgcgactgagaggcagaaaggcctcctgttggttgagaaacttgattacttgcaatcaaaactcttgcagaatgtctttttcagcctctccaaacccttgaaaaagccagggaaatggcttaatgaggctttgaaaagatcaacagataaccagggatttcagatctggatagacaaactgagactatggcttaaagagcaaacttatgcagataattcactgctgttgatagaaagctcttcatgggacaagcttagttctgatcagttacctgatgcagatgttcctatttggatcgctgcacaaagggcagtctctcgttatgaaggaattttgtcacctgttggtcctcgtggaagactgttaagaagattgcttaaatggactggactaataccttctctgccagaagcaacgataaaatccaacaatgaaactaaacatcttgaaggacatgtgaggccaaactttctaccaagaattacccttgctaatatatgggaacctgcaagcagagaatcttgcaataacaatatctgggagatggtgaaagcttcttttcgtattctgtttgggaggtctactcttcaggaaccagcattccaggagttaatactactttacactgatgaagttgttccaagtgaaacgaaggacgagatggttccgctgcaactgaaaatttatgagaggattccgatcccagatttgccagtagttttcccccacaagaaattgtccttccgcatcctagatacagtaaggctagatattgctactgtaataggtctattggcatatgtggtgaactacaaatttgagagtttagcctcatctccgtcagctttttcttcttgatatagttgctggtactgcactcgtcatacttgttttccgtgtagcactgggctacaaacagacccgggataggtaccagcttctggtgaataaaaccctctatgagaagacattggcaagtgggttcggctcggtttacttccttctcgatgcttctgagcaacagcagtacaaagaagcacttttggcatatgccatgttgctctgcagaaagaagtatgaggtctcatctcgtgcaagcataagagatgcatgcgagcagtttatgcacgagaaattcgaggcaaagattgagatgccgatcgacaaggcaatggagacactgctgcggttggggctggtgattgagcttcccactgatggtgggtcgagcgtgattggtctcccatgctcggaggcatacaggatcctgaaaagccgttgggacggcttgctggaacaagatacagaacaaggctgattagaacgagacatgtacgttggtggcttggagtggagtgggatgggatgccgtgctggtacatactcgacgcgtcggcaaagctcactcttgtttgtatgtatacgtaccagttgttgcagcaagtgtatatgtgctagctacgtgcatgtataatcgtgatctagtttgttgtacacaaacgattgcagtgtatgtatatgggagcacatgtttttttcggaagactagccatgtgtctgtaagtttttctatttgtaagttggtttccatttataaatatagagcataaacactgttctgtta

SEQ ID NO: 61114 - DNA, 2614 bp, Zea Mays
cgggccggaccggcccaatcgaagttttacgagccaaaacgtgaaagtgtcgtccagccagccacgtggctccggcagggcagagcgtttatccaactcggctctcagcgactgcccaccaccaccactgaggattcctcttccggcggcggcggcggcggcagcgatgctcctcctgcgcgccaacgcgctcgccgccgtaccggtgtccttctccataacgccggcggcctcctatagctgcttcccctggccgtcttcatccaccactgccgcgagctgctccgtcggctcctctgccaggctcgacgccgccgtgcagtacgacccgctccgccccggctccgatgcgtgggcccatcccgacggcatggtcaccgcggagggtgacgaggagaaacagcgctatgacacggagggggagtccaacgactgggaaggggaagggccccaaggatcatcagaccccgagggcatcaacgtgccgcgccagcgctacatcgccgtccccaaggaggccctcctcgatgctgtcctctcgcagttcgcgtccgacgacgacgacgccgcggacttcaagcgctgcgccagatgcttggacgccatccttcacgccgagcacaagaggatgctcgaggagatgcgcacctcctacatgctcacgcaacgccaccgggacgaggaagaggagcaggatgacactgacaccgcctcgggctcggactacgtcaacggcaaagccggctccggatttttcggcatcacccaactggatggcacgttgttccttactagaagcgtggacttgagaactctgctcggattgaccccagaccccgattcccagaccagagttgcttttgcaactcaatttcagcgctcattcatgaccctactacgcaatgctcagtttgaagaactctccgcacaagatctgctcttgacatatgccctaaataacgattacctgctcacgctgcccatttatgtcgactggaagaaggctgctcaatctaatgcaataatattcaggcgtggatacgcgactgagaggcagaaaggcctcctgttggttgagaaacttgattacttgcaatcaaaactcttgcagaatgtctttttcagcctctccaaacccttgaaaaagccagggaaatggcttaatgaggctttgaaaagatcaacagataaccagggatttcagatctggatagacaaactgagactatggcttaaagagcaaacttatgcagataattcactgctgttgatagaaagctcttcatgggacaagcttagttctgatcagttacctgatgcagatgttcctatttggatcgctgcacaaagggcagtctctcgttatgaaggaattttgtcacctgttggtcctcgtggaagactgttaagaagattgcttaaatggactggactaataccttctctgccagaagcaacgataaaatccaacaatgaaactaaacatcttgaaggacatgtgaggccaaactttctaccaagaattacccttgctaatatatgggaacctgcaagcagagaatcttgcaataacaatatctgggagatggtgaaagcttcttttcgtattctgtttgggaggtctactcttcagcattccaggagttaatactactttacactgatgaagttgttccaagtgaaacgaaggacgagatggttccgctgcaactgaaaatttatgagaggattccgatcccagatttgccagtaaggctagatattgctactgtaataggtctattggcatatgtggtgaactacaaatttgagagtttagcctcatctccgtcagctttttcttcttgatatagttgctggtactgcactcgtcatacttgttttccgtgtagcactgggctacaaacagacccgggataggtaccagcttctggtgaataaaaccctctatgagaagacattggcaagtgggttcggctcggtttacttccttctcgatgcttctgagcaacagcagtacaaagaagcacttttggcatatgccatgttgctctgcagaaagaagtatgaggtctcatctcgtgcaagcataagagatgcatgcgagcagtttatgcacgagaaattcgaggcaaagattgagatgccgatcgacaaggcaatggagacactgctgcggttggggctggtgattgagcttcccactgatggtgggtcgagcgtgattggtctcccatgctcggaggcatacaggatcctgaaaagccgttgggacggcttgctggaacaagatacagaacaaggctgattagaacgagacatgtacgttggtggcttggagtggagtgggatgggatgccgtgctggtacatactcgacgcgtcggcaaagctcactcttgtttgtatgtatacgtaccagttgttgcagcaagtgtatatgtgctagctacgtgcatgtataatcgtgatctagtttgttgtacacaaacgattgcagtgtatgtatatgggagcacatgtttttttcggaagactagccatgtgtctgtaagtttttctatttgtaagttggtttccatttataaatatagagcataaacactgttctgtta

SEQ ID NO: 61115 - DNA, 2483 bp, Zea Mays
cgggccggaccggcccaatcgaagttttacgagccaaaacgtgaaagtgtcgtccagccagccacgtggctccggcagggcagagcgtttatccaactcggctctcagcgactgcccaccaccaccactgaggattcctcttccggcggcggcggcggcggcagcgatgctcctcctgcgcgccaacgcgctcgccgccgtaccggtgtccttctccataacgccggcggcctcctatagctgcttcccctggccgtcttcatccaccactgccgcgagctgctccgtcggctcctctgccaggctcgacgccgccgtgcagtacgacccgctccgccccggctccgatgcgtgggcccatcccgacggcatggtcaccgcggagggtgacgaggagaaacagcgctatgacacggagggggagtccaacgactgggaaggggaagggccccaaggatcatcagaccccgagggcatcaacgtgccgcgccagcgctacatcgccgtccccaaggaggccctcctcgatgctgtcctctcgcagttcgcgtccgacgacgacgacgccgcggacttcaagcgctgcgccagatgcttggacgccatccttcacgccgagcacaagaggatgctcgaggagatgcgcacctcctacatgctcacgcaacgccaccgggacgaggaagaggagcaggatgacactgacaccgcctcgggctcggactacgtcaacggcaaagccggctccggatttttcggcatcacccaactggatggcacgttgttccttactagaagcgtggacttgagaactctgctcggattgaccccagaccccgattcccagaccaggcgtggatacgcgactgagaggcagaaaggcctcctgttggttgagaaacttgattacttgcaatcaaaactcttgcagaatgtctttttcagcctctccaaacccttgaaaaagccagggaaatggcttaatgagttcctggcaggctttgaaaagatcaacagataaccagggatttcagatctggatagacaaactgagactatggcttaaagagcaaacttatgcagataattcactgctgttgatagaaagctcttcatgggacaagcttagttctgatcagttacctgatgcagatgttcctatttggatcgctgcacaaagggcagtctctcgttatgaaggaattttgtcacctgttggtcctcgtggaagactgttaagaagattgcttaaatggactggactaataccttctctgccagaagcaacgataaaatccaacaatgaaactaaacatcttgaaggacatgtgaggccaaactttctaccaagaattacccttgctaatatatgggaacctgcaagcagagaatcttgcaataacaatatctgggagatggtgaaagcttcttttcgtattctgtttgggaggtctactcttcaggaaccagcattccaggagttaatactactttacactgatgaagttgttccaagtgaaacgaaggacgagatggttccgctgcaactgaaaatttatgagaggattccgatcccagatttgccagtagttttcccccacaagaaattgtccttccgcatcctagatacagtaaggctagatattgctactgtaataggtcagctttttcttcttgatatagttgctggtactgcactcgtcatacttgttttccgtgtagcactgggctacaaacagacccgggataggtaccagcttctggtgaataaaaccctctatgagaagacattggcaagtgggttcggctcggtttacttccttctcgatgcttctgagcaacagcagtacaaagaagcacttttggcatatgccatgttgctctgcagaaagaagtatgaggtctcatctcgtgcaagcataagagatgcatgcgagcagtttatgcacgagaaattcgaggcaaaggtgaaagatgacggatacattattgtttccgttctcatgattgagatgccgatcgacaaggcaatggagacactgctgcggttggggctggtgattgagcttcccactgatggtgggtcgagcgtgattggtctcccatgctcggaggcatacaggatcctgaaaagccgttgggacggcttgctggaacaagatacagaacaaggctgattagaacgagacatgtacgttggtggcttggagtggagtgggatgggatgccgtgctggtacatactcgacgcgtcggcaaagctcactcttgtttgtatgtatacgtaccagttgttgcagcaagtgtatatgtgctagctacgtgcatgtataatcgtgatctagtttgttgtacacaaacgattgcagtgtatgtatatgggagcacatgtttttttcggaagactagccatgtgtctgtaagtttttctatttgtaagttggtttccatttataaatatagagcataaacactgttctgtta

SEQ ID NO: 61116 - DNA, 2608 bp, Zea Mays
cgggccggaccggcccaatcgaagttttacgagccaaaacgtgaaagtgtcgtccagccagccacgtggctccggcagggcagagcgtttatccaactcggctctcagcgactgcccaccaccaccactgaggattcctcttccggcggcggcggcggcggcagcgatgctcctcctgcgcgccaacgcgctcgccgccgtaccggtgtccttctccataacgccggcggcctcctatagctgcttcccctggccgtcttcatccaccactgccgcgagctgctccgtcggctcctctgccaggctcgacgccgccgtgcagtacgacccgctccgccccggctccgatgcgtgggcccatcccgacggcatggtcaccgcggagggtgacgaggagaaacagcgctatgacacggagggggagtccaacgactgggaaggggaagggccccaaggatcatcagaccccgagggcatcaacgtgccgcgccagcgctacatcgccgtccccaaggaggccctcctcgatgctgtcctctcgcagttcgcgtccgacgacgacgacgccgcggacttcaagcgctgcgccagatgcttggacgccatccttcacgccgagcacaagaggatgctcgaggagatgcgcacctcctacatgctcacgcaacgccaccgggacgaggaagaggagcaggatgacactgacaccgcctcgggctcggactacgtcaacggcaaagccggctccggatttttcggcatcacccaactggatggcacgttgttccttactagaagcgtggacttgagaactctgctcggattgaccccagaccccgattcccagaccagagttgcttttgcaactcaatttcagcgctcattcatgaccctactacgcaatgctcagtttgaagaactctccgcacaagatctgctcttgacatatgccctaaataacgattacctgctcacgctgcccatttatgtcgactggaagaaggctgctcaatctaatgcaataatattcaggcgtggatacgcgactgagaggcagaaaggcctcctgttggttgagaaacttgattacttgcaatcaaaactcttgcagaatgtctttttcagcctctccaaacccttgaaaaagccagggaaatggcttaatgaggctttgaaaagatcaacagataaccagggatttcagatctggatagacaaactgagactatggcttaaagagcaaacttatgcagataattcactgctgttgatagaaagctcttcatgggacaagcttagttctgatcagttacctgatgcagatgttcctatttggatcgctgcacaaagggcagtctctcgttatgaaggaattttgtcacctgttggtcctcgtggaagactgttaagaagattgcttaaatggactggactaataccttctctgccagaagcaacgataaaatccaacaatgaaactaaacatcttgaaggacatgtgaggccaaactttctaccaagaattacccttgctaatatatgggaacctgcaagcagagaatcttgcaataacaatatctgggagatggtgaaagcttcttttcgtattctgtttgggaggtctactcttcaggaaccagcattccaggagttaatactactttacactgatgaagttgttccaagtgaaacgaaggacgagatggttccgctgcaactgaaaatttatgagaggattccgatcccagatttgccagtaaggctagatattgctactgtaataggtcagctttttcttcttgatatagttgctggtactgcactcgtcatacttgttttccgtgtagcactgggctacaaacagacccgggataggtaccagcttctggtgaataaaaccctctatgagaagacattggcaagtgggttcggctcggtttacttccttctcgatgcttctgagcaacagcagtacaaagaagcacttttggcatatgccatgttgctctgcagaaagaagtatgaggtctcatctcgtgcaagcataagagatgcatgcgagcagtttatgcacgagaaattcgaggcaaaggtgaaagatgacggatacattattgtttccgttctcatgattgagatgccgatcgacaaggcaatggagacactgctgcggttggggctggtgattgagcttcccactgatggtgggtcgagcgtgattggtctcccatgctcggaggcatacaggatcctgaaaagccgttgggacggcttgctggaacaagatacagaacaaggctgattagaacgagacatgtacgttggtggcttggagtggagtgggatgggatgccgtgctggtacatactcgacgcgtcggcaaagctcactcttgtttgtatgtatacgtaccagttgttgcagcaagtgtatatgtgctagctacgtgcatgtataatcgtgatctagtttgttgtacacaaacgattgcagtgtatgtatatgggagcacatgtttttttcggaagactagccatgtgtctgtaagtttttctatttgtaagttggtttccatttataaatatagagcataaacactgttctgtta

SEQ ID NO: 61117 - DNA, 2444 bp, Zea Mays
cgggccggaccggcccaatcgaagttttacgagccaaaacgtgaaagtgtcgtccagccagccacgtggctccggcagggcagagcgtttatccaactcggctctcagcgactgcccaccaccaccactgaggattcctcttccggcggcggcggcggcggcagcgatgctcctcctgcgcgccaacgcgctcgccgccgtaccggtgtccttctccataacgccggcggcctcctatagctgcttcccctggccgtcttcatccaccactgccgcgagctgctccgtcggctcctctgccaggctcgacgccgccgtgcagtacgacccgctccgccccggctccgatgcgtgggcccatcccgacggcatggtcaccgcggagggtgacgaggagaaacagcgctatgacacggagggggagtccaacgactgggaaggggaagggccccaaggatcatcagaccccgagggcatcaacgtgccgcgccagcgctacatcgccgtccccaaggaggccctcctcgatgctgtcctctcgcagttcgcgtccgacgacgacgacgccgcggacttcaagcgctgcgccagatgcttggacgccatccttcacgccgagcacaagaggatgctcgaggagatgcgcacctcctacatgctcacgcaacgccaccgggacgaggaagaggagcaggatgacactgacaccgcctcgggctcggactacgtcaacggcaaagccggctccggatttttcggcatcacccaactggatggcacgttgttccttactagaagcgtggacttgagaactctgctcggattgaccccagaccccgattcccagaccaggcgtggatacgcgactgagaggcagaaaggcctcctgttggttgagaaacttgattacttgcaatcaaaactcttgcagaatgtctttttcagcctctccaaacccttgaaaaagccagggaaatggcttaatgagttcctggcaggctttgaaaagatcaacagataaccagggatttcagatctggatagacaaactgagactatggcttaaagagcaaacttatgcagataattcactgctgttgatagaaagctcttcatgggacaagcttagttctgatcagttacctgatgcagatgttcctatttggatcgctgcacaaagggcagtctctcgttatgaaggaattttgtcacctgttggtcctcgtggaagactgttaagaagattgcttaaatggactggactaataccttctctgccagaagcaacgataaaatccaacaatgaaactaaacatcttgaaggacatgtgaggccaaactttctaccaagaattacccttgctaatatatgggaacctgcaagcagagaatcttgcaataacaatatctgggagatggtgaaagcttcttttcgtattctgtttgggaggtctactcttcaggaaccagcattccaggagttaatactactttacactgatgaagttgttccaagtgaaacgaaggacgagatggttccgctgcaactgaaaatttatgagaggattccgatcccagatttgccagtagttttcccccacaagaaattgtccttccgcatcctagatacagtaaggctagatattgctactgtaataggtcagctttttcttcttgatatagttgctggtactgcactcgtcatacttgttttccgtgtagcactgggctacaaacagacccgggataggtaccagcttctggtgaataaaaccctctatgagaagacattggcaagtgggttcggctcggtttacttccttctcgatgcttctgagcaacagcagtacaaagaagcacttttggcatatgccatgttgctctgcagaaagaagtatgaggtctcatctcgtgcaagcataagagatgcatgcgagcagtttatgcacgagaaattcgaggcaaagattgagatgccgatcgacaaggcaatggagacactgctgcggttggggctggtgattgagcttcccactgatggtgggtcgagcgtgattggtctcccatgctcggaggcatacaggatcctgaaaagccgttgggacggcttgctggaacaagatacagaacaaggctgattagaacgagacatgtacgttggtggcttggagtggagtgggatgggatgccgtgctggtacatactcgacgcgtcggcaaagctcactcttgtttgtatgtatacgtaccagttgttgcagcaagtgtatatgtgctagctacgtgcatgtataatcgtgatctagtttgttgtacacaaacgattgcagtgtatgtatatgggagcacatgtttttttcggaagactagccatgtgtctgtaagtttttctatttgtaagttggtttccatttataaatatagagcataaacactgttctgtta

SEQ ID NO: 61118 - DNA, 2653 bp, Zea Mays
cgggccggaccggcccaatcgaagttttacgagccaaaacgtgaaagtgtcgtccagccagccacgtggctccggcagggcagagcgtttatccaactcggctctcagcgactgcccaccaccaccactgaggattcctcttccggcggcggcggcggcggcagcgatgctcctcctgcgcgccaacgcgctcgccgccgtaccggtgtccttctccataacgccggcggcctcctatagctgcttcccctggccgtcttcatccaccactgccgcgagctgctccgtcggctcctctgccaggctcgacgccgccgtgcagtacgacccgctccgccccggctccgatgcgtgggcccatcccgacggcatggtcaccgcggagggtgacgaggagaaacagcgctatgacacggagggggagtccaacgactgggaaggggaagggccccaaggatcatcagaccccgagggcatcaacgtgccgcgccagcgctacatcgccgtccccaaggaggccctcctcgatgctgtcctctcgcagttcgcgtccgacgacgacgacgccgcggacttcaagcgctgcgccagatgcttggacgccatccttcacgccgagcacaagaggatgctcgaggagatgcgcacctcctacatgctcacgcaacgccaccgggacgaggaagaggagcaggatgacactgacaccgcctcgggctcggactacgtcaacggcaaagccggctccggatttttcggcatcacccaactggatggcacgttgttccttactagaagcgtggacttgagaactctgctcggattgaccccagaccccgattcccagaccagagttgcttttgcaactcaatttcagcgctcattcatgaccctactacgcaatgctcagtttgaagaactctccgcacaagatctgctcttgacatatgccctaaataacgattacctgctcacgctgcccatttatgtcgactggaagaaggctgctcaatctaatgcaataatattcaggcgtggatacgcgactgagaggcagaaaggcctcctgttggttgagaaacttgattacttgcaatcaaaactcttgcagaatgtctttttcagcctctccaaacccttgaaaaagccagggaaatggcttaatgaggctttgaaaagatcaacagataaccagggatttcagatctggatagacaaactgagactatggcttaaagagcaaacttatgcagataattcactgctgttgatagaaagctcttcatgggacaagcttagttctgatcagttacctgatgcagatgttcctatttggatcgctgcacaaagggcagtctctcgttatgaaggaattttgtcacctgttggtcctcgtggaagactgttaagaagattgcttaaatggactggactaataccttctctgccagaagcaacgataaaatccaacaatgaaactaaacatcttgaaggacatgtgaggccaaactttctaccaagaattacccttgctaatatatgggaacctgcaagcagagaatcttgcaataacaatatctgggagatggtgaaagcttcttttcgtattctgtttgggaggtctactcttcaggaaccagcattccaggagttaatactactttacactgatgaagttgttccaagtgaaacgaaggacgagatggttccgctgcaactgaaaatttatgagaggattccgatcccagatttgccagtagttttcccccacaagaaattgtccttccgcatcctagatacagtaaggctagatattgctactgtaataggtcagctttttcttcttgatatagttgctggtactgcactcgtcatacttgttttccgtgtagcactgggctacaaacagacccgggataggtaccagcttctggtgaataaaaccctctatgagaagacattggcaagtgggttcggctcggtttacttccttctcgatgcttctgagcaacagcagtacaaagaagcacttttggcatatgccatgttgctctgcagaaagaagtatgaggtctcatctcgtgcaagcataagagatgcatgcgagcagtttatgcacgagaaattcgaggcaaaggtgaaagatgacggatacattattgtttccgttctcatgattgagatgccgatcgacaaggcaatggagacactgctgcggttggggctggtgattgagcttcccactgatggtgggtcgagcgtgattggtctcccatgctcggaggcatacaggatcctgaaaagccgttgggacggcttgctggaacaagatacagaacaaggctgattagaacgagacatgtacgttggtggcttggagtggagtgggatgggatgccgtgctggtacatactcgacgcgtcggcaaagctcactcttgtttgtatgtatacgtaccagttgttgcagcaagtgtatatgtgctagctacgtgcatgtataatcgtgatctagtttgttgtacacaaacgattgcagtgtatgtatatgggagcacatgtttttttcggaagactagccatgtgtctgtaagtttttctatttgtaagttggtttccatttataaatatagagcataaacactgttctgtta

SEQ ID NO: 61119 - DNA, 2769 bp, Zea Mays
cgggccggaccggcccaatcgaagttttacgagccaaaacgtgaaagtgtcgtccagccagccacgtggctccggcagggcagagcgtttatccaactcggctctcagcgactgcccaccaccaccactgaggattcctcttccggcggcggcggcggcggcagcgatgctcctcctgcgcgccaacgcgctcgccgccgtaccggtgtccttctccataacgccggcggcctcctatagctgcttcccctggccgtcttcatccaccactgccgcgagctgctccgtcggctcctctgccaggctcgacgccgccgtgcagtacgacccgctccgccccggctccgatgcgtgggcccatcccgacggcatggtcaccgcggagggtgacgaggagaaacagcgctatgacacggagggggagtccaacgactgggaaggggaagggccccaaggatcatcagaccccgagggcatcaacgtgccgcgccagcgctacatcgccgtccccaaggaggccctcctcgatgctgtcctctcgcagttcgcgtccgacgacgacgacgccgcggacttcaagcgctgcgccaggtgcaattcactcgctacttttatactatgttacttgccacttcgtcaacaatctaccactaattacatcattccctcccttccttagatgcttggacgccatccttcacgccgagcacaagaggatgctcgaggagatgcgcacctcctacatgctcacgcaacgccaccgggacgaggaagaggagcaggatgacactgacaccgcctcgggctcggactacgtcaacggcaaagccggctccggatttttcggcatcacccaactggatggcacgttgttccttactagaagcgtggacttgagaactctgctcggattgaccccagaccccgattcccagaccagagttgcttttgcaactcaatttcagcgctcattcatgaccctactacgcaatgctcagtttgaagaactctccgcacaagatctgctcttgacatatgccctaaataacgattacctgctcacgctgcccatttatgtcgactggaagaaggctgctcaatctaatgcaataatattcaggcgtggatacgcgactgagaggcagaaaggcctcctgttggttgagaaacttgattacttgcaatcaaaactcttgcagaatgtctttttcagcctctccaaacccttgaaaaagccagggaaatggcttaatgaggctttgaaaagatcaacagataaccagggatttcagatctggatagacaaactgagactatggcttaaagagcaaacttatgcagataattcactgctgttgatagaaagctcttcatgggacaagcttagttctgatcagttacctgatgcagatgttcctatttggatcgctgcacaaagggcagtctctcgttatgaaggaattttgtcacctgttggtcctcgtggaagactgttaagaagattgcttaaatggactggactaataccttctctgccagaagcaacgataaaatccaacaatgaaactaaacatcttgaaggacatgtgaggccaaactttctaccaagaattacccttgctaatatatgggaacctgcaagcagagaatcttgcaataacaatatctgggagatggtgaaagcttcttttcgtattctgtttgggaggtctactcttcaggaaccagcattccaggagttaatactactttacactgatgaagttgttccaagtgaaacgaaggacgagatggttccgctgcaactgaaaatttatgagaggattccgatcccagatttgccatgacggtcatggtaaaattcgtctgcaggtagttttcccccacaagaaattgtccttccgcatcctagatacagtaaggctagatattgctactgtaataggtcagctttttcttcttgatatagttgctggtactgcactcgtcatacttgttttccgtgtagcactgggctacaaacagacccgggataggtaccagcttctggtgaataaaaccctctatgagaagacattggcaagtgggttcggctcggtttacttccttctcgatgcttctgagcaacagcagtacaaagaagcacttttggcatatgccatgttgctctgcagaaagaagtatgaggtctcatctcgtgcaagcataagagatgcatgcgagcagtttatgcacgagaaattcgaggcaaaggtgaaagatgacggatacattattgtttccgttctcatgattgagatgccgatcgacaaggcaatggagacactgctgcggttggggctggtgattgagcttcccactgatggtgggtcgagcgtgattggtctcccatgctcggaggcatacaggatcctgaaaagccgttgggacggcttgctggaacaagatacagaacaaggctgattagaacgagacatgtacgttggtggcttggagtggagtgggatgggatgccgtgctggtacatactcgacgcgtcggcaaagctcactcttgtttgtatgtatacgtaccagttgttgcagcaagtgtatatgtgctagctacgtgcatgtataatcgtgatctagtttgttgtacacaaacgattgcagtgtatgtatatgggagcacatgtttttttcggaagactagccatgtgtctgtaagtttttctatttgtaagttggtttccatttataaatatagagcataaacactgttctgtta

SEQ ID NO: 61120 - DNA, 2496 bp, Zea Mays
cgggccggaccggcccaatcgaagttttacgagccaaaacgtgaaagtgtcgtccagccagccacgtggctccggcagggcagagcgtttatccaactcggctctcagcgactgcccaccaccaccactgaggattcctcttccggcggcggcggcggcggcagcgatgctcctcctgcgcgccaacgcgctcgccgccgtaccggtgtccttctccataacgccggcggcctcctatagctgcttcccctggccgtcttcatccaccactgccgcgagctgctccgtcggctcctctgccaggctcgacgccgccgtgcagtacgacccgctccgccccggctccgatgcgtgggcccatcccgacggcatggtcaccgcggagggtgacgaggagaaacagcgctatgacacggagggggagtccaacgactgggaaggggaagggccccaaggatcatcagaccccgagggcatcaacgtgccgcgccagcgctacatcgccgtccccaaggaggccctcctcgatgctgtcctctcgcagttcgcgtccgacgacgacgacgccgcggacttcaagcgctgcgccagatgcttggacgccatccttcacgccgagcacaagaggatgctcgaggagatgcgcacctcctacatgctcacgcaacgccaccgggacgaggaagaggagcaggatgacactgacaccgcctcgggctcggactacgtcaacggcaaagccggctccggatttttcggcatcacccaactggatggcacgttgttccttactagaagcgtggacttgagaactctgctcggattgaccccagaccccgattcccagaccaggcgtggatacgcgactgagaggcagaaaggcctcctgttggttgagaaacttgattacttgcaatcaaaactcttgcagaatgtctttttcagcctctccaaacccttgaaaaagccagggaaatggcttaatgagttcctggcaggctttgaaaagatcaacagataaccagggatttcagatctggatagacaaactgagactatggcttaaagagcaaacttatgcagataattcactgctgttgatagaaagctcttcatgggacaagcttagttctgatcagttacctgatgcagatgttcctatttggatcgctgcacaaagggcagtctctcgttatgaaggaattttgtcacctgttggtcctcgtggaagactgttaagaagattgcttaaatggactggactaataccttctctgccagaagcaacgataaaatccaacaatgaaactaaacatcttgaaggacatgtgaggccaaactttctaccaagaattacccttgctaatatatgggaacctgcaagcagagaatcttgcaataacaatatctgggagatggtgaaagcttcttttcgtattctgtttgggaggtctactcttcaggaaccagcattccaggagttaatactactttacactgatgaagttgttccaagtgaaacgaaggacgagatggttccgctgcaactgaaaatttatgagaggattccgatcccagatttgccagtagttttcccccacaagaaattgtccttccgcatcctagatacagtaaggctagatattgctactgtaataggtctattggcatatgtggtgaactacaaatttgagagtttagcctcatctccgtcagctttttcttcttgatatagttgctggtactgcactcgtcatacttgttttccgtgtagcactgggctacaaacagacccgggataggtaccagcttctggtgaataaaaccctctatgagaagacattggcaagtgggttcggctcggtttacttccttctcgatgcttctgagcaacagcagtacaaagaagcacttttggcatatgccatgttgctctgcagaaagaagtatgaggtctcatctcgtgcaagcataagagatgcatgcgagcagtttatgcacgagaaattcgaggcaaagattgagatgccgatcgacaaggcaatggagacactgctgcggttggggctggtgattgagcttcccactgatggtgggtcgagcgtgattggtctcccatgctcggaggcatacaggatcctgaaaagccgttgggacggcttgctggaacaagatacagaacaaggctgattagaacgagacatgtacgttggtggcttggagtggagtgggatgggatgccgtgctggtacatactcgacgcgtcggcaaagctcactcttgtttgtatgtatacgtaccagttgttgcagcaagtgtatatgtgctagctacgtgcatgtataatcgtgatctagtttgttgtacacaaacgattgcagtgtatgtatatgggagcacatgtttttttcggaagactagccatgtgtctgtaagtttttctatttgtaagttggtttccatttataaatatagagcataaacactgttctgtta

SEQ ID NO: 61121 - DNA, 286 bp, Zea Mays
tgttacctgactgaatgaattgaaggaatagatgtcactgacgcgaatggcggagggaggcggcgattcagatttcggagtcgttgcgctgcggcagggcagggctaggagaggataggaggcaatcagagatcccctagcctagactagcctcccctgacaagtgcaagagctgacccctccggcctccgctcttccctctcggccggtcttgttgtttggggcaccaatccatagatgactggctgagctccctcctcctccctctactccaagatacatggag

SEQ ID NO: 61122 - DNA, 443 bp, Zea Mays
attggagatcaatcttgttactctcaagtttctcaacaagggcccttgttcagaagccacatcagaaaatacctcaaatgtcagccagaaattgtaaaagcttccttgcattttttttcgttccaaactgctgttaagtttgtatgttataattttactagttgaagtcaacatgcaaacatcaaatgcaagggcaacttcacagtgaatggcaaatttgcgatggtattaaacatggaccgatatcacaagtaaaaaataaagtattgataaagaaaagctggaaaaagaatcgtggtgcttttaaaggatatatgtttgcaattctttcaataaacagctaggatatgcccaaaggtcaaaggttcccaggccacttactcatcatcgctgcagcattcaatctcctctgttgacaggtcttttcttgcctgtatatcaag

SEQ ID NO: 61123 - DNA, 5469 bp, Zea Mays
atcaaatctctacagacacctctagcggattagtgacgtcagcgcgcgcatcgcacacgcgtctcctccctctgctcccagtctccaatctcctcccttccccactgcggcggaagtccaccaaagcgaaaccaagagcggcccgaccagatccaccttcttcctccccccttcatgcaaccaaaccctagggactagggctaattcccctcctcctcctactccatggcctcggatttcgacgagaccgacgaagccttcttcgacaagctagtcaactccgacgacgacgacgatcccccggccgccgccgccgtgggggggctcgctgcgctatcgctgaccgatcaacccgacgcgccgccgcctcgcgagtccgagcctcgtgaccagcctgctgctgctgctgcggcggcagcggcaccgacggaggatgcggagcgtgagccctcgccggaggtgtatcctgcggccgtgctgctgcatccgccccccgacctcgctgccaccgtcggggcagatccggccggggacctcctgccggaagacggagaacccttctccggggccgcggctgtgccagaggatcatcagggcctggagccgtcgctgtcgtcgtctctctcagcaggcaccggcgatggcagcgcgccggatcgcaccgtctctggccacacggagagcaatgccagttcccagttggattccagcacagctgcggaggggtctgggcatcagagcgccaaatcgcagctggagtacacggatcccaggtatctagagagcctctaccctggctggaagtacgatgacgctacgcagcagtggtatcagggactgggcttgaacacaggcagacggcttctcagcctgagactgaggctggcaatcagcctgcagtggcaccacagaaagagggggaggcacagtgtgaacccaagccgatgcatacagaggtgggatatggggagagcaatgccacttcccagttcgattccagagctactgctgagggatacggggatcggagcgctgatgcgcaggtggagtacactgatcccagatatctagagagcctctaccctggctggaagtacgacgaggccacacatcagtggtatcaggtagataccctcaacacacagacttatgctgctcgtgatactggtggtgctgtggcagaccttgcgagtggcggtagtgttcagcagcaccaacagtttagtggttcgtacatacaaaacacttcacatccagagcctgctcttgagcttacagagccgacttctgagtcaaagcctcagcttgagcctgcggcggcccctcctcagaccgatgcttatcctgcggtggcatcacataaagaggagcagaaagagcatggatctgtaccggtgcatactaagcctgaagctcaggagattcctgccaatgctggtgatactgccacagtgacagagggtgggtccccagggtcagagaaaggcatccataccgccgtcaagcaagtgcagtggaacgactttggtgccagcactggtggggcggatctatttggtgacctcctgcccgatggagctgaagatgacttctttgagggcaccgtccctgtcagccaagacgtctcatccttggtaggtgctacaaatgttagcgcaccagatcacagcttctctgcaggagtgtataacactgccatgattagtgctggacacagcttctctgacggagttgataaaaatgctaactctcatttcggtcccagtggaagtagtgcagggtacggggatcaaagcactaatgcacagttgggctccactgatcccaaatacctggagagcctctacccggggtggaagtatgatgaggcgacacagcagtggtatcaggtagatacccacagtgcacagagttacgttgctgataatactggtgctgttgtagccgttgggagtgacaatacacagcaacatcagcagcagtttagtgcatcgtacttgcaaaacaatttacatgcagcacttgaaaccattgcggaagagagcagcaccaatgccatgagctgggtccagggtgggaccaacacaggacccccagaatacccaccgaacatgctgttctacgcagaatacccaggatggtactttgacaccaacactcaacaatggcaaacacttgagtcataccagcaaagtgttgcacatgttgcaactactgcagcagcctcagatgggttcgcagggacatgccataatgtagctcattacactgaggattcttatgcaagtagctataaccagcagagccagtggcaaccggattcgttcggtaataccatgcaggctgatgttttggggggcaagagcttgctagggaatcagagttggtacagtggtttggagcattctacaagtaaggaattaaggtacaaaggatttgaaccttcaacaggtttccagactagtcgcaaggaattccagcctcctaaagatcaccaggctggtcacatggcagatgaacctttgacaagatatgggtatggtagttcaaatggggtcgtcaatacacaaaatttcgtaccaaaagagggtatgcacaagacacaaatgcatgatgactccactgcgcatacttatgctgcaagcaactattggggtactcagacctccatgggcagtgctcagcagcaactgactggtacaaatggtccatcccaacagtttggtttctcaccacatgagcagagatcatcagctggacgcccaccacacactgtggtatcctttggatttggggggaagcttgtagttcttaaagaaaccagctctatggctgcaaactttgacagcggaaatcagggcaattctggtcgaacggtatcagttcttaatattccagagattgttgctgataaaattgatcattcaagcatcgctaacggtggtgcatttagctacttccatgctttgtgtcgccatcctattcctggccctcttgttggtggaagtgctgcatcaaaggatctgaataaatggcttgatgatatgagtggcgtatatgaatcttctcagacagaattccagggaggggatgttcagaaggtgcttatttcgttgttgaaaatattgtgccaacactatggaaagcttcgttcatcctttgggtctgacccgtcacaagagggtatagatggcccagagatggcagtgacgaaacttttctcatcttgtaagagcagtgctaatatgaaagggtatggagctgttgtccattgcatgagaaatcttccctcagaaagccagattcagactactgcccaggaggttcaaagtctcttggtttctggtagaaggaaagaggcccttcaccaggcacaagaaggtcacctttggggccctgcactgatccttgctttacaacttggtgataagttttatgcggatactgtgaagaaaatggcccactgccattttgtttctggatcacccttgaggacactgtgccttcttattgctggacaacctgcagatgttttcagttttgagaatcctgttaacagtggtttgtcttctccccaacagcctgtagaggctgctcctaaaggtatgctggatgactggcaagagaatttggctattataacagcaaacaggacaaaaggtgatgaccttgtaattacccgccttggggattgcctttgggaagagaaaaatgaggttgcatctgcccactcgtgctatttagttgctgaactaaatattgattcgtactctggaagtgcaaggatgtgccttattggtgcggaccacttgagatgtccgcgcacatttaccagccctgaagcaatccagagaacagaggtttatgagtatgcaaaggttcttggtaattctcagtatatcctcttgccatttcaaccatacaagctgatatatgcatatatgcttgcggaggttgggaagatttctgattcactaaagtactgtcaagcatctctgaaggtgctcaagtcctctggtcgtgcacctgaactagaagcatggaagcaactgtttattaccctggaggaccggatacgtacccatcaacagggcggttatgcaacaaatcttgcccctggaaagattgttggaaagcttttcacatcacttgataaatctttgtcccgaatgatgggtacacaatctgcaccgttgcctcaactgccgcagggtgctgcaaatgagagagggaagttgcacataacagaagtatttctgaaccagacttcggcaaaaccccccaacagcagggtgctgctgtatcaagtaaggcacagagcacatcaggttcaggcagttcacgctttggatggttggtgcagaagacaatagggcttgtttcaaaatctcaccgccaggcaaagctaggggaacagaacaagttctactatgacgagaagctgaagcggtgggttgaagaaggtgctgagatccctgccgaggagcccccacttcccccacctccaacaaaagtgccattccagaacagcgttccagatcccaactccaatgctcctcccactggtggaggttattcctcaaatcctcccgagcctagttccgggatgccaccgatgccacccacccagaaccagttctcagcacgtggaaggatgggtgttagatcaagatatgtggatacttttaacaagggtggcggtggtggtggcgcaaatgccttcggagtagcaacatcttatagcaaaccagcagctccttcaattgaaaccgcccgacaggatgaatcgtcgtcctcaccagcgatggaaacatcatttagttcgccgccatcactgatacagatgcagtcaagcattccgcggtacccaagtatggataacgtcagctcccccacaggcagcattaacagctcgatgtcaaggtcaagagcgtcatcatggagcggaacgtacccagagcagttgagcagcactgccgcttccaggtcacctgatggacagatgacgcagtcaccatcgatgcctggaagaagacctccgcacagccgttccaacagcgcgtcttcttccgcccagctcaatggtttgggtgaggatcttcacgaggtggagctctgacacctggccgcagattttgaccataatgtgatttatattaatagctgcatgtgtctagagagcaaagcaaaggaaattaaagtgcggtgtccctttttcaatttttttacatgtgaaagactgtggatgccgctgcattgtacagatagttgactcgttcgccagatgaaaaatgtataacaagagtcgtaggttcaagatagggagaagatgaaaccgtgatgattcatcattgttaaaaagatggactgtctgttggaaaaataaagctgattaataaccgcaataatgtcggtccgcatcttggtgttcatattcttatttgtgtgtatgcatttctttgttcctgt

SEQ ID NO: 61124 - DNA, 5694 bp, Zea Mays
atcaaatctctacagacacctctagcggattagtgacgtcagcgcgcgcatcgcacacgcgtctcctccctctgctcccagtctccaatctcctcccttccccactgcggcggaagtccaccaaagcgaaaccaagagcggcccgaccagatccaccttcttcctccccccttcatgcaaccaaaccctagggactagggctaattcccctcctcctcctactccatggcctcggatttcgacgagaccgacgaagccttcttcgacaagctagtcaactccgacgacgacgacgatcccccggccgccgccgccgtgggggggctcgctgcgctatcgctgaccgatcaacccgacgcgccgccgcctcgcgagtccgagcctcgtgaccagcctgctgctgctgctgcggcggcagcggcaccgacggaggatgcggagcgtgagccctcgccggaggtgtatcctgcggccgtgctgctgcatccgccccccgacctcgctgccaccgtcggggcagatccggccggggacctcctgccggaagacggagaacccttctccggggccgcggctgtgccagaggatcatcagggcctggagccgtcgctgtcgtcgtctctctcagcaggcaccggcgatggcagcgcgccggatcgcaccgtctctggccacacggagagcaatgccagttcccagttggattccagcacagctgcggaggggtctgggcatcagagcgccaaatcgcagctggagtacacggatcccaggtatctagagagcctctaccctggctggaagtacgatgacgctacgcagcagtggtatcagggactgggcttgaacacaggcagacggcttctcagcctgagactgaggctggcaatcagcctgcagtggcaccacagaaagagggggaggcacagtgtgaacccaagccgatgcatacagaggtgggatatggggagagcaatgccacttcccagttcgattccagagctactgctgagggatacggggatcggagcgctgatgcgcaggtggagtacactgatcccagatatctagagagcctctaccctggctggaagtacgacgaggccacacatcagtggtatcaggtagataccctcaacacacagacttatgctgctcgtgatactggtggtgctgtggcagaccttgcgagtggcggtagtgttcagcagcaccaacagtttagtggttcgtacatacaaaacacttcacatccagagcctgctcttgagcttacagagccgacttctgagtcaaagcctcagcttgagcctgcggcggcccctcctcagaccgatgcttatcctgcggtggcatcacataaagaggagcagaaagagcatggatctgtaccggtgcatactaagcctgaagctcaggagattcctgccaatgctggtgatactgccacagtgacagagggtgggtccccagggtcagagaaaggcatccataccgccgtcaagcaagtgcagtggaacgactttggtgccagcactggtggggcggatctatttggtgacctcctgcccgatggagctgaagatgacttctttgagggcaccgtccctgtcagccaagacgtctcatccttggtaggtgctacaaatgttagcgcaccagatcacagcttctctgcaggagtgtataacactgccatgattagtgctggacacagcttctctgacggagttgataaaaatgctaactctcatttcggtcccagtggaagtagtgcagggtacggggatcaaagcactaatgcacagttgggctccactgatcccaaatacctggagagcctctacccggggtggaagtatgatgaggcgacacagcagtggtatcaggtagatacccacagtgcacagagttacgttgctgataatactggtgctgttgtagccgttgggagtgacaatacacagcaacatcagcagcagtttagtgcatcgtacttgcaaaacaatttacatgcagcacttgaaaccattgcggaagagagcagcaccaatgccatgagctgggtccagggtgggaccaacacaggacccccagaatacccaccgaacatgctgttctacgcagaatacccaggatggtactttgacaccaacactcaacaatggcaaacacttgagtcataccagcaaagtgttgcacatgttgcaactactgcagcagcctcagatgggttcgcagggacatgccataatgtagctcattacactgaggattcttatgcaagtagctataaccagcagagccagtggcaaccggattcgttcggtaataccatgcaggctgatgttttggggggcaagagcttgctaggtagttcctatggttctaatcagcaggctgggaatcagattgggcaacaggccaatgtggactctttaaatcacgagcctcatgtaaatacatttatgccttctacagggaatcagagttggtacagtggtttggagcattctacaagtaaggaattaaggtacaaaggatttgaaccttcaacaggtttccagactagtcgcaaggaattccagcctcctaaagatcaccaggctggtcacatggcagatgaacctttgacaagatatgggtatggtagttcaaatggggtcgtcaatacacaaaatttcgtaccaaaagagggtatgcacaagacacaaatgcatgatgactccactgcgcatacttatgctgcaagcaactattggggtactcagacctccatgggcagtgctcagcagcaactgactggtacaaatggtccatcccaacagtttggtttctcaccacatgagcagagatcatcagctggacgcccaccacacactgtggtatcctttggatttggggggaagcttgtagttcttaaagaaaccagctctatggctgcaaactttgacagcggaaatcagggcaattctggtcgaacggtatcagttcttaatattccagagattgttgctgataaaattgatcattcaagcatcgctaacggtggtgcatttagctacttccatgctttgtgtcgccatcctattcctggccctcttgttggtggaagtgctgcatcaaaggatctgaataaatggcttgatgatatgagtggcgtatatgaatcttctcagacagaattccagggaggggatgttcagaaggtgcttatttcgttgttgaaaatattgtgccaacactatggaaagcttcgttcatcctttgggtctgacccgtcacaagagatggcccagagatggcagtgacgaaacttttctcatcttgtaagagcagtgctaatatgaaagggtatggagctgttgtccattgcatgagaaatcttccctcagaaagccagattcagactactgcccaggaggttcaaagtctcttggtttctggtagaaggaaagaggcccttcaccaggcacaagaaggtcacctttggggccctgcactgatccttgctttacaacttggtgataagttttatgcggatactgtgaagaaaatggcccactgccattttgtttctggatcacccttgaggacactgtgccttcttattgctggacaacctgcagatgttttcagttttgagaatcctgttaacagtggtttgtcttctccccaacagcctgtagaggctgctcctaaaggtatgctggatgactggcaagagaatttggctattataacagcaaacaggacaaaaggtgatgaccttgtaattacccgccttggggattgcctttgggaagagaaaaatgaggttgcatctgcccactcgtgctatttagttgctgaactaaatattgattcgtactctggaagtgcaaggatgtgccttattggtgcggaccacttgagatgtccgcgcacatttaccagccctgaagcaatccagagaacagaggtttatgagtatgcaaaggttcttggtaattctcagtatatcctcttgccatttcaaccatacaagctgatatatgcatatatgcttgcggaggttgggaagatttctgattcactaaagtactgtcaagcatctctgaaggtgctcaagtcctctggtcgtgcacctgaactagaagcatggaagcaactgtttattaccctggaggaccggatacgtacccatcaacagggcggttatgcaacaaatcttgcccctggaaagattgttggaaagcttttcacatcacttgataaatctttgtcccgaatgatgggtacacaatctgcaccgttgcctcaactgccgcagggtgctgcaaatgagagaggtgtttattcttctcctgatacaaaagtagtaaatagtcagtcagtgatgtccatggcaccattagtgtcatctgcttcagagcagtctatgagtgaaattggaggaaatagtgtctatggcagggaagttgcacataacagaagtatttctgaaccagacttcggcaaaaccccccaacagcagggtgctgctgtatcaagtaaggcacagagcacatcaggttcaggcagttcacgctttggatggttggtgcagaagacaatagggcttgtttcaaaatctcaccgccaggcaaagctaggggaacagaacaagttctactatgacgagaagctgaagcggtgggttgaagaaggtgctgagatccctgccgaggagcccccacttcccccacctccaacaaaagtgccattccagaacagcgttccagatcccaactccaatgctcctcccactggtggaggttattcctcaaatcctcccgagcctagttccgggatgccaccgatgccacccacccagaaccagttctcagcacgtggaaggatgggtgttagatcaagatatgtggatacttttaacaagggtggcggtggtggtggcgcaaatgccttcggagtagcaacatcttatagcaaaccagcagctccttcaattgaaaccgcccgacaggatgaatcgtcgtcctcaccagcgatggaaacatcatttagttcgccgccatcactgatacagatgcagtcaagcattccgcggtacccaagtatggataacgtcagctcccccacaggcagcattaacagctcgatgtcaaggtcaagagcgtcatcatggagcggaacgtacccagagcagttgagcagcactgccgcttccaggtcacctgatggacagatgacgcagtcaccatcgatgcctggaagaagacctccgcacagccgttccaacagcgcgtcttcttccgcccagctcaatggtttgggtgaggatcttcacgaggtggagctctgacacctggccgcagattttgaccataatgtgatttatattaatagctgcatgtgtctagagagcaaagcaaaggaaattaaagtgcggtgtccctttttcaatttttttacatgtgaaagactgtggatgccgctgcattgtacagatagttgactcgttcgccagatgaaaaatgtataacaagagtcgtaggttcaagatagggagaagatgaaaccgtgatgattcatcattgttaaaaagatggactgtctgttggaaaaataaagctgattaataaccgcaataatgtcggtccgcatcttggtgttcatattcttatttgtgtgtatgcatttctttgttcctgt

SEQ ID NO: 61125 - DNA, 5710 bp, Zea Mays
atcaaatctctacagacacctctagcggattagtgacgtcagcgcgcgcatcgcacacgcgtctcctccctctgctcccagtctccaatctcctcccttccccactgcggcggaagtccaccaaagcgaaaccaagagcggcccgaccagatccaccttcttcctccccccttcatgcaaccaaaccctagggactagggctaattcccctcctcctcctactccatggcctcggatttcgacgagaccgacgaagccttcttcgacaagctagtcaactccgacgacgacgacgatcccccggccgccgccgccgtgggggggctcgctgcgctatcgctgaccgatcaacccgacgcgccgccgcctcgcgagtccgagcctcgtgaccagcctgctgctgctgctgcggcggcagcggcaccgacggaggatgcggagcgtgagccctcgccggaggtgtatcctgcggccgtgctgctgcatccgccccccgacctcgctgccaccgtcggggcagatccggccggggacctcctgccggaagacggagaacccttctccggggccgcggctgtgccagaggatcatcagggcctggagccgtcgctgtcgtcgtctctctcagcaggcaccggcgatggcagcgcgccggatcgcaccgtctctggccacacggagagcaatgccagttcccagttggattccagcacagctgcggaggggtctgggcatcagagcgccaaatcgcagctggagtacacggatcccaggtatctagagagcctctaccctggctggaagtacgatgacgctacgcagcagtggtatcagggactgggcttgaacacaggcagacggcttctcagcctgagactgaggctggcaatcagcctgcagtggcaccacagaaagagggggaggcacagtgtgaacccaagccgatgcatacagaggtgggatatggggagagcaatgccacttcccagttcgattccagagctactgctgagggatacggggatcggagcgctgatgcgcaggtggagtacactgatcccagatatctagagagcctctaccctggctggaagtacgacgaggccacacatcagtggtatcaggtagataccctcaacacacagacttatgctgctcgtgatactggtggtgctgtggcagaccttgcgagtggcggtagtgttcagcagcaccaacagtttagtggttcgtacatacaaaacacttcacatccagagcctgctcttgagcttacagagccgacttctgagtcaaagcctcagcttgagcctgcggcggcccctcctcagaccgatgcttatcctgcggtggcatcacataaagaggagcagaaagagcatggatctgtaccggtgcatactaagcctgaagctcaggagattcctgccaatgctggtgatactgccacagtgacagagggtgggtccccagggtcagagaaaggcatccataccgccgtcaagcaagtgcagtggaacgactttggtgccagcactggtggggcggatctatttggtgacctcctgcccgatggagctgaagatgacttctttgagggcaccgtccctgtcagccaagacgtctcatccttggtaggtgctacaaatgttagcgcaccagatcacagcttctctgcaggagtgtataacactgccatgattagtgctggacacagcttctctgacggagttgataaaaatgctaactctcatttcggtcccagtggaagtagtgcagggtacggggatcaaagcactaatgcacagttgggctccactgatcccaaatacctggagagcctctacccggggtggaagtatgatgaggcgacacagcagtggtatcaggtagatacccacagtgcacagagttacgttgctgataatactggtgctgttgtagccgttgggagtgacaatacacagcaacatcagcagcagtttagtgcatcgtacttgcaaaacaatttacatgcagcacttgaaaccattgcggaagagagcagcaccaatgccatgagctgggtccagggtgggaccaacacaggacccccagaatacccaccgaacatgctgttctacgcagaatacccaggatggtactttgacaccaacactcaacaatggcaaacacttgagtcataccagcaaagtgttgcacatgttgcaactactgcagcagcctcagatgggttcgcagggacatgccataatgtagctcattacactgaggattcttatgcaagtagctataaccagcagagccagtggcaaccggattcgttcggtaataccatgcaggctgatgttttggggggcaagagcttgctaggtagttcctatggttctaatcagcaggctgggaatcagattgggcaacaggccaatgtggactctttaaatcacgagcctcatgtaaatacatttatgccttctacagggaatcagagttggtacagtggtttggagcattctacaagtaaggaattaaggtacaaaggatttgaaccttcaacaggtttccagactagtcgcaaggaattccagcctcctaaagatcaccaggctggtcacatggcagatgaacctttgacaagatatgggtatggtagttcaaatggggtcgtcaatacacaaaatttcgtaccaaaagagggtatgcacaagacacaaatgcatgatgactccactgcgcatacttatgctgcaagcaactattggggtactcagacctccatgggcagtgctcagcagcaactgactggtacaaatggtccatcccaacagtttggtttctcaccacatgagcagagatcatcagctggacgcccaccacacactgtggtatcctttggatttggggggaagcttgtagttcttaaagaaaccagctctatggctgcaaactttgacagcggaaatcagggcaattctggtcgaacggtatcagttcttaatattccagagattgttgctgataaaattgatcattcaagcatcgctaacggtggtgcatttagctacttccatgctttgtgtcgccatcctattcctggccctcttgttggtggaagtgctgcatcaaaggatctgaataaatggcttgatgatatgagtggcgtatatgaatcttctcagacagaattccagggaggggatgttcagaaggtgcttatttcgttgttgaaaatattgtgccaacactatggaaagcttcgttcatcctttgggtctgacccgtcacaagagggtatagatggcccagagatggcagtgacgaaacttttctcatcttgtaagagcagtgctaatatgaaagggtatggagctgttgtccattgcatgagaaatcttccctcagaaagccagattcagactactgcccaggaggttcaaagtctcttggtttctggtagaaggaaagaggcccttcaccaggcacaagaaggtcacctttggggccctgcactgatccttgctttacaacttggtgataagttttatgcggatactgtgaagaaaatggcccactgccattttgtttctggatcacccttgaggacactgtgccttcttattgctggacaacctgcagatgttttcagttttgagaatcctgttaacagtggtttgtcttctccccaacagcctgtagaggctgctcctaaaggtatgctggatgactggcaagagaatttggctattataacagcaaacaggacaaaaggtgatgaccttgtaattacccgccttggggattgcctttgggaagagaaaaatgaggttgcatctgcccactcgtgctatttagttgctgaactaaatattgattcgtactctggaagtgcaaggatgtgccttattggtgcggaccacttgagatgtccgcgcacatttaccagccctgaagcaatccagagaacagaggtttatgagtatgcaaaggttcttggtaattctcagtatatcctcttgccatttcaaccatacaagctgatatatgcatatatgcttgcggaggttgggaagatttctgattcactaaatgcattatgaaggtactgtcaagcatctctgaaggtgctcaagtcctctggtcgtgcacctgaactagaagcatggaagcaactgtttattaccctggaggaccggatacgtacccatcaacagggcggttatgcaacaaatcttgcccctggaaagattgttggaaagcttttcacatcacttgataaatctttgtcccgaatgatgggtacacaatctgcaccgttgcctcaactgccgcagggtgctgcaaatgagagaggtgtttattcttctcctgatacaaaagtagtaaatagtcagtcagtgatgtccatggcaccattagtgtcatctgcttcagagcagtctatgagtgaaattggaggaaatagtgtctatggcagggaagttgcacataacagaagtatttctgaaccagacttcggcaaaaccccccaacagggtgctgctgtatcaagtaaggcacagagcacatcaggttcaggcagttcacgctttggatggttggtgcagaagacaatagggcttgtttcaaaatctcaccgccaggcaaagctaggggaacagaacaagttctactatgacgagaagctgaagcggtgggttgaagaaggtgctgagatccctgccgaggagcccccacttcccccacctccaacaaaagtgccattccagaacagcgttccagatcccaactccaatgctcctcccactggtggaggttattcctcaaatcctcccgagcctagttccgggatgccaccgatgccacccacccagaaccagttctcagcacgtggaaggatgggtgttagatcaagatatgtggatacttttaacaagggtggcggtggtggtggcgcaaatgccttcggagtagcaacatcttatagcaaaccagcagctccttcaattgaaaccgcccgacaggatgaatcgtcgtcctcaccagcgatggaaacatcatttagttcgccgccatcactgatacagatgcagtcaagcattccgcggtacccaagtatggataacgtcagctcccccacaggcagcattaacagctcgatgtcaaggtcaagagcgtcatcatggagcggaacgtacccagagcagttgagcagcactgccgcttccaggtcacctgatggacagatgacgcagtcaccatcgatgcctggaagaagacctccgcacagccgttccaacagcgcgtcttcttccgcccagctcaatggtttgggtgaggatcttcacgaggtggagctctgacacctggccgcagattttgaccataatgtgatttatattaatagctgcatgtgtctagagagcaaagcaaaggaaattaaagtgcggtgtccctttttcaatttttttacatgtgaaagactgtggatgccgctgcattgtacagatagttgactcgttcgccagatgaaaaatgtataacaagagtcgtaggttcaagatagggagaagatgaaaccgtgatgattcatcattgttaaaaagatggactgtctgttggaaaaataaagctgattaataaccgcaataatgtcggtccgcatcttggtgttcatattcttatttgtgtgtatgcatttctttgttcctgt

SEQ ID NO: 61126 - DNA, 5698 bp, Zea Mays
atcaaatctctacagacacctctagcggattagtgacgtcagcgcgcgcatcgcacacgcgtctcctccctctgctcccagtctccaatctcctcccttccccactgcggcggaagtccaccaaagcgaaaccaagagcggcccgaccagatccaccttcttcctccccccttcatgcaaccaaaccctagggactagggctaattcccctcctcctcctactccatggcctcggatttcgacgagaccgacgaagccttcttcgacaagctagtcaactccgacgacgacgacgatcccccggccgccgccgccgtgggggggctcgctgcgctatcgctgaccgatcaacccgacgcgccgccgcctcgcgagtccgagcctcgtgaccagcctgctgctgctgctgcggcggcagcggcaccgacggaggatgcggagcgtgagccctcgccggaggtgtatcctgcggccgtgctgctgcatccgccccccgacctcgctgccaccgtcggggcagatccggccggggacctcctgccggaagacggagaacccttctccggggccgcggctgtgccagaggatcatcagggcctggagccgtcgctgtcgtcgtctctctcagcaggcaccggcgatggcagcgcgccggatcgcaccgtctctggccacacggagagcaatgccagttcccagttggattccagcacagctgcggaggggtctgggcatcagagcgccaaatcgcagctggagtacacggatcccaggtatctagagagcctctaccctggctggaagtacgatgacgctacgcagcagtggtatcagggactgggcttgaacacaggcagacggcttctcagcctgagactgaggctggcaatcagcctgcagtggcaccacagaaagagggggaggcacagtgtgaacccaagccgatgcatacagaggtgggatatggggagagcaatgccacttcccagttcgattccagagctactgctgagggatacggggatcggagcgctgatgcgcaggtggagtacactgatcccagatatctagagagcctctaccctggctggaagtacgacgaggccacacatcagtggtatcaggtagataccctcaacacacagacttatgctgctcgtgatactggtggtgctgtggcagaccttgcgagtggcggtagtgttcagcagcaccaacagtttagtggttcgtacatacaaaacacttcacatccagagcctgctcttgagcttacagagccgacttctgagtcaaagcctcagcttgagcctgcggcggcccctcctcagaccgatgcttatcctgcggtggcatcacataaagaggagcagaaagagcatggatctgtaccggtgcatactaagcctgaagctcaggagattcctgccaatgctggtgatactgccacagtgacagagggtgggtccccagggtcagagaaaggcatccataccgccgtcaagcaagtgcagtggaacgactttggtgccagcactggtggggcggatctatttggtgacctcctgcccgatggagctgaagatgacttctttgagggcaccgtccctgtcagccaagacgtctcatccttggtaggtgctacaaatgttagcgcaccagatcacagcttctctgcaggagtgtataacactgccatgattagtgctggacacagcttctctgacggagttgataaaaatgctaactctcatttcggtcccagtggaagtagtgcagggtacggggatcaaagcactaatgcacagttgggctccactgatcccaaatacctggagagcctctacccggggtggaagtatgatgaggcgacacagcagtggtatcaggtagatacccacagtgcacagagttacgttgctgataatactggtgctgttgtagccgttgggagtgacaatacacagcaacatcagcagcagtttagtgcatcgtacttgcaaaacaatttacatgcagcacttgaaaccattgcggaagagagcagcaccaatgccatgagctgggtccagggtgggaccaacacaggacccccagaatacccaccgaacatgctgttctacgcagaatacccaggatggtactttgacaccaacactcaacaatggcaaacacttgagtcataccagcaaagtgttgcacatgttgcaactactgcagcagcctcagatgggttcgcagggacatgccataatgtagctcattacactgaggattcttatgcaagtagctataaccagcagagccagtggcaaccggattcgttcggtaataccatgcaggctgatgttttggggggcaagagcttgctaggtagttcctatggttctaatcagcaggctgggaatcagattgggcaacaggccaatgtggactctttaaatcacgagcctcatgtaaatacatttatgccttctacagggaatcagagttggtacagtggtttggagcattctacaagtaaggaattaaggtacaaaggatttgaaccttcaacaggtttccagactagtcgcaaggaattccagcctcctaaagatcaccaggctggtcacatggcagatgaacctttgacaagatatgggtatggtagttcaaatggggtcgtcaatacacaaaatttcgtaccaaaagagggtatgcacaagacacaaatgcatgatgactccactgcgcatacttatgctgcaagcaactattggggtactcagacctccatgggcagtgctcagcagcaactgactggtacaaatggtccatcccaacagtttggtttctcaccacatgagcagagatcatcagctggacgcccaccacacactgtggtatcctttggatttggggggaagcttgtagttcttaaagaaaccagctctatggctgcaaactttgacagcggaaatcagggcaattctggtcgaacggtatcagttcttaatattccagagattgttgctgataaaattgatcattcaagcatcgctaacggtggtgcatttagctacttccatgctttgtgtcgccatcctattcctggccctcttgttggtggaagtgctgcatcaaaggatctgaataaatggcttgatgatatgagtggcgtatatgaatcttctcagacagaattccagggaggggatgttcagaaggtgcttatttcgttgttgaaaatattgtgccaacactatggaaagcttcgttcatcctttgggtctgacccgtcacaagagggtatagatggcccagagatggcagtgacgaaacttttctcatcttgtaagagcagtgctaatatgaaagggtatggagctgttgtccattgcatgagaaatcttccctcagaaagccagattcagactactgcccaggaggttcaaagtctcttggtttctggtagaaggaaagaggcccttcaccaggcacaagaaggtcacctttggggccctgcactgatccttgctttacaacttggtgataagttttatgcggatactgtgaagaaaatggcccactgccattttgtttctggatcacccttgaggacactgtgccttcttattgctggacaacctgcagatgttttcagttttgagaatcctgttaacagtggtttgtcttctccccaacagcctgtagaggctgctcctaaaggtatgctggatgactggcaagagaatttggctattataacagcaaacaggacaaaaggtgatgaccttgtaattacccgccttggggattgcctttgggaagagaaaaatgaggttgcatctgcccactcgtgctatttagttgctgaactaaatattgattcgtactctggaagtgcaaggatgtgccttattggtgcggaccacttgagatgtccgcgcacatttaccagccctgaagcaatccagagaacagaggtttatgagtatgcaaaggttcttggtaattctcagtatatcctcttgccatttcaaccatacaagctgatatatgcatatatgcttgcggaggttgggaagatttctgattcactaaagtactgtcaagcatctctgaaggtgctcaagtcctctggtcgtgcacctgaactagaagcatggaagcaactgtttattaccctggaggaccggatacgtacccatcaacagggcggttatgcaacaaatcttgcccctggaaagattgttggaaagcttttcacatcacttgataaatctttgtcccgaatgatgggtacacaatctgcaccgttgcctcaactgccgcagggtgctgcaaatgagagaggtgtttattcttctcctgatacaaaagtagtaaatagtcagtcagtgatgtccatggcaccattagtgtcatctgcttcagagcagtctatgagtgaaattggaggaaatagtgtctatggcagggaagttgcacataacagaagtatttctgaaccagacttcggcaaaaccccccaacagggtgctgctgtatcaagtaaggcacagagcacatcaggttcaggcagttcacgctttggatggttggtgcagaagacaatagggcttgtttcaaaatctcaccgccaggcaaagctaggggaacagaacaagttctactatgacgagaagctgaagcggtgggttgaagaaggtgctgagatccctgccgaggagcccccacttcccccacctccaacaaaagtgccattccagaacagcgttccagatcccaactccaatgctcctcccactggtggaggttattcctcaaatcctcccgagcctagttccgggatgccaccgatgccacccacccagaaccagttctcagcacgtggaaggatgggtgttagatcaagatatgtggatacttttaacaagggtggcggtggtggtggcgcaaatgccttcggagtagcaacatcttatagcaaaccagcagctccttcaattgaaaccgcccgacaggatgaatcgtcgtcctcaccagcgatggaaacatcatttagttcgccgccatcactgatacagatgcagtcaagcattccgcggtacccaagtatggataacgtcagctcccccacaggcagcattaacagctcgatgtcaaggtcaagagcgtcatcatggagcggaacgtacccagagcagttgagcagcactgccgcttccaggtcacctgatggacagatgacgcagtcaccatcgatgcctggaagaagacctccgcacagccgttccaacagcgcgtcttcttccgcccagctcaatggtttgggtgaggatcttcacgaggtggagctctgacacctggccgcagattttgaccataatgtgatttatattaatagctgcatgtgtctagagagcaaagcaaaggaaattaaagtgcggtgtccctttttcaatttttttacatgtgaaagactgtggatgccgctgcattgtacagatagttgactcgttcgccagatgaaaaatgtataacaagagtcgtaggttcaagatagggagaagatgaaaccgtgatgattcatcattgttaaaaagatggactgtctgttggaaaaataaagctgattaataaccgcaataatgtcggtccgcatcttggtgttcatattcttatttgtgtgtatgcatttctttgttcctgt

SEQ ID NO: 61127 - DNA, 5739 bp, Zea Mays
atcaaatctctacagacacctctagcggattagtgacgtcagcgcgcgcatcgcacacgcgtctcctccctctgctcccagtctccaatctcctcccttccccactgcggcggaagtccaccaaagcgaaaccaagagcggcccgaccagatccaccttcttcctccccccttcatgcaaccaaaccctagggactagggctaattcccctcctcctcctactccatggcctcggatttcgacgagaccgacgaagccttcttcgacaagctagtcaactccgacgacgacgacgatcccccggccgccgccgccgtgggggggctcgctgcgctatcgctgaccgatcaacccgacgcgccgccgcctcgcgagtccgagcctcgtgaccagcctgctgctgctgctgcggcggcagcggcaccgacggaggatgcggagcgtgagccctcgccggaggtgtatcctgcggccgtgctgctgcatccgccccccgacctcgctgccaccgtcggggcagatccggccggggacctcctgccggaagacggagaacccttctccggggccgcggctgtgccagaggatcatcagggcctggagccgtcgctgtcgtcgtctctctcagcaggcaccggcgatggcagcgcgccggatcgcaccgtctctggccacacggagagcaatgccagttcccagttggattccagcacagctgcggaggggtctgggcatcagagcgccaaatcgcagctggagtacacggatcccaggtatctagagagcctctaccctggctggaagtacgatgacgctacgcagcagtggtatcagggactgggcttgaacacaggcagacggcttctcagcctgagactgaggctggcaatcagcctgcagtggcaccacagaaagagggggaggcacagtgtgaacccaagccgatgcatacagaggtgggatatggggagagcaatgccacttcccagttcgattccagagctactgctgagggatacggggatcggagcgctgatgcgcaggtggagtacactgatcccagatatctagagagcctctaccctggctggaagtacgacgaggccacacatcagtggtatcaggtagataccctcaacacacagacttatgctgctcgtgatactggtggtgctgtggcagaccttgcgagtggcggtagtgttcagcagcaccaacagtttagtggttcgtacatacaaaacacttcacatccagagcctgctcttgagcttacagagccgacttctgagtcaaagcctcagcttgagcctgcggcggcccctcctcagaccgatgcttatcctgcggtggcatcacataaagaggagcagaaagagcatggatctgtaccggtgcatactaagcctgaagctcaggagattcctgccaatgctggtgatactgccacagtgacagagggtgggtccccagggtcagagaaaggcatccataccgccgtcaagcaagtgcagtggaacgactttggtgccagcactggtggggcggatctatttggtgacctcctgcccgatggagctgaagatgacttctttgagggcaccgtccctgtcagccaagacgtctcatccttggtaggtgctacaaatgttagcgcaccagatcacagcttctctgcaggagtgtataacactgccatgattagtgctggacacagcttctctgacggagttgataaaaatgctaactctcatttcggtcccagtggaagtagtgcagggtacggggatcaaagcactaatgcacagttgggctccactgatcccaaatacctggagagcctctacccggggtggaagtatgatgaggcgacacagcagtggtatcaggtagatacccacagtgcacagagttacgttgctgataatactggtgctgttgtagccgttgggagtgacaatacacagcaacatcagcagcagtttagtgcatcgtacttgcaaaacaatttacatgcagcacttgaaaccattgcggaagagagcagcaccaatgccatgagctgggtccagggtgggaccaacacaggacccccagaatacccaccgaacatgctgttctacgcagaatacccaggatggtactttgacaccaacactcaacaatggcaaacacttgagtcataccagcaaagtgttgcacatgttgcaactactgcagcagcctcagatgggttcgcagggacatgccataatgtagctcattacactgaggattcttatgcaagtagctataaccagcagagccagtggcaaccggattcgttcggtaataccatgcaggctgatgttttggggggcaagagcttgctaggtagttcctatggttctaatcagcaggctgggaatcagattgggcaacaggccaatgtggactctttaaatcacgagcctcatgtaaatacatttatgccttctacagggaatcagagttggtacagtggtttggagcattctacaagtaaggaattaaggtacaaaggatttgaaccttcaacaggtttccagactagtcgcaaggaattccagcctcctaaagatcaccaggctggtcacatggcagatgaacctttgacaagatatgggtatggtagttcaaatggggtcgtcaatacacaaaatttcgtaccaaaagagggtatgcacaagacacaaatgcatgatgactccactgcgcatacttatgctgcaagcaactattggggtactcagacctccatgggcagtgctcagcagcaactgactggtacaaatggtccatcccaacagtttggtttctcaccacatgagcagagatcatcagctggacgcccaccacacactgtggtatcctttggatttggggggaagcttgtagttcttaaagaaaccagctctatggctgcaaactttgacagcggaaatcagggcaattctggtcgaacggtatcagttcttaatattccagagattgttgctgataaaattgatcattcaagcatcgctaacggtggtgcatttagctacttccatgctttgtgtcgccatcctattcctggccctcttgttggtggaagtgctgcatcaaaggatctgaataaatggcttgatgatatgagtggcgtatatgaatcttctcagacagaattccagggaggggatgttcagaaggtgcttatttcgttgttgaaaatattgtgccaacactatggaaagcttcgttcatcctttgggtctgacccgtcacaagagggtatagatggcccagagatggcagtgacgaaacttttctcatcttgtaagagcagtgctaatatgaaagggtatggagctgttgtccattgcatgagaaatcttccctcagaaagccagattcagactactgcccaggaggttcaaagtctcttggtttctggtagaaggaaagaggcccttcaccaggcacaagaaggtcacctttggggccctgcactgatccttgctttacaacttggtgataagttttatgcggatactgtgaagaaaatggcccactgccattttgtttctggatcacccttgaggacactgtgccttcttattgctggacaacctgcagatgttttcagttttgagaatcctgttaacagtggtttgtcttctccccaacagcctgtagaggctgctcctaaaggtatgctggatgactggcaagagaatttggctattataacagcaaacaggacaaaaggtgatgaccttgtaattacccgccttggggattgcctttgggaagagaaaaatgaggttgcatctgcccactcgtgctatttagttgctgaactaaatattgattcgtactctggaagtgcaaggatgtgccttattggtgcggaccacttgagatgtccgcgcacatttaccagccctgaagcaatccagagaacagaggtttatgagtatgcaaaggttcttggtaattctcagtatatcctcttgccatttcaaccatacaagctgatatatgcatatatgcttgcggaggttgggaagatttctgattcactaaagtactgtcaagcatctctgaaggtgctcaagtcctctggtcgtgcacctgaactagaagcatggaagcaactgtttattaccctggaggaccggatacgtacccatcaacagattgttggaaagcttttcacatcacttgataaatctttgtcccgaatgatgggtacacaatctgcaccgttgcctcaactgccgcagggtgctgcaaatgagagaggtgtttattcttctcctgatacaaaagtagtaaatagtcagtcagtgatgtccatggcaccattagtgtcatctgcttcagagcagtctatgagtgaaattggaggaaatagtgtctatggcagggaagttgcacataacagaagtatttctgaaccagacttcggcaaaaccccccaacaggtacttgtctcttgatgttgttttctgaagaattttcaattttttttatacctatgcatatgataatgcagcagggtgctgctgtatcaagtaaggcacagagcacatcaggttcaggcagttcacgctttggatggttggtgcagaagacaatagggcttgtttcaaaatctcaccgccaggcaaagctaggggaacagaacaagttctactatgacgagaagctgaagcggtgggttgaagaaggtgctgagatccctgccgaggagcccccacttcccccacctccaacaaaagtgccattccagaacagcgttccagatcccaactccaatgctcctcccactggtggaggttattcctcaaatcctcccgagcctagttccgggatgccaccgatgccacccacccagaaccagttctcagcacgtggaaggatgggtgttagatcaagatatgtggatacttttaacaagggtggcggtggtggtggcgcaaatgccttcggagtagcaacatcttatagcaaaccagcagctccttcaattgaaaccgcccgacaggatgaatcgtcgtcctcaccagcgatggaaacatcatttagttcgccgccatcactgatacagatgcagtcaagcattccgcggtacccaagtatggataacgtcagctcccccacaggcagcattaacagctcgatgtcaaggtcaagagcgtcatcatggagcggaacgtacccagagcagttgagcagcactgccgcttccaggtcacctgatggacagatgacgcagtcaccatcgatgcctggaagaagacctccgcacagccgttccaacagcgcgtcttcttccgcccagctcaatggtttgggtgaggatcttcacgaggtggagctctgacacctggccgcagattttgaccataatgtgatttatattaatagctgcatgtgtctagagagcaaagcaaaggaaattaaagtgcggtgtccctttttcaatttttttacatgtgaaagactgtggatgccgctgcattgtacagatagttgactcgttcgccagatgaaaaatgtataacaagagtcgtaggttcaagatagggagaagatgaaaccgtgatgattcatcattgttaaaaagatggactgtctgttggaaaaataaagctgattaataaccgcaataatgtcggtccgcatcttggtgttcatattcttatttgtgtgtatgcatttctttgttcctgt

SEQ ID NO: 61128 - DNA, 5575 bp, Zea Mays
atcaaatctctacagacacctctagcggattagtgacgtcagcgcgcgcatcgcacacgcgtctcctccctctgctcccagtctccaatctcctcccttccccactgcggcggaagtccaccaaagcgaaaccaagagcggcccgaccagatccaccttcttcctccccccttcatgcaaccaaaccctagggactagggctaattcccctcctcctcctactccatggcctcggatttcgacgagaccgacgaagccttcttcgacaagctagtcaactccgacgacgacgacgatcccccggccgccgccgccgtgggggggctcgctgcgctatcgctgaccgatcaacccgacgcgccgccgcctcgcgagtccgagcctcgtgaccagcctgctgctgctgctgcggcggcagcggcaccgacggaggatgcggagcgtgagccctcgccggaggtgtatcctgcggccgtgctgctgcatccgccccccgacctcgctgccaccgtcggggcagatccggccggggacctcctgccggaagacggagaacccttctccggggccgcggctgtgccagaggatcatcagggcctggagccgtcgctgtcgtcgtctctctcagcaggcaccggcgatggcagcgcgccggatcgcaccgtctctggccacacggagagcaatgccagttcccagttggattccagcacagctgcggaggggtctgggcatcagagcgccaaatcgcagctggagtacacggatcccaggtatctagagagcctctaccctggctggaagtacgatgacgctacgcagcagtggtatcagggactgggcttgaacacaggcagacggcttctcagcctgagactgaggctggcaatcagcctgcagtggcaccacagaaagagggggaggcacagtgtgaacccaagccgatgcatacagaggtgggatatggggagagcaatgccacttcccagttcgattccagagctactgctgagggatacggggatcggagcgctgatgcgcaggtggagtacactgatcccagatatctagagagcctctaccctggctggaagtacgacgaggccacacatcagtggtatcaggtagataccctcaacacacagacttatgctgctcgtgatactggtggtgctgtggcagaccttgcgagtggcggtagtgttcagcagcaccaacagtttagtggttcgtacatacaaaacacttcacatccagagcctgctcttgagcttacagagccgacttctgagtcaaagcctcagcttgagcctgcggcggcccctcctcagaccgatgcttatcctgcggtggcatcacataaagaggagcagaaagagcatggatctgtaccggtgcatactaagcctgaagctcaggagattcctgccaatgctggtgatactgccacagtgacagagggtgggtccccagggtcagagaaaggcatccataccgccgtcaagcaagtgcagtggaacgactttggtgccagcactggtggggcggatctatttggtgacctcctgcccgatggagctgaagatgacttctttgagggcaccgtccctgtcagccaagacgtctcatccttggtaggtgctacaaatgttagcgcaccagatcacagcttctctgcaggagtgtataacactgccatgattagtgctggacacagcttctctgacggagttgataaaaatgctaactctcatttcggtcccagtggaagtagtgcagggtacggggatcaaagcactaatgcacagttgggctccactgatcccaaatacctggagagcctctacccggggtggaagtatgatgaggcgacacagcagtggtatcaggtagatacccacagtgcacagagttacgttgctgataatactggtgctgttgtagccgttgggagtgacaatacacagcaacatcagcagcagtttagtgcatcgtacttgcaaaacaatttacatgcagcacttgaaaccattgcggaagagagcagcaccaatgccatgagctgggtccagggtgggaccaacacaggacccccagaatacccaccgaacatgctgttctacgcagaatacccaggatggtactttgacaccaacactcaacaatggcaaacacttgagtcataccagcaaagtgttgcacatgttgcaactactgcagcagcctcagatgggttcgcagggacatgccataatgtagctcattacactgaggattcttatgcaagtagctataaccagcagagccagtggcaaccggattcgttcggtaataccatgcaggctgatgttttggggggcaagagcttgctaggtagttcctatggttctaatcagcaggctgggaatcagattgggcaacaggccaatgtggactctttaaatcacgagcctcatgtaaatacatttatgccttctacagggaatcagagttggtacagtggtttggagcattctacaagtaaggaattaaggtacaaaggatttgaaccttcaacaggtttccagactagtcgcaaggaattccagcctcctaaagatcaccaggctggtcacatggcagatgaacctttgacaagatatgggtatggtagttcaaatggggtcgtcaatacacaaaatttcgtaccaaaagagggtatgcacaagacacaaatgcatgatgactccactgcgcatacttatgctgcaagcaactattggggtactcagacctccatgggcagtgctcagcagcaactgactggtacaaatggtccatcccaacagtttggtttctcaccacatgagcagagatcatcagctggacgcccaccacacactgtggtatcctttggatttggggggaagcttgtagttcttaaagaaaccagctctatggctgcaaactttgacagcggaaatcagggcaattctggtcgaacggtatcagttcttaatattccagagattgttgctgataaaattgatcattcaagcatcgctaacggtggtgcatttagctacttccatgctttgtgtcgccatcctattcctggccctcttgttggtggaagtgctgcatcaaaggatctgaataaatggcttgatgatatgagtggcgtatatgaatcttctcagacagaattccagggaggggatgttcagaaggtgcttatttcgttgttgaaaatattgtgccaacactatggaaagcttcgttcatcctttgggtctgacccgtcacaagagggtatagatggcccagagatggcagtgacgaaacttttctcatcttgtaagagcagtgctaatatgaaagggtatggagctgttgtccattgcatgagaaatcttccctcagaaagccagattcagttttatgcggatactgtgaagaaaatggcccactgccattttgtttctggatcacccttgaggacactgtgccttcttattgctggacaacctgcagatgttttcagttttgagaatcctgttaacagtggtttgtcttctccccaacagcctgtagaggctgctcctaaaggtatgctggatgactggcaagagaatttggctattataacagcaaacaggacaaaaggtgatgaccttgtaattacccgccttggggattgcctttgggaagagaaaaatgaggttgcatctgcccactcgtgctatttagttgctgaactaaatattgattcgtactctggaagtgcaaggatgtgccttattggtgcggaccacttgagatgtccgcgcacatttaccagccctgaagcaatccagagaacagaggtttatgagtatgcaaaggttcttggtaattctcagtatatcctcttgccatttcaaccatacaagctgatatatgcatatatgcttgcggaggttgggaagatttctgattcactaaagtactgtcaagcatctctgaaggtgctcaagtcctctggtcgtgcacctgaactagaagcatggaagcaactgtttattaccctggaggaccggatacgtacccatcaacagggcggttatgcaacaaatcttgcccctggaaagattgttggaaagcttttcacatcacttgataaatctttgtcccgaatgatgggtacacaatctgcaccgttgcctcaactgccgcagggtgctgcaaatgagagaggtgtttattcttctcctgatacaaaagtagtaaatagtcagtcagtgatgtccatggcaccattagtgtcatctgcttcagagcagtctatgagtgaaattggaggaaatagtgtctatggcagggaagttgcacataacagaagtatttctgaaccagacttcggcaaaaccccccaacagggtgctgctgtatcaagtaaggcacagagcacatcaggttcaggcagttcacgctttggatggttggtgcagaagacaatagggcttgtttcaaaatctcaccgccaggcaaagctaggggaacagaacaagttctactatgacgagaagctgaagcggtgggttgaagaaggtgctgagatccctgccgaggagcccccacttcccccacctccaacaaaagtgccattccagaacagcgttccagatcccaactccaatgctcctcccactggtggaggttattcctcaaatcctcccgagcctagttccgggatgccaccgatgccacccacccagaaccagttctcagcacgtggaaggatgggtgttagatcaagatatgtggatacttttaacaagggtggcggtggtggtggcgcaaatgccttcggagtagcaacatcttatagcaaaccagcagctccttcaattgaaaccgcccgacaggatgaatcgtcgtcctcaccagcgatggaaacatcatttagttcgccgccatcactgatacagatgcagtcaagcattccgcggtacccaagtatggataacgtcagctcccccacaggcagcattaacagctcgatgtcaaggtcaagagcgtcatcatggagcggaacgtacccagagcagttgagcagcactgccgcttccaggtcacctgatggacagatgacgcagtcaccatcgatgcctggaagaagacctccgcacagccgttccaacagcgcgtcttcttccgcccagctcaatggtttgggtgaggatcttcacgaggtggagctctgacacctggccgcagattttgaccataatgtgatttatattaatagctgcatgtgtctagagagcaaagcaaaggaaattaaagtgcggtgtccctttttcaatttttttacatgtgaaagactgtggatgccgctgcattgtacagatagttgactcgttcgccagatgaaaaatgtataacaagagtcgtaggttcaagatagggagaagatgaaaccgtgatgattcatcattgttaaaaagatggactgtctgttggaaaaataaagctgattaataaccgcaataatgtcggtccgcatcttggtgttcatattcttatttgtgtgtatgcatttctttgttcctgt

SEQ ID NO: 61129 - DNA, 5713 bp, Zea Mays
atcaaatctctacagacacctctagcggattagtgacgtcagcgcgcgcatcgcacacgcgtctcctccctctgctcccagtctccaatctcctcccttccccactgcggcggaagtccaccaaagcgaaaccaagagcggcccgaccagatccaccttcttcctccccccttcatgcaaccaaaccctagggactagggctaattcccctcctcctcctactccatggcctcggatttcgacgagaccgacgaagccttcttcgacaagctagtcaactccgacgacgacgacgatcccccggccgccgccgccgtgggggggctcgctgcgctatcgctgaccgatcaacccgacgcgccgccgcctcgcgagtccgagcctcgtgaccagcctgctgctgctgctgcggcggcagcggcaccgacggaggatgcggagcgtgagccctcgccggaggtgtatcctgcggccgtgctgctgcatccgccccccgacctcgctgccaccgtcggggcagatccggccggggacctcctgccggaagacggagaacccttctccggggccgcggctgtgccagaggatcatcagggcctggagccgtcgctgtcgtcgtctctctcagcaggcaccggcgatggcagcgcgccggatcgcaccgtctctggccacacggagagcaatgccagttcccagttggattccagcacagctgcggaggggtctgggcatcagagcgccaaatcgcagctggagtacacggatcccaggtatctagagagcctctaccctggctggaagtacgatgacgctacgcagcagtggtatcagggactgggcttgaacacaggcagacggcttctcagcctgagactgaggctggcaatcagcctgcagtggcaccacagaaagagggggaggcacagtgtgaacccaagccgatgcatacagaggtgggatatggggagagcaatgccacttcccagttcgattccagagctactgctgagggatacggggatcggagcgctgatgcgcaggtggagtacactgatcccagatatctagagagcctctaccctggctggaagtacgacgaggccacacatcagtggtatcaggtagataccctcaacacacagacttatgctgctcgtgatactggtggtgctgtggcagaccttgcgagtggcggtagtgttcagcagcaccaacagtttagtggttcgtacatacaaaacacttcacatccagagcctgctcttgagcttacagagccgacttctgagtcaaagcctcagcttgagcctgcggcggcccctcctcagaccgatgcttatcctgcggtggcatcacataaagaggagcagaaagagcatggatctgtaccggtgcatactaagcctgaagctcaggagattcctgccaatgctggtgatactgccacagtgacagagggtgggtccccagggtcagagaaaggcatccataccgccgtcaagcaagtgcagtggaacgactttggtgccagcactggtggggcggatctatttggtgacctcctgcccgatggagctgaagatgacttctttgagggcaccgtccctgtcagccaagacgtctcatccttggtaggtgctacaaatgttagcgcaccagatcacagcttctctgcaggagtgtataacactgccatgattagtgctggacacagcttctctgacggagttgataaaaatgctaactctcatttcggtcccagtggaagtagtgcagggtacggggatcaaagcactaatgcacagttgggctccactgatcccaaatacctggagagcctctacccggggtggaagtatgatgaggcgacacagcagtggtatcaggtagatacccacagtgcacagagttacgttgctgataatactggtgctgttgtagccgttgggagtgacaatacacagcaacatcagcagcagtttagtgcatcgtacttgcaaaacaatttacatgcagcacttgaaaccattgcggaagagagcagcaccaatgccatgagctgggtccagggtgggaccaacacaggacccccagaatacccaccgaacatgctgttctacgcagaatacccaggatggtactttgacaccaacactcaacaatggcaaacacttgagtcataccagcaaagtgttgcacatgttgcaactactgcagcagcctcagatgggttcgcagggacatgccataatgtagctcattacactgaggattcttatgcaagtagctataaccagcagagccagtggcaaccggattcgttcggtaataccatgcaggctgatgttttggggggcaagagcttgctaggtagttcctatggttctaatcagcaggctgggaatcagattgggcaacaggccaatgtggactctttaaatcacgagcctcatgtaaatacatttatgccttctacagggaatcagagttggtacagtggtttggagcattctacaagtaaggaattaaggtacaaaggatttgaaccttcaacaggtttccagactagtcgcaaggaattccagcctcctaaagatcaccaggctggtcacatggcagatgaacctttgacaagatatgggtatggtagttcaaatggggtcgtcaatacacaaaatttcgtaccaaaagagggtatgcacaagacacaaatgcatgatgactccactgcgcatacttatgctgcaagcaactattggggtactcagacctccatgggcagtgctcagcagcaactgactggtacaaatggtccatcccaacagtttggtttctcaccacatgagcagagatcatcagctggacgcccaccacacactgtggtatcctttggatttggggggaagcttgtagttcttaaagaaaccagctctatggctgcaaactttgacagcggaaatcagggcaattctggtcgaacggtatcagttcttaatattccagagattgttgctgataaaattgatcattcaagcatcgctaacggtggtgcatttagctacttccatgctttgtgtcgccatcctattcctggccctcttgttggtggaagtgctgcatcaaaggatctgaataaatggcttgatgatatgagtggcgtatatgaatcttctcagacagaattccagggaggggatgttcagaaggtgcttatttcgttgttgaaaatattgtgccaacactatggaaagcttcgttcatcctttgggtctgacccgtcacaagagggtatagatggcccagagatggcagtgacgaaacttttctcatcttgtaagagcagtgctaatatgaaagggtatggagctgttgtccattgcatgagaaatcttccctcagaaagccagattcagactactgcccaggaggttcaaagtctcttggtttctggtagaaggaaagaggcccttcaccaggcacaagaaggtcacctttggggccctgcactgatccttgctttacaacttggtgataagttttatgcggatactgtgaagaaaatggcccactgccattttgtttctggatcacccttgaggacactgtgccttcttattgctggacaacctgcagatgttttcagttttgagaatcctgttaacagtggtttgtcttctccccaacagcctgtagaggctgctcctaaaggtatgctggatgactggcaagagaatttggctattataacagcaaacaggacaaaaggtgatgaccttgtaattacccgccttggggattgcctttgggaagagaaaaatgaggttgcatctgcccactcgtgctatttagttgctgaactaaatattgattcgtactctggaagtgcaaggatgtgccttattggtgcggaccacttgagatgtccgcgcacatttaccagccctgaagcaatccagagaacagaggtttatgagtatgcaaaggttcttggtaattctcagtatatcctcttgccatttcaaccatacaagctgatatatgcatatatgcttgcggaggttgggaagatttctgattcactaaatgcattatgaaggtactgtcaagcatctctgaaggtgctcaagtcctctggtcgtgcacctgaactagaagcatggaagcaactgtttattaccctggaggaccggatacgtacccatcaacagggcggttatgcaacaaatcttgcccctggaaagattgttggaaagcttttcacatcacttgataaatctttgtcccgaatgatgggtacacaatctgcaccgttgcctcaactgccgcagggtgctgcaaatgagagaggtgtttattcttctcctgatacaaaagtagtaaatagtcagtcagtgatgtccatggcaccattagtgtcatctgcttcagagcagtctatgagtgaaattggaggaaatagtgtctatggcagggaagttgcacataacagaagtatttctgaaccagacttcggcaaaaccccccaacagcagggtgctgctgtatcaagtaaggcacagagcacatcaggttcaggcagttcacgctttggatggttggtgcagaagacaatagggcttgtttcaaaatctcaccgccaggcaaagctaggggaacagaacaagttctactatgacgagaagctgaagcggtgggttgaagaaggtgctgagatccctgccgaggagcccccacttcccccacctccaacaaaagtgccattccagaacagcgttccagatcccaactccaatgctcctcccactggtggaggttattcctcaaatcctcccgagcctagttccgggatgccaccgatgccacccacccagaaccagttctcagcacgtggaaggatgggtgttagatcaagatatgtggatacttttaacaagggtggcggtggtggtggcgcaaatgccttcggagtagcaacatcttatagcaaaccagcagctccttcaattgaaaccgcccgacaggatgaatcgtcgtcctcaccagcgatggaaacatcatttagttcgccgccatcactgatacagatgcagtcaagcattccgcggtacccaagtatggataacgtcagctcccccacaggcagcattaacagctcgatgtcaaggtcaagagcgtcatcatggagcggaacgtacccagagcagttgagcagcactgccgcttccaggtcacctgatggacagatgacgcagtcaccatcgatgcctggaagaagacctccgcacagccgttccaacagcgcgtcttcttccgcccagctcaatggtttgggtgaggatcttcacgaggtggagctctgacacctggccgcagattttgaccataatgtgatttatattaatagctgcatgtgtctagagagcaaagcaaaggaaattaaagtgcggtgtccctttttcaatttttttacatgtgaaagactgtggatgccgctgcattgtacagatagttgactcgttcgccagatgaaaaatgtataacaagagtcgtaggttcaagatagggagaagatgaaaccgtgatgattcatcattgttaaaaagatggactgtctgttggaaaaataaagctgattaataaccgcaataatgtcggtccgcatcttggtgttcatattcttatttgtgtgtatgcatttctttgttcctgt

SEQ ID NO: 61130 - DNA, 5645 bp, Zea Mays
atcaaatctctacagacacctctagcggattagtgacgtcagcgcgcgcatcgcacacgcgtctcctccctctgctcccagtctccaatctcctcccttccccactgcggcggaagtccaccaaagcgaaaccaagagcggcccgaccagatccaccttcttcctccccccttcatgcaaccaaaccctagggactagggctaattcccctcctcctcctactccatggcctcggatttcgacgagaccgacgaagccttcttcgacaagctagtcaactccgacgacgacgacgatcccccggccgccgccgccgtgggggggctcgctgcgctatcgctgaccgatcaacccgacgcgccgccgcctcgcgagtccgagcctcgtgaccagcctgctgctgctgctgcggcggcagcggcaccgacggaggatgcggagcgtgagccctcgccggaggtgtatcctgcggccgtgctgctgcatccgccccccgacctcgctgccaccgtcggggcagatccggccggggacctcctgccggaagacggagaacccttctccggggccgcggctgtgccagaggatcatcagggcctggagccgtcgctgtcgtcgtctctctcagcaggcaccggcgatggcagcgcgccggatcgcaccgtctctggccacacggagagcaatgccagttcccagttggattccagcacagctgcggaggggtctgggcatcagagcgccaaatcgcagctggagtacacggatcccaggtatctagagagcctctaccctggctggaagtacgatgacgctacgcagcagtggtatcagggactgggcttgaacacaggcagacggcttctcagcctgagactgaggctggcaatcagcctgcagtggcaccacagaaagagggggaggcacagtgtgaacccaagccgatgcatacagaggtgggatatggggagagcaatgccacttcccagttcgattccagagctactgctgagggatacggggatcggagcgctgatgcgcaggtggagtacactgatcccagatatctagagagcctctaccctggctggaagtacgacgaggccacacatcagtggtatcaggtagataccctcaacacacagacttatgctgctcgtgatactggtggtgctgtggcagaccttgcgagtggcggtagtgttcagcagcaccaacagtttagtggttcgtacatacaaaacacttcacatccagagcctgctcttgagcttacagagccgacttctgagtcaaagcctcagcttgagcctgcggcggcccctcctcagaccgatgcttatcctgcggtggcatcacataaagaggagcagaaagagcatggatctgtaccggtgcatactaagcctgaagctcaggagattcctgccaatgctggtgatactgccacagtgacagagggtgggtccccagggtcagagaaaggcatccataccgccgtcaagcaagtgcagtggaacgactttggtgccagcactggtggggcggatctatttggtgacctcctgcccgatggagctgaagatgacttctttgagggcaccgtccctgtcagccaagacgtctcatccttggtaggtgctacaaatgttagcgcaccagatcacagcttctctgcaggagtgtataacactgccatgattagtgctggacacagcttctctgacggagttgataaaaatgctaactctcatttcggtcccagtggaagtagtgcagggtacggggatcaaagcactaatgcacagttgggctccactgatcccaaatacctggagagcctctacccggggtggaagtatgatgaggcgacacagcagtggtatcaggtagatacccacagtgcacagagttacgttgctgataatactggtgctgttgtagccgttgggagtgacaatacacagcaacatcagcagcagtttagtgcatcgtacttgcaaaacaatttacatgcagcacttgaaaccattgcggaagagagcagcaccaatgccatgagctgggtccagggtgggaccaacacaggacccccagaatacccaccgaacatgctgttctacgcagaatacccaggatggtactttgacaccaacactcaacaatggcaaacacttgagtcataccagcaaagtgttgcacatgttgcaactactgcagcagcctcagatgggttcgcagggacatgccataatgtagctcattacactgaggattcttatgcaagtagctataaccagcagagccagtggcaaccggattcgttcggtaataccatgcaggctgatgttttggggggcaagagcttgctaggtagttcctatggttctaatcagcaggctgggaatcagattgggcaacaggccaatgtggactctttaaatcacgagcctcatgtaaatacatttatgccttctacagggaatcagagttggtacagtggtttggagcattctacaagtaaggaattaaggtacaaaggatttgaaccttcaacaggtttccagactagtcgcaaggaattccagcctcctaaagatcaccaggctggtcacatggcagatgaacctttgacaagatatgggtatggtagttcaaatggggtcgtcaatacacaaaatttcgtaccaaaagagggtatgcacaagacacaaatgcatgatgactccactgcgcatacttatgctgcaagcaactattggggtactcagacctccatgggcagtgctcagcagcaactgactggtacaaatggtccatcccaacagtttggtttctcaccacatgagcagagatcatcagctggacgcccaccacacactgtggtatcctttggatttggggggaagcttgtagttcttaaagaaaccagctctatggctgcaaactttgacagcggaaatcagggcaattctggtcgaacggtatcagttcttaatattccagagattgttgctgataaaattgatcattcaagcatcgctaacggtggtgcatttagctacttccatgctttgtgtcgccatcctattcctggccctcttgttggtggaagtgctgcatcaaaggatctgaataaatggcttgatgatatgagtggcgtatatgaatcttctcagacagaattccagggaggggatgttcagaaggtgcttatttcgttgttgaaaatattgtgccaacactatggaaagcttcgttcatcctttgggtctgacccgtcacaagagggtatagatggcccagagatggcagtgacgaaacttttctcatcttgtaagagcagtgctaatatgaaagggtatggagctgttgtccattgcatgagaaatcttccctcagaaagccagattcagactactgcccaggaggttcaaagtctcttggtttctggtagaaggaaagaggcccttcaccaggcacaagaaggtcacctttggggccctgcactgatccttgctttacaacttggtgataagttttatgcggatactgtgaagaaaatggcccactgccattttgtttctggatcacccttgaggacactgtgccttcttattgctggacaacctgcagatgttttcagttttgagaatcctgttaacagtggtttgtcttctccccaacagcctgtagaggctgctcctaaaggtatgctggatgactggcaagagaatttggctattataacagcaaacaggacaaaaggttgcatctgcccactcgtgctatttagttgctgaactaaatattgattcgtactctggaagtgcaaggatgtgccttattggtgcggaccacttgagatgtccgcgcacatttaccagccctgaagcaatccagagaacagaggtttatgagtatgcaaaggttcttggtaattctcagtatatcctcttgccatttcaaccatacaagctgatatatgcatatatgcttgcggaggttgggaagatttctgattcactaaagtactgtcaagcatctctgaaggtgctcaagtcctctggtcgtgcacctgaactagaagcatggaagcaactgtttattaccctggaggaccggatacgtacccatcaacagggcggttatgcaacaaatcttgcccctggaaagattgttggaaagcttttcacatcacttgataaatctttgtcccgaatgatgggtacacaatctgcaccgttgcctcaactgccgcagggtgctgcaaatgagagaggtgtttattcttctcctgatacaaaagtagtaaatagtcagtcagtgatgtccatggcaccattagtgtcatctgcttcagagcagtctatgagtgaaattggaggaaatagtgtctatggcagggaagttgcacataacagaagtatttctgaaccagacttcggcaaaaccccccaacagcagggtgctgctgtatcaagtaaggcacagagcacatcaggttcaggcagttcacgctttggatggttggtgcagaagacaatagggcttgtttcaaaatctcaccgccaggcaaagctaggggaacagaacaagttctactatgacgagaagctgaagcggtgggttgaagaaggtgctgagatccctgccgaggagcccccacttcccccacctccaacaaaagtgccattccagaacagcgttccagatcccaactccaatgctcctcccactggtggaggttattcctcaaatcctcccgagcctagttccgggatgccaccgatgccacccacccagaaccagttctcagcacgtggaaggatgggtgttagatcaagatatgtggatacttttaacaagggtggcggtggtggtggcgcaaatgccttcggagtagcaacatcttatagcaaaccagcagctccttcaattgaaaccgcccgacaggatgaatcgtcgtcctcaccagcgatggaaacatcatttagttcgccgccatcactgatacagatgcagtcaagcattccgcggtacccaagtatggataacgtcagctcccccacaggcagcattaacagctcgatgtcaaggtcaagagcgtcatcatggagcggaacgtacccagagcagttgagcagcactgccgcttccaggtcacctgatggacagatgacgcagtcaccatcgatgcctggaagaagacctccgcacagccgttccaacagcgcgtcttcttccgcccagctcaatggtttgggtgaggatcttcacgaggtggagctctgacacctggccgcagattttgaccataatgtgatttatattaatagctgcatgtgtctagagagcaaagcaaaggaaattaaagtgcggtgtccctttttcaatttttttacatgtgaaagactgtggatgccgctgcattgtacagatagttgactcgttcgccagatgaaaaatgtataacaagagtcgtaggttcaagatagggagaagatgaaaccgtgatgattcatcattgttaaaaagatggactgtctgttggaaaaataaagctgattaataaccgcaataatgtcggtccgcatcttggtgttcatattcttatttgtgtgtatgcatttctttgttcctgt

SEQ ID NO: 61131 - DNA, 5642 bp, Zea Mays
atcaaatctctacagacacctctagcggattagtgacgtcagcgcgcgcatcgcacacgcgtctcctccctctgctcccagtctccaatctcctcccttccccactgcggcggaagtccaccaaagcgaaaccaagagcggcccgaccagatccaccttcttcctccccccttcatgcaaccaaaccctagggactagggctaattcccctcctcctcctactccatggcctcggatttcgacgagaccgacgaagccttcttcgacaagctagtcaactccgacgacgacgacgatcccccggccgccgccgccgtgggggggctcgctgcgctatcgctgaccgatcaacccgacgcgccgccgcctcgcgagtccgagcctcgtgaccagcctgctgctgctgctgcggcggcagcggcaccgacggaggatgcggagcgtgagccctcgccggaggtgtatcctgcggccgtgctgctgcatccgccccccgacctcgctgccaccgtcggggcagatccggccggggacctcctgccggaagacggagaacccttctccggggccgcggctgtgccagaggatcatcagggcctggagccgtcgctgtcgtcgtctctctcagcaggcaccggcgatggcagcgcgccggatcgcaccgtctctggccacacggagagcaatgccagttcccagttggattccagcacagctgcggaggggtctgggcatcagagcgccaaatcgcagctggagtacacggatcccaggtatctagagagcctctaccctggctggaagtacgatgacgctacgcagcagtggtatcagggactgggcttgaacacaggcagacggcttctcagcctgagactgaggctggcaatcagcctgcagtggcaccacagaaagagggggaggcacagtgtgaacccaagccgatgcatacagaggtgggatatggggagagcaatgccacttcccagttcgattccagagctactgctgagggatacggggatcggagcgctgatgcgcaggtggagtacactgatcccagatatctagagagcctctaccctggctggaagtacgacgaggccacacatcagtggtatcaggtagataccctcaacacacagacttatgctgctcgtgatactggtggtgctgtggcagaccttgcgagtggcggtagtgttcagcagcaccaacagtttagtggttcgtacatacaaaacacttcacatccagagcctgctcttgagcttacagagccgacttctgagtcaaagcctcagcttgagcctgcggcggcccctcctcagaccgatgcttatcctgcggtggcatcacataaagaggagcagaaagagcatggatctgtaccggtgcatactaagcctgaagctcaggagattcctgccaatgctggtgatactgccacagtgacagagggtgggtccccagggtcagagaaaggcatccataccgccgtcaagcaagtgcagtggaacgactttggtgccagcactggtggggcggatctatttggtgacctcctgcccgatggagctgaagatgacttctttgagggcaccgtccctgtcagccaagacgtctcatccttggtaggtgctacaaatgttagcgcaccagatcacagcttctctgcaggagtgtataacactgccatgattagtgctggacacagcttctctgacggagttgataaaaatgctaactctcatttcggtcccagtggaagtagtgcagggtacggggatcaaagcactaatgcacagttgggctccactgatcccaaatacctggagagcctctacccggggtggaagtatgatgaggcgacacagcagtggtatcaggtagatacccacagtgcacagagttacgttgctgataatactggtgctgttgtagccgttgggagtgacaatacacagcaacatcagcagcagtttagtgcatcgtacttgcaaaacaatttacatgcagcacttgaaaccattgcggaagagagcagcaccaatgccatgagctgggtccagggtgggaccaacacaggacccccagaatacccaccgaacatgctgttctacgcagaatacccaggatggtactttgacaccaacactcaacaatggcaaacacttgagtcataccagcaaagtgttgcacatgttgcaactactgcagcagcctcagatgggttcgcagggacatgccataatgtagctcattacactgaggattcttatgcaagtagctataaccagcagagccagtggcaaccggattcgttcggtaataccatgcaggctgatgttttggggggcaagagcttgctaggtagttcctatggttctaatcagcaggctgggaatcagattgggcaacaggccaatgtggactctttaaatcacgagcctcatgtaaatacatttatgccttctacagggaatcagagttggtacagtggtttggagcattctacaagtaaggaattaaggtacaaaggatttgaaccttcaacaggtttccagactagtcgcaaggaattccagcctcctaaagatcaccaggctggtcacatggcagatgaacctttgacaagatatgggtatggtagttcaaatggggtcgtcaatacacaaaatttcgtaccaaaagagggtatgcacaagacacaaatgcatgatgactccactgcgcatacttatgctgcaagcaactattggggtactcagacctccatgggcagtgctcagcagcaactgactggtacaaatggtccatcccaacagtttggtttctcaccacatgagcagagatcatcagctggacgcccaccacacactgtggtatcctttggatttggggggaagcttgtagttcttaaagaaaccagctctatggctgcaaactttgacagcggaaatcagggcaattctggtcgaacggtatcagttcttaatattccagagattgttgctgataaaattgatcattcaagcatcgctaacggtggtgcatttagctacttccatgctttgtgtcgccatcctattcctggccctcttgttggtggaagtgctgcatcaaaggatctgaataaatggcttgatgatatgagtggcgtatatgaatcttctcagacagaattccagggaggggatgttcagaaggtgcttatttcgttgttgaaaatattgtgccaacactatggaaagcttcgttcatcctttgggtctgacccgtcacaagagtgctaatatgaaagggtatggagctgttgtccattgcatgagaaatcttccctcagaaagccagattcagactactgcccaggaggttcaaagtctcttggtttctggtagaaggaaagaggcccttcaccaggcacaagaaggtcacctttggggccctgcactgatccttgctttacaacttggtgataagttttatgcggatactgtgaagaaaatggcccactgccattttgtttctggatcacccttgaggacactgtgccttcttattgctggacaacctgcagatgttttcagttttgagaatcctgttaacagtggtttgtcttctccccaacagcctgtagaggctgctcctaaaggtatgctggatgactggcaagagaatttggctattataacagcaaacaggacaaaaggtgatgaccttgtaattacccgccttggggattgcctttgggaagagaaaaatgaggttgcatctgcccactcgtgctatttagttgctgaactaaatattgattcgtactctggaagtgcaaggatgtgccttattggtgcggaccacttgagatgtccgcgcacatttaccagccctgaagcaatccagagaacagaggtttatgagtatgcaaaggttcttggtaattctcagtatatcctcttgccatttcaaccatacaagctgatatatgcatatatgcttgcggaggttgggaagatttctgattcactaaagtactgtcaagcatctctgaaggtgctcaagtcctctggtcgtgcacctgaactagaagcatggaagcaactgtttattaccctggaggaccggatacgtacccatcaacagggcggttatgcaacaaatcttgcccctggaaagattgttggaaagcttttcacatcacttgataaatctttgtcccgaatgatgggtacacaatctgcaccgttgcctcaactgccgcagggtgctgcaaatgagagaggtgtttattcttctcctgatacaaaagtagtaaatagtcagtcagtgatgtccatggcaccattagtgtcatctgcttcagagcagtctatgagtgaaattggaggaaatagtgtctatggcagggaagttgcacataacagaagtatttctgaaccagacttcggcaaaaccccccaacagggtgctgctgtatcaagtaaggcacagagcacatcaggttcaggcagttcacgctttggatggttggtgcagaagacaatagggcttgtttcaaaatctcaccgccaggcaaagctaggggaacagaacaagttctactatgacgagaagctgaagcggtgggttgaagaaggtgctgagatccctgccgaggagcccccacttcccccacctccaacaaaagtgccattccagaacagcgttccagatcccaactccaatgctcctcccactggtggaggttattcctcaaatcctcccgagcctagttccgggatgccaccgatgccacccacccagaaccagttctcagcacgtggaaggatgggtgttagatcaagatatgtggatacttttaacaagggtggcggtggtggtggcgcaaatgccttcggagtagcaacatcttatagcaaaccagcagctccttcaattgaaaccgcccgacaggatgaatcgtcgtcctcaccagcgatggaaacatcatttagttcgccgccatcactgatacagatgcagtcaagcattccgcggtacccaagtatggataacgtcagctcccccacaggcagcattaacagctcgatgtcaaggtcaagagcgtcatcatggagcggaacgtacccagagcagttgagcagcactgccgcttccaggtcacctgatggacagatgacgcagtcaccatcgatgcctggaagaagacctccgcacagccgttccaacagcgcgtcttcttccgcccagctcaatggtttgggtgaggatcttcacgaggtggagctctgacacctggccgcagattttgaccataatgtgatttatattaatagctgcatgtgtctagagagcaaagcaaaggaaattaaagtgcggtgtccctttttcaatttttttacatgtgaaagactgtggatgccgctgcattgtacagatagttgactcgttcgccagatgaaaaatgtataacaagagtcgtaggttcaagatagggagaagatgaaaccgtgatgattcatcattgttaaaaagatggactgtctgttggaaaaataaagctgattaataaccgcaataatgtcggtccgcatcttggtgttcatattcttatttgtgtgtatgcatttctttgttcctgt

SEQ ID NO: 61132 - DNA, 2129 bp, Zea Mays
gtgcgtgttccttcttcctcctgcgctagctgcgcggttctgctcttcaattctgcggtccctgtgcctcctggccctcgccgcggcggcggcggtgtccgggcggcgccacggggcctccccggcgcgcggcagcgggcagagcatgtacctggcgccggcctgccgggcgcacacggcgtcggtggcggacttcggcggcgtgggcgacggcaccacttccaacaccgcggcgttccggtccgcggtggaccacctgtcgcagtactcgggcgagggcggcggcggtggcatgctgtacgtgcccgcgggcaagtggctgacgggccccttcaacctgaccagccacttcaccctctacctccaccaagacgccgtcatcctcggctcccaggacgtaggcgagtggccaatcgtggatcccctgccttcttacggaagagggagggacaaggtcggagggaggttcgctagcctcatcggcggatcgaacctgaccgacgtagtcatcactggcagcaacgggacgatcgatgggcagggcgccatgtggtggtccaagttccacaagaaccagctcaagtacacgcgcggctacctcatcgagctgatgcactcggacaccatctacatctccaacctgacgctgctcaactcgccggcgtggaacatccacccagtctacagcagcaacatcgtggtgcaaggcatcaccatcctggcgccgaccaactcgcccaacaccgacggcatcaacccagactcctgctctcacgtccgcatcgaggactgctacatcgtgtcgggcgacgactgcgtggccatcaagagcggctgggacgagtacggcatctcgtacgggatgcccagccagcacatcgtcatccgccgcctcacgtgcgtgtccccgaccagcgccgtcatcgcgctgggcagcgagatgtcgggcggcatccaggacgtgcgcgccgaggacatcacggcgatcaacaccgagtccgccgtgcgcatcaagaccgccgtcggccgcggcgcctacgtcagggacgtgttcgcgcgccggatgacgctcaccaccatgaagcgggtgttctggatgacgggcgactacaagtcccacccggacgacaagtacgaccccaacgccgtccccgttgtcgccaacatcagctaccaggacgtggtggccacgggggtctacaaggaggcggcgcgcctccagggcatccagggcgcaccgttccggggcatctgcgtcgccaacgtcaccgccgacctgtccaagtccaggaagtacccatggaactgcgccgacatcgagggagtgtcggccaacgtcagccccgcgccgtgcgacccgctacagggcgcgcacgacggcgcatgcccgttcccgaccgacacgctgcccatcgaccaggtcacagtgcagcagtgcgcatacgacatcccggccaccaactagcagctcaatcaaggagtgtattcggatgtggatcagccgcctagtacaacttgtagttcaggtccaatgcaagcgactagtagtatcaagtctcatcaacacaataacgacagaatgaatcgggcactagcctagaaagcattcataaactccgagcctgtacaccatctacagcctaaagactgacttgactcatcacctgccgccgaagaacgagaagaagccgcctccgcctcctttcttctcgggcctctcctgctcttcgaccatgaccgccgtcatcgcatctctttccaccaatctccaagtagcctgctccagagcaaggccagcaggcgtgggcgggtcattcagcaccagcggcacgcccctattcgtactccggatcacctccgtgtcctctggcaccacgcctagtaaaggcaacccgagcatttcctgcacgtccagcgctgacatcatgtcctcccccttcaccaggtctggccgcactcggttgacaacgatcttgatgtctttgatgccatcgcactccagcagtcccgcgacacggtcagcatcgcggagagccgtaatgtcgggagtggtaacgagcaccgcctcttctgcgggtgcaatggcagtgacaaacccagcatcaacacctgcaaaacaaaacatcaag

SEQ ID NO: 61133 - DNA, 2103 bp, Zea Mays
ccgcgttcgttcgtggcggccgcattctgcggtccctgtgcctcctggccctcgccgcggcggcggcggtgtccgggcggcgccacggggcctccccggcgcgcggcagcgggcagagcatgtacctggcgccggcctgccgggcgcacacggcgtcggtggcggacttcggcggcgtgggcgacggcaccacttccaacaccgcggcgttccggtccgcggtggaccacctgtcgcagtactcgggcgagggcggcggcggtggcatgctgtacgtgcccgcgggcaagtggctgacgggccccttcaacctgaccagccacttcaccctctacctccaccaagacgccgtcatcctcggctcccaggacgtaggcgagtggccaatcgtggatcccctgccttcttacggaagagggagggacaaggtcggagggaggttcgctagcctcatcggcggatcgaacctgaccgacgtagtcatcactggcagcaacgggacgatcgatgggcagggcgccatgtggtggtccaagttccacaagaaccagctcaagtacacgcgcggctacctcatcgagctgatgcactcggacaccatctacatctccaacctgacgctgctcaactcgccggcgtggaacatccacccagtctacagcagcaacatcgtggtgcaaggcatcaccatcctggcgccgaccaactcgcccaacaccgacggcatcaacccagactcctgctctcacgtccgcatcgaggactgctacatcgtgtcgggcgacgactgcgtggccatcaagagcggctgggacgagtacggcatctcgtacgggatgcccagccagcacatcgtcatccgccgcctcacgtgcgtgtccccgaccagcgccgtcatcgcgctgggcagcgagatgtcgggcggcatccaggacgtgcgcgccgaggacatcacggcgatcaacaccgagtccgccgtgcgcatcaagaccgccgtcggccgcggcgcctacgtcagggacgtgttcgcgcgccggatgacgctcaccaccatgaagcgggtgttctggatgacgggcgactacaagtcccacccggacgacaagtacgaccccaacgccgtccccgttgtcgccaacatcagctaccaggacgtggtggccacgggggtctacaaggaggcggcgcgcctccagggcatccagggcgcaccgttccggggcatctgcgtcgccaacgtcaccgccgacctgtccaagtccaggaagtacccatggaactgcgccgacatcgagggagtgtcggccaacgtcagccccgcgccgtgcgacccgctacagggcgcgcacgacggcgcatgcccgttcccgaccgacacgctgcccatcgaccaggtcacagtgcagcagtgcgcatacgacatcccggccaccaactagcagctcaatcaaggagtgtattcggatgtggatcagccgcctagtacaacttgtagttcaggtccaatgcaagcgactagtagtatcaagtctcatcaacacaataacgacagaatgaatcgggcactagcctagaaagcattcataaactccgagcctgtacaccatctacagcctaaagactgacttgactcatcacctgccgccgaagaacgagaagaagccgcctccgcctcctttcttctcgggcctctcctgctcttcgaccatgaccgccgtcatcgcatctctttccaccaatctccaagtagcctgctccagagcaaggccagcaggcgtgggcgggtcattcagcaccagcggcacgcccctattcgtactccggatcacctccgtgtcctctggcaccacgcctagtaaaggcaacccgagcatttcctgcacgtccagcgctgacatcatgtcctcccccttcaccaggtctggccgcactcggttgacaacgatcttgatgtctttgatgccatcgcactccagcagtcccgcgacacggtcagcatcgcggagagccgtaatgtcgggagtggtaacgagcaccgcctcttctgcgggtgcaatggcagtgacaaacccagcatcaacacctgcaaaacaaaacatcaag

SEQ ID NO: 61134 - DNA, 1382 bp, Zea Mays
ccagcaaactgcaaaccaaccctaaagccaccgatccgacggcggggatcgaccgatcaaaccacaaaaccctacccctggccgccccttttttatataaaaggatcgccctccgcgcgccgccgctccttcgcaaaccctcctaccccattccgccgcccgccccgcgaccccgaggaggaggcaagatgaagacgatcctggcgtcggagacgatggacatcccggagggcgtcacagtgacggtggcggccaagctggtgacggtggagggcccccgcgggaagctcacccggaacttcaagcacctcaacctcgacttccagctgcaggagggcggccgcaagctcaaggtggacgcatggttcggcacccgccgcaccatggccgccatccgcaccgccatctcccacgtccagaacctcatcaagggggtcaccaagggctaccgctacaagatgaggtttgtctacgcccatttccccatcaacgcgtccatcaccaactccaacaccgccatcgagataaggaacttcctcggcgagaagaagaaaggtggacatgcttgacggcgtgaccatcctccgctccgagaaggtcaaggacgagcttattctcgatggcaacgacgtcgagttagtctctcgctccgccgccctcatcaaccagaaatgccatgtcaagaagaaggatatcaggaagtttttggatggtatctatgtgagcgacaagggtgtgatcgaagaggagcagtgagggacaattagttgttatcgtttgagttggaattattgtttggtttgcaattttctcaaggtgaactttgtaatcggttaggatgtgttgtggaccattatcttatcctacaatattatcgtatctgtttaagaatatgaagcttgtttatcatttcctaaaaggatctggtcgacgaggttactaaaacaggtgaaggttaaaggtttaaacgtagctttaaacaatatagtaaaatattaatatattatagtttcagacaataatatgaagctaaataccaaacaatcaacattgttcacataataatattctgcaaaatgatatctctacaactggtcaactgcacaagttcaactaatagtaagttgacaaacgcaaacaaaatagaatgaaatctataaacataacaaaaaaagcaaatagagtggaatgcaatgttcacaaaatcaagcacacaagcgttatctagtctccctttattatatgttaataaccatcatctaaatcatctataactaacttcatccttgtctaatttgttgcttatcaccatatccaccgctgttgtttctggcttcatcatccatatcaaggtcatcaagcaaaaaaaaaaaaaaaataac

SEQ ID NO: 61135 - DNA, 1404 bp, Zea Mays
gaagcccagccgagtgaccaagtagcattacaggcccacctgaccacttgaccagcaaactgcaaaccaaccctaaagccaccgatccgacggcggggatcgaccgatcaaaccacaaaaccctacccctggccgccccttttttatataaaaggatcgccctccgcgcgccgccgctccttcgcaaaccctcctaccccattccgccgcccgccccgcgaccccgaggaggaggcaagatgaagacgatcctggcgtcggagacgatggacatcccggagggcgtcacagtgacggtggcggccaagctggtgacggtggagggcccccgcgggaagctcacccggaacttcaagcacctcaacctcgacttccagctgcaggagggcggccgcaagctcaaggtggacgcatggttcggcacccgccgcaccatggccgccatccgcaccgccatctcccacgtccagaacctcatcaagggggtcaccaagggctaccgctacaagatgaggtttgtctacgcccatttccccatcaacgcgtccatcaccaactccaacaccgccatcgagataaggaacttcctcggcgagaagaaggtcagaaaggtggacatgcttgacggcgtgaccatcctccgctccgagaaggtcaaggacgagcttattctcgatggcaacgacgtcgaaaatgccatgtcaagaagaaggatatcaggaagtttttggatggtatctatgtgagcgacaagggtgtgatcgaagaggagcagtgagggacaattagttgttatcgtttgagttggaattattgtttggtttgcaattttctcaaggtgaactttgtaatcggttaggatgtgttgtggaccattatcttatcctacaatattatcgtatctgtttaagaatatgaagcttgtttatcatttcctaaaaggatctggtcgacgaggttactaaaacaggtgaaggttaaaggtttaaacgtagctttaaacaatatagtaaaatattaatatattatagtttcagacaataatatgaagctaaataccaaacaatcaacattgttcacataataatattctgcaaaatgatatctctacaactggtcaactgcacaagttcaactaatagtaagttgacaaacgcaaacaaaatagaatgaaatctataaacataacaaaaaaagcaaatagagtggaatgcaatgttcacaaaatcaagcacacaagcgttatctagtctccctttattatatgttaataaccatcatctaaatcatctataactaacttcatccttgtctaatttgttgcttatcaccatatccaccgctgttgtttctggcttcatcatccatatcaaggtcatcaagcaaaaaaaaaaaaaaaataac

SEQ ID NO: 61136 - DNA, 1662 bp, Zea Mays
agtctatataaccccctccctgccatccacccaacgaaccccaccaccaccacagcttctctctagctttgatctccaagcccacgccaactaattaataagcaacgtacaagcaatgggcaggtcaccgtgctgcgaccaggacgcgggggtgaagaagggtccgtggacgcccgaggaggacaagctgctggtggactacatcaacgagcacggccacggcagctggcgccgcctgcccaagctcgccggcctcaaccgctgcggcaagagctgccgcctgcgatggaccaactacctccgccccgacatcaagcgcggcaggttcaccgacgacgaggaagacctcatcgtccacctccactccctcctcggcaacaagtggtcctccatcgccaccaagctccccggccgcaccgacaacgagatcaagaactactggaacacgcacctccgcaagaagctgctctccatggggatcgaccccgtcacgcaccagcgacgcaccgacctcaacctcctcgcagctggcttccccagcctcctcgccgccgccaacttcgcggccgccgctggtgctccagcacctacggcgacaggcccactcgccgccgcccatgttagcagctgggacatcaacgcgctcaggctccaggccgacgccgccaagtaccagctcctcgagggcctcgtccgcgtgctcaccgcccccgccgccgcaccaaccgtcggcctcatgaccctcctcgccgccgccaatggaggggcgcccagcggccaccagcagagcaccagggtcgtccagcagtgcgacggcatgctcagcctgccggcgctgaccagcgtgccgcccgtcacgacgccgccgggcacgtcctccgccgcctactccctctccgggctcctcttcggcggtgccggcacgacgaccaccgctccggccgccggggacgggctcagctccacagatcagctcggccacagcggggccacgaccgggagcaacatcactgccgccgcgatgccgccacctttgtcatcagcggcggccgagggttgtaatggcgccggcaaaggttgcggcaggtcgaccccatcgacgtgcgacgagacgccggcgtcgagcccgttcgatagcctggacagcctcaccttggattttgaccacaacagcgacagttggagagagttgctagagcaaatgtcatggttgaacaaccccaatgatcagctgtgagaagaaatgacacacatatatctctctcatactacataggagtacgtacgtcgtcagatgaagaattgatgaaaagttgaatgatatatatgatagatggagcgatcgagaaaccgtttctttgcattggattggttgttgcatgcacacttctttgaagatgtgaagtttgtaatctgttgataggataaaattaaggtggtttggcccactttgttttggctatatatgtacagattaaagaaccaacgcggcataaatacatatatagatatatgctcacctaaacgatttcaatttgttgttttagttttttttttgcttttgatttgcctttgcaaggagggcacacacatagatatacatatacttttgtaatgattagcttgtgacatatatataaagtaaatgagatttccttttcc

SEQ ID NO: 61137 - DNA, 1387 bp, Zea Mays
ataaacaactagtatagtgtttacttatctttttgccatgtaaactggaaagggatctaggacgtcgtttggtctctctgctgccttcttcctccttcctccacccctgccttgctcaaagtagtcagtcgtcatcgtctcctccgatcgcctccagttcattccagttagcgccgctgatcccctccctaatcaccatccatccatccggtaggattccccagccatgtcggcgaccgcggtgaagtttcccgtggaggcgccgtgaaggtcaccaacgtctctcttagtgcaaccgtgcaagacattaaggagttcttttccttttcaggagatattgaacatgtggagatgcagagtggtgatgagtggtctcaaattgcatatgtcactttcaaagatgcacaaggcgcagaaactgcacttcttctttcgggtgccacaatagttgatctttctgtgatcattggacctgctccagagtatcagccaccccctattgcctctgctccaccaatgagtggaaccagagttccagttggtggagacaacaacgttgtccacaaggccgaggatgttgtgagcactatgcttgccaagggtttcgtgctaggaaaagacgcggttggcaaggccaaagcgttcgatgagaagcacggcttcacatccacagccggtgctaaggtggcctccatcgacaagaagattgggctgagcaataagattaccacaggcacttcgttggtcagcgggaaggtgaaggagatggaccagaagttccaggtctctgacaagacaaagtcagcgttcgcggctgccgagcagaaggtgagcagtgccgggtccgccatcatgaagaacaggtacgtcttcaccggcgcgtcgtgggtcaccggcgcgttcaacaaggtcgccaaggctgccacggacgtcgggacaatgaccaaggagaagatggcggccgaggagcagcagaagggtttctctggcccatcgtctaggagccactcgtacacgcccatccgatgattcgttggctttctgttatgcgccctccctcagacagacaatgttgtattgtattacacataacacattggtggatgtaagacatagatagctatatatagaacagatcatcaggccccctcgcaccacttgttcaccgttccatgttctgttaaatttcgtactgcagggatttgtttctttaggacaagcaagtatggtggtgataccaatctgttggtttttacaaatccatgttcagactgtttgtggtttgaatgaacattttgtagaagtggtgggaagttaactggataatatgatgttgctgaaacaacatgctatcactatttgcagttatttggaatgcttcttgttt

SEQ ID NO: 61138 - DNA, 4235 bp, Zea Mays
aatccaagtcagatttattccacaccttcattccatgcgaaacgaatagaccctcaattctctttaatccactatgatcctcttgcaaccgaacctgaccttatatgctgtacccttttgagtaaaaatacctttttttcagggaatctgtgtttcagaaatctaaacacacccctaatccgattccgatgctgtgctgccgcgccaccgcatccctgccgtctccgcctcccccctcgcatgctgccgacccccacgcgcgcctcaggggcggcggccggcccgctacgaccttccgggcgcgctcgccgccttcgtctccatgtcgtcaccctcctccgccgcccacgcggccgcgggccccgtcctacgcaccttcacagcgctcctcaagctctgcgcggcgcgcgccgatctcgccacgggccgcgccgtccacgcgcagctcgaggcgcgggggctcgcctccgagtccatcgcttccacggcgctcgccaacatgtacttcaagtgccgccgccccgccgacgcgcgcagggtgttcgaccggatgccttccagggaccgcgtcgcctggaacgcggtcgtcgctgggtacgcgcgaaacgggcttccatcgtccgcgatggaggcggtcgtgcggatgcagggggaggagggcggggagcggcccgactccgtcacgcttgtgtccgtgctgccggcctgcgccgacgcccgggcgctccacgcgtgcagggaggtacacgccttcgcgctccgcgccgggctcgatgagctcgtcaatgtctccacggcggtacttgacgcctactgcaagtgcggcgcggtggaggcggcaagggctgtcttcgattgtatgcctgtcaggaactccgtgtcttggaacgccatgattgacgggtatgctgacaatggtaacgccacggaggctatggctttgttctggaggatggtccaggagggcgtggatgtgacggatgcgtctgtgttggcagcactacaagcgtgcggggagcttggatatctcgatgaggtgaggcgtgtccatgagctacttgtgagagttggcttgagctccaatgtgtcggtgacgaacgcgcttatcaccacatacgccaagtgcaagagggcagacctcgctgcccaggtgttcaacgagctgggcaacaaaaagacacggatctcatggaatgccatgatcctcggcttcacgcagaacgaatgccccgaggatgcagagaggctcttcgctaggatgcagttggaaaatgtgagaccagattcgttcaccctggtcagcgtgattcctgcagtcgcggacatttctgatccgctgcaagcaagatggatccatggatattctatcaggcaccaactagaccaggatgtctatgtcctgacagcccttattgacatgtactccaaatgtgggcgtgtcagcatagctagaaggctcttcgattccgcaagggacagacatgttatcacctggaatgcgatgatccatggttatggttcacatggttttggccaggctgcagttgagctatttgaagagatgaagggcactggcagtttgcccaacgagacaacattcctctcggttcttgcagcttgcagtcatgctggtttggttgatgaagggcagaaatattttgctagcatgaagaaggactatgggcttgaacctggaatggagcactacggtaccatggtggatctacttggacgagctgggaagctagacgaagcttggtctttcatcaaaaacatgcctatagaacctggcattagtgtttatggtgcaatgttaggtgcttgcaagttgcacaagaatgttgaattggctgaagaatcagcacagataatctttgagctgggcccagaggagggggtgtatcatgtccttttggcaaacatttatgcaaacgcttcaatgtggaaagacgtcgcgagggtgaggactgctatggagaagaaaggactccagaagactcctggatggagtattatccagctcaaaaatgaggtccataccttctactctggaagcacaaatcaccagcacgcgaaggacatatacgcaagactggctaagctcatcgaagagatcaaagatatgggctatgtgccagacactgattcaatacatgatgtggaggatgatgtcaaggcacagctgcttaacacccacagtgagaagcttgctattgcatatgggctcattcgaacagcccctggcacgacaattcagataaagaagaaccttcgagtttgtaacgactgtcataatgcaaccaagttaatatctctactgacaggacgggaaataatcatgagagacattcaacgctttcaccattttaaggatggtaaatgttcatgtggagactactggtagtgaaatgttgaaggcagtctgaatatccatttccgagatgatatacagctgctatacaagtatacaattagactaacagtagtgcacaagatatttatgtctattgagggcactgcttttcatcatcatgccttgtctgaagcagtgaagctaaatgtacacgatgagatgagcactggaaactgaaggaaataagctaaacgccttgtctgattcagctgacttgtacttgccaattgctgccaaggttcagcaagcttgacgatgactgccttggttcctctccagcgaaaccagacactccccgtaatacaatcacaggtacaggtacgctagaagacgttgtctgttacttgaatcagtataagagaattcgcttaattgtggcgcaatcttaagttgcatgattgagatatactgcaaatattgggaggcatataaaatgagaagagacctgtggtctattagaaaaggagctttctgtatgctgcgttgtcaacaaatatgtcaggtgttgatcctttaagacccacagacaacttttggatctgccagtaagcaaaaaaaaaaaagatcagaaagagtgtacggccggtgagcaagcatgggctgcatggcatcggtgttggctatcggaatgacaggtgaaggactgaaaccctgacgtgcaggccgggccattggttagcctgaccaatcctggtaggtgtctgccatttatgatggctgggctggctctcggagcaactctctccaatgagggctttccgtcattgatgccggtgcagaccgtttttcttcgccttgctctcaggcagcagctagctctttgatccctgttggattggatggaggtccgtggcagtgcacccagcatgaagccaaaggtggagccgccgttggaggcttcacacgactgggaggtgaccccgctgtccggcgacaaccccttcttcaccagcgtcatgcgcaagagccaagtccagaacccctttcagctggtcatcccggttcgcttccaccgccacctcccggaggcgcgcgcgcccgcggtgctcctctgccgcgaccggtcgtggacggtgagctacgcgggcgtcggcaagtggaagaggctccagggggcgtggagggacttcgcccgcgacaacgggctccgcctcggggacgcctgcgtcttcgagctccttgtgcccagtactgatgcaacccaaggagacggagacggcagcaaggatcagggggaggtggtgttccgtgtgcaggtgctccgcggcggcctgccggctgagatcacctcccggggcgccacctccgacgatccactcgtcattgtggactagatccaactgcggggagagtagtacgtagtagactagtagtggtgcagtgcagtctgtagaggagacgagacgctcaggagctaggtagcatcgtcgttgtattttgttgttgcccctgctctagctagctcgctggtcctcgtggatcttgtagccagtttctttctttcagctgcagaccttcctcttcctgtggacacggttgctccatcaccaagtgtgctgatgctaccagctttctgctgtgacagtacatagtagacgctatcaccaagtgtgctgatgctaccacattccagtagacgcggcatgcttgaagagatgtgttcaatgagcatcatcctttgtgtccatccatcgtgtcaataactagagctgaatagctcgaccgagtttagtgtttaggctatctcgagcagcgttatctaaatgaatattctgtgtcctttaaaggaatattctgtgtcatttacagtgcactataaaag

SEQ ID NO: 61139 - DNA, 4162 bp, Zea Mays
aatccaagtcagatttattccacaccttcattccatgcgaaacgaatagaccctcaattctctttaatccactatgatcctcttgcaaccgaacctgaccttatatgctgtacccttttgagtaaaaatacctttttttcagggaatctgtgtttcagaaatctaaacacacccctaatccgattccgatgctgtgctgccgcgccaccgcatccctgccgtctccgcctcccccctcgcatgctgccgacccccacgcgcgcctcaggggcggcggccggcccgctacgaccttccgggcgcgctcgccgccttcgtctccatgtcgtcaccctcctccgccgcccacgcggccgcgggccccgtcctacgcaccttcacagcgctcctcaagctctgcgcggcgcgcgccgatctcgccacgggccgcgccgtccacgcgcagctcgaggcgcgggggctcgcctccgagtccatcgcttccacggcgctcgccaacatgtacttcaagtgccgccgccccgccgacgcgcgcagggtgttcgaccggatgccttccagggaccgcgtcgcctggaacgcggtcgtcgctgggtacgcgcgaaacgggcttccatcgtccgcgatggaggcggtcgtgcggatgcagggggaggagggcggggagcggcccgactccgtcacgcttgtgtccgtgctgccggcctgcgccgacgcccgggcgctccacgcgtgcagggaggtacacgccttcgcgctccgcgccgggctcgatgagctcgtcaatgtctccacggcggtacttgacgcctactgcaagtgcggcgcggtggaggcggcaagggctgtcttcgattgtatgcctgtcaggaactccgtgtcttggaacgccatgattgacgggtatgctgacaatggtaacgccacggaggctatggctttgttctggaggatggtccaggagggcgtggatgtgacggatgcgtctgtgttggcagcactacaagcgtgcggggagcttggatatctcgatgaggtgaggcgtgtccatgagctacttgtgagagttggcttgagctccaatgtgtcggtgacgaacgcgcttatcaccacatacgccaagtgcaagagggcagacctcgctgcccaggtgttcaacgagctgggcaacaaaaagacacggatctcatggaatgccatgatcctcggcttcacgcagaacgaatgccccgaggatgcagagaggctcttcgctaggatgcagttggaaaatgtgagaccagattcgttcaccctggtcagcgtgattcctgcagtcgcggacatttctgatccgctgcaagcaagatggatccatggatattctatcaggcaccaactagaccaggatgtctatgtcctgacagcccttattgacatgtactccaaatgtgggcgtgtcagcatagctagaaggctcttcgattccgcaagggacagacatgttatcacctggaatgcgatgatccatggttatggttcacatggttttggccaggctgcagttgagctatttgaagagatgaagggcactggcagtttgcccaacgagacaacattcctctcggttcttgcagcttgcagtcatgctggtttggttgatgaagggcagaaatattttgctagcatgaagaaggactatgggcttgaacctggaatggagcactacggtaccatggtggatctacttggacgagctgggaagctagacgaagcttggtctttcatcaaaaacatgcctatagaacctggcattagtgtttatggtgcaatgttaggtgcttgcaagttgcacaagaatgttgaattggctgaagaatcagcacagataatctttgagctgggcccagaggagggggtgtatcatgtccttttggcaaacatttatgcaaacgcttcaatgtggaaagacgtcgcgagggtgaggactgctatggagaagaaaggactccagaagactcctggatggagtattatccagctcaaaaatgaggtccataccttctactctggaagcacaaatcaccagcacgcgaaggacatatacgcaagactggctaagctcatcgaagagatcaaagatatgggctatgtgccagacactgattcaatacatgatgtggaggatgatgtcaaggcacagctgcttaacacccacagtgagaagcttgctattgcatatgggctcattcgaacagcccctggcacgacaattcagataaagaagaaccttcgagtttgtaacgactgtcataatgcaaccaagttaatatctctactgacaggacgggaaataatcatgagagacattcaacgctttcaccattttaaggatggtaaatgttcatgtggagactactggtagtgaaatgttgaaggcagtctgaatatccatttccgagatgatatacagctgctatacaagtatacaattagactaacagtgaagctaaatgtacacgatgagatgagcactggaaactgaaggaaataagctaaacgccttgtctgattcagctgacttgtacttgccaattgctgccaaggttcagcaagcttgacgatgactgccttggttcctctccagcgaaaccagacactccccgtaatacaatcacaggtacaggtacgctagaagacgttgtctgttacttgaatcagtataagagaattcgcttaattgtggcgcaatcttaagttgcatgattgagatatactgcaaatattgggaggcatataaaatgagaagagacctgtggtctattagaaaaggagctttctgtatgctgcgttgtcaacaaatatgtcaggtgttgatcctttaagacccacagacaacttttggatctgccagtaagcaaaaaaaaaaaagatcagaaagagtgtacggccggtgagcaagcatgggctgcatggcatcggtgttggctatcggaatgacaggtgaaggactgaaaccctgacgtgcaggccgggccattggttagcctgaccaatcctggtaggtgtctgccatttatgatggctgggctggctctcggagcaactctctccaatgagggctttccgtcattgatgccggtgcagaccgtttttcttcgccttgctctcagctagctctttgatccctgttggattggatggaggtccgtggcagtgcacccagcatgaagccaaaggtggagccgccgttggaggcttcacacgactgggaggtgaccccgctgtccggcgacaaccccttcttcaccagcgtcatgcgcaagagccaagtccagaacccctttcagctggtcatcccggttcgcttccaccgccacctcccggaggcgcgcgcgcccgcggtgctcctctgccgcgaccggtcgtggacggtgagctacgcgggcgtcggcaagtggaagaggctccagggggcgtggagggacttcgcccgcgacaacgggctccgcctcggggacgcctgcgtcttcgagctccttgtgcccagtactgatgcaacccaaggagacggagacggcagcaaggatcagggggaggtggtgttccgtgtgcaggtgctccgcggcggcctgccggctgagatcacctcccggggcgccacctccgacgatccactcgtcattgtggactagatccaactgcggggagagtagtacgtagtagactagtagtggtgcagtgcagtctgtagaggagacgagacgctcaggagctaggtagcatcgtcgttgtattttgttgttgcccctgctctagctagctcgctggtcctcgtggatcttgtagccagtttctttctttcagctgcagaccttcctcttcctgtggacacggttgctccatcaccaagtgtgctgatgctaccagctttctgctgtgacagtacatagtagacgctatcaccaagtgtgctgatgctaccacattccagtagacgcggcatgcttgaagagatgtgttcaatgagcatcatcctttgtgtccatccatcgtgtcaataactagagctgaatagctcgaccgagtttagtgtttaggctatctcgagcagcgttatctaaatgaatattctgtgtcctttaaaggaatattctgtgtcatttacagtgcactataaaag

SEQ ID NO: 61140 - DNA, 4067 bp, Zea Mays
aatccaagtcagatttattccacaccttcattccatgcgaaacgaatagaccctcaattctctttaatccactatgatcctcttgcaaccgaacctgaccttatatgctgtacccttttgagtaaaaatacctttttttcagggaatctgtgtttcagaaatctaaacacacccctaatccgattccgatgctgtgctgccgcgccaccgcatccctgccgtctccgcctcccccctcgcatgctgccgacccccacgcgcgcctcaggggcggcggccggcccgctacgaccttccgggcgcgctcgccgccttcgtctccatgtcgtcaccctcctccgccgcccacgcggccgcgggccccgtcctacgcaccttcacagcgctcctcaagctctgcgcggcgcgcgccgatctcgccacgggccgcgccgtccacgcgcagctcgaggcgcgggggctcgcctccgagtccatcgcttccacggcgctcgccaacatgtacttcaagtgccgccgccccgccgacgcgcgcagggtgttcgaccggatgccttccagggaccgcgtcgcctggaacgcggtcgtcgctgggtacgcgcgaaacgggcttccatcgtccgcgatggaggcggtcgtgcggatgcagggggaggagggcggggagcggcccgactccgtcacgcttgtgtccgtgctgccggcctgcgccgacgcccgggcgctccacgcgtgcagggaggtacacgccttcgcgctccgcgccgggctcgatgagctcgtcaatgtctccacggcggtacttgacgcctactgcaagtgcggcgcggtggaggcggcaagggctgtcttcgattgtatgcctgtcaggaactccgtgtcttggaacgccatgattgacgggtatgctgacaatggtaacgccacggaggctatggctttgttctggaggatggtccaggagggcgtggatgtgacggatgcgtctgtgttggcagcactacaagcgtgcggggagcttggatatctcgatgaggtgaggcgtgtccatgagctacttgtgagagttggcttgagctccaatgtgtcggtgacgaacgcgcttatcaccacatacgccaagtgcaagagggcagacctcgctgcccaggtgttcaacgagctgggcaacaaaaagacacggatctcatggaatgccatgatcctcggcttcacgcagaacgaatgccccgaggatgcagagaggctcttcgctaggatgcagttggaaaatgtgagaccagattcgttcaccctggtcagcgtgattcctgcagtcgcggacatttctgatccgctgcaagcaagatggatccatggatattctatcaggcaccaactagaccaggatgtctatgtcctgacagcccttattgacatgtactccaaatgtgggcgtgtcagcatagctagaaggctcttcgattccgcaagggacagacatgttatcacctggaatgcgatgatccatggttatggttcacatggttttggccaggctgcagttgagctatttgaagagatgaagggcactggcagtttgcccaacgagacaacattcctctcggttcttgcagcttgcagtcatgctggtttggttgatgaagggcagaaatattttgctagcatgaagaaggactatgggcttgaacctggaatggagcactacggtaccatggtggatctacttggacgagctgggaagctagacgaagcttggtctttcatcaaaaacatgcctatagaacctggcattagtgtttatggtgcaatgttaggtgcttgcaagttgcacaagaatgttgaattggctgaagaatcagcacagataatctttgagctgggcccagaggagggggtgtatcatgtccttttggcaaacatttatgcaaacgcttcaatgtggaaagacgtcgcgagggtgaggactgctatggagaagaaaggactccagaagactcctggatggagtattatccagctcaaaaatgaggtccataccttctactctggaagcacaaatcaccagcacgcgaaggacatatacgcaagactggctaagctcatcgaagagatcaaagatatgggctatgtgccagacactgattcaatacatgatgtggaggatgatgtcaaggcacagctgcttaacacccacagtgagaagcttgctattgcatatgggctcattcgaacagcccctggcacgacaattcagataaagaagaaccttcgagtttgtaacgactgtcataatgcaaccaagttaatatctctactgacaggacgggaaataatcatgagagacattcaacgctttcaccattttaaggatggtaaatgttcatgtggagactactggtagtgaaatgttgaaggcagtctgaatatccatttccgagatgatatacagctgctatacaagtatacaattagactaacaggttcagcaagcttgacgatgactgccttggttcctctccagcgaaaccagacactccccgtaatacaatcacaggtacaggtacgctagaagacgttgtctgttacttgaatcagtataagagaattcgcttaattgtggcgcaatcttaagttgcatgattgagatatactgcaaatattgggaggcatataaaatgagaagagacctgtggtctattagaaaaggagctttctgtatgctgcgttgtcaacaaatatgtcaggtgttgatcctttaagacccacagacaacttttggatctgccagtaagcaaaaaaaaaaaagatcagaaagagtgtacggccggtgagcaagcatgggctgcatggcatcggtgttggctatcggaatgacaggtgaaggactgaaaccctgacgtgcaggccgggccattggttagcctgaccaatcctggtaggtgtctgccatttatgatggctgggctggctctcggagcaactctctccaatgagggctttccgtcattgatgccggtgcagaccgtttttcttcgccttgctctcaggcagcagctagctctttgatccctgttggattggatggaggtccgtggcagtgcacccagcatgaagccaaaggtggagccgccgttggaggcttcacacgactgggaggtgaccccgctgtccggcgacaaccccttcttcaccagcgtcatgcgcaagagccaagtccagaacccctttcagctggtcatcccggttcgcttccaccgccacctcccggaggcgcgcgcgcccgcggtgctcctctgccgcgaccggtcgtggacggtgagctacgcgggcgtcggcaagtggaagaggctccagggggcgtggagggacttcgcccgcgacaacgggctccgcctcggggacgcctgcgtcttcgagctccttgtgcccagtactgatgcaacccaaggagacggagacggcagcaaggatcagggggaggtggtgttccgtgtgcaggtgctccgcggcggcctgccggctgagatcacctcccggggcgccacctccgacgatccactcgtcattgtggactagatccaactgcggggagagtagtacgtagtagactagtagtggtgcagtgcagtctgtagaggagacgagacgctcaggagctaggtagcatcgtcgttgtattttgttgttgcccctgctctagctagctcgctggtcctcgtggatcttgtagccagtttctttctttcagctgcagaccttcctcttcctgtggacacggttgctccatcaccaagtgtgctgatgctaccagctttctgctgtgacagtacatagtagacgctatcaccaagtgtgctgatgctaccacattccagtagacgcggcatgcttgaagagatgtgttcaatgagcatcatcctttgtgtccatccatcgtgtcaataactagagctgaatagctcgaccgagtttagtgtttaggctatctcgagcagcgttatctaaatgaatattctgtgtcctttaaaggaatattctgtgtcatttacagtgcactataaaag

SEQ ID NO: 61141 - DNA, 4169 bp, Zea Mays
aatccaagtcagatttattccacaccttcattccatgcgaaacgaatagaccctcaattctctttaatccactatgatcctcttgcaaccgaacctgaccttatatgctgtacccttttgagtaaaaatacctttttttcagggaatctgtgtttcagaaatctaaacacacccctaatccgattccgatgctgtgctgccgcgccaccgcatccctgccgtctccgcctcccccctcgcatgctgccgacccccacgcgcgcctcaggggcggcggccggcccgctacgaccttccgggcgcgctcgccgccttcgtctccatgtcgtcaccctcctccgccgcccacgcggccgcgggccccgtcctacgcaccttcacagcgctcctcaagctctgcgcggcgcgcgccgatctcgccacgggccgcgccgtccacgcgcagctcgaggcgcgggggctcgcctccgagtccatcgcttccacggcgctcgccaacatgtacttcaagtgccgccgccccgccgacgcgcgcagggtgttcgaccggatgccttccagggaccgcgtcgcctggaacgcggtcgtcgctgggtacgcgcgaaacgggcttccatcgtccgcgatggaggcggtcgtgcggatgcagggggaggagggcggggagcggcccgactccgtcacgcttgtgtccgtgctgccggcctgcgccgacgcccgggcgctccacgcgtgcagggaggtacacgccttcgcgctccgcgccgggctcgatgagctcgtcaatgtctccacggcggtacttgacgcctactgcaagtgcggcgcggtggaggcggcaagggctgtcttcgattgtatgcctgtcaggaactccgtgtcttggaacgccatgattgacgggtatgctgacaatggtaacgccacggaggctatggctttgttctggaggatggtccaggagggcgtggatgtgacggatgcgtctgtgttggcagcactacaagcgtgcggggagcttggatatctcgatgaggtgaggcgtgtccatgagctacttgtgagagttggcttgagctccaatgtgtcggtgacgaacgcgcttatcaccacatacgccaagtgcaagagggcagacctcgctgcccaggtgttcaacgagctgggcaacaaaaagacacggatctcatggaatgccatgatcctcggcttcacgcagaacgaatgccccgaggatgcagagaggctcttcgctaggatgcagttggaaaatgtgagaccagattcgttcaccctggtcagcgtgattcctgcagtcgcggacatttctgatccgctgcaagcaagatggatccatggatattctatcaggcaccaactagaccaggatgtctatgtcctgacagcccttattgacatgtactccaaatgtgggcgtgtcagcatagctagaaggctcttcgattccgcaagggacagacatgttatcacctggaatgcgatgatccatggttatggttcacatggttttggccaggctgcagttgagctatttgaagagatgaagggcactggcagtttgcccaacgagacaacattcctctcggttcttgcagcttgcagtcatgctggtttggttgatgaagggcagaaatattttgctagcatgaagaaggactatgggcttgaacctggaatggagcactacggtaccatggtggatctacttggacgagctgggaagctagacgaagcttggtctttcatcaaaaacatgcctatagaacctggcattagtgtttatggtgcaatgttaggtgcttgcaagttgcacaagaatgttgaattggctgaagaatcagcacagataatctttgagctgggcccagaggagggggtgtatcatgtccttttggcaaacatttatgcaaacgcttcaatgtggaaagacgtcgcgagggtgaggactgctatggagaagaaaggactccagaagactcctggatggagtattatccagctcaaaaatgaggtccataccttctactctggaagcacaaatcaccagcacgcgaaggacatatacgcaagactggctaagctcatcgaagagatcaaagatatgggctatgtgccagacactgattcaatacatgatgtggaggatgatgtcaaggcacagctgcttaacacccacagtgagaagcttgctattgcatatgggctcattcgaacagcccctggcacgacaattcagataaagaagaaccttcgagtttgtaacgactgtcataatgcaaccaagttaatatctctactgacaggacgggaaataatcatgagagacattcaacgctttcaccattttaaggatggtaaatgttcatgtggagactactggtagtgaaatgttgaaggcagtctgaatatccatttccgagatgatatacagctgctatacaagtatacaattagactaacagtgaagctaaatgtacacgatgagatgagcactggaaactgaaggaaataagctaaacgccttgtctgattcagctgacttgtacttgccaattgctgccaaggttcagcaagcttgacgatgactgccttggttcctctccagcgaaaccagacactccccgtaatacaatcacaggtacaggtacgctagaagacgttgtctgttacttgaatcagtataagagaattcgcttaattgtggcgcaatcttaagttgcatgattgagatatactgcaaatattgggaggcatataaaatgagaagagacctgtggtctattagaaaaggagctttctgtatgctgcgttgtcaacaaatatgtcaggtgttgatcctttaagacccacagacaacttttggatctgccagtaagcaaaaaaaaaaaagatcagaaagagtgtacggccggtgagcaagcatgggctgcatggcatcggtgttggctatcggaatgacaggtgaaggactgaaaccctgacgtgcaggccgggccattggttagcctgaccaatcctggtaggtgtctgccatttatgatggctgggctggctctcggagcaactctctccaatgagggctttccgtcattgatgccggtgcagaccgtttttcttcgccttgctctcaggcagcagctagctctttgatccctgttggattggatggaggtccgtggcagtgcacccagcatgaagccaaaggtggagccgccgttggaggcttcacacgactgggaggtgaccccgctgtccggcgacaaccccttcttcaccagcgtcatgcgcaagagccaagtccagaacccctttcagctggtcatcccggttcgcttccaccgccacctcccggaggcgcgcgcgcccgcggtgctcctctgccgcgaccggtcgtggacggtgagctacgcgggcgtcggcaagtggaagaggctccagggggcgtggagggacttcgcccgcgacaacgggctccgcctcggggacgcctgcgtcttcgagctccttgtgcccagtactgatgcaacccaaggagacggagacggcagcaaggatcagggggaggtggtgttccgtgtgcaggtgctccgcggcggcctgccggctgagatcacctcccggggcgccacctccgacgatccactcgtcattgtggactagatccaactgcggggagagtagtacgtagtagactagtagtggtgcagtgcagtctgtagaggagacgagacgctcaggagctaggtagcatcgtcgttgtattttgttgttgcccctgctctagctagctcgctggtcctcgtggatcttgtagccagtttctttctttcagctgcagaccttcctcttcctgtggacacggttgctccatcaccaagtgtgctgatgctaccagctttctgctgtgacagtacatagtagacgctatcaccaagtgtgctgatgctaccacattccagtagacgcggcatgcttgaagagatgtgttcaatgagcatcatcctttgtgtccatccatcgtgtcaataactagagctgaatagctcgaccgagtttagtgtttaggctatctcgagcagcgttatctaaatgaatattctgtgtcctttaaaggaatattctgtgtcatttacagtgcactataaaag

SEQ ID NO: 61142 - DNA, 4232 bp, Zea Mays
aatccaagtcagatttattccacaccttcattccatgcgaaacgaatagaccctcaattctctttaatccactatgatcctcttgcaaccgaacctgaccttatatgctgtacccttttgagtaaaaatacctttttttcagggaatctgtgtttcagaaatctaaacacacccctaatccgattccgatgctgtgctgccgcgccaccgcatccctgccgtctccgcctcccccctcgcatgctgccgacccccacgcgcgcctcaggggcggcggccggcccgctacgaccttccgggcgcgctcgccgccttcgtctccatgtcgtcaccctcctccgccgcccacgcggccgcgggccccgtcctacgcaccttcacagcgctcctcaagctctgcgcggcgcgcgccgatctcgccacgggccgcgccgtccacgcgcagctcgaggcgcgggggctcgcctccgagtccatcgcttccacggcgctcgccaacatgtacttcaagtgccgccgccccgccgacgcgcgcagggtgttcgaccggatgccttccagggaccgcgtcgcctggaacgcggtcgtcgctgggtacgcgcgaaacgggcttccatcgtccgcgatggaggcggtcgtgcggatgcagggggaggagggcggggagcggcccgactccgtcacgcttgtgtccgtgctgccggcctgcgccgacgcccgggcgctccacgcgtgcagggaggtacacgccttcgcgctccgcgccgggctcgatgagctcgtcaatgtctccacggcggtacttgacgcctactgcaagtgcggcgcggtggaggcggcaagggctgtcttcgattgtatgcctgtcaggaactccgtgtcttggaacgccatgattgacgggtatgctgacaatggtaacgccacggaggctatggctttgttctggaggatggtccaggagggcgtggatgtgacggatgcgtctgtgttggcagcactacaagcgtgcggggagcttggatatctcgatgaggtgaggcgtgtccatgagctacttgtgagagttggcttgagctccaatgtgtcggtgacgaacgcgcttatcaccacatacgccaagtgcaagagggcagacctcgctgcccaggtgttcaacgagctgggcaacaaaaagacacggatctcatggaatgccatgatcctcggcttcacgcagaacgaatgccccgaggatgcagagaggctcttcgctaggatgcagttggaaaatgtgagaccagattcgttcaccctggtcagcgtgattcctgcagtcgcggacatttctgatccgctgcaagcaagatggatccatggatattctatcaggcaccaactagaccaggatgtctatgtcctgacagcccttattgacatgtactccaaatgtgggcgtgtcagcatagctagaaggctcttcgattccgcaagggacagacatgttatcacctggaatgcgatgatccatggttatggttcacatggttttggccaggctgcagttgagctatttgaagagatgaagggcactggcagtttgcccaacgagacaacattcctctcggttcttgcagcttgcagtcatgctggtttggttgatgaagggcagaaatattttgctagcatgaagaaggactatgggcttgaacctggaatggagcactacggtaccatggtggatctacttggacgagctgggaagctagacgaagcttggtctttcatcaaaaacatgcctatagaacctggcattagtgtttatggtgcaatgttaggtgcttgcaagttgcacaagaatgttgaattggctgaagaatcagcacagataatctttgagctgggcccagaggagggggtgtatcatgtccttttggcaaacatttatgcaaacgcttcaatgtggaaagacgtcgcgagggtgaggactgctatggagaagaaaggactccagaagactcctggatggagtattatccagctcaaaaatgaggtccataccttctactctggaagcacaaatcaccagcacgcgaaggacatatacgcaagactggctaagctcatcgaagagatcaaagatatgggctatgtgccagacactgattcaatacatgatgtggaggatgatgtcaaggcacagctgcttaacacccacagtgagaagcttgctattgcatatgggctcattcgaacagcccctggcacgacaattcagataaagaagaaccttcgagtttgtaacgactgtcataatgcaaccaagttaatatctctactgacaggacgggaaataatcatgagagacattcaacgctttcaccattttaaggatggtaaatgttcatgtggagactactggtagtgaaatgttgaaggcagtctgaatatccatttccgagatgatatacagctgctatacaagtatacaattagactaacagtgcacaagatatttatgtctattgagggcactgcttttcatcatcatgccttgtctgaagcagtgaagctaaatgtacacgatgagatgagcactggaaactgaaggaaataagctaaacgccttgtctgattcagctgacttgtacttgccaattgctgccaaggttcagcaagcttgacgatgactgccttggttcctctccagcgaaaccagacactccccgtaatacaatcacaggtacaggtacgctagaagacgttgtctgttacttgaatcagtataagagaattcgcttaattgtggcgcaatcttaagttgcatgattgagatatactgcaaatattgggaggcatataaaatgagaagagacctgtggtctattagaaaaggagctttctgtatgctgcgttgtcaacaaatatgtcaggtgttgatcctttaagacccacagacaacttttggatctgccagtaagcaaaaaaaaaaaagatcagaaagagtgtacggccggtgagcaagcatgggctgcatggcatcggtgttggctatcggaatgacaggtgaaggactgaaaccctgacgtgcaggccgggccattggttagcctgaccaatcctggtaggtgtctgccatttatgatggctgggctggctctcggagcaactctctccaatgagggctttccgtcattgatgccggtgcagaccgtttttcttcgccttgctctcaggcagcagctagctctttgatccctgttggattggatggaggtccgtggcagtgcacccagcatgaagccaaaggtggagccgccgttggaggcttcacacgactgggaggtgaccccgctgtccggcgacaaccccttcttcaccagcgtcatgcgcaagagccaagtccagaacccctttcagctggtcatcccggttcgcttccaccgccacctcccggaggcgcgcgcgcccgcggtgctcctctgccgcgaccggtcgtggacggtgagctacgcgggcgtcggcaagtggaagaggctccagggggcgtggagggacttcgcccgcgacaacgggctccgcctcggggacgcctgcgtcttcgagctccttgtgcccagtactgatgcaacccaaggagacggagacggcagcaaggatcagggggaggtggtgttccgtgtgcaggtgctccgcggcggcctgccggctgagatcacctcccggggcgccacctccgacgatccactcgtcattgtggactagatccaactgcggggagagtagtacgtagtagactagtagtggtgcagtgcagtctgtagaggagacgagacgctcaggagctaggtagcatcgtcgttgtattttgttgttgcccctgctctagctagctcgctggtcctcgtggatcttgtagccagtttctttctttcagctgcagaccttcctcttcctgtggacacggttgctccatcaccaagtgtgctgatgctaccagctttctgctgtgacagtacatagtagacgctatcaccaagtgtgctgatgctaccacattccagtagacgcggcatgcttgaagagatgtgttcaatgagcatcatcctttgtgtccatccatcgtgtcaataactagagctgaatagctcgaccgagtttagtgtttaggctatctcgagcagcgttatctaaatgaatattctgtgtcctttaaaggaatattctgtgtcatttacagtgcactataaaag

SEQ ID NO: 61143 - DNA, 2175 bp, Zea Mays
ccgcgtcagaagcaccaaccgagccatggttcacgggctgcgggctgcgggctgcgggctgcggcggccgacgggaccggtgtgagcaggcgaccacgaaggggcccacccgtcggtggctgcctgcccccgctcgtcaacaactaccccgaaagccgccaagcggctgctgcgcaaggtgcgaaaggcaccttccctgcccgattggcgatttaagtggtgggggagggaaggccgatggtcagtgaaagagaggtaggtggccggacggtggtggcatcgccaattcaactccgcatctgaatcggcactcggcagcgcgccagctccatagtgtaggaggagatggcgctcacaagaatcggtcttgctggccttgcggtcatggggcagaaccttgccctcaacattgcagagaaagggttccccatctctgtgtacaacaggacaacctccaaggtggacgagaccgtgcagcgtgccaaggcagaaggaaaccttcccgtctacggcttccatgaccccgcgtcctttgtgaagtccattcagaagccacgggtggtgatcatgctcgtcaaggccggcgcgccagttgaccagaccatcgcgacgctcgcagctcacttggagcagggcgactgcatcatcgatggggggaacgagtggtacgagaacacggagaggagggagaaggccatggaggagcgcggcctcctgtatcttggcatgggtgtctctggaggagaggagggtgcccgcaacggcccgtccttgatgcccggaggctcgttcgaggcttacaagtacgtcgaagacattgtcctcaaggtggctgctcaggtccctgacagtggcccgtgtgtcacgtacattggcaaaggtggatcgggcaactttgtcaagatggttcacaacggaatcgagtatggcgatatgcagctgatttccgaggcatacgacgttctcaagtcggtcggtaagctcaccaacagtgagctgcaccaggtgttctccgagtggaacaagggcgagctcctgagcttcttgatcgagatcacggccgacatctttggcatcaaggacgagcatggcgatggctacctggtggacaaggtccttgacaagaccgggatgaaagggacagggaagtggacggtgcagcaggccgccgagctgtcggtggccgctcctacgatcgaggcgtccttggactcgaggttcctgagcgggctgaaggacgagcgggtggaggcctccaagatcttccagggtgactactactccaccggctcgccggtggacaaggcgcagctggtggaggacgtgaggcaggccctgtacgcgtccaagatctgcagctacgcgcagggcatgaacatcatcaaggccaagagcgcggagaaaggctgggggctcaacctcggcgagctggccaggatctggaagggcgggtgcatcatccgcgccatcttcctggaccgcatcaagaaggcctacgacaggaacccgggcctcgccagcctgctcgtagaccccgagttcgcgcaggagatcatggacaggcaggcggcgtggcgcagggtggtgtgcctcgccatcaacaacggcgtcagcaccccgggaatgtccgctagcctggcctacttcgactcctaccgcagggacaggctgcctgccaacctggtgcaggcccagagggactacttcggggctcacacctacgagagggtcgacatgcctggctctttccacaccgagtggttcaagattgcgcgcaacatctccaacaactgatgagctgctcaacggatggcatgcccggtgttgactactccagtcgaactagcgaaagagttcagcttggtcgccgcagaaaacctccattgcctcgatgtgcgtccacattggagaggtcttcacgaaaggaggaggatgagttgagaagccatcaggtgttgtgattgaaacaaacttggacattggtctaccctcacaagcttttgggtgcagccagcagtgcaatctttgagctagtctccataactttgcttgcatggatgaagcacggtgatcatctcctgtgttaggggtccatgttcctcttctggtgcagccagcagtgttatctttgagctagtctccatagctttacttggcatagatgaagcacgatga

SEQ ID NO: 61144 - DNA, 4062 bp, Zea Mays
attcctcccacattccaccgcacccacacgtttctttaccctaaccccgacagccgccgccgtttcttcatcttcctcgcagcgccggcgctccatcttccgctccctccccgactcgcgatcggcacgcaggcgacgtcggggcagtctcggactcggcggcggcgtcagcggctccccctcccgccctcgccagtcgcttccggtcctccgcacaccaaccggcgactctgcgtgcgcgcctcctgcttccggtggaccgtcgacggcgcccgggccccggtggccggcgggcagcgagagccagcagcctggcagttttcctcattggaaaggaaggacaatcagagccaagagtttcttcataaacctgaataaaaggacatgcgatacagggcaccgcgtagctcaggtcgtcgcaataatgttctttcatggatctctgaagttaaagacacatctaatgtgggcgtaagaaagaaaagggggagaagagcacctccatctgctaaaagattgcgtgataaaagggtggataaggcgattgaaagtgatggtgctgttgacagtgacagcgatgatacagatggacaggttgacaagaatcagcctagtgcacacattgaggaacatgttgatgggagaactggtgatgacttagcaacagcaggccactcaggcaattcttccaatggtccatcctcagcttcagaagaacaggaccattcaacaaactctaaagacaagctccaaaaagctagctctcaaaacacaaagaaggtttttggaaactcaacaaacggcaagcaaggtgcatctaatttggaacaggaatgtgcaaatgaagatgggtctcatgtgctagttgctgctgtgtacaaggatattgataatgaaagaagctctcaaaagattagggatgatgtatcagatgcacaactggatacagcttcatctgatgacaaaagttcagaagaagtcgaagacgtgaaggtttgtgacatttgtggagatgttggtgaggaggagaagctcgctgtctgtagcagatgcaatgacggcgcagagcacacgtattgcatgcgggtaatgatggaagaggttccagatagtgagtggttgtgtgaagactgccaaactgctgtagaatctgaaaatgagaatagactacaaaagtctcaggtgaaggctggcacttcaaaagagctttccttagaaggggagattaacaaacctgccattgctgcaaagggaagaagttcatctgactgtgaattgaaggctgggaatatagaaaacaaagagtcaaataccacaaatgagaggaatggcacagtcaaaaccaggacggaagaagatgctgtgacgacatcctcaactagagatattttttctgaaactggtggcttgtacatgggggctgactctagaaagagaatggaaccatcacacgagacattcgtgtctgatgctgacaaaggaaagcaacctagccatcaagtatcaacttcattggtggttaatgctctgaagaatcaggcaccacagtctcgtggtcaactttccaaatccacttctttcaataactcaaaggtccccaaagtgaaacagctattgaatgaagttcctcagaagccaaaatttttgaaggaatcttggtcctctattatcaataaaaaggaaggaccaatcagcatgactactaagtcagcgaccttcaaaaagcctaagccttgtgagccaacaaacaaggcaaagtcttccgtcttgtcacctgtcgaggagccaagggtgccgaatcagttggcgagccacaatgtaacaaatggtcagtgttctatattggggcctccctctgccacatcatcaatggttgctcctgttctaagaactgatagcacaactcagctgctctctacaagaaataacacagttgactcaaataatttaggttctgttcatctacaaggaaacagtgagctaaagaagcctcgtttagcaaaagtgccgggaagtatgatgctatctaatgctgaaagatccgcaggtgggattcttggttccggtgctcatcgagaagtgattcaaaattcagacccttcacatagggatgctaaaataaaggaccaaactggcttcagacagggtgcttctagcagcaatcggacaatccgttgccaaagatgtaatgaatatggccattctacacatttttgcgaagttgaaaaacttcgtttgtcttcaggaaaacctttgagtgagcgaaacttgaaggatgcatctgccaaaagaaataagacatccgaagttagtacattggcttctagtgaaaaaactccttccagagaaccagagcatgtcgtaaagtgtgctattaatcagaatctgataaatgggcctaatgatggtatacctgccccattcagccatgtaaagaagcactcattatcacctcgagctaatgtgtccatccctgggagcggagtagattgtagcaagcctaagttcaaaaataatgatccatctctatctggcacagcaggaatctttgttcataatggtcgcattatgccaaatgatcatagggatgaacctgctcaagggttttcagctggtgatgaaccaacgtcttcaactgtccctgagctgggctggatatggcaaggtggttttgagctgcagaggactggaagttcaccggagctgtgtgatggtttccaagcccatttatcatgttctgcttcacagttagtgctggacgcagttaagaaattcccttctaaagtccagcttgaggaagttcctcggaagaattcatggccaacacagtttcagaaaaacggtccaacttatgacaacataggtctttttttctttgctagagatgttcaaagctatgaaaatcactacagtaaattagttgagaatatgctgaagaatgatttagttctcagaggaagtgttggtactgttgagttgcttatattcccttccaatatcctatcaaagaacttccaaaggtggaatatgttgtactttctatggggtctattcagagttagcaaaaaagattcctctaacctcccatcttatctatccacaagtagagtagaacgaaattttaatgatgatctccaggccatggattggatgccatctacccattcattctcacagaacaggagtgatttagctgaaccggaccctgatttgttaaagtcaactaattttgaaccgagtttggaagccagtcgtgaggtgtgtttggatggagagaactctttgaatcaacttgtacgcagaagagctctagatgatcacctagattcagatgcaaaagcatgttcaacgattagcaatggtgccatgggttcctctgccatgtctatgcaaagaaaacatcagaaacctgattatccagaacatcaagataaaaagagggacacttttggtggtaatgttagtgaaagagatttcgatgtgaacacggtgccagttacttgttctgtctccttaactcaccttcaggaagaacctggtaagctgagcacagccatcgacctcatggatatagaccatggggttagcgcaggtgcactggatcgttcacatgcatcaggtggtgcaggtaaaagaagttttgagacggccgaagtagctgctgaagtacccgagcataagaaaactaagctggataataatgttgtgcctataagctctggtccacgcgagaatgcctgtacgaatgatggcaatagcgataaactgatgcctggaagctcaagcagtgatggcaagcgcgtgtttccacttgatctaaatgcagtgggggatgaggacatcgtaaatattccagccttcaggtgatgaagagttcgctgttccatgacaaaccaaccgtggtggtttggttcagaatgagagatgtgcattgtaaatcgcatgtgcagtttttgacctaatgttttcagacaacacttacagatgtgatgttcccctctttggcagtgaataattctgctccagaatatgcttacagatgtgatctcatctgccagattc

SEQ ID NO: 61145 - DNA, 4073 bp, Zea Mays
attcctcccacattccaccgcacccacacgtttctttaccctaaccccgacagccgccgccgtttcttcatcttcctcgcagcgccggcgctccatcttccgctccctccccgactcgcgatcggcacgcaggcgacgtcggggcagtctcggactcggcggcggcgtcagcggctccccctcccgccctcgccagtcgcttccggtcctccgcacaccaaccggcgactctgcgtgcgcgcctcctgcttccggtggaccgtcgacggcgcccgggccccggtggccggcgggcagcgagagccagcagcctgttttcctcattggaaaggaaggacaatcagagccaagagtttcttcataaacctgaataaaaggacatgcgattacggaatacagacagggcaccgcgtagctcaggtcgtcgcaataatgttctttcatggatctctgaagttaaagacacatctaatgtgggcgtaagaaagaaaagggggagaagagcacctccatctgctaaaagattgcgtgataaaagggtggataaggcgattgaaagtgatggtgctgttgacagtgacagcgatgatacagatggacaggttgacaagaatcagcctagtgcacacattgaggaacatgttgatgggagaactggtgatgacttagcaacagcaggccactcaggcaattcttccaatggtccatcctcagcttcagaagaacaggaccattcaacaaactctaaagacaagctccaaaaagctagctctcaaaacacaaagaaggtttttggaaactcaacaaacggcaagcaaggtgcatctaatttggaacaggaatgtgcaaatgaagatgggtctcatgtgctagttgctgctgtgtacaaggatattgataatgaaagaagctctcaaaagattagggatgatcaggtatcagatgcacaactggatacagcttcatctgatgacaaaagttcagaagaagtcgaagacgtgaaggtttgtgacatttgtggagatgttggtgaggaggagaagctcgctgtctgtagcagatgcaatgacggcgcagagcacacgtattgcatgcgggtaatgatggaagaggttccagatagtgagtggttgtgtgaagactgccaaactgctgtagaatctgaaaatgagaatagactacaaaagtctcaggtgaaggctggcacttcaaaagagctttccttagaaggggagattaacaaacctgccattgctgcaaagggaagaagttcatctgactgtgaattgaaggctgggaatatagaaaacaaagagtcaaataccacaaatgagaggaatggcacagtcaaaaccaggacggaagaagatgctgtgacgacatcctcaactagagatattttttctgaaactggtggcttgtacatgggggctgactctagaaagagaatggaaccatcacacgagacattcgtgtctgatgctgacaaaggaaagcaacctagccatcaagtatcaacttcattggtggttaatgctctgaagaatcaggcaccacagtctcgtggtcaactttccaaatccacttctttcaataactcaaaggtccccaaagtgaaacagctattgaatgaagttcctcagaagccaaaatttttgaaggaatcttggtcctctattatcaataaaaaggaaggaccaatcagcatgactactaagtcagcgaccttcaaaaagcctaagccttgtgagccaacaaacaaggcaaagtcttccgtcttgtcacctgtcgaggagccaagggtgccgaatcagttggcgagccacaatgtaacaaatggtcagtgttctatattggggcctccctctgccacatcatcaatggttgctcctgttctaagaactgatagcacaactcagctgctctctacaagaaataacacagttgactcaaataatttaggttctgttcatctacaaggaaacagtgagctaaagaagcctcgtttagcaaaagtgccgggaagtatgatgctatctaatgctgaaagatccgcaggtgggattcttggttccggtgctcatcgagaagtgattcaaaattcagacccttcacatagggatgctaaaataaaggaccaaactggcttcagacagggtgcttctagcagcaatcggacaatccgttgccaaagatgtaatgaatatggccattctacacatttttgcgaagttgaaaaacttcgtttgtcttcaggaaaacctttgagtgagcgaaacttgaaggatgcatctgccaaaagaaataagacatccgaagttagtacattggcttctagtgaaaaaactccttccagagaaccagagcatgtcgtaaagtgtgctattaatcagaatctgataaatgggcctaatgatggtatacctgccccattcagccatgtaaagaagcactcattatcacctcgagctaatgtgtccatccctgggagcggagtagattgtagcaagcctaagttcaaaaataatgatccatctctatctggcacagcaggaatctttgttcataatggtcgcattatgccaaatgatcatagggatgaacctgctcaagggttttcagctggtgatgaaccaacgtcttcaactgtccctgagctgggctggatatggcaaggtggttttgagctgcagaggactggaagttcaccggagctgtgtgatggtttccaagcccatttatcatgttctgcttcacagttagtgctggacgcagttaagaaattcccttctaaagtccagcttgaggaagttcctcggaagaattcatggccaacacagtttcagaaaaacggtccaacttatgacaacataggtctttttttctttgctagagatgttcaaagctatgaaaatcactacagtaaattagttgagaatatgctgaagaatgatttagttctcagaggaagtgttggtactgttgagttgcttatattcccttccaatatcctatcaaagaacttccaaaggtggaatatgttgtactttctatggggtctattcagagttagcaaaaaagattcctctaacctcccatcttatctatccacaagtagagtagaacgaaattttaatgatgatctccaggccatggattggatgccatctacccattcattctcacagaacaggagtgatttagctgaaccggaccctgatttgttaaagtcaactaattttgaaccgagtttggaagccagtcgtgaggtgtgtttggatggagagaactctttgaatcaacttgtacgcagaagagctctagatgatcacctagattcagatgcaaaagcatgttcaacgattagcaatggtgccatgggttcctctgccatgtctatgcaaagaaaacatcagaaacctgattatccagaacatcaagataaaaagagggacacttttggtggtaatgttagtgaaagagatttcgatgtgaacacggtgccagttacttgttctgtctccttaactcaccttcaggaagaacctggtaagctgagcacagccatcgacctcatggatatagaccatggggttagcgcaggtgcactggatcgttcacatgcatcaggtggtgcaggtaaaagaagttttgagacggccgaagtagctgctgaagtacccgagcataagaaaactaagctggataataatgttgtgcctataagctctggtccacgcgagaatgcctgtacgaatgatggcaatagcgataaactgatgcctggaagctcaagcagtgatggcaagcgcgtgtttccacttgatctaaatgcagtgggggatgaggacatcgtaaatattccagccttcaggtgatgaagagttcgctgttccatgacaaaccaaccgtggtggtttggttcagaatgagagatgtgcattgtaaatcgcatgtgcagtttttgacctaatgttttcagacaacacttacagatgtgatgttcccctctttggcagtgaataattctgctccagaatatgcttacagatgtgatctcatctgccagattc

SEQ ID NO: 61146 - DNA, 4026 bp, Zea Mays
attcctcccacattccaccgcacccacacgtttctttaccctaaccccgacagccgccgccgtttcttcatcttcctcgcagcgccggcgctccatcttccgctccctccccgactcgcgatcggcacgcaggcgacgtcggggcagtctcggactcggcggcggcgtcagcggctccccctcccgccctcgccagtcgcttccggtcctccgcacaccaaccggcgactctgcgtgcgcgcctcctgcttccggtggaccgtcgacggcgcccgggccccggtggccggcgggcagcgagagccagcagcctggcagttttcctcattggaaaggaaggacaatcagagccaagagtttcttcataaacctgaataaaaggacatgcgattacggaatacagacagggcaccgcgtagctcaggtcgtcgcaataatgttctttcatggatctctgaagttaaagacacatctaatgtgggcgtaagaaagaaaagggggagaagagcacctccatctgctaaaagattgcgtgataaaagggtggataaggcgattgaaagtgatggtgctgttgacagtgacagcgatgatacagatggacaggttgacaagaatcagcctagtgcacacattgaggaacatgttgatgggagaactggtgatgacttagcaacagcaggccactcaggcaattcttccaatggtccatcctcagcttcagaagaacaggaccattcaacaaactctaaagacaagctccaaaaagctagctctcaaaacacaaagaaggtttttggaaactcaacaaacggcaagcaaggtgcatctaatttggaacaggaatgtgcaaatgaagatgggtctcatgtgctagttgctgctgtggtatcagatgcacaactggatacagcttcatctgatgacaaaagttcagaagaagtcgaagacgtgaaggtttgtgacatttgtggagatgttggtgaggaggagaagctcgctgtctgtagcagatgcaatgacggcgcagagcacacgtattgcatgcgggtaatgatggaagaggttccagatagtgagtggttgtgtgaagactgccaaactgctgtagaatctgaaaatgagaatagactacaaaagtctcaggtgaaggctggcacttcaaaagagctttccttagaaggggagattaacaaacctgccattgctgcaaagggaagaagttcatctgactgtgaattgaaggctgggaatatagaaaacaaagagtcaaataccacaaatgagaggaatggcacagtcaaaaccaggacggaagaagatgctgtgacgacatcctcaactagagatattttttctgaaactggtggcttgtacatgggggctgactctagaaagagaatggaaccatcacacgagacattcgtgtctgatgctgacaaaggaaagcaacctagccatcaagtatcaacttcattggtggttaatgctctgaagaatcaggcaccacagtctcgtggtcaactttccaaatccacttctttcaataactcaaaggtccccaaagtgaaacagctattgaatgaagttcctcagaagccaaaatttttgaaggaatcttggtcctctattatcaataaaaaggaaggaccaatcagcatgactactaagtcagcgaccttcaaaaagcctaagccttgtgagccaacaaacaaggcaaagtcttccgtcttgtcacctgtcgaggagccaagggtgccgaatcagttggcgagccacaatgtaacaaatggtcagtgttctatattggggcctccctctgccacatcatcaatggttgctcctgttctaagaactgatagcacaactcagctgctctctacaagaaataacacagttgactcaaataatttaggttctgttcatctacaaggaaacagtgagctaaagaagcctcgtttagcaaaagtgccgggaagtatgatgctatctaatgctgaaagatccgcaggtgggattcttggttccggtgctcatcgagaagtgattcaaaattcagacccttcacatagggatgctaaaataaaggaccaaactggcttcagacagggtgcttctagcagcaatcggacaatccgttgccaaagatgtaatgaatatggccattctacacatttttgcgaagttgaaaaacttcgtttgtcttcaggaaaacctttgagtgagcgaaacttgaaggatgcatctgccaaaagaaataagacatccgaagttagtacattggcttctagtgaaaaaactccttccagagaaccagagcatgtcgtaaagtgtgctattaatcagaatctgataaatgggcctaatgatggtatacctgccccattcagccatgtaaagaagcactcattatcacctcgagctaatgtgtccatccctgggagcggagtagattgtagcaagcctaagttcaaaaataatgatccatctctatctggcacagcaggaatctttgttcataatggtcgcattatgccaaatgatcatagggatgaacctgctcaagggttttcagctggtgatgaaccaacgtcttcaactgtccctgagctgggctggatatggcaaggtggttttgagctgcagaggactggaagttcaccggagctgtgtgatggtttccaagcccatttatcatgttctgcttcacagttagtgctggacgcagttaagaaattcccttctaaagtccagcttgaggaagttcctcggaagaattcatggccaacacagtttcagaaaaacggtccaacttatgacaacataggtctttttttctttgctagagatgttcaaagctatgaaaatcactacagtaaattagttgagaatatgctgaagaatgatttagttctcagaggaagtgttggtactgttgagttgcttatattcccttccaatatcctatcaaagaacttccaaaggtggaatatgttgtactttctatggggtctattcagagttagcaaaaaagattcctctaacctcccatcttatctatccacaagtagagtagaacgaaattttaatgatgatctccaggccatggattggatgccatctacccattcattctcacagaacaggagtgatttagctgaaccggaccctgatttgttaaagtcaactaattttgaaccgagtttggaagccagtcgtgaggtgtgtttggatggagagaactctttgaatcaacttgtacgcagaagagctctagatgatcacctagattcagatgcaaaagcatgttcaacgattagcaatggtgccatgggttcctctgccatgtctatgcaaagaaaacatcagaaacctgattatccagaacatcaagataaaaagagggacacttttggtggtaatgttagtgaaagagatttcgatgtgaacacggtgccagttacttgttctgtctccttaactcaccttcaggaagaacctggtaagctgagcacagccatcgacctcatggatatagaccatggggttagcgcaggtgcactggatcgttcacatgcatcaggtggtgcaggtaaaagaagttttgagacggccgaagtagctgctgaagtacccgagcataagaaaactaagctggataataatgttgtgcctataagctctggtccacgcgagaatgcctgtacgaatgatggcaatagcgataaactgatgcctggaagctcaagcagtgatggcaagcgcgtgtttccacttgatctaaatgcagtgggggatgaggacatcgtaaatattccagccttcaggtgatgaagagttcgctgttccatgacaaaccaaccgtggtggtttggttcagaatgagagatgtgcattgtaaatcgcatgtgcagtttttgacctaatgttttcagacaacacttacagatgtgatgttcccctctttggcagtgaataattctgctccagaatatgcttacagatgtgatctcatctgccagattc

SEQ ID NO: 61147 - DNA, 3936 bp, Zea Mays
attcctcccacattccaccgcacccacacgtttctttaccctaaccccgacagccgccgccgtttcttcatcttcctcgcagcgccggcgctccatcttccgctccctccccgactcgcgatcggcacgcaggcgacgtcggggcagtctcggactcggcggcggcgtcagcggctccccctcccgccctcgccagtcgcttccggtcctccgcacaccaaccggcgactctgcgtgcgcgcctcctgcttccggtggaccgtcgacggcgcccgggccccggtggccggcgggcagcgagagccagcagcctggcagttttcctcattggaaaggaaggacaatcagagccaagagtttcttcataaacctgaataaaaggacatgcgattacggaatacagacagggcaccgcgtagctcaggtcgtcgcaataatgttctttcatggatctctgaagttaaagacacatctaatgtgggcgtaagaaagaaaagggggagaagagcacctccatctgctaaaagattgcgtgataaaagggtggataaggcgattgaaagtgatggtgctgttgacagtgacagcgatgatacagatggacaggttgacaagaatcagcctagtgcacacattgaggaacatgttgatgggagaactggtgatgacttagcaacagcaggccactcaggcaattcttccaatggtccatcctcagcttcagaagaacaggaccattcaacaaactctaaagacaagctccaaaaagctagctctcaaaacacaaagaaggtttttggaaactcaacaaacggcaagcaaggtgcatctaatttggaacaggaatgtgcaaatgaagatgggtctcatgtgctagttgctgctgtgtacaaggatattgataatgaaagaagctctcaaaagattagggatgatcaggtatcagatgcacaactggatacagcttcatctgatgacaaaagttcagaagaagtcgaagacgtgaaggtttgtgacatttgtggagatgttggtgaggaggagaagctcgctgtctgtagcagatgcaatgacggcgcagagcacacgtattgcatgcgggtaatgatggaagaggttccagatagtgagtggttgtgtgaagactgccaaactgctgtagaatctgaaaatgagaatagactacaaaagtctcaggtgaaggctggcacttcaaaagagctttccttagaaggggagattaacaaacctgccattgctgcaaagggaagaagttcatctgactgtgaattgaaggctgggaatatagaaaacaaagagtcaaataccacaaatgagaggaatggcacagtcaaaaccaggacggaagaagatgctgtgacgacatcctcaactagagatattttttctgaaactggtggcttgtacatgggggctgactctagaaagagaatggaaccatcacacgagacattcgtgtctgatgctgacaaaggaaagcaacctagccatcaagtatcaacttcattggtggttaatgctctgaagaatcaggcaccacagtctcgtggtcaactttccaaatccacttctttcaataactcaaaggtccccaaagtgaaacagctattgaatgaagttcctcagaagccaaaatttttgaaggaatcttggtcctctattatcaataaaaaggaaggaccaatcagcatgactactaagtcagcgaccttcaaaaagcctaagccttgtgagccaacaaacaaggcaaagtcttccgtcttgtcacctgtcgaggagccaagggtgccgaatcagttggcgagccacaatgtaacaaatggaaacagtgagctaaagaagcctcgtttagcaaaagtgccgggaagtatgatgctatctaatgctgaaagatccgcaggtgggattcttggttccggtgctcatcgagaagtgattcaaaattcagacccttcacatagggatgctaaaataaaggaccaaactggcttcagacagggtgcttctagcagcaatcggacaatccgttgccaaagatgtaatgaatatggccattctacacatttttgcgaagttgaaaaacttcgtttgtcttcaggaaaacctttgagtgagcgaaacttgaaggatgcatctgccaaaagaaataagacatccgaagttagtacattggcttctagtgaaaaaactccttccagagaaccagagcatgtcgtaaagtgtgctattaatcagaatctgataaatgggcctaatgatggtatacctgccccattcagccatgtaaagaagcactcattatcacctcgagctaatgtgtccatccctgggagcggagtagattgtagcaagcctaagttcaaaaataatgatccatctctatctggcacagcaggaatctttgttcataatggtcgcattatgccaaatgatcatagggatgaacctgctcaagggttttcagctggtgatgaaccaacgtcttcaactgtccctgagctgggctggatatggcaaggtggttttgagctgcagaggactggaagttcaccggagctgtgtgatggtttccaagcccatttatcatgttctgcttcacagttagtgctggacgcagttaagaaattcccttctaaagtccagcttgaggaagttcctcggaagaattcatggccaacacagtttcagaaaaacggtccaacttatgacaacataggtctttttttctttgctagagatgttcaaagctatgaaaatcactacagtaaattagttgagaatatgctgaagaatgatttagttctcagaggaagtgttggtactgttgagttgcttatattcccttccaatatcctatcaaagaacttccaaaggtggaatatgttgtactttctatggggtctattcagagttagcaaaaaagattcctctaacctcccatcttatctatccacaagtagagtagaacgaaattttaatgatgatctccaggccatggattggatgccatctacccattcattctcacagaacaggagtgatttagctgaaccggaccctgatttgttaaagtcaactaattttgaaccgagtttggaagccagtcgtgaggtgtgtttggatggagagaactctttgaatcaacttgtacgcagaagagctctagatgatcacctagattcagatgcaaaagcatgttcaacgattagcaatggtgccatgggttcctctgccatgtctatgcaaagaaaacatcagaaacctgattatccagaacatcaagataaaaagagggacacttttggtggtaatgttagtgaaagagatttcgatgtgaacacggtgccagttacttgttctgtctccttaactcaccttcaggaagaacctggtaagctgagcacagccatcgacctcatggatatagaccatggggttagcgcaggtgcactggatcgttcacatgcatcaggtggtgcaggtaaaagaagttttgagacggccgaagtagctgctgaagtacccgagcataagaaaactaagctggataataatgttgtgcctataagctctggtccacgcgagaatgcctgtacgaatgatggcaatagcgataaactgatgcctggaagctcaagcagtgatggcaagcgcgtgtttccacttgatctaaatgcagtgggggatgaggacatcgtaaatattccagccttcaggtgatgaagagttcgctgttccatgacaaaccaaccgtggtggtttggttcagaatgagagatgtgcattgtaaatcgcatgtgcagtttttgacctaatgttttcagacaacacttacagatgtgatgttcccctctttggcagtgaataattctgctccagaatatgcttacagatgtgatctcatctgccagattc

SEQ ID NO: 61148 - DNA, 4090 bp, Zea Mays
ttccatccgctgcattcctcccacattccaccgcacccacacgtttctttaccctaaccccgacagccgccgccgtttcttcatcttcctcgcagcgccggcgctccatcttccgctccctccccgactcgcgatcggcacgcaggcgacgtcggggcagtctcggactcggcggcggcgtcagcggctccccctcccgccctcgccagtcgcttccggtcctccgcacaccaaccggcgactctgcgtgcgcgcctcctgcttccggtggaccgtcgacggcgcccgggccccggtggccggcgggcagcgagagccagcagcctggcagttttcctcattggaaaggaaggacaatcagagccaagagtttcttcataaacctgaataaaaggacatgcgattacggaatacagacagggcaccgcgtagctcaggtcgtcgcaataatgttctttcatggatctctgaagttaaagacacatctaatgtgggcgtaagaaagaaaagggggagaagagcacctccatctgctaaaagattgcgtgataaaagggtggataaggcgattgaaagtgatggtgctgttgacagtgacagcgatgatacagatggacaggttgacaagaatcagcctagtgcacacattgaggaacatgttgatgggagaactggtgatgacttagcaacagcaggccactcaggcaattcttccaatggtccatcctcagcttcagaagaacaggaccattcaacaaactctaaagacaagctccaaaaagctagctctcaaaacacaaagaaggtttttggaaactcaacaaacggcaagcaaggtgcatctaatttggaacaggaatgtgcaaatgaagatgggtctcatgtgctagttgctgctgtgtacaaggatattgataatgaaagaagctctcaaaagattagggatgatcaggtatcagatgcacaactggatacagcttcatctgatgacaaaagttcagaagaagtcgaagacgtgaaggtttgtgacatttgtggagatgttggtgaggaggagaagctcgctgtctgtagcagatgcaatgacggcgcagagcacacgtattgcatgcgggtaatgatggaagaggttccagatagtgagtggttgtgtgaagactgccaaactgctgtagaatctgaaaatgagaatagactacaaaagtctcaggtgaaggctggcacttcaaaagagctttccttagaaggggagattaacaaacctgccattgctgcaaagggaagaagttcatctgactgtgaattgaaggctgggaatatagaaaacaaagagtcaaataccacaaatgagaggaatggcacagtcaaaaccaggacggaagaagatgctgtgacgacatcctcaactagagatattttttctgaaactggtggcttgtacatgggggctgactctagaaagagaatggaaccatcacacgagacattcgtgtctgatgctgacaaaggaaagcaacctagccatcaagtatcaacttcattggtggttaatgctctgaagaatcaggcaccacagtctcgtggtcaactttccaaatccacttctttcaataactcaaaggtccccaaagtgaaacagctattgaatgaagttcctcagaagccaaaatttttgaaggaatcttggtcctctattatcaataaaaaggaaggaccaatcagcatgactactaagtcagcgaccttcaaaaagcctaagccttgtgagccaacaaacaaggcaaagtcttccgtcttgtcacctgtcgaggagccaagggtgccgaatcagttggcgagccacaatgtaacaaatggtcagtgttctatattggggcctccctctgccacatcatcaatggttgctcctgttctaagaactgatagcacaactcagctgctctctacaagaaataacacagttgactcaaataatttaggttctgttcatctacaaggaaacagtgagctaaagaagcctcgtttagcaaaagtgccgggaagtatgatgctatctaatgctgaaagatccgcaggtgggattcttggttccggtgctcatcgagaagtgattcaaaattcagacccttcacatagggatgctaaaataaaggaccaaactggcttcagacagggtgcttctagcagcaatcggacaatccgttgccaaagatgtaatgaatatggccattctacacatttttgcgaagttgaaaaacttcgtttgtcttcaggaaaacctttgagtgagcgaaacttgaaggatgcatctgccaaaagaaataagacatccgaagttagtacattggcttctagtgaaaaaactccttccagagaaccagagcatgtcgtaaagtgtgctattaatcagaatctgataaatgggcctaatgatggtatacctgccccattcagccatgtaaagaagcactcattatcacctcgagctaatgtgtccatccctgggagcggagtagattgtagcaagcctaagttcaaaaataatgatccatctctatctggcacagcaggaatctttgttcataatggtcgcattatgccaaatgatcatagggatgaacctgctcaagggttttcagctggtgatgaaccaacgtcttcaactgtccctgagctgggctggatatggcaaggtggttttgagctgcagaggactggaagttcaccggagctgtgtgatggtttccaagcccatttatcatgttctgcttcacagttagtgctggacgcagttaagaaattcccttctaaagtccagcttgaggaagttcctcggaagaattcatggccaacacagtttcagaaaaacggtccaacttatgacaacataggtctttttttctttgctagagatgttcaaagctatgaaaatcactacagtaaattagttgagaatatgctgaagaatgatttagttctcagaggaagtgttggtactgttgagttgcttatattcccttccaatatcctatcaaagaacttccaaaggtggaatatgttgtactttctatggggtctattcagagttagcaaaaaagattcctctaacctcccatcttatctatccacaagtagagtagaacgaaattttaatgatgatctccaggccatggattggatgccatctacccattcattctcacagaacaggagtgatttagctgaaccggaccctgatttgttaaagtcaactaattttgaaccgagtttggaagccagtcgtgaggtgtgtttggatggagagaactctttgaatcaacttgtacgcagaagagctctagatgatcacctagattcagatgcaaaagcatgttcaacgattagcaatggtgccatgggttcctctgccatgtctatgcaaagaaaacatcagaaacctgattatccagaacatcaagataaaaagagggacacttttggtggtaatgttagtgaaagagatttcgatgtgaacacggtgccagttacttgttctgtctccttaactcaccttcaggaagaacctggtaagctgagcacagccatcgacctcatggatatagaccatggggttagcgcaggtgcactggatcgttcacatgcatcaggtggtgcaggtaaaagaagttttgagacggccgaagtagctgctgaagtacccgagcataagaaaactaagctggataataatgttgtgcctataagctctggtccacgcgagaatgcctgtacgaatgatggcaatagcgataaactgatgcctggaagctcaagcagtgatggcaagcgcgtgtttccacttgatctaaatgcagtgggggatgaggacatcgtaaatattccagccttcaggtgatgaagagttcgctgttccatgacaaaccaaccgtggtggtttggttcagaatgagagatgtgcattgtaaatcgcatgtgcagtttttgacctaatgttttcagacaacacttacagatgtgatgttcccctctttggcagtgaataattctgctccagaatatgcttacagatgtgatctcatctgccagattc

SEQ ID NO: 61149 - DNA, 4103 bp, Zea Mays
tccgctgattctccccttccatccgctgcattcctcccacattccaccgcacccacacgtttctttaccctaaccccgacagccgccgccgtttcttcatcttcctcgcagcgccggcgctccatcttccgctccctccccgactcgcgatcggcacgcaggcgacgtcggggcagtctcggactcggcggcggcgtcagcggctccccctcccgccctcgccagtcgcttccggtcctccgcacaccaaccggcgactctgcgtgcgcgcctcctgcttccggtggaccgtcgacggcgcccgggccccggtggccggcgggcagcgagagccagcagcctggcagttttcctcattggaaaggaaggacaatcagagccaagagtttcttcataaacctgaataaaaggacatgcgattacggaatacagacagggcaccgcgtagctcaggtcgtcgcaataatgttctttcatggatctctgaagttaaagacacatctaatgtgggcgtaagaaagaaaagggggagaagagcacctccatctgctaaaagattgcgtgataaaagggtggataaggcgattgaaagtgatggtgctgttgacagtgacagcgatgatacagatggacaggttgacaagaatcagcctagtgcacacattgaggaacatgttgatgggagaactggtgatgacttagcaacagcaggccactcaggcaattcttccaatggtccatcctcagcttcagaagaacaggaccattcaacaaactctaaagacaagctccaaaaagctagctctcaaaacacaaagaaggtttttggaaactcaacaaacggcaagcaaggtgcatctaatttggaacaggaatgtgcaaatgaagatgggtctcatgtgctagttgctgctgtgtacaaggatattgataatgaaagaagctctcaaaagattagggatgatgtatcagatgcacaactggatacagcttcatctgatgacaaaagttcagaagaagtcgaagacgtgaaggtttgtgacatttgtggagatgttggtgaggaggagaagctcgctgtctgtagcagatgcaatgacggcgcagagcacacgtattgcatgcgggtaatgatggaagaggttccagatagtgagtggttgtgtgaagactgccaaactgctgtagaatctgaaaatgagaatagactacaaaagtctcaggtgaaggctggcacttcaaaagagctttccttagaaggggagattaacaaacctgccattgctgcaaagggaagaagttcatctgactgtgaattgaaggctgggaatatagaaaacaaagagtcaaataccacaaatgagaggaatggcacagtcaaaaccaggacggaagaagatgctgtgacgacatcctcaactagagatattttttctgaaactggtggcttgtacatgggggctgactctagaaagagaatggaaccatcacacgagacattcgtgtctgatgctgacaaaggaaagcaacctagccatcaagtatcaacttcattggtggttaatgctctgaagaatcaggcaccacagtctcgtggtcaactttccaaatccacttctttcaataactcaaaggtccccaaagtgaaacagctattgaatgaagttcctcagaagccaaaatttttgaaggaatcttggtcctctattatcaataaaaaggaaggaccaatcagcatgactactaagtcagcgaccttcaaaaagcctaagccttgtgagccaacaaacaaggcaaagtcttccgtcttgtcacctgtcgaggagccaagggtgccgaatcagttggcgagccacaatgtaacaaatggtcagtgttctatattggggcctccctctgccacatcatcaatggttgctcctgttctaagaactgatagcacaactcagctgctctctacaagaaataacacagttgactcaaataatttaggttctgttcatctacaaggaaacagtgagctaaagaagcctcgtttagcaaaagtgccgggaagtatgatgctatctaatgctgaaagatccgcaggtgggattcttggttccggtgctcatcgagaagtgattcaaaattcagacccttcacatagggatgctaaaataaaggaccaaactggcttcagacagggtgcttctagcagcaatcggacaatccgttgccaaagatgtaatgaatatggccattctacacatttttgcgaagttgaaaaacttcgtttgtcttcaggaaaacctttgagtgagcgaaacttgaaggatgcatctgccaaaagaaataagacatccgaagttagtacattggcttctagtgaaaaaactccttccagagaaccagagcatgtcgtaaagtgtgctattaatcagaatctgataaatgggcctaatgatggtatacctgccccattcagccatgtaaagaagcactcattatcacctcgagctaatgtgtccatccctgggagcggagtagattgtagcaagcctaagttcaaaaataatgatccatctctatctggcacagcaggaatctttgttcataatggtcgcattatgccaaatgatcatagggatgaacctgctcaagggttttcagctggtgatgaaccaacgtcttcaactgtccctgagctgggctggatatggcaaggtggttttgagctgcagaggactggaagttcaccggagctgtgtgatggtttccaagcccatttatcatgttctgcttcacagttagtgctggacgcagttaagaaattcccttctaaagtccagcttgaggaagttcctcggaagaattcatggccaacacagtttcagaaaaacggtccaacttatgacaacataggtctttttttctttgctagagatgttcaaagctatgaaaatcactacagtaaattagttgagaatatgctgaagaatgatttagttctcagaggaagtgttggtactgttgagttgcttatattcccttccaatatcctatcaaagaacttccaaaggtggaatatgttgtactttctatggggtctattcagagttagcaaaaaagattcctctaacctcccatcttatctatccacaagtagagtagaacgaaattttaatgatgatctccaggccatggattggatgccatctacccattcattctcacagaacaggagtgatttagctgaaccggaccctgatttgttaaagtcaactaattttgaaccgagtttggaagccagtcgtgaggtgtgtttggatggagagaactctttgaatcaacttgtacgcagaagagctctagatgatcacctagattcagatgcaaaagcatgttcaacgattagcaatggtgccatgggttcctctgccatgtctatgcaaagaaaacatcagaaacctgattatccagaacatcaagataaaaagagggacacttttggtggtaatgttagtgaaagagatttcgatgtgaacacggtgccagttacttgttctgtctccttaactcaccttcaggaagaacctggtaagctgagcacagccatcgacctcatggatatagaccatggggttagcgcaggtgcactggatcgttcacatgcatcaggtggtgcaggtaaaagaagttttgagacggccgaagtagctgctgaagtacccgagcataagaaaactaagctggataataatgttgtgcctataagctctggtccacgcgagaatgcctgtacgaatgatggcaatagcgataaactgatgcctggaagctcaagcagtgatggcaagcgcgtgtttccacttgatctaaatgcagtgggggatgaggacatcgtaaatattccagccttcaggtgatgaagagttcgctgttccatgacaaaccaaccgtggtggtttggttcagaatgagagatgtgcattgtaaatcgcatgtgcagtttttgacctaatgttttcagacaacacttacagatgtgatgttcccctctttggcagtgaataattctgctccagaatatgcttacagatgtgatctcatctgccagattc

SEQ ID NO: 61150 - DNA, 4029 bp, Zea Mays
caaggcccgcgcatccccttccgctgattctccccttccatccgctgcattcctcccacattccaccgcacccacacgtttctttaccctaaccccgacagccgccgccgtttcttcatcttcctcgcagcgccggcgctccatcttccgctccctccccgactcgcgatcggcacgcaggcgacgtcggggcagtctcggactcggcggcggcgtcagcggctccccctcccgccctcgccagtcgcttccggtcctccgcacaccaaccggcgactctgcgtgcgcgcctcctgcttccggtggaccgtcgacggcgcccgggccccggtggccggcgggcagcgagagccagcagcctggcagttttcctcattggaaaggaaggacaatcagagccaagagtttcttcataaacctgaataaaaggacatgcgattacggaatacagacagggcaccgcgtagctcaggtcgtcgcaataatgttctttcatggatctctgaagttaaagacacatctaatgtgggcgtaagaaagaaaagggggagaagagcacctccatctgctaaaagattgcgtgataaaagggtggataaggcgattgaaagtgatggtgctgttgacagtgacagcgatgatacagatggacaggttgacaagaatcagcctagtgcacacattgaggaacatgttgatgggagaactggtgatgacttagcaacagcaggccactcaggcaattcttccaatggtccatcctcagcttcagaagaacaggaccattcaacaaactctaaagacaagctccaaaaagctagctctcaaaacacaaagaaggtttttggaaactcaacaaacggcaagcaaggtgcatctaatttggaacaggaatgtgcaaatgaagatgggtctcatgtgctagttgctgctgtatcagatgcacaactggatacagcttcatctgatgacaaaagttcagaagaagtcgaagacgtgaaggtttgtgacatttgtggagatgttggtgaggaggagaagctcgctgtctgtagcagatgcaatgacggcgcagagcacacgtattgcatgcgggtaatgatggaagaggttccagatagtgagtggttgtgtgaagactgccaaactgctgtagaatctgaaaatgagaatagactacaaaagtctcaggtgaaggctggcacttcaaaagagctttccttagaaggggagattaacaaacctgccattgctgcaaagggaagaagttcatctgactgtgaattgaaggctgggaatatagaaaacaaagagtcaaataccacaaatgagaggaatggcacagtcaaaaccaggacggaagaagatgctgtgacgacatcctcaactagagatattttttctgaaactggtggcttgtacatgggggctgactctagaaagagaatggaaccatcacacgagacattcgtgtctgatgctgacaaaggaaagcaacctagccatcaagtatcaacttcattggtggttaatgctctgaagaatcaggcaccacagtctcgtggtcaactttccaaatccacttctttcaataactcaaaggtccccaaagtgaaacagctattgaatgaagttcctcagaagccaaaatttttgaaggaatcttggtcctctattatcaataaaaaggaaggaccaatcagcatgactactaagtcagcgaccttcaaaaagcctaagccttgtgagccaacaaacaaggcaaagtcttccgtcttgtcacctgtcgaggagccaagggtgccgaatcagttggcgagccacaatgtaacaaatggtcagtgttctatattggggcctccctctgccacatcatcaatggttgctcctgttctaagaactgatagcacaactcagctgctctctacaagaaataacacagttgactcaaataatttaggttctgttcatctacaaggaaacagtgagctaaagaagcctcgtttagcaaaagtgccgggaagtatgatgctatctaatgctgaaagatccgcaggtgggattcttggttccggtgctcatcgagaagtgattcaaaattcagacccttcacatagggatgctaaaataaaggaccaaactggcttcagacagggtgcttctagcagcaatcggacaatccgttgccaaagatgtaatgaatatggccattctacacatttttgcgaagttgaaaaacttcgtttgtcttcaggaaaacctttgagtgagcgaaacttgaaggatgcatctgccaaaagaaataagacatccgaagttagtacattggcttctagtgaaaaaactccttccagagaaccagagcatgtcgtaaagtgtgctattaatcagaatctgataaatgggcctaatgatggtatacctgccccattcagccatgtaaagaagcactcattatcacctcgagctaatgtgtccatccctgggagcggagtagattgtagcaagcctaagttcaaaaataatgatccatctctatctggcacagcaggaatctttgttcataatggtcgcattatgccaaatgatcatagggatgaacctgctcaagggttttcagctggtgatgaaccaacgtcttcaactgtccctgagctgggctggatatggcaaggtggttttgagctgcagaggactggaagttcaccggagctgtgtgatggtttccaagcccatttatcatgttctgcttcacagttagtgctggacgcagttaagaaattcccttctaaagtccagcttgaggaagttcctcggaagaattcatggccaacacagtttcagaaaaacggtccaacttatgacaacataggtctttttttctttgctagagatgttcaaagctatgaaaatcactacagtaaattagttgagaatatgctgaagaatgatttagttctcagaggaagtgttggtactgttgagttgcttatattcccttccaatatcctatcaaagaacttccaaaggtggaatatgttgtactttctatggggtctattcagagttagcaaaaaagattcctctaacctcccatcttatctatccacaagtagagtagaacgaaattttaatgatgatctccaggccatggattggatgccatctacccattcattctcacagaacaggagtgatttagctgaaccggaccctgatttgttaaagtcaactaattttgaaccgagtttggaagccagtcgtgaggtgtgtttggatggagagaactctttgaatcaacttgtacgcagaagagctctagatgatcacctagattcagatgcaaaagcatgttcaacgattagcaatggtgccatgggttcctctgccatgtctatgcaaagaaaacatcagaaacctgattatccagaacatcaagataaaaagagggacacttttggtggtaatgttagtgaaagagatttcgatgtgaacacggtgccagttacttgttctgtctccttaactcaccttcaggaagaccatggggttagcgcaggtgcactggatcgttcacatgcatcaggtggtgcaggtaaaagaagttttgagacggccgaagtagctgctgaagtacccgagcataagaaaactaagctggataataatgttgtgcctataagctctggtccacgcgagaatgcctgtacgaatgatggcaatagcgataaactgatgcctggaagctcaagcagtgatggcaagcgcgtgtttccacttgatctaaatgcagtgggggatgaggacatcgtaaatattccagccttcaggtgatgaagagttcgctgttccatgacaaaccaaccgtggtggtttggttcagaatgagagatgtgcattgtaaatcgcatgtgcagtttttgacctaatgttttcagacaacacttacagatgtgatgttcccctctttggcagtgaataattctgctccagaatatgcttacagatgtgatctcatctgccagattc

SEQ ID NO: 61151 - DNA, 4071 bp, Zea Mays
caaggcccgcgcatccccttccgctgattctccccttccatccgctgcattcctcccacattccaccgcacccacacgtttctttaccctaaccccgacagccgccgccgtttcttcatcttcctcgcagcgccggcgctccatcttccgctccctccccgactcgcgatcggcacgcaggcgacgtcggggcagtctcggactcggcggcggcgtcagcggctccccctcccgccctcgccagtcgcttccggtcctccgcacaccaaccggcgactctgcgtgcgcgcctcctgcttccggtggaccgtcgacggcgcccgggccccggtggccggcgggcagcgagagccagcagcctggcagttttcctcattggaaaggaaggacaatcagagccaagagtttcttcataaacctgaataaaaggacatgcgattacggaatacagacagggcaccgcgtagctcaggtcgtcgcaataatgttctttcatggatctctgaagttaaagacacatctaatgtgggcgtaagaaagaaaagggggagaagagcacctccatctgctaaaagattgcgtgataaaagggtggataaggcgattgaaagtgatggtgctgttgacagtgacagcgatgatacagatggacaggttgacaagaatcagcctagtgcacacattgaggaacatgttgatgggagaactggtgatgacttagcaacagcaggccactcaggcaattcttccaatggtccatcctcagcttcagaagaacaggaccattcaacaaactctaaagacaagctccaaaaagctagctctcaaaacacaaagaaggtttttggaaactcaacaaacggcaagcaaggtgcatctaatttggaacaggaatgtgcaaatgaagatgggtctcatgtgctagttgctgctgtatcagatgcacaactggatacagcttcatctgatgacaaaagttcagaagaagtcgaagacgtgaaggtttgtgacatttgtggagatgttggtgaggaggagaagctcgctgtctgtagcagatgcaatgacggcgcagagcacacgtattgcatgcgggtaatgatggaagaggttccagatagtgagtggttgtgtgaagactgccaaactgctgtagaatctgaaaatgagaatagactacaaaagtctcaggtgaaggctggcacttcaaaagagctttccttagaaggggagattaacaaacctgccattgctgcaaagggaagaagttcatctgactgtgaattgaaggctgggaatatagaaaacaaagagtcaaataccacaaatgagaggaatggcacagtcaaaaccaggacggaagaagatgctgtgacgacatcctcaactagagatattttttctgaaactggtggcttgtacatgggggctgactctagaaagagaatggaaccatcacacgagacattcgtgtctgatgctgacaaaggaaagcaacctagccatcaagtatcaacttcattggtggttaatgctctgaagaatcaggcaccacagtctcgtggtcaactttccaaatccacttctttcaataactcaaaggtccccaaagtgaaacagctattgaatgaagttcctcagaagccaaaatttttgaaggaatcttggtcctctattatcaataaaaaggaaggaccaatcagcatgactactaagtcagcgaccttcaaaaagcctaagccttgtgagccaacaaacaaggcaaagtcttccgtcttgtcacctgtcgaggagccaagggtgccgaatcagttggcgagccacaatgtaacaaatggtcagtgttctatattggggcctccctctgccacatcatcaatggttgctcctgttctaagaactgatagcacaactcagctgctctctacaagaaataacacagttgactcaaataatttaggttctgttcatctacaaggaaacagtgagctaaagaagcctcgtttagcaaaagtgccgggaagtatgatgctatctaatgctgaaagatccgcaggtgggattcttggttccggtgctcatcgagaagtgattcaaaattcagacccttcacatagggatgctaaaataaaggaccaaactggcttcagacagggtgcttctagcagcaatcggacaatccgttgccaaagatgtaatgaatatggccattctacacatttttgcgaagttgaaaaacttcgtttgtcttcaggaaaacctttgagtgagcgaaacttgaaggatgcatctgccaaaagaaataagacatccgaagttagtacattggcttctagtgaaaaaactccttccagagaaccagagcatgtcgtaaagtgtgctattaatcagaatctgataaatgggcctaatgatggtatacctgccccattcagccatgtaaagaagcactcattatcacctcgagctaatgtgtccatccctgggagcggagtagattgtagcaagcctaagttcaaaaataatgatccatctctatctggcacagcaggaatctttgttcataatggtcgcattatgccaaatgatcatagggatgaacctgctcaagggttttcagctggtgatgaaccaacgtcttcaactgtccctgagctgggctggatatggcaaggtggttttgagctgcagaggactggaagttcaccggagctgtgtgatggtttccaagcccatttatcatgttctgcttcacagttagtgctggacgcagttaagaaattcccttctaaagtccagcttgaggaagttcctcggaagaattcatggccaacacagtttcagaaaaacggtccaacttatgacaacataggtctttttttctttgctagagatgttcaaagctatgaaaatcactacagtaaattagttgagaatatgctgaagaatgatttagttctcagaggaagtgttggtactgttgagttgcttatattcccttccaatatcctatcaaagaacttccaaaggtggaatatgttgtactttctatggggtctattcagagttagcaaaaaagattcctctaacctcccatcttatctatccacaagtagagtagaacgaaattttaatgatgatctccaggccatggattggatgccatctacccattcattctcacagaacaggagtgatttagctgaaccggaccctgatttgttaaagtcaactaattttgaaccgagtttggaagccagtcgtgaggtgtgtttggatggagagaactctttgaatcaacttgtacgcagaagagctctagatgatcacctagattcagatgcaaaagcatgttcaacgattagcaatggtgccatgggttcctctgccatgtctatgcaaagaaaacatcagaaacctgattatccagaacatcaagataaaaagagggacacttttggtggtaatgttagtgaaagagatttcgatgtgaacacggtgccagttacttgttctgtctccttaactcaccttcaggaagaacctggtaagctgagcacagccatcgacctcatggatatagaccatggggttagcgcaggtgcactggatcgttcacatgcatcaggtggtgcaggtaaaagaagttttgagacggccgaagtagctgctgaagtacccgagcataagaaaactaagctggataataatgttgtgcctataagctctggtccacgcgagaatgcctgtacgaatgatggcaatagcgataaactgatgcctggaagctcaagcagtgatggcaagcgcgtgtttccacttgatctaaatgcagtgggggatgaggacatcgtaaatattccagccttcaggtgatgaagagttcgctgttccatgacaaaccaaccgtggtggtttggttcagaatgagagatgtgcattgtaaatcgcatgtgcagtttttgacctaatgttttcagacaacacttacagatgtgatgttcccctctttggcagtgaataattctgctccagaatatgcttacagatgtgatctcatctgccagattc

SEQ ID NO: 61152 - DNA, 1831 bp, Zea Mays
ccccaactcacaaacgtaccagaggcttaccaagcactccattgtgatcgatggatcccggatgtcaccattgggctggagtggactgtcgtgggcaatcggcatcctcatcgtggcgccgctcctcacccagaccgctcaccatctcgaccgtggccagtaccagtcgctgatcctcattgccgccacgtccttcgggtccttcttctgcctgctaacaggcttcttcaagacggtctgggtgttcctgttctacatcctcttcatcgctggctcgatcatcgtcgctgaggcggtgcacacccgcaaccttgggctgatgatccgtggcctggctgcgcatgactcgggcaagcaccttgtccttcgccgccgcgctgctgccagccagctcagcctgtactgcactgccataggaggcattggagctgccctcatggcagctttcatgtaccacatgctgcggcgcactgaccagctcactggcctctgggtcgtgtccatcttctgtggccttatctggttcatcggcatctgccatggcctcttcacaaacaggcccagcagctcgtcacccaccaccgcattcgagcccaacttcttcaccaagctcagctacagcatgaccctcctccgttacccgcaggccattggcagcctggttgcggtgttcctgtcctctttcgccacaatgtgcatcttcaccagcggcacgctctatgctatcggtggtgtctgcatcaagccggtgctcgtgcttgcgctatggatcctctactttctgttccccttgatctcgctcccgctcctccacccgatccagatcataatccgcgcggacgccgtgcgcatgcagctgctcgggttcataatctgcctgttcgtgtccggtgccgggttctacttcaagagccacaggtggagggctgcccacatcatcgtcatcgccctggtccagagcaccgccaatggcatactgtacgcgttcggccgcatcctgctcctcgatgcctcgccgccggggaaggagggtgcgttctcggtctggtacgcgtttgttcgtgtcaccggtgccatgatcggcttcgctgcctcctccgctggccctgggcgcgcgggagggtcctttgctgctgcgttcctcgggagcttcctgggcatcatcgtgctgatcttcggcaacgtcagcaacatcggggcgctgaaggcggccgggcacctcaaggggatggacgacgagaagaggatgggcggtctcgggatggagaagggcgagggcatgggtagcgccgtcgctgattctggcgagagcagggggagggtatgatgatgactattcgtgacagtgaattcctgggaggtgggggagaaaaggattgcgtcctgtggaggttgtgcttgtgagaaggatttgttctctcttttttttcttgtttctttggccgtgtttcagtgacactgttgatggatcccagtgcttcgcccgtttgatgcatcatggtggtggtggtgatgatggatgacatagtggtaggggagtgtgtgctagttgttaatgtgttatttattcttttgcttgcaagacaattgtaactgatgatcgttagatcatatggttcttccttcgttcttcacccgcccccaaagtctcttgcagtaaagcttcattcatgattcagcctgtgtccgtgtggggaaaaaaatgtgatggtggcattgtgtagacagaagtaaaacatctgtaaactcacttgtagcgatcattctgttctctctgatgccagatgctcgtatgcatttgaatccgccgcagtgccgacctgtgttcaga

SEQ ID NO: 61153 - DNA, 1836 bp, Zea Mays
agagagcacaaaaaaagcaggtaccagaggcttaccaagcactccattgtgatcgatggatcccggatgtcaccattgggctggagtggactgtcgtgggcaatcggcatcctcatcgtggcgccgctcctcacccagaccgctcaccatctcgaccgtggccagtaccagtcgctgatcctcattgccgccacgtccttcgggtccttcttctgcctgctaacaggcttcttcaagacggtctgggtgttcctgttctacatcctcttcatcgctggctcgatcatcgtcgctgaggcggtgcacacccgcaaccttgggctgatgatccgtggcctggctgcgcatgactcgggcaagcaccttgtccttcgccgccgcgctgctgccagccagctcagcctgtactgcactgccataggaggcattggagctgccctcatggcagctttcatgtaccacatgctgcggcgcactgaccagctcactggcctctgggtcgtgtccatcttctgtggccttatctggttcatcggcatctgccatggcctcttcacaaacaggcccagcagctcgtcacccaccaccgcattcgagcccaacttcttcaccaagctcagctacagcatgaccctcctccgttacccgcaggccattggcagcctggttgcggtgttcctgtcctctttcgccacaatgtgcatcttcaccagcggcacgctctatgctatcggtggtgtctgcatcaagccggtgctcgtgcttgcgctatggatcctctactttctgttccccttgatctcgctcccgctcctccacccgatccagatcataatccgcgcggacgccgtgcgcatgcagctgctcgggttcataatctgcctgttcgtgtccggtgccgggttctacttcaagagccacaggtggagggctgcccacatcatcgtcatcgccctggtccagagcaccgccaatggcatactgtacgcgttcggccgcatcctgctcctcgatgcctcgccgccggggaaggagggtgcgttctcggtctggtacgcgtttgttcgtgtcaccggtgccatgatcggcttcgctgcctcctccgctggccctgggcgcgcgggagggtcctttgctgctgcgttcctcgggagcttcctgggcatcatcgtgctgatcttcggcaacgtcagcaacatcggggcgctgaaggcggccgggcacctcaaggggatggacgacgagaagaggatgggcggtctcgggatggagaagggcgagggcatgggtagcgccgtcgctgattctggcgagagcagggggagggtatgatgatgactattcgtgacagtgaattcctgggaggtgggggagaaaaggattgcgtcctgtggaggttgtgcttgtgagaaggatttgttctctcttttttttcttgtttctttggccgtgtttcagtgacactgttgatggatcccagtgcttcgcccgtttgatgcatcatggtggtggtggtgatgatggatgacatagtggtaggggagtgtgtgctagttgttaatgtgttatttattcttttgcttgcaagacaattgtaactgatgatcgttagatcatatggttcttccttcgttcttcacccgcccccaaagtctcttgcagtaaagcttcattcatgattcagcctgtgtccgtgtggggaaaaaaatgtgatggtggcattgtgtagacagaagtaaaacatctgtaaactcacttgtagcgatcattctgttctctctgatgccagatgctcgtatgcatttgaatccgccgcagtgccgacctgtgttcaga

SEQ ID NO: 61154 - DNA, 1880 bp, Zea Mays
attaaattgcgcagaaaaaccctgaaccatatttcagatagcttctagccgtcgcatcagaattgtaccagaggcttaccaagcactccattgtgatcgatggatcccggatgtcaccattgggctggagtggactgtcgtgggcaatcggcatcctcatcgtggcgccgctcctcacccagaccgctcaccatctcgaccgtggccagtaccagtcgctgatcctcattgccgccacgtccttcgggtccttcttctgcctgctaacaggcttcttcaagacggtctgggtgttcctgttctacatcctcttcatcgctggctcgatcatcgtcgctgaggcggtgcacacccgcaaccttgggctgatgatccgtggcctggctgcgcatgactcgggcaagcaccttgtccttcgccgccgcgctgctgccagccagctcagcctgtactgcactgccataggaggcattggagctgccctcatggcagctttcatgtaccacatgctgcggcgcactgaccagctcactggcctctgggtcgtgtccatcttctgtggccttatctggttcatcggcatctgccatggcctcttcacaaacaggcccagcagctcgtcacccaccaccgcattcgagcccaacttcttcaccaagctcagctacagcatgaccctcctccgttacccgcaggccattggcagcctggttgcggtgttcctgtcctctttcgccacaatgtgcatcttcaccagcggcacgctctatgctatcggtggtgtctgcatcaagccggtgctcgtgcttgcgctatggatcctctactttctgttccccttgatctcgctcccgctcctccacccgatccagatcataatccgcgcggacgccgtgcgcatgcagctgctcgggttcataatctgcctgttcgtgtccggtgccgggttctacttcaagagccacaggtggagggctgcccacatcatcgtcatcgccctggtccagagcaccgccaatggcatactgtacgcgttcggccgcatcctgctcctcgatgcctcgccgccggggaaggagggtgcgttctcggtctggtacgcgtttgttcgtgtcaccggtgccatgatcggcttcgctgcctcctccgctggccctgggcgcgcgggagggtcctttgctgctgcgttcctcgggagcttcctgggcatcatcgtgctgatcttcggcaacgtcagcaacatcggggcgctgaaggcggccgggcacctcaaggggatggacgacgagaagaggatgggcggtctcgggatggagaagggcgagggcatgggtagcgccgtcgctgattctggcgagagcagggggagggtatgatgatgactattcgtgacagtgaattcctgggaggtgggggagaaaaggattgcgtcctgtggaggttgtgcttgtgagaaggatttgttctctcttttttttcttgtttctttggccgtgtttcagtgacactgttgatggatcccagtgcttcgcccgtttgatgcatcatggtggtggtggtgatgatggatgacatagtggtaggggagtgtgtgctagttgttaatgtgttatttattcttttgcttgcaagacaattgtaactgatgatcgttagatcatatggttcttccttcgttcttcacccgcccccaaagtctcttgcagtaaagcttcattcatgattcagcctgtgtccgtgtggggaaaaaaatgtgatggtggcattgtgtagacagaagtaaaacatctgtaaactcacttgtagcgatcattctgttctctctgatgccagatgctcgtatgcatttgaatccgccgcagtgccgacctgtgttcaga

SEQ ID NO: 61155 - DNA, 2722 bp, Zea Mays
cggggggcatcgggccaaaccaaaagcacggacaccaaccaaaggccaactcatgaacaccaacaactagtgtagtgtgtagttgtgtgcacgctggcttggtccccgtagcagagaaccccacccccataaaagctcctctccattggccgaacgccgagagcaccactccctccctccggctcccaaccccagcacagcgcagcagcagtcctctctcctctcactctactcctccagctccccacccctctcccaaaacctcagttcaatcccaggtttcaaatccgccaccttttggacacacaccacacttgcctacccccagagctgagctagctagctgctctctctctctcttttcacctaagcgagaacagagcccaagaggcctcaaaagaaccactgcacttcctccgcatagctcgtcgccctctctctcctatcagtcctcccagctccagctaccacagcagccctctcgcttaaaggaggagggagaagagggcggggcgagcaatgtcggagcagcagcagccattgccgcagcctcggagcagcatgcgggaggctctggagaaggaggacaaggagaaggcggcggctgctgcggcggccaaggagaaggcggccgtccccaagaacggcaacggcaacggcggcaagaatggcggcggcgccggcagcggcaacggcggagcgcccccgcagtccggggaggagacggcccgcgagatccaggtggtcagggaggcgtaccgccgcgagacggccgcgccggcctacgtcatacccgaggagccgccggccgtggtcgagctcgtcggctggtacatctacggcttctgctcctacttcatcacccacctgctgctgccggtcctcttcccggccatcatcacgcaggtaccagaggcttaccaagcactccattgtgatcgatggatcccggatgtcaccattgggctggagtggactgtcgtgggcaatcggcatcctcatcgtggcgccgctcctcacccagaccgctcaccatctcgaccgtggccagtaccagtcgctgatcctcattgccgccacgtccttcgggtccttcttctgcctgctaacaggcttcttcaagacggtctgggtgttcctgttctacatcctcttcatcgctggctcgatcatcgtcgctgaggcggtgcacacccgcaaccttgggctgatgatccgtggcctggctgcgcatgactcgggcaagcaccttgtccttcgccgccgcgctgctgccagccagctcagcctgtactgcactgccataggaggcattggagctgccctcatggcagctttcatgtaccacatgctgcggcgcactgaccagctcactggcctctgggtcgtgtccatcttctgtggccttatctggttcatcggcatctgccatggcctcttcacaaacaggcccagcagctcgtcacccaccaccgcattcgagcccaacttcttcaccaagctcagctacagcatgaccctcctccgttacccgcaggccattggcagcctggttgcggtgttcctgtcctctttcgccacaatgtgcatcttcaccagcggcacgctctatgctatcggtggtgtctgcatcaagccggtgctcgtgcttgcgctatggatcctctactttctgttccccttgatctcgctcccgctcctccacccgatccagatcataatccgcgcggacgccgtgcgcatgcagctgctcgggttcataatctgcctgttcgtgtccggtgccgggttctacttcaagagccacaggtggagggctgcccacatcatcgtcatcgccctggtccagagcaccgccaatggcatactgtacgcgttcggccgcatcctgctcctcgatgcctcgccgccggggaaggagggtgcgttctcggtctggtacgcgtttgttcgtgtcaccggtgccatgatcggcttcgctgcctcctccgctggccctgggcgcgcgggagggtcctttgctgctgcgttcctcgggagcttcctgggcatcatcgtgctgatcttcggcaacgtcagcaacatcggggcgctgaaggcggccgggcacctcaaggggatggacgacgagaagaggatgggcggtctcgggatggagaagggcgagggcatgggtagcgccgtcgctgattctggcgagagcagggggagggtatgatgatgactattcgtgacagtgaattcctgggaggtgggggagaaaaggattgcgtcctgtggaggttgtgcttgtgagaaggatttgttctctcttttttttcttgtttctttggccgtgtttcagtgacactgttgatggatcccagtgcttcgcccgtttgatgcatcatggtggtggtggtgatgatggatgacatagtggtaggggagtgtgtgctagttgttaatgtgttatttattcttttgcttgcaagacaattgtaactgatgatcgttagatcatatggttcttccttcgttcttcacccgcccccaaagtctcttgcagtaaagcttcattcatgattcagcctgtgtccgtgtggggaaaaaaatgtgatggtggcattgtgtagacagaagtaaaacatctgtaaactcacttgtagcgatcattctgttctctctgatgccagatgctcgtatgcatttgaatccgccgcagtgccgacctgtgttcaga

SEQ ID NO: 61156 - DNA, 1422 bp, Zea Mays
ccctaccaaaaaaaaatccaaagcgagcagatcccccgcccctaaccgactcccctcgcttccattccattaatggccgccaccaagagccctccaacacacacctgacctccccttcccccctctctccgccgcccgttccccgcgcctccccgtccgccccggccccgccgccgccttctccttcgccggccccgccgccgcgtcgcccttctaccaccaacaccacccgtccctgagctactacgcctactacggcaagaaactggacccggagccgtggcggtgccgccgcaccgacggcaagaagtggcggtgctccaaggaggcgcaccccgactccaagtactgcgagcgccacatgcaccgtggccgcaaccgttcaagaaagcctgtggaatccaagaccgcctcgtcgtcgtcgcccgcgcacccgtcgccgccccagctgtccaccgtcaccaccaccgcgcctctcgagccccttgcagcggcggggggcaaggtccacggcctgtccctcggcggcggcgctgctggctcgtcgcacctcggcgtcgatgcttcgaatgctcactatcgttatggtagcaagtaccctctcggagctaaaccggacggcggcgagttgagcttcttctcaggagcgtcatcggggaacaactcgaggggcggcttcaccatcgactctccatcagataacaactcgtggcactccgccctggcgtccagcgtgcccccgttcacgctgtcgacgaagagcggggactccggcctcctgcccggcgcctacgcctcctactcccagtcccactcccacatggagccgccgcgggagctcgggcaggtcaccatcgcctcgctggcgcaggagcaggagcgccagcagccgttcagtggtgggatgctcgggaacgtgaagcaggagaaccagaaccagccgctgcggcccttcttcgacgagtggcccgggacgcgggcggactcgtggccgccggagatggacggcgcgccgcgggccggcaggacctccttctcctcctccaccacccagctctccatctccatcccgatgcccagatgcgactgacgaggaaccgtcgatcgggcggccactagacggtggacgctcacgctcactagtgcgctgtcgcctggagtggagatcgatcgtcacgccgccgccgcctacgccctcgtcctacctatttgttttgccgtagtgtattgtaccgacctcattaagaacagaacagaacagaagtctctgtgtaagagccggctccttcctgttcctatggtttgtactagtagcgtgctttgtatttgttgtacccctcaagaccgagaatgaaacccgcccgccgtcagtctgtctttgcgttttagtagatgatgcgagtgtttcgtgtgcatttccag

SEQ ID NO: 61157 - DNA, 1425 bp, Zea Mays
ccctaccaaaaaaaaatccaaagcgagcagatcccccgcccctaaccgactcccctcgcttccattccattaatggccgccaccaagagccctccaacacacacctgacctccccttcccccctctctccgccgcccgttccccgcgcctccccgtccgccccggccccgccgccgccttctccttcgccggccccgccgccgcgtcgcccttctaccaccaacaccacccgtccctgagctactacgcctactacggcaagaaactggacccggagccgtggcggtgccgccgcaccgacggcaagaagtggcggtgctccaaggaggcgcaccccgactccaagtactgcgagcgccacatgcaccgtggccgcaaccgttcaagaaagcctgtggaatccaagaccgcctcgtcgtcgtcgcccgcgcacccgtcgccgccccagctgtccaccgtcaccaccaccgcgcctctcgagccccttgcagcggcggggggcaaggtccacggcctgtccctcggcggcggcgctgctggctcgtcgcacctcggcgtcgatgcttcgaatgctcactatcgttatggtagcaacaggtaccctctcggagctaaaccggacggcggcgagttgagcttcttctcaggagcgtcatcggggaacaactcgaggggcggcttcaccatcgactctccatcagataacaactcgtggcactccgccctggcgtccagcgtgcccccgttcacgctgtcgacgaagagcggggactccggcctcctgcccggcgcctacgcctcctactcccagtcccactcccacatggagccgccgcgggagctcgggcaggtcaccatcgcctcgctggcgcaggagcaggagcgccagcagccgttcagtggtgggatgctcgggaacgtgaagcaggagaaccagaaccagccgctgcggcccttcttcgacgagtggcccgggacgcgggcggactcgtggccgccggagatggacggcgcgccgcgggccggcaggacctccttctcctcctccaccacccagctctccatctccatcccgatgcccagatgcgactgacgaggaaccgtcgatcgggcggccactagacggtggacgctcacgctcactagtgcgctgtcgcctggagtggagatcgatcgtcacgccgccgccgcctacgccctcgtcctacctatttgttttgccgtagtgtattgtaccgacctcattaagaacagaacagaacagaagtctctgtgtaagagccggctccttcctgttcctatggtttgtactagtagcgtgctttgtatttgttgtacccctcaagaccgagaatgaaacccgcccgccgtcagtctgtctttgcgttttagtagatgatgcgagtgtttcgtgtgcatttccag

SEQ ID NO: 61158 - DNA, 1380 bp, Zea Mays
ccctaccaaaaaaaaatccaaagcgagcagatcccccgcccctaaccgactcccctcgcttccattccattaatggccgccaccaagagccctccaacacacacctgacctccccttcccccctctctccgccgccttctccttcgccggccccgccgccgcgtcgcccttctaccaccaacaccacccgtccctgagctactacgcctactacggcaagaaactggacccggagccgtggcggtgccgccgcaccgacggcaagaagtggcggtgctccaaggaggcgcaccccgactccaagtactgcgagcgccacatgcaccgtggccgcaaccgttcaagaaagcctgtggaatccaagaccgcctcgtcgtcgtcgcccgcgcacccgtcgccgccccagctgtccaccgtcaccaccaccgcgcctctcgagccccttgcagcggcggggggcaaggtccacggcctgtccctcggcggcggcgctgctggctcgtcgcacctcggcgtcgatgcttcgaatgctcactatcgttatggtagcaagtaccctctcggagctaaaccggacggcggcgagttgagcttcttctcaggagcgtcatcggggaacaactcgaggggcggcttcaccatcgactctccatcagataacaactcgtggcactccgccctggcgtccagcgtgcccccgttcacgctgtcgacgaagagcggggactccggcctcctgcccggcgcctacgcctcctactcccagtcccactcccacatggagccgccgcgggagctcgggcaggtcaccatcgcctcgctggcgcaggagcaggagcgccagcagccgttcagtggtgggatgctcgggaacgtgaagcaggagaaccagaaccagccgctgcggcccttcttcgacgagtggcccgggacgcgggcggactcgtggccgccggagatggacggcgcgccgcgggccggcaggacctccttctcctcctccaccacccagctctccatctccatcccgatgcccagatgcgactgacgaggaaccgtcgatcgggcggccactagacggtggacgctcacgctcactagtgcgctgtcgcctggagtggagatcgatcgtcacgccgccgccgcctacgccctcgtcctacctatttgttttgccgtagtgtattgtaccgacctcattaagaacagaacagaacagaagtctctgtgtaagagccggctccttcctgttcctatggtttgtactagtagcgtgctttgtatttgttgtacccctcaagaccgagaatgaaacccgcccgccgtcagtctgtctttgcgttttagtagatgatgcgagtgtttcgtgtgcatttccag

SEQ ID NO: 61159 - DNA, 402 bp, Zea Mays
aaattctactgcatgtgtcaagactggaaaatttatctggcgtctagggatcaagacaagaaactcaccgtaccacggagatcaatatgtccatttcaatgtcaacatccccgaaaatttgacgtctagacagcgggagctgatcgaggaattcgcgaaggaggagcaaggcgaagacgagaaggacgccaaggcagcagctggagcatcggggggatagccggttttaggagccacagtagtgccttttagctggtatttataccgtgaccgtagacctgtctcaaattcgcagcggaaagatttatagataggtctttgtttcggattttgtagctggaataaatgaataatacgtctagaactgattttctgtctttttcgtaaaaaataaaaacaaat

SEQ ID NO: 61160 - DNA, 1335 bp, Zea Mays
atagtcagtaagggtgttcaaggttccaagcgcaaacttggagagtgaggcaataaaaaaaggttccaagcacaaaaatcaaaatgtctggcagtagccctgcaaccgttgcgtttagaaagtgctgccaatttagaaagagctcgcttgcaaagaagctccacccagacacaaataaaggtgatgcggatgcagaacgcaagtttcaagaggttcaacgagcttatgagactttaaaggatgaacaaaaaagatcattatatgatcaggttggccctgatcagtatgagaaaactgcttctggcggaggcggaactggcttcgagggtggttttggaaatccatttgaggatatttttggtggtggcggtggcggtggtggaatgaatgatttctttaggaacattttcggggatagggactttggaggacgagatgttaagttcaagggtgcagcaaaacggtcaccttccaaacgtctgtaacatgtgaaatctgtggtggagccggtgtgcctcctggaaccacacctgaaacatgtctatcttgcaggggttcaggatttatattcatgcaaaccgggccattcaggatgcaatcaacctgcacaaaatgtggtggttctgggaaaactgtgaaggaattctgcaaggcatgcagaggaaacaaagttgtgcctggaaggaaatcagtccgccttgacatactgcctggttcggataatgaggacaccataaaggtggttcgatcaggtggagaagacccagatggccgtccaggtgatctttatgtgaccctcgaggttcgtgaggatcctgttttccgaagagagaaaggtgatattcatgttgatgctgtcctgaatgtgactcaggcaattttgggagggacagttcaagtcccaactctcagtggagacgttgttctaaagatcaagcccggtactcaacctggtcagaaggtagttctgagaggaaaagggatcaagacaagaaactcaccgtaccacggagatcaatatgtccatttcaatgtcaacatccccgaaaatttgacgtctagacagcgggagctgatcgaggaattcgcgaaggaggagcaaggcgaagacgagaaggacgccaaggcagcagctggagcatcggggggatagccggttttaggagccacagtagtgccttttagctggtatttataccgtgaccgtagacctgtctcaaattcgcagcggaaagatttatagataggtctttgtttcggattttgtagctggaataaatgaataatacgtctagaactgattttctgtctttttcgtaaaaaataaaaacaaat

SEQ ID NO: 61161 - DNA, 1448 bp, Zea Mays
gcgctcctgctcgcccgccgctccctctcctcctccccccgcatcccgcgggcgcacacagcagggatatggagcgaggcgccctcccggagctctcccttctctccgccgagcagcgcccgcaggtccttccacgggaccaggccggtggcggcaagggactactacgatgtgctcggcgtcagcaagagcgccagccaggcggagataaaaaaggcctattatgggcttgcaaagaagctccacccagacacaaataaaggtgatgcggatgcagaacgcaagtttcaagaggttcaacgagcttatgagactttaaaggatgaacaaaaaagatcattatatgatcaggttggccctgatcagtatgagaaaactgcttctggcggaggcggaactggcttcgagggtggttttggaaatccatttgaggatatttttggtggtggcggtggcggtggtggaatgaatgatttctttaggaacattttcggggatagggactttggaggacgagatgttaaggttgcactcgaactatcatttgtggaagcagttcaagggtgcagcaaaacggtcaccttccaaacgtctgtaacatgtgaaatctgtggtggagccggtgtgcctcctggaaccacacctgaaacatgtctatcttgcaggggttcaggatttatattcatgcaaaccgggccattcaggatgcaatcaacctgcacaaaatgtggtggttctgggaaaactgtgaaggaattctgcaaggcatgcagaggaaacaaagttgtgcctggaaggaaatcagtccgccttgacatactgcctggttcggataatgaggacaccataaaggtggttcgatcaggtggagaagacccagatggccgtccaggtgatctttatgtgaccctcgaggttcgtgaggatcctgttttccgaagagagaaaggtgatattcatgttgatgctgtcctgaatgtgactcaggcaattttgggagggacagttcaagtcccaactctcagtggagacgttgttctaaagatcaagcccggtactcaacctggtcagaaggtagttctgagaggaaaagggatcaagacaagaaactcaccgtaccacggagatcaatatgtccatttcaatgtcaacatccccgaaaatttgacgtctagacagcgggagctgatcgaggaattcgcgaaggaggagcaaggcgaagacgagaaggacgccaaggcagcagctggagcatcggggggatagccggttttaggagccacagtagtgccttttagctggtatttataccgtgaccgtagacctgtctcaaattcgcagcggaaagatttatagataggtctttgtttcggattttgtagctggaataaatgaataatacgtctagaactgattttctgtctttttcgtaaaaaataaaaacaaat

SEQ ID NO: 61162 - DNA, 1508 bp, Zea Mays
gcattccagaacgttcggcgccggcgaggccacacgcccaccatcagtcagccgccccgccaaagccatgcgcctccccgccggcgcacgcctcgcgctcctgctcgcccgccgctccctctcctcctccccccgcatcccgcgggcgcacacagggatatggagcgaggcgccctcccggagctctcccttctctccgccgagcagcgcccgcaggtccttccacgggaccaggccggtggcggcaagggactactacgatgtgctcggcgtcagcaagagcgccagccaggcggagataaaaaaggcctattatgggcttgcaaagaagctccacccagacacaaataaaggtgatgcggatgcagaacgcaagtttcaagaggttcaacgagcttatgagactttaaaggatgaacaaaaaagatcattatatgatcaggttggccctgatcagtatgagaaaactgcttctggcggaggcggaactggcttcgagggtggttttggaaatccatttgaggatatttttggtggtggcggtggcggtggtggaatgaatgatttctttaggaacattttcggggatagggactttggaggacgagatgttaagttcaagggtgcagcaaaacggtcaccttccaaacgtctgtaacatgtgaaatctgtggtggagccggtgtgcctcctggaaccacacctgaaacatgtctatcttgcaggggttcaggatttatattcatgcaaaccgggccattcaggatgcaatcaacctgcacaaaatgtggtggttctgggaaaactgtgaaggaattctgcaaggcatgcagaggaaacaaagttgtgcctggaaggaaatcagtccgccttgacatactgcctggttcggataatgaggacaccataaaggtggttcgatcaggtggagaagacccagatggccgtccaggtgatctttatgtgaccctcgaggttcgtgaggatcctgttttccgaagagagaaaggtgatattcatgttgatgctgtcctgaatgtgactcaggcaattttgggagggacagttcaagtcccaactctcagtggagacgttgttctaaagatcaagcccggtactcaacctggtcagaaggtagttctgagaggaaaagggatcaagacaagaaactcaccgtaccacggagatcaatatgtccatttcaatgtcaacatccccgaaaatttgacgtctagacagcgggagctgatcgaggaattcgcgaaggaggagcaaggcgaagacgagaaggacgccaaggcagcagctggagcatcggggggatagccggttttaggagccacagtagtgccttttagctggtatttataccgtgaccgtagacctgtctcaaattcgcagcggaaagatttatagataggtctttgtttcggattttgtagctggaataaatgaataatacgtctagaactgattttctgtctttttcgtaaaaaataaaaacaaat

SEQ ID NO: 61163 - DNA, 1613 bp, Zea Mays
gtcccttgctaattggcccccaaatggagggtgatccatgtgaagaggcccagcccagctgacaacaccagcccctgagaagcagcgcaggcgcagggcattccagaacgttcggcgccggcgaggccacacgcccaccatcagtcagccgccccgccaaagccatgcgcctccccgccggcgcacgcctcgcgctcctgctcgcccgccgctccctctcctcctccccccgcatcccgcgggcgcacacagggatatggagcgaggcgccctcccggagctctcccttctctccgccgagcagcgcccgcaggtccttccacgggaccaggccggtggcggcaagggactactacgatgtgctcggcgtcagcaagagcgccagccaggcggagataaaaaaggcctattatgggcttgcaaagaagctccacccagacacaaataaaggtgatgcggatgcagaacgcaagtttcaagaggttcaacgagcttatgagactttaaaggatgaacaaaaaagatcattatatgatcaggttggccctgatcagtatgagaaaactgcttctggcggaggcggaactggcttcgagggtggttttggaaatccatttgaggatatttttggtggtggcggtggcggtggtggaatgaatgatttctttaggaacattttcggggatagggactttggaggacgagatgttaaggttgcactcgaactatcatttgtggaagcagttcaagggtgcagcaaaacggtcaccttccaaacgtctgtaacatgtgaaatctgtggtggagccggtgtgcctcctggaaccacacctgaaacatgtctatcttgcaggggttcaggatttatattcatgcaaaccgggccattcaggatgcaatcaacctgcacaaaatgtggtggttctgggaaaactgtgaaggaattctgcaaggcatgcagaggaaacaaagttgtgcctggaaggaaatcagtccgccttgacatactgcctggttcggataatgaggacaccataaaggtggttcgatcaggtggagaagacccagatggccgtccaggttcgtgaggatcctgttttccgaagagagaaaggtgatattcatgttgatgctgtcctgaatgtgactcaggcaattttgggagggacagttcaagtcccaactctcagtggagacgttgttctaaagatcaagcccggtactcaacctggtcagaaggtagttctgagaggaaaagggatcaagacaagaaactcaccgtaccacggagatcaatatgtccatttcaatgtcaacatccccgaaaatttgacgtctagacagcgggagctgatcgaggaattcgcgaaggaggagcaaggcgaagacgagaaggacgccaaggcagcagctggagcatcggggggatagccggttttaggagccacagtagtgccttttagctggtatttataccgtgaccgtagacctgtctcaaattcgcagcggaaagatttatagataggtctttgtttcggattttgtagctggaataaatgaataatacgtctagaactgattttctgtctttttcgtaaaaaataaaaacaaat

SEQ ID NO: 61164 - DNA, 1639 bp, Zea Mays
atggtcccttgctaattggcccccaaatggagggtgatccatgtgaagaggcccagcccagctgacaacaccagcccctgagaagcagcgcaggcgcagggcattccagaacgttcggcgccggcgaggccacacgcccaccatcagtcagccgccccgccaaagccatgcgcctccccgccggcgcacgcctcgcgctcctgctcgcccgccgctccctctcctcctccccccgcatcccgcgggcgcacacagggatatggagcgaggcgccctcccggagctctcccttctctccgccgagcagcgcccgcaggtccttccacgggaccaggccggtggcggcaagggactactacgatgtgctcggcgtcagcaagagcgccagccaggcggagataaaaaaggcctattatgggcttgcaaagaagctccacccagacacaaataaaggtgatgcggatgcagaacgcaagtttcaagaggttcaacgagcttatgagactttaaaggatgaacaaaaaagatcattatatgatcaggttggccctgatcagtatgagaaaactgcttctggcggaggcggaactggcttcgagggtggttttggaaatccatttgaggatatttttggtggtggcggtggcggtggtggaatgaatgatttctttaggaacattttcggggatagggactttggaggacgagatgttaaggttgcactcgaactatcatttgtggaagcagttcaagggtgcagcaaaacggtcaccttccaaacgtctgtaacatgtgaaatctgtggtggagccggtgtgcctcctggaaccacacctgaaacatgtctatcttgcaggggttcaggatttatattcatgcaaaccgggccattcaggatgcaatcaacctgcacaaaatgtggtggttctgggaaaactgtgaaggaattctgcaaggcatgcagaggaaacaaagttgtgcctggaaggaaatcagtccgccttgacatactgcctggttcggataatgaggacaccataaaggtggttcgatcaggtggagaagacccagatggccgtccaggtgatctttatgtgaccctcgaggttcgtgaggatcctgttttccgaagagagaaaggtgatattcatgttgatgctgtcctgaatgtgactcaggcaattttgggagggacagttcaagtcccaactctcagtggagacgttgttctaaagatcaagcccggtactcaacctggtcagaaggtagttctgagaggaaaagggatcaagacaagaaactcaccgtaccacggagatcaatatgtccatttcaatgtcaacatccccgaaaatttgacgtctagacagcgggagctgatcgaggaattcgcgaaggaggagcaaggcgaagacgagaaggacgccaaggcagcagctggagcatcggggggatagccggttttaggagccacagtagtgccttttagctggtatttataccgtgaccgtagacctgtctcaaattcgcagcggaaagatttatagataggtctttgtttcggattttgtagctggaataaatgaataatacgtctagaactgattttctgtctttttcgtaaaaaataaaaacaaat

SEQ ID NO: 61165 - DNA, 1756 bp, Zea Mays
cggcctccgagaagcagcgcaggcgcagggcattccagaacgttcggcggcggcgaggcgacacgcccaccaccagtcagccgccccgccacagccatgcgcctccacgccggcgcacgcctcgcgctcctgctcgcccgccgctccctctcctcctccccccgtatcccgcgggtgcacacagcttgtcgcgctccccgctctacagggatacggagcgaggcgccctcccggagctctcccttctatccgccgagcagcgcccgcaggtccttccacgggaccaggccggtggcggcaagggactactacgatgtgctcggcgtcagcaagagcgccagccaggcggagatcaaaaaggcctattatgggcttgcaaagaagctccatccagacacaaataaaggtgatgcggatgcagaacgcaagtttcaagaggttcaacgagcttatgagactctaaaggatgaacaaaaaagatcattatatgatcaggttggccctgatcagtatgagaaaactgcttctggcggaggcggaactggcttcgagggtggttttggaaatccatttgaggatatttttggtggtggcggtggcggtggtggaatgaatgatttctttaggaacatttttggggatagggactttagaggacgagatgttaaggttgcactcgaactatcatttatggaagcagttcaagggtgcagcaaaacggtcaccttccaaacgtctgtaacatgtgaaatctgtggtggagccggtgtgcctcctggaaccacacctgaaacatgtctatcttgcaggggttcaggatttatattcatgcaaaccgggcccttcaggatgcaatcaacctgcacaaaatgtggtggttctgggaaaactgtgaaggaattctgcaaggcatgcagaggaaacaaagttgtgcctggaaggaaatcagtccgccttgacatactgcctggtttggataatgaggataccataaaggtggttcgatcaggtggagaagacccagatggccgtccaggtgatctttatgtgaccctcgaggttcgtgaggatcctgttttccgaagagagaaaggtgatattcatgttgatgctgtcctgaatgtgactcaggcaattttgggagggacagttcaagtcccaactctcagtggagacgttgttctaaaggtcaagcccggtactcaacctggtcagaaggtagttctgagaggaaaagggatcaagacaagaaactcaccgcactacggagatcaatatgtccatttcaatgtcaacatccccgaaaatttgacgtctagacagcgggagctgatcgaggaattcgcgaaggaggagcaaggcgaagacgagaaggacgccaaggcagcagctggagcatcggggggatagccggttttaggagccacagtagtgccttttagctggtatttataccgtgaccatagacctgtctcaaattcgcagcgaaaaaaatatatagataggtctttgtttcggattttgtagctggaataaatggataatacgtctagaactgattttctgtcttctttttcgtgagtctgctaagcatgatcccttcctcgcacggtgcacctctccctcctcttctcgcttcctgcaggccaacccgacaggtcatcgatagcagcacaattatacaaagcggaagctaaaatcatggttatagttgttagctttaaacatatatttcaatgttaagagtatctttaag

SEQ ID NO: 61166 - DNA, 1734 bp, Zea Mays
cggcctccgagaagcagcgcaggcgcagggcattccagaacgttcggcggcggcgaggcgacacgcccaccaccagtcagccgccccgccacagccatgcgcctccacgccggcgcacgcctcgcgctcctgctcgcccgccgctccctctcctcctccccccgtatcccgcgggtgcacacagagggatacggagcgaggcgccctcccggagctctcccttctatccgccgagcagcgcccgcaggtccttccacgggaccaggccggtggcggcaagggactactacgatgtgctcggcgtcagcaagagcgccagccaggcggagatcaaaaaggcctattatgggcttgcaaagaagctccatccagacacaaataaaggtgatgcggatgcagaacgcaagtttcaagaggttcaacgagcttatgagactctaaaggatgaacaaaaaagatcattatatgatcaggttggccctgatcagtatgagaaaactgcttctggcggaggcggaactggcttcgagggtggttttggaaatccatttgaggatatttttggtggtggcggtggcggtggtggaatgaatgatttctttaggaacatttttggggatagggactttagaggacgagatgttaaggttgcactcgaactatcatttatggaagcagttcaagggtgcagcaaaacggtcaccttccaaacgtctgtaacatgtgaaatctgtggtggagccggtgtgcctcctggaaccacacctgaaacatgtctatcttgcaggggttcaggatttatattcatgcaaaccgggcccttcaggatgcaatcaacctgcacaaaatgtggtggttctgggaaaactgtgaaggaattctgcaaggcatgcagaggaaacaaagttgtgcctggaaggaaatcagtccgccttgacatactgcctggtttggataatgaggataccataaaggtggttcgatcaggtggagaagacccagatggccgtccaggtgatctttatgtgaccctcgaggttcgtgaggatcctgttttccgaagagagaaaggtgatattcatgttgatgctgtcctgaatgtgactcaggcaattttgggagggacagttcaagtcccaactctcagtggagacgttgttctaaaggtcaagcccggtactcaacctggtcagaaggtagttctgagaggaaaagggatcaagacaagaaactcaccgcactacggagatcaatatgtccatttcaatgtcaacatccccgaaaatttgacgtctagacagcgggagctgatcgaggaattcgcgaaggaggagcaaggcgaagacgagaaggacgccaaggcagcagctggagcatcggggggatagccggttttaggagccacagtagtgccttttagctggtatttataccgtgaccatagacctgtctcaaattcgcagcgaaaaaaatatatagataggtctttgtttcggattttgtagctggaataaatggataatacgtctagaactgattttctgtcttctttttcgtgagtctgctaagcatgatcccttcctcgcacggtgcacctctccctcctcttctcgcttcctgcaggccaacccgacaggtcatcgatagcagcacaattatacaaagcggaagctaaaatcatggttatagttgttagctttaaacatatatttcaatgttaagagtatctttaag

SEQ ID NO: 61167 - DNA, 1758 bp, Zea Mays
aagaggcccagcccagctgacaacaccggcctccgagaagcagcgcaggcgcagggcattccagaacgttcggcggcggcgaggcgacacgcccaccaccagtcagccgccccgccacagccatgcgcctccacgccggcgcacgcctcgcgctcctgctcgcccgccgctccctctcctcctccccccgtatcccgcgggtgcacacagggatacggagcgaggcgccctcccggagctctcccttctatccgccgagcagcgcccgcaggtccttccacgggaccaggccggtggcggcaagggactactacgatgtgctcggcgtcagcaagagcgccagccaggcggagatcaaaaaggcctattatgggcttgcaaagaagctccatccagacacaaataaaggtgatgcggatgcagaacgcaagtttcaagaggttcaacgagcttatgagactctaaaggatgaacaaaaaagatcattatatgatcaggttggccctgatcagtatgagaaaactgcttctggcggaggcggaactggcttcgagggtggttttggaaatccatttgaggatatttttggtggtggcggtggcggtggtggaatgaatgatttctttaggaacatttttggggatagggactttagaggacgagatgttaaggttgcactcgaactatcatttatggaagcagttcaagggtgcagcaaaacggtcaccttccaaacgtctgtaacatgtgaaatctgtggtggagccggtgtgcctcctggaaccacacctgaaacatgtctatcttgcaggggttcaggatttatattcatgcaaaccgggcccttcaggatgcaatcaacctgcacaaaatgtggtggttctgggaaaactgtgaaggaattctgcaaggcatgcagaggaaacaaagttgtgcctggaaggaaatcagtccgccttgacatactgcctggtttggataatgaggataccataaaggtggttcgatcaggtggagaagacccagatggccgtccaggtgatctttatgtgaccctcgaggttcgtgaggatcctgttttccgaagagagaaaggtgatattcatgttgatgctgtcctgaatgtgactcaggcaattttgggagggacagttcaagtcccaactctcagtggagacgttgttctaaaggtcaagcccggtactcaacctggtcagaaggtagttctgagaggaaaagggatcaagacaagaaactcaccgcactacggagatcaatatgtccatttcaatgtcaacatccccgaaaatttgacgtctagacagcgggagctgatcgaggaattcgcgaaggaggagcaaggcgaagacgagaaggacgccaaggcagcagctggagcatcggggggatagccggttttaggagccacagtagtgccttttagctggtatttataccgtgaccatagacctgtctcaaattcgcagcgaaaaaaatatatagataggtctttgtttcggattttgtagctggaataaatggataatacgtctagaactgattttctgtcttctttttcgtgagtctgctaagcatgatcccttcctcgcacggtgcacctctccctcctcttctcgcttcctgcaggccaacccgacaggtcatcgatagcagcacaattatacaaagcggaagctaaaatcatggttatagttgttagctttaaacatatatttcaatgttaagagtatctttaag

SEQ ID NO: 61168 - DNA, 1727 bp, Zea Mays
aagaggcccagcccagctgacaacaccggcctccgagaagcagcgcaggcgcagggcattccagaacgttcggcggcggcgaggcgacacgcccaccaccagtcagccgccccgccacagccatgcgcctccacgccggcgcacgcctcgcgctcctgctcgcccgccgctccctctcctcctccccccgtatcccgcgggtgcacacagggatacggagcgaggcgccctcccggagctctcccttctatccgccgagcagcgcccgcaggtccttccacgggaccaggccggtggcggcaagggactactacgatgtgctcggcgtcagcaagagcgccagccaggcggagatcaaaaaggcctattatgggcttgcaaagaagctccatccagacacaaataaaggtgatgcggatgcagaacgcaagtttcaagaggttcaacgagcttatgagactctaaaggatgaacaaaaaagatcattatatgatcaggttggccctgatcagtatgagaaaactgcttctggcggaggcggaactggcttcgagggtggttttggaaatccatttgaggatatttttggtggtggcggtggcggtggtggaatgaatgatttctttaggaacatttttggggatagggactttagaggacgagatgttaagttcaagggtgcagcaaaacggtcaccttccaaacgtctgtaacatgtgaaatctgtggtggagccggtgtgcctcctggaaccacacctgaaacatgtctatcttgcaggggttcaggatttatattcatgcaaaccgggcccttcaggatgcaatcaacctgcacaaaatgtggtggttctgggaaaactgtgaaggaattctgcaaggcatgcagaggaaacaaagttgtgcctggaaggaaatcagtccgccttgacatactgcctggtttggataatgaggataccataaaggtggttcgatcaggtggagaagacccagatggccgtccaggtgatctttatgtgaccctcgaggttcgtgaggatcctgttttccgaagagagaaaggtgatattcatgttgatgctgtcctgaatgtgactcaggcaattttgggagggacagttcaagtcccaactctcagtggagacgttgttctaaaggtcaagcccggtactcaacctggtcagaaggtagttctgagaggaaaagggatcaagacaagaaactcaccgcactacggagatcaatatgtccatttcaatgtcaacatccccgaaaatttgacgtctagacagcgggagctgatcgaggaattcgcgaaggaggagcaaggcgaagacgagaaggacgccaaggcagcagctggagcatcggggggatagccggttttaggagccacagtagtgccttttagctggtatttataccgtgaccatagacctgtctcaaattcgcagcgaaaaaaatatatagataggtctttgtttcggattttgtagctggaataaatggataatacgtctagaactgattttctgtcttctttttcgtgagtctgctaagcatgatcccttcctcgcacggtgcacctctccctcctcttctcgcttcctgcaggccaacccgacaggtcatcgatagcagcacaattatacaaagcggaagctaaaatcatggttatagttgttagctttaaacatatatttcaatgttaagagtatctttaag

SEQ ID NO: 61169 - DNA, 1573 bp, Zea Mays
atgcccttggtggcgccgacattccaatgcagtgactactacacggagctgctcgtcgtctatagcgcgacggaaggatacatgatgcgatgtggtggcgctcaaacagaggcacgaccggcaggagcaagtgccacaccgacgtttggatggagcgagcaagcgtggcctggcgacctgctgatggcggcgaaggggatggcggcaggagcagttgtgggaacggaggcacggagagcaggagcaaatggcacgcctaagtccaaacggagcactctaaaggatgaacaaaaaagatcattatatgatcaggttggccctgatcagtatgagaaaactgcttctggcggaggcggaactggcttcgagggtggttttggaaatccatttgaggatatttttggtggtggcggtggcggtggtggaatgaatgatttctttaggaacatttttggggatagggactttagaggacgagatgttaaggttgcactcgaactatcatttatggaagcagttcaagggtgcagcaaaacggtcaccttccaaacgtctgtaacatgtgaaatctgtggtggagccggtgtgcctcctggaaccacacctgaaacatgtctatcttgcaggggttcaggatttatattcatgcaaaccgggcccttcaggatgcaatcaacctgcacaaaatgtggtggttctgggaaaactgtgaaggaattctgcaaggcatgcagaggaaacaaagttgtgcctggaaggaaatcagtccgccttgacatactgcctggtttggataatgaggataccataaaggtggttcgatcaggtggagaagacccagatggccgtccaggtgatctttatgtgaccctcgaggttcgtgaggatcctgttttccgaagagagaaaggtgatattcatgttgatgctgtcctgaatgtgactcaggcaattttgggagggacagttcaagtcccaactctcagtggagacgttgttctaaaggtcaagcccggtactcaacctggtcagaaggtagttctgagaggaaaagggatcaagacaagaaactcaccgcactacggagatcaatatgtccatttcaatgtcaacatccccgaaaatttgacgtctagacagcgggagctgatcgaggaattcgcgaaggaggagcaaggcgaagacgagaaggacgccaaggcagcagctggagcatcggggggatagccggttttaggagccacagtagtgccttttagctggtatttataccgtgaccatagacctgtctcaaattcgcagcgaaaaaaatatatagataggtctttgtttcggattttgtagctggaataaatggataatacgtctagaactgattttctgtcttctttttcgtgagtctgctaagcatgatcccttcctcgcacggtgcacctctccctcctcttctcgcttcctgcaggccaacccgacaggtcatcgatagcagcacaattatacaaagcggaagctaaaatcatggttatagttgttagctttaaacatatatttcaatgttaagagtatctttaag

SEQ ID NO: 61170 - DNA, 1572 bp, Zea Mays
atgcccttggtggcgccgacattccaatgcagtgactactacacggagctgctcgtcgtctatagcgcgacggaaggatacatgatgcgatgtggtggcgctcaaacagaggcacgaccggcaggagcaagtgccacaccgacgtttggatggagcgagcaagcgtggcctggcgacctgctgatggcggcgaaggggatggcggcaggagcagttgtgggaacggaggcacggagagcaggagcaaatggcacgcctaagtccaaacggagcactctaaaggatgaacaaaaaagatcattatatgatcaggttggccctgatcagtatgagaaaactgcttctggcggaggcggaactggcttcgagggtggttttggaaatccatttgaggatatttttggtggtggcggtggcggtggtggaatgaatgatttctttaggaacatttttggggatagggactttagaggacgagatgttaaggttgcactcgaactatcatttatggaagcagttcaagggtgcagcaaaacggtcaccttccaaacgtctgtaacatgtgaaatctgtggtggagccggtgtgcctcctggaaccacacctgaaacatgtctatcttgcaggggttcaggattatattcatgcaaaccgggcccttcaggatgcaatcaacctgcacaaaatgtggtggttctgggaaaactgtgaaggaattctgcaaggcatgcagaggaaacaaagttgtgcctggaaggaaatcagtccgccttgacatactgcctggtttggataatgaggataccataaaggtggttcgatcaggtggagaagacccagatggccgtccaggtgatctttatgtgaccctcgaggttcgtgaggatcctgttttccgaagagagaaaggtgatattcatgttgatgctgtcctgaatgtgactcaggcaattttgggagggacagttcaagtcccaactctcagtggagacgttgttctaaaggtcaagcccggtactcaacctggtcagaaggtagttctgagaggaaaagggatcaagacaagaaactcaccgcactacggagatcaatatgtccatttcaatgtcaacatccccgaaaatttgacgtctagacagcgggagctgatcgaggaattcgcgaaggaggagcaaggcgaagacgagaaggacgccaaggcagcagctggagcatcggggggatagccggttttaggagccacagtagtgccttttagctggtatttataccgtgaccatagacctgtctcaaattcgcagcgaaaaaaatatatagataggtctttgtttcggattttgtagctggaataaatggataatacgtctagaactgattttctgtcttctttttcgtgagtctgctaagcatgatcccttcctcgcacggtgcacctctccctcctcttctcgcttcctgcaggccaacccgacaggtcatcgatagcagcacaattatacaaagcggaagctaaaatcatggttatagttgttagctttaaacatatatttcaatgttaagagtatctttaag

SEQ ID NO: 61171 - DNA, 1952 bp, Zea Mays
atgcccttggtggcgccgacattccaatgcagtgactactacacggagctgctcgtcgtctatagcgcgacggaaggatacatgatgcgatgtggtggcgctcaaacagaggcacgaccggcaggagcaagtgccacaccgacgtttggatggagcgagcaagcgtggcctggcgacctgctgatggcggcgaaggggatggcggcaggagcagttgtgggaacggaggcacggagagcaggagcaaatggcacgcctaagtccaaacggagcactctaaaggatgaacaaaaaagatcattatatgatcaggttggccctgatcagtatgagaaaactgcttctggcggaggcggaactggcttcgagggtggttttggaaatccatttgaggatatttttggtggtggcggtggcggtggtggaatgaatgatttctttaggaacatttttggggatagggactttagaggacgagatgttaaggttgcactcgaactatcatttatggaagcagttcaagggtgcagcaaaacggtcaccttccaaacgtctgtaacatgtgaaatctgtggtggagccggtgtgcctcctggaaccacacctgaaacatgtctatcttgcaggggttcaggatttatattcatgcaaaccgggcccttcaggatgcaatcaacctgcacaaaatgtggtggttctgggaaaactgtgaaggaattctgcaaggcatgcagaggaaacaaagttgtgcctggaaggaaatcagtccgccttgacatactgcctggtttggataatgaggataccataaaggtggttcgatcaggtggagaagacccagatggccgtccaggttcgtgaggatcctgttttccgaagagagaaaggtgatattcatgttgatgctgtcctgaatgtgactcaggcaattttgggagggacagttcaagtcccaactctcagtggagacgttgttctaaaggtcaagcccggtactcaacctggtcagaaggtagttctgagaggaaaaggtaatctactgtgcacacttttgttcttttttggcggtgcattatctctttaattacggattgtaacacggctatgatgcgtttgtgaaatgattagtccaaaaggtttctggaacatagccatgtcagagattgttttcttgtgtggaagtaacaaaattatgaatcgatcgaacaatcaaattctactgcatgtgtcaagactggaaaatttatctggcgtctaggtgaactgccaatttgaactgaagaagctggtggaaacttgcatgctttatctaaaccctgatgcatctatcctgcagggatcaagacaagaaactcaccgcactacggagatcaatatgtccatttcaatgtcaacatccccgagtaagcaagcctagccgcctctcaaaatggagtagtcttatgctatctatcgtgcatccaactgctgcaagtgagactcacgtatgatgtcctgcagaaatttgacgtctagacagcgggagctgatcgaggaattcgcgaaggaggagcaaggcgaagacgagaaggacgccaaggcagcagctggagcatcggggggatagccggttttaggagccacagtagtgccttttagctggtatttataccgtgaccatagacctgtctcaaattcgcagcgaaaaaaatatatagataggtctttgtttcggattttgtagctggaataaatggataatacgtctagaactgattttctgtcttctttttcgtgagtctgctaagcatgatcccttcctcgcacggtgcacctctccctcctcttctcgcttcctgcaggccaacccgacaggtcatcgatagcagcacaattatacaaagcggaagctaaaatcatggttatagttgttagctttaaacatatatttcaatgttaagagtatctttaag

SEQ ID NO: 61172 - DNA, 1289 bp, Zea Mays
ttacatcgtggccggaatagtcacgaaaattatccaaacgagattcagacagaaccgtctaagttgttattcctctgactctctgcttcatgattcggaaaataaaatgtatagccgtattacgcgtcgactctttaataatcactaaaaattccgatccaaaatatgtgtgacctctaaaaaaagaaaaaaaataaaaaaaagagaaagatcccgccgtccatatccttccggcttccgccgccccctcgcctgggatttttctggcgccgccgcccctggattcttcaaaatcccgtcgctacctccaagcttcttcttctccacagcgccgcggctctctccagctcgctcggttctcccatggcgagctcgccggggatgcccctgccccagccgcccctccctgcttcttctgccctggtcagcgttcctctctctctcctcatctccatggccggagctccctcatcccctcctctcggcgtcttctacctgctgtgctcgccagctccctacactcagcctggccgcgcggctctctggagcttgcccctggctcggatttccttccccagccgagatccctccctgttcgtctctgctccggtgttaggtcaagctccccatggtgccgtcgccctcaagctcgcgccctgctctctctgctctctctgacacgcgtctgctctagctcgccccgccgtcgagctcccttgcgcacgtgtccctagcccctgctctgctcatccatggtcgcacgctcctccggcacgcggagctcttccttgcttccgttctggccgtgccctggcccctgctcatacggcgctcggactaccctactcccagttttctctgccccatcttcctcagcagccgtgcggctcttcctctgatccgcacttcctccagctcacctccactccctgccctttcttctgcttgattcgctggagctttcacttctcctcccatggcgcgcccagctgctcctccctcagctcggctccccagcgccctgccggcggccccctagtgagcacccgtgacttccccctccagttccctgcttggccaccccatcgccatggccgctcttctctgctcgcgatgtgttgctcctacgcgccaggacctccaccgagttcgtccgtggccgcgggatgcagctcatcccatctctctcacgccgttttccccagccacaccgtcgcgctagttccggatctcccggcgcgcccctggagtctcctcgccgcgtgcccagccatcatgctcccctgcgc

SEQ ID NO: 61173 - DNA, 781 bp, Zea Mays
atggctccgccgcggactggcctgaaggccctgaatctcaaacactacatcctggcagctctgatggcgatcctcgccgtggcggtcgtcgtcaccgtcttctccgtcctgctgagccctgcacgcattttcttctccgtaaccaatcctaggagccacctgttggtgggcaatggaggtgcgaatctcaccttcaccctcgccgccaacaacaccagccagcgcgcggcagtgtggtacaacaccatcctcgtcgacgtgctcaacagcacggtggtgaccccggcgtcgatctggaccaaggccgacctgaagaagaacgcgacgtcgctcatggctgggtggcagacccgtgggagcgtggcgactgtcgacgctacagtgtcggtgtctcggggatcgatggccatggccttcatcaacggcgccgacgtcaatagctctgctttcaccgtgacggtcaccgccgtggcccggttcaaggtcggcatcgccaagacgcagttgtacgacatcaatgtgatgtgcactcccgttatcttcttgctccaaaaccgctcaggcataagtgtggccgcctcaggtgccaatgtggattgcgggccctattgattggcaagcaacgaacgagcgatgctcatatccatgtgtctgttcttctctttgaaagcttgctggcattaagcgatggtcgtacccatgtttgtgttcttctctttgaaagcttgcgatgttgatttcttttgagtatgttaattgatttatatctatttaattttag

SEQ ID NO: 61174 - DNA, 1538 bp, Zea Mays
cggcgaaggtcatcatcatcatcatctctccagtcacgacgaatgacctccctgcctctggattcttcagctcgatcacgcttctctcccacggaatctggagctccataactccaaacaaactccctgcgagacttgcgattagggggacctcccctggcatccctcccccggtagaatgagaggtcttcaactacttcaatgtggttgcgcaagttgtacacatggcctttcttcaaatcagtaggttcatcatgctgagctccagcaagtggcagggggatgccggttgttggcaactccctgtcaggttcagtcaccgtgagacaaacttccttcggaatctcacacgggtcagagcaccaggcccaaaggtcgaaggacctagtgcgctccctgcgccttgtgcgctcctgcacgaaatgaatggcacaactcttgcccaatgcccttgcagccacctcttctccccagcagtgaactgggatcccctcaacccgcaccttcactctgaactcccagtttgtccttcttgcatagttctcctctgtccagtcaccaaaatggaaaacacgaccatggtacgagacatctcttctatctaatgcccaccgcttgtttcttgggtcagagaaaataatgaaaaattgctcaggaaagtgcttgacaagttggaactgaccatggcgaaggtcgaacttctccctaagcatgtctcccgcaaaaagggtatcaacttcatggctgttaccatcatatgagcagaccacagccttgttgatgagctcatctctgcggcgtcggatgttgcctgttgctgaaatcgcacagaacgctctggtcggtcttgctcttgggtcgccggggtagcgggccgccatgtcttgaattccttgagcggcttcaaggtatgacttgctgctgagtttgggaaggaggttgtgaggttgtctttggtgctgttcctgtcccttttgaagagctttggagctgggtctatgctgttggatggagtggatgctggcgttggctccatggcagtgattcagcttgaatgaatgcttcagcgattcttggtggttgcgctttgaattggacttcactaaatggattttgtcagggcagctcccagccttatgtccggatcggaagcatgaccagcatctggggggagcccaacaacggaaagaatagtgctctgccgagaagcaattgtagcatttaccctgaaatttcttcttgaagaaactggccccattaaattcatcttctttgcggattaaattggcccccaggttgttgttcttcctgcgccaccagaatcgaggtttgactacagtccagccctcaccctcctcctctgccgaagaaattaataatttgcctgcaaagggtcggctgtcgcggtactgcccactgcccgtcgggtcaaaaaggttcacctcaccggactcccgggatggggtcttcaacgcgcttcggacctgaacggcattgaaaccagacggggcgctgtcaaatgtccatttcatcttctc

SEQ ID NO: 61175 - DNA, 2837 bp, Zea Mays
gcggcggcggctccggctgccacaccaacagacaggcaagggctaggcaaggcgcaagaagaggaggggaagtcgaaaataatttagcagcggaagcggaagcagcagcacgaggtgggtggggcagcggcagcggggttctggctaaattattttaatgtctttattatcagagattccagtaatgtgccttgcctcttttatgtgattgtacaaatcaatgaacggaactcatccctggacctccatgtccgggggtgcatgttctaaccttggatatgccagagacatgaatggtaatgttccaattagcactacaaattcctctggaccaagcattggagttagctcgttggtgactgacgccaactcgtcactttccggtggtgcccagttacagccaagtactagcatgaatggtgattcattgatgcgtgttcctgcatcaccaatgtcattttcatccaataacatctctggctcttcagtcattgatggttccatcatgcagcaaagtccaccccaagaacagatgcagaaaaggaggtcttcaagtgtaacatcacaacatgtgatcgatgctggtggtgcattgcatgctcagaagaaatcaaggactgatgttagtcagggtgatatcatgcaacatcagctgattcagcatctgatccatggtcagaattctcttcatttccaggggcaacagaacccacagcttcaagcttttatccagcagcataaactagcacaacttcagcaacggcagcagcagcatttgttgcaaccattttctcagatgcaacaaccccaagttggtattcctcggcagccgcaacttaggccgccattggcacagactggaatgcagttaggtggtcctgttaggactcctatcgagaggggtgtttgttctcgcaggatactgcagtatctatttcacaagcgtcatcgcccagagaataactctataacatactggaggaagattgttgaagagtactttgcacctcgagcaagagaaaggtggtgtgtctcttcttatgaaaacagagggaattcttcagctgctgctccacagaaagctctggatacatggcgatgtggcatttgcaatacacatgctgggaaaggatatgaagctacctatgaaatacttcctaggctctgccaaattagatttgaccatggtgttattgatgaatacttatactttgactcacccaacgaatttgggttgcctaatggacaaatggtgctggagcatgcaaaagttgttcaaaaaagtgtttatgaacatctacatgttatacacgagggacatctgagaatcattttcacaccagaactgaagataatatcgtgggaattttgttcaagacgtcatgaggaatacaccactcgtaagactatagcaccacaggttaataatcttctgcaagttgtccagaaataccaagctgttgtcactgaaagtggatcagccgggatatcaaataatgatgcacaaaccatctgcaacatatatcggaggtggtgaatcacatgaaggacttgattgagttcagccacaagaacggccttggtcctaaagagagcctgaacagctattctaaaaccatggcgaagtttcagaatatgcatgattcaagacagctcatggctgctgctaaccttgccaataaccagagcaacaccaaactaatggggaccaaagaagaagcaagtgcttctgcgaccaaccagactcctggtgtcggagccatcggcaataatgctcttcagcatgccacacctctaaacagctaccagaatatgctcagaagctccagtgcaaatccagtcttgctgcagcaggaggcatcgagtgtcttcaaaggtcctacagcaatgcacagtggcatacagctggaagcagccagatccttccgtggacctaaccaagtgcagttccaacaccctgcggcgattcagcagcagcagcctatgccgcagcagagcaatttccagggctttggtggtgttaacccacagtaccagcaccatgtgcttaatcagcttctgcaggaagttaagaacaataaccacgtgaaagcacagcaactgcctccagatgcacctaaagcgagcggcggtcttgcaccaggagttgctattcccaacgttgctgctgctggggagcagggacagcatatcaacagtaatacccgtgaccataacggcgcggtgaagggtgctgctccagctggtactggcccaagcaatgtgatcaacaacacagccagcatgccccccggcagaaacaacagcttcaagtcggtgagcagcagtccagctgctgctaccggtggcattgcggtgaactcgaaggtcgacgactccttccatcaactggaggacctcgacctcgacggcttgatcacaaacgaactgatggagagcgggttgttcggcgccggacaagggtggtgagcatgtcccaccacgcctcacactactatcgagttccttcaccgaaagcgccaagcaacaatataagctttgccacccttctctttctggagtttttgtgttgacagtttcagatgatcgtgccatatacaattatgtaaggtagcgagttggatttggcttgggagtcgggaacggcgcaatctatagagctgttagcgtgtgcgtatgacatgttgctgtggttatcattttcatgctatggaggagtgtcgattatagtctcctgttgtctggcacggcgtgagtgtgtgtttcccatggttctatgaaatcaaattatagaagaaacaagatctaatgtttaggaatcgattctctatggttca

SEQ ID NO: 61176 - DNA, 2911 bp, Zea Mays
gcggcggcggctccggctgccacaccaacagacaggcaagggctaggcaaggcgcaagaagaggaggggaagtcgaaaataatttagcagcggaagcggaagcagcagcacgaggtgggtggggcagcggcagcggggttctggctaaattattttaatgtctttattatcagagattccagtaatgtgccttgcctcttttatgtgattgtacaaatcaatgaacggaactcatccctggacctccatgtccgggggtgcatgttctaaccttggatatgccagagacatgaatggtaatgttccaattagcactacaaattcctctggaccaagcattggagttagctcgttggtgactgacgccaactcgtcactttccggtggtgcccagttacagccaagtactagcatgaatggtgattcattgatgcgtgttcctgcatcaccaatgtcattttcatccaataacatctctggctcttcagtcattgatggttccatcatgcagcaaagtccaccccaagaacagatgcagaaaaggaggtcttcaagtgtaacatcacaacatgtgatcgatgctggtggtgcattgcatgctcagaagaaatcaaggactgatgttagtcagggtgatatcatgcaacatcagctgattcagcatctgatccatggtcagaattctcttcatttccaggggcaacagaacccacagcttcaagcttttatccagcagcataaactagcacaacttcagcaacggcagcagcagcatttgttgcaaccattttctcagatgcaacaaccccaagttggtattcctcggcagccgcaacttaggccgccattggcacagactggaatgcagttaggtggtcctgttaggactcctatcgagaggggtgtttgttctcgcaggatactgcagtatctatttcacaagcgtcatcgcccagagaataactctataacatactggaggaagattgttgaagagtactttgcacctcgagcaagagaaaggtggtgtgtctcttcttatgaaaacagagggaattcttcagctgctgctccacagaaagctctggatacatggcgatgtggcatttgcaatacacatgctgggaaaggatatgaagctacctatgaaatacttcctaggctctgccaaattagatttgaccatggtgttattgatgaatacttatactttgactcacccaacgaatttgggttgcctaatggacaaatggtgctggagcatgcaaaagttgttcaaaaaagtgtttatgaacatctacatgttatacacgagggacatctgagaatcattttcacaccagaactgaagataatatcgtgggaattttgttcaagacgtcatgaggaatacaccactcgttaataatcttctgcaagttgtccagaaataccaagctgttgtcactgaaagtggatcagccgggatatcaaataatgatgcacaaaccatctgcaacatgtttgtcactgcatcacaacaactggcaaaaaatctagagcatcacaccttaaatgaacatgggctctctaaaagatatgtacgctccctgcagatatcggaggtggtgaatcacatgaaggacttgattgagttcagccacaagaacggccttggtcctaaagagagcctgaacagctattctaaaaccatggcgaagtttcagaatatgcatgattcaagacagctcatggctgctgctaaccttgccaataaccagagcaacaccaaactaatggggaccaaagaagaagcaagtgcttctgcgaccaaccagactcctggtgtcggagccatcggcaataatgctcttcagcatgccacacctctaaacagctaccagaatatgctcagaagctccagtgcaaatccagtcttgctgcagcaggaggcatcgagtgtcttcaaaggtcctacagcaatgcacagtggcatacagctggaagcagccagatccttccgtggacctaaccaagtgcagttccaacaccctgcggcgattcagcagcagcagcctatgccgcagcagagcaatttccagggctttggtggtgttaacccacagtaccagcaccatgtgcttaatcagcttctgcaggaagttaagaacaataaccacgtgaaagcacagcaactgcctccagatgcacctaaagcgagcggcggtcttgcaccaggagttgctattcccaacgttgctgctgctggggagcagggacagcatatcaacagtaatacccgtgaccataacggcgcggtgaagggtgctgctccagctggtactggcccaagcaatgtgatcaacaacacagccagcatgccccccggcagaaacaacagcttcaagtcggtgagcagcagtccagctgctgctaccggtggcattgcggtgaactcgaaggtcgacgactccttccatcaactggaggacctcgacctcgacggcttgatcacaaacgaactgatggagagcgggttgttcggcgccggacaagggtggtgagcatgtcccaccacgcctcacactactatcgagttccttcaccgaaagcgccaagcaacaatataagctttgccacccttctctttctggagtttttgtgttgacagtttcagatgatcgtgccatatacaattatgtaaggtagcgagttggatttggcttgggagtcgggaacggcgcaatctatagagctgttagcgtgtgcgtatgacatgttgctgtggttatcattttcatgctatggaggagtgtcgattatagtctcctgttgtctggcacggcgtgagtgtgtgtttcccatggttctatgaaatcaaattatagaagaaacaagatctaatgtttaggaatcgattctctatggttca

SEQ ID NO: 61177 - DNA, 2726 bp, Zea Mays
gcggcggcggctccggctgccacaccaacagacaggcaagggctaggcaaggcgcaagaagaggaggggaagtcgaaaataatttagcagcggaagcggaagcagcagcacgaggtgggtggggcagcggcagcggggttctggctaaattattttaatgtctttattatcagagattccagtaatgtgccttgcctcttttatgtgattgtacaaatcaatgaacggaactcatccctggacctccatgtccgggggtgcatgttctaaccttggatatgccagagacatgaatgttacagccaacaaagtccaccccaagaacagatgcagaaaaggaggtcttcaagtgtaacatcacaacatgtgatcgatgctggtggtgcattgcatgctcagaagaaatcaaggactgatgttagtcagggtgatatcatgcaacatcagctgattcagcatctgatccatggtcagaattctcttcatttccaggggcaacagaacccacagcttcaagcttttatccagcagcataaactagcacaacttcagcaacggcagcagcagcatttgttgcaaccattttctcagatgcaacaaccccaagttggtattcctcggcagccgcaacttaggccgccattggcacagactggaatgcagttaggtggtcctgttaggactcctatcgagaggggtgtttgttctcgcaggatactgcagtatctatttcacaagcgtcatcgcccagagaataactctataacatactggaggaagattgttgaagagtactttgcacctcgagcaagagaaaggtggtgtgtctcttcttatgaaaacagagggaattcttcagctgctgctccacagaaagctctggatacatggcgatgtggcatttgcaatacacatgctgggaaaggatatgaagctacctatgaaatacttcctaggctctgccaaattagatttgaccatggtgttattgatgaatacttatactttgactcacccaacgaatttgggttgcctaatggacaaatggtgctggagcatgcaaaagttgttcaaaaaagtgtttatgaacatctacatgttatacacgagggacatctgagaatcattttcacaccagaactgaagataatatcgtgggaattttgttcaagacgtcatgaggaatacaccactcgtaagactatagcaccacaggttaataatcttctgcaagttgtccagaaataccaagctgttgtcactgaaagtggatcagccgggatatcaaataatgatgcacaaaccatctgcaacatgtttgtcactgcatcacaacaactggcaaaaaatctagagcatcacaccttaaatgaacatgggctctctaaaagatatgtacgctccctgcagatatcggaggtggtgaatcacatgaaggacttgattgagttcagccacaagaacggccttggtcctaaagagagcctgaacagctattctaaaaccatggcgaagtttcagaatatgcatgattcaagacagctcatggctgctgctaaccttgccaataaccagagcaacaccaaactaatggggaccaaagaagaagcaagtgcttctgcgaccaaccagactcctggtgtcggagccatcggcaataatgctcttcagcatgccacacctctaaacagctaccagaatatgctcagaagctccagtgcaaatccagtcttgctgcagcaggaggcatcgagtgtcttcaaaggtcctacagcaatgcacagtggcatacagctggaagcagccagatccttccgtggacctaaccaagtgcagttccaacaccctgcggcgattcagcagcagcagcctatgccgcagcagagcaatttccagggctttggtggtgttaacccacagtaccagcaccatgtgcttaatcagcttctgcaggaagttaagaacaataaccacgtgaaagcacagcaactgcctccagatgcacctaaagcgagcggcggtcttgcaccaggagttgctattcccaacgttgctgctgctggggagcagggacagcatatcaacagtaatacccgtgaccataacggcgcggtgaagggtgctgctccagctggtactggcccaagcaatgtgatcaacaacacagccagcatgccccccggcagaaacaacagcttcaagtcggtgagcagcagtccagctgctgctaccggtggcattgcggtgaactcgaaggtcgacgactccttccatcaactggaggacctcgacctcgacggcttgatcacaaacgaactgatggagagcgggttgttcggcgccggacaagggtggtgagcatgtcccaccacgcctcacactactatcgagttccttcaccgaaagcgccaagcaacaatataagctttgccacccttctctttctggagtttttgtgttgacagtttcagatgatcgtgccatatacaattatgtaaggtagcgagttggatttggcttgggagtcgggaacggcgcaatctatagagctgttagcgtgtgcgtatgacatgttgctgtggttatcattttcatgctatggaggagtgtcgattatagtctcctgttgtctggcacggcgtgagtgtgtgtttcccatggttctatgaaatcaaattatagaagaaacaagatctaatgtttaggaatcgattctctatggttca

SEQ ID NO: 61178 - DNA, 2810 bp, Zea Mays
gcggcggcggctccggctgccacaccaacagacaggcaagggctaggcaaggcgcaagaagaggaggggaagtcgaaaataatttagcagcggaagcggaagcagcagcacgaggttctggctaaattattttaatgtctttattatcagagattccagtaatgtgccttgcctcttttatgtgattgtacaaatcaatgaacggaactcatccctggacctccatgtccgggggtgcatgttctaaccttggatatgccagagacatgaatgttacagccaagtactagcatgaatggtgattcattgatgcgtgttcctgcatcaccaatgtcattttcatccaataacatctctggctcttcagtcattgatggttccatcatgcagcaaagtccaccccaagaacagatgcagaaaaggaggtcttcaagtgtaacatcacaacatgtgatcgatgctggtggtgcattgcatgctcagaagaaatcaaggactgatgttagtcagggtgatatcatgcaacatcagctgattcagcatctgatccatggtcagaattctcttcatttccaggggcaacagaacccacagcttcaagcttttatccagcagcataaactagcacaacttcagcaacggcagcagcagcatttgttgcaaccattttctcagatgcaacaaccccaagttggtattcctcggcagccgcaacttaggccgccattggcacagactggaatgcagttaggtggtcctgttaggactcctatcgagaggggtgtttgttctcgcaggatactgcagtatctatttcacaagcgtcatcgcccagagaataactctataacatactggaggaagattgttgaagagtactttgcacctcgagcaagagaaaggtggtgtgtctcttcttatgaaaacagagggaattcttcagctgctgctccacagaaagctctggatacatggcgatgtggcatttgcaatacacatgctgggaaaggatatgaagctacctatgaaatacttcctaggctctgccaaattagatttgaccatggtgttattgatgaatacttatactttgactcacccaacgaatttgggttgcctaatggacaaatggtgctggagcatgcaaaagttgttcaaaaaagtgtttatgaacatctacatgttatacacgagggacatctgagaatcattttcacaccagaactgaagataatatcgtgggaattttgttcaagacgtcatgaggaatacaccactcgtaagactatagcaccacaggttaataatcttctgcaagttgtccagaaataccaagctgttgtcactgaaagtggatcagccgggatatcaaataatgatgcacaaaccatctgcaacatgtttgtcactgcatcacaacaactggcaaaaaatctagagcatcacaccttaaatgaacatgggctctctaaaagatatgtacgctccctgcagatatcggaggtggtgaatcacatgaaggacttgattgagttcagccacaagaacggccttggtcctaaagagagcctgaacagctattctaaaaccatggcgaagtttcagaatatgcatgattcaagacagctcatggctgctgctaaccttgccaataaccagagcaacaccaaactaatggggaccaaagaagaagcaagtgcttctgcgaccaaccagactcctggtgtcggagccatcggcaataatgctcttcagcatgccacacctctaaacagctaccagaatatgctcagaagctccagtgcaaatccagtcttgctgcagcaggaggcatcgagtgtcttcaaaggtcctacagcaatgcacagtggcatacagctggaagcagccagatccttccgtggacctaaccaagtgcagttccaacaccctgcggcgattcagcagcagcagcctatgccgcagcagagcaatttccagggctttggtggtgttaacccacagtaccagcaccatgtgcttaatcagcttctgcaggaagttaagaacaataaccacgtgaaagcacagcaactgcctccagatgcacctaaagcgagcggcggtcttgcaccaggagttgctattcccaacgttgctgctgctggggagcagggacagcatatcaacagtaatacccgtgaccataacggcgcggtgaagggtgctgctccagctggtactggcccaagcaatgtgatcaacaacacagccagcatgccccccggcagaaacaacagcttcaagtcggtgagcagcagtccagctgctgctaccggtggcattgcggtgaactcgaaggtcgacgactccttccatcaactggaggacctcgacctcgacggcttgatcacaaacgaactgatggagagcgggttgttcggcgccggacaagggtggtgagcatgtcccaccacgcctcacactactatcgagttccttcaccgaaagcgccaagcaacaatataagctttgccacccttctctttctggagtttttgtgttgacagtttcagatgatcgtgccatatacaattatgtaaggtagcgagttggatttggcttgggagtcgggaacggcgcaatctatagagctgttagcgtgtgcgtatgacatgttgctgtggttatcattttcatgctatggaggagtgtcgattatagtctcctgttgtctggcacggcgtgagtgtgtgtttcccatggttctatgaaatcaaattatagaagaaacaagatctaatgtttaggaatcgattctctatggttca

SEQ ID NO: 61179 - DNA, 403 bp, Zea Mays
ctcagattatataatccaaattatataatccagattatataatcctccaaaaataatccagattatataatccattggggtaaacaaacaggcccttagaaacatcaggtatgtatgccaaactttagtgtccatcatttcgtttctgacagctgatacaaacttatattttagattgatggctcttgattgctgtttctcaggcactgcattggcgtactggtcataaaaatgattgcctccagataataagttctgctgcttcaaattcagttctgccagctgtaggaatagaaatggaattgagggtatccatggagatgcatgtagctgaactcagtcaagtttctatccattgtgtgtgtgtgcacttatttggcatcgtgttcttcctttttcatgg

SEQ ID NO: 61180 - DNA, 1617 bp, Zea Mays
tgtggcagcagatattcagactatgctagaagaaacccagctgaaatttgaggaggaaagacagaatttgttaaaagtactgtctaacacttccaaagagcagtgtgagggttcactgaacgaagagtacaacaagtttcaggaaacatatgatatgttctgtaaagaaaaggatgctcacatgcagactttcagaggacgtgcgcatcccgtaccagcagaagcgcatgttcggcttcgtcaccttcatgtatgtcgagacggtgaaggccatcctgagcaaggcaacccgcacttcgtgcgcgacgtgcgcgtgctcgtcaagccctacaaggagaagggcaaggtccccggcaggttcaggaagctgcagcacgcgcaccatggcggagccgagttcgccggttgcgcgtcgcccactggattgctggattccagggacccctacgccctcctgcttctttcaggtgcccaggtgttcaccagtgaggtgttaaaggttgtagaggatggactgagggaagctagctttgagattggacttgatgatcaaaaggtgcacaaggagatggacgagatctataccgtgttcataaacatctctactcctattaatgtatacaataagttgtttgttttgcaatcaacactgcaggcaactataatctcgagaataccatggagtcccagatgcgcaaccgcaacagaggtgatgtgggtggagctcgctgcgccgctcgacgccgagttccgtttcgtgggacagcccttcgacgcgaccgtctggcagacccgagcagcagcgtcgcgtagtggggtggggagtctggtgctgctcaggggcaccgacgacgcatcgaagctcgcgagagagcgagtcgagggggtgttcgagatggagctgaggatcgccatggaggttaggtacttccctgtgcacatcgtttggagcagcaggttggaggcgacttgccgctgaagatgctcatgccgaacgccccacccaggatggatgggaggctagcacgagccttgatcatccaaatggacgcaaataatttattaagattctcatgggattgctcacaaggatattggatactaaataaagagtgcaagaggatgcttgttcggcatttgcaacccttgaagaggtcacattggatgctggtactcaactagcacataaataaaatgtttctgctggaaagtgcactgcagacaagtctaaggatacagccgggtggtgttatggattcacggccttatttctttctgtgagatctttagaaatctttgagagaatggaatgcatatggggcttttcttccctgttaaatggcagtggttctgtcatatctttctaccatccactatttatggacccatctatacactaaacacacttaaagcaaggtactgttttagggcctgtttgtttaccccccagattatataatctggattaaataatcctaagaggcaaacaaacagtctagcttatttgcccagattatataatctaacctcttggattatgataatccataagcaagtgaggaggtgcttatttcagattatttttttcccacttccccactaccctttcaagtttcc

SEQ ID NO: 61181 - DNA, 1546 bp, Zea Mays
tgtggcagcagatattcagactatgctagaagaaacccagctgaaatttgaggaggaaagacagaatttgttaaaagtactgtctaacacttccaaagagcagtgtgagggttcactgaacgaagagtacaacaagtttcaggaaacatatgatatgttctgtaaagaaaaggatgctcacatgcagactttcagaggacgtgcgcatcccgtaccagcagaagcgcatgttcggcttcgtcaccttcatgtatgtcgagacggtgaaggccatcctgagcaaggcaacccgcacttcgtgcgcgacgtgcgcgtgctcgtcaagccctacaaggagaagggcaaggtccccggcaggttcaggaagctgcagcacgcgcaccatggcggagccgagttcgccggttgcgcgtcgcccactggattgctggattccagggacccctacgccctcctgcttctttcaggtgcccaggtgttcaccagtgaggtgttaaaggttgtagaggatggactgagggaagctagctttgagattggacttgatgatcaaaaggtgcacaaggagatggacgagatctataccgtgttcataaacatctctactcctattaatgtatacaataagttgtttgttttgcaatcaacactgcaggcaactataatctcgagaataccatggagtcccagatgcgcaaccgcaacagaggtgatgtgggtggagctcgctgcgccgctcgacgccgagttccgtttcgtgggacagcccttcgacgcgaccgtctggcagacccgagcagcagcgtcgcgtagtggggtggggagtctggtgctgctcaggggcaccgacgacgcatcgaagctcgcgagagagcgagtcgagggggtgttcgagatggagctgaggatcgccatggaggttaggtacttccctgtgcacatcgtttggagcagcagagccttgatcatccaaatggacgcaaataatttattaagattctcatgggattgctcacaaggatattggatactaaataaagagtgcaagaggatgcttgttcggcatttgcaacccttgaagaggtcacattggatgctggtactcaactagcacataaataaaatgtttctgctggaaagtgcactgcagacaagtctaaggatacagccgggtggtgttatggattcacggccttatttctttctgtgagatctttagaaatctttgagagaatggaatgcatatggggcttttcttccctgttaaatggcagtggttctgtcatatctttctaccatccactatttatggacccatctatacactaaacacacttaaagcaaggtactgttttagggcctgtttgtttaccccccagattatataatctggattaaataatcctaagaggcaaacaaacagtctagcttatttgcccagattatataatctaacctcttggattatgataatccataagcaagtgaggaggtgcttatttcagattatttttttcccacttccccactaccctttcaagtttcc

SEQ ID NO: 61182 - DNA, 1493 bp, Zea Mays
aatatatatagcatttaatatatactgaaatctgcatatatagtggcagcaaaatgatgttctgcattccacaggatggttaagattccaaatgaaaagatgactgcataagctgatggatggatgggtggtgaacaattgcggtgaaacctgaaaggatactactgatgctgcactgcacacagcacagctgcacccgaaacgcacgcacgcacgcgacaggcgacagcgccagtagaggcccgggcttacataaagggcagccactccggccccgaccgcttcttcgcaaacctcccctctcccatcgacttactccgtcgtccgtcgcactgccacggatcaccctcttccttcgtcttcctccacaaaacctatagtgctggtgcgccgaggagctagctagctagcccggccggccggcgccatgcctcccgtgaaggccgaggacctggttgtgcacgccgtcaaggagcagttcgccggcctcgactactgcatcaccagcccccccccgccatggatcacgacggtgctcgttggcttccagcactacctggtcatgctcggcaccaccgtcctcatcgccaccatcatcgtcccgctcatgggcggcggcatgccgagaaggcgatcgtgatctagaccatcctcttcctctccgggatcaacatgctgctgcaggtccacttcggcacgcggctccccgccgtgatgagcggctcctacacctacatctacccggtcgtggccatcatcctgagccaacgatacgcgctcctcatcgaccctctcgagggcgtgctcatcatcgtcggcgtcttccaggccgtcgtcggcttcttcggcatatggagagtcttcattaggttcctgagccccctcacggcggtccccttcgtcacgctcacaggcctgggactcttcttctccgcgttccccggggtcaccaagtgcatcgaagtgggtctccccgcccttgtcctcctggtgatcttcgcagagtacgcctcccacgtgttcgctaaggggagcttcgtgttcagccggtgccccgtgctggtgaccgtcgtgatcatctggatctacgccgagatcctgacggcggccggcgcctacaaccagctgggaattacctgaccaattacagatgactgcataagttgatggtcgccgctcttgccaaaacagggagggaagcccctcatggctggctcggactgggtccttcgtcgaacacctgtcgtgcagccccccgccccctcgtttggatcacaacgcagagcaacgctcctcaccgcaccagtccgcaccgcccgacgagcaacaccacggaagacatgaccacccgcgcgcagattggccacagaaatgcgcaggccgccgccagagattgctagatccggcaatgccaccgccagcagacgccggggccaggggtcgcgcccgccgccgctgtggccagggggcgtgtgcctcgccctcgccgcgac

SEQ ID NO: 61183 - DNA, 1887 bp, Zea Mays
ctaaggatagcagaagtgttggacggaaagagtttttccttcgatgcctatatacaaactaatcagtgccttatatttacagtgcccataactgattccctaacaaattagcaacttatcctaagctcccctagctctaatcagtcgactatttgctatccttgtgccacaccctagttagtgttaggaccgtgcaattcgtcctggtcttattgttgtggcttgctgctcctagacttgatgttgtggctgtaggtgtggcccacgaaggcatcgacaataggctcatgcagtggtacttcagaggaaaagaaacaacaggaacaagaacatctacatattggaacaggctcgtgcctagtgtagatgggatcattgttccaaagagaaactgattgagagaacattcataaaagaagataattaaaatatatatagcatttaatatatactgaaatctgcatatatagtggcagcaaaatgatgttctgcattccacaggatggttaagattccaaatgaaaagatgactgcataagctgatggatggatgggtggtgaacaattgcggtgaaacctgaaaggatactactgatgctgcactgcacacagcacagctgcacccgaaacgcacgcacgcacgcgacaggcgacagcgccagtagaggcccgggcttacataaagggcagccactccggccccgaccgcttcttcgcaaacctcccctctcccatcgacttactccgtcgtccgtcgcactgccacggatcaccctcttccttcgtcttcctccacaaaacctatagtgctggtgcgccgaggagctagctagctagcccggccggccggcgccatgcctcccgtgaaggccgaggacctggttgtgcacgccgtcaaggagcagttcgccggcctcgactactgcatcaccagcccccccccgccatggatcacgacggtgctcgttggcttccagcactacctggtcatgctcggcaccaccgtcctcatcgccaccatcatcgtcccgctcatgggcggcggcatgtccacttcggcacgcggctccccgccgtgatgagcggctcctacacctacatctacccggtcgtggccatcatcctgagccaacgatacgcgctcctcatcgaccctctcgagagattcgtgttcacgatgaggtcgctccagggcgtgctcatcatcgtcggcgtcttccaggccgtcgtcggcttcttcggcatatggagagtcttcattaggttcctgagccccctcacggcggtccccttcgtcacgctcacaggcctgggactcttcttctccgcgttccccggggtcaccaagtgcatcgaagtgggtctccccgcccttgtcctcctggtgatcttcgcagagtacgcctcccacgtgttcgctaaggggagcttcgtgttcagccggtgccccgtgctggtgaccgtcgtgatcatctggatctacgccgagatcctgacggcggccggcgcctacaaccagctgggaattacctgaccaattacagatgactgcataagttgatggtcgccgctcttgccaaaacagggagggaagcccctcatggctggctcggactgggtccttcgtcgaacacctgtcgtgcagccccccgccccctcgtttggatcacaacgcagagcaacgctcctcaccgcaccagtccgcaccgcccgacgagcaacaccacggaagacatgaccacccgcgcgcagattggccacagaaatgcgcaggccgccgccagagattgctagatccggcaatgccaccgccagcagacgccggggccaggggtcgcgcccgccgccgctgtggccagggggcgtgtgcctcgccctcgccgcgac

SEQ ID NO: 61184 - DNA, 1336 bp, Zea Mays
cagtttggtgaacacacctctatcgccccgacctcgacgcgacccctctcgcttggatccggacggcccggtccctccgccctcccatgcgcacggcgccgccgccgccgcagccgacatgacgctcgcagccctcgcccgtgccctcgaccggtccgcgcgctcctcccgcccgcgccagggtttccagctcgggggcctccggcagtcgcccgcgccaccgctacagccgcctgtccacggcggtgagggtggggcggcaggatttgttcgcagctacctgactgcggcctcgtcggcagctcttgggaatccatccgcgggcaagactgtggattggagatatgtcctcgccagcccacatttccgacgcctcttctcggacgggtccaagaagaactacgagaactattaccccaagggtaagaaggaggtgcctaaaggagatggtacaaacaagtctgaatctaagcaggaatccaatacagatgaaggatggaattttcaggataatgctatgaaacagatgcagaatttccttgcgcctttattgattcttggcctgatgctatcatccatgtcatctagcttcgcagaccagaaggaggtctgcaatttcttggggccacagaaaactaacaatactgttgcaagtccttgtgtaccaaatcctgtctctaattcatgttagcattatctgcattttaattcttggatgactgattttgaccttacaattgcttctttatcttcaggtcagctctatacgcgagtcaccttagtattacattggccttagtaccttatttactaatatagagccaagagcaaaactcacatttacttataggttgcacatattgtcggaactgtattgtgttgtttgtcaccaatatgcaccattatgaatgaaatttgcatctaagctttagatcaggtaatcttaatcagaacagaaacattagtgagacagcatcactaactttacagtgtagtcaaatattatactgtacaatcggtttatcttggtaaagtgaaaatcaccagcggttaggggttttgtgtctattaccgattaattgcatgtccaaataatcctgtcacccacacatattgatccttctatatgtatacaatatatgtataaaacaataatatgttagtcatataaacacatcggccaaagcctcgcccaaggcgcgagaaatttactagttagatatatttatgacggaaacagttagtatctggatgagcgagaactatccggtacataaccagataatcgggtagctattattttttacaatatttttataaaattataaactcttat

SEQ ID NO: 61185 - DNA, 2160 bp, Zea Mays
ctccctcccgctcactcgcgcaatccgtcgaactcgaacactgccatggccaccgccgctgccgacgacgatgtcaagctcgaatccttcctccaatggctccagtccaacggcgccgacctccgcagctgcacgatccgcgcatgcggcggcaagggcttgggggttttttccaccgccgcccccgagccgggctccaacgacggggtggcgatggtggtaccgctcgatctcgccatcacgcccatgcgggtgctgcaggacccactcgtcggcccgcgatgccgcgcgctcttagaggacggagtcgtcgacgaccgcctcctcgtcatgctcttcctcatggccgagcgccgacgccctggctcactctggaagccatacttggatatgcttccgagcacctttgggagctccctttggtttactgaggaagagcttgccgaactggaagggacaactttgcaccgagctacgttgattcagaggaagtcattgcaatcctcatttgatgagaaggttaaagggctcgttgaggagcttttgcatgtcgatgaatcagcaagctcagttgaagttttgtttgaggacttcctttgggcaaactcaatcttctggactcgagcactgaacataccattgcctcattcttatgtttttctgggctcatgtggcgatcaacaggccagggctgacaatgatgcccaccaggaaattgatattacagctaaggattgtagtgctgatgagaattctaaaccaagtaacacagagtcaatttgggttgagggccttgtcccaggaattgatttctgcaatcataatgtaaaggcactggcaacatgggaagttgattctgtgggaaatgctaccggaattcctgcttcaatgtacctcttgcttgctgataaaagtcctgctgagactggagcagagatctgcataaactacggcaacaaaggaaatgaggaactactgtacctttatggatttgtggttgacaacaatcctgatgattatctcatggtaaccctcataatgatgttcattatcctttggaagctcttagacagatccagtctgctgatataaaaatgaagctactagagatgcagaagggagaattgaggtgcctcctacccagaagtttgcttgataatggattttttggtatccgttctagtgaagataaggatagcaagaaaaatactggtccgttttcaagttttagttggagtggtcaacgcaaagttccatcatatcttccaaaaattgttttccctcatgaatttatgagtactctacgtactattgccatgcaagaacatgagcttgaacaggttgcttctttacttggagaggttggatatagtgaagacagagaaacatcttgtgcagcgatccaaagtgctatttgggaggtctgcggtgatcagggtgcactgggtttgcttgtggatcttctcggggtcaaaatggctgaacttgaagagggctctggaacagaagcatctgacgccgaactgctcgagcagttcgattccattcagccagaagactacgcgagtgaaagcggcgagaagcacgaaaggaagtcaaagacaaactaccgttcgtgtgtagtgtaccggagagggcaaaagcagctgacgaggctgttcctgagggaggtagagcatcttctggagctttctgcgaaagaacagagctaagagactctcatctggccctgcctgcatcaaggttagaactgcagggttgtgaaaggaggcacacccgttgcgaaagtagaataccgccttcgtttcgttcccttgcgaaagtactactactccgttccaggactacgatttcgtctcccgaggattccggattgcccgttggctgggcatttgtggaggagacgtcgtcttgcactttgctgccacggctaggctgtagctttacctgattcagcttgcagcggcggagctgcagcgaacagccatctagagacagctccagagctctggttttaccaaaatgcgtttcttttctagatgactttgccttcgtcagagatgcatctcctggtctcacgagtcacagttccgactccgagacggtcaaggagattatagtctgctaagattatgtaatctaaagtattttttaaaccgg

SEQ ID NO: 61186 - DNA, 2053 bp, Zea Mays
ctccctcccgctcactcgcgcaatccgtcgaactcgaacactgccatggccaccgccgctgccgacgacgatgtcaagctcgaatccttcctccaatggctccagtccaacggcgccgacctccgcagctgcacgatccgcgcatgcggcggcaagggcttgggggttttttccaccgccgcccccgagccgggctccaacgacggggtggcgatggtggtaccgctcgatctcgccatcacgcccatgcgggtgctgcaggacccactcgtcggcccgcgatgccgcgcgctcttagaggacggagtcgtcgacgaccgcctcctcgtcatgctcttcctcatggccgagcgccgacgccctggctcactctggaagccatacttggatatgcttccgagcacctttgggagctccctttggtttactgaggaagagcttgccgaactggaagggacaactttgcaccgagctacgttgattcagaggaagtcattgcaatcctcatttgatgagaaggttaaagggctcgttgaggagcttttgcatgtcgatgaatcagcaagttgaagttttgtttgaggacttcctttggccagggctgacaatgatgcccaccaggaaattgatattacagctaaggattgtagtgctgatgagaattctaaaccaagtaacacagagtcaatttgggttgagggccttgtcccaggaattgatttctgcaatcataatgtaaaggcactggcaacatgggaagttgattctgtgggaaatgctaccggaattcctgcttcaatgtacctcttgcttgctgataaaagtcctgctgagactggagcagagatctgcataaactacggcaacaaaggaaatgaggaactactgtacctttatggatttgtggttgacaacaatcctgatgattatctcatggttcattatcctttggaagctcttagacagatccagtctgctgatataaaaatgaagctactagagatgcagaagggagaattgaggtgcctcctacccagaagtttgcttgataatggattttttggtatccgttctagtgaagataaggatagcaagaaaaatactggtccgttttcaagttttagttggagtggtcaacgcaaagttccatcatatcttccaaaaattgttttccctcatgaatttatgagtactctacgtactattgccatgcaagaacatgagcttgaacaggttgcttctttacttggagaggttggatatagtgaagacagagaaacatcttgtgcagcgatccaaagtgctatttgggaggtctgcggtgatcagggtgcactgggtttgcttgtggatcttctcggggtcaaaatggctgaacttgaagagggctctggaacagaagcatctgacgccgaactgctcgagcagttcgattccattcagccagaagactacgcgagtgaaagcggcgagaagcacgaaaggaagtcaaagacaaactaccgttcgtgtgtagtgtaccggagagggcaaaagcagctgacgaggctgttcctgagggaggtagagcatcttctggagctttctgcgaaagaacagagctaagagactctcatctggccctgcctgcatcaaggttagaactgcagggttgtgaaaggaggcacacccgttgcgaaagtagaataccgccttcgtttcgttcccttgcgaaagtactactactccgttccaggactacgatttcgtctcccgaggattccggattgcccgttggctgggcatttgtggaggagacgtcgtcttgcactttgctgccacggctaggctgtagctttacctgattcagcttgcagcggcggagctgcagcgaacagccatctagagacagctccagagctctggttttaccaaaatgcgtttcttttctagatgactttgccttcgtcagagatgcatctcctggtctcacgagtcacagttccgactccgagacggtcaaggagattatagtctgctaagattatgtaatctaaagtattttttaaaccgg

SEQ ID NO: 61187 - DNA, 2155 bp, Zea Mays
ctccctcccgctcactcgcgcaatccgtcgaactcgaacactgccatggccaccgccgctgccgacgacgatgtcaagctcgaatccttcctccaatggctccagtccaacggcgccgacctccgcagctgcacgatccgcgcatgcggcggcaagggcttgggggttttttccaccgccgcccccgagccgggctccaacgacggggtggcgatggtggtaccgctcgatctcgccatcacgcccatgcgggtgctgcaggacccactcgtcggcccgcgatgccgcgcgctcttagaggacggagtcgtcgacgaccgcctcctcgtcatgctcttcctcatggccgagcgccgacgccctggctcactctggaagccatacttggatatgcttccgagcacctttgggagctccctttggtttactgaggaagagcttgccgaactggaagggacaactttgcaccgagctacgttgattcagaggaagtcattgcaatcctcatttgatgagaaggttaaagggctcgttgaggagcttttgcatgtcgatgaatcagcaagttgaagttttgtttgaggacttcctttgggcaaactcaatcttctggactcgagcactgaacataccattgcctcattcttatgtttttctgggctcatgtggcgatcaacaggccagggctgacaatgatgcccaccaggaaattgatattacagctaaggattgtagtgctgatgagaattctaaaccaagtaacacagagtcaatttgggttgagggccttgtcccaggaattgatttctgcaatcataatgtaaaggcactggcaacatgggaagttgattctgtgggaaatgctaccggaattcctgcttcaatgtacctcttgcttgctgataaaagtcctgctgagactggagcagagatctgcataaactacggcaacaaaggaaatgaggaactactgtacctttatggatttgtggttgacaacaatcctgatgattatctcatggtaaccctcataatgatgttcattatcctttggaagctcttagacagatccagtctgctgatataaaaatgaagctactagagatgcagaagggagaattgaggtgcctcctacccagaagtttgcttgataatggattttttggtatccgttctagtgaagataaggatagcaagaaaaatactggtccgttttcaagttttagttggagtggtcaacgcaaagttccatcatatcttccaaaaattgttttccctcatgaatttatgagtactctacgtactattgccatgcaagaacatgagcttgaacaggttgcttctttacttggagaggttggatatagtgaagacagagaaacatcttgtgcagcgatccaaagtgctatttgggaggtctgcggtgatcagggtgcactgggtttgcttgtggatcttctcggggtcaaaatggctgaacttgaagagggctctggaacagaagcatctgacgccgaactgctcgagcagttcgattccattcagccagaagactacgcgagtgaaagcggcgagaagcacgaaaggaagtcaaagacaaactaccgttcgtgtgtagtgtaccggagagggcaaaagcagctgacgaggctgttcctgagggaggtagagcatcttctggagctttctgcgaaagaacagagctaagagactctcatctggccctgcctgcatcaaggttagaactgcagggttgtgaaaggaggcacacccgttgcgaaagtagaataccgccttcgtttcgttcccttgcgaaagtactactactccgttccaggactacgatttcgtctcccgaggattccggattgcccgttggctgggcatttgtggaggagacgtcgtcttgcactttgctgccacggctaggctgtagctttacctgattcagcttgcagcggcggagctgcagcgaacagccatctagagacagctccagagctctggttttaccaaaatgcgtttcttttctagatgactttgccttcgtcagagatgcatctcctggtctcacgagtcacagttccgactccgagacggtcaaggagattatagtctgctaagattatgtaatctaaagtattttttaaaccgg

SEQ ID NO: 61188 - DNA, 2286 bp, Zea Mays
ctccctcccgctcactcgcgcaatccgtcgaactcgaacactgccatggccaccgccgctgccgacgacgatgtcaagctcgaatccttcctccaatggctccagtccaacggcgccgacctccgcagctgcacgatccgcgcatgcggcggcaagggcttgggggttttttccaccgccgcccccgagccgggctccaacgacggggtggcgatggtggtaccgctcgatctcgccatcacgcccatgcgggtgctgcaggacccactcgtcggcccgcgatgccgcgcgctcttagaggacggagtcgtcgacgaccgcctcctcgtcatgctcttcctcatggccgagcgccgacgccctggctcactctggaagccatacttggatatgcttccgagcacctttgggagctccctttggtttactgaggaagagcttgccgaactggaagggacaactttgcaccgagctacgttgattcagaggaagtcattgcaatcctcatttgatgagaaggttaaagggctcgttgaggagcttttgcatgtcgatgaatcagcaagctcagttgaagttttgtttgaggacttcctttgtacgagtctatgacagggcaaactcaatcttctggactcgagcactgaacataccattgcctcattcttatgtttttctgggctcatgtggcgatcaacaggccagggctgacaatgatgcccaccaggaaattgatattacagctaaggattgtagtgctgatgagaattctaaaccaagtaacacagagtcaatttgggttgagggccttgtcccaggaattgatttctgcaatcataatgtaaaggcactggcaacatgggaagttgattctgtgggaaatgctaccggaattcctgcttcaatgtacctcttgcttgctgataaaagtcctgctgagactggagcagagatctgcataaactacggcaacaaaggaaatgaggaactactgtacctttatggatttgtggttgacaacaatcctgatgattatctcatggttcattatcctttggaagctcttagacagatccagtctgctgatataaaaatgaagctactagagatgcagaagggagaattgaggtgcctcctacccagaagtttgcttgataatggattttttggtatccgttctagtgaagataaggatagcaagaaaaatactggtccgttttcaagttttagttggagtggtcaacgcaaagttccatcatatcttccaaaaattgttttccctcatgaatttatgagtactctacgtactattgccatgcaagaacatgagcttgaacaggttgcttctttacttggagagactttattctctaggcgtgaaactacactttttggagatgcagtgatcagtgtttcgttcgctacttctgaactgatctgttgataactgtgtactaaaaaggagtaggagactagtgactccgcacgttggatatagtgaagacagagaaacatcttgtgcagcgatccaaagtgctatttgggaggtctgcggtgatcagggtgcactgggtttgcttgtggatcttctcggggtcaaaatggctgaacttgaagagggctctggaacagaagcatctgacgccgaactgctcgagcagttcgattccattcagccagaagactacgcgagtgaaagcggcgagaagcacgaaaggaagtcaaagacaaactaccgttcgtgtgtagtgtaccggagagggcaaaagcagctgacgaggctgttcctgagggaggtagagcatcttctggagctttctgcgaaagaacagagctaagagactctcatctggccctgcctgcatcaaggttagaactgcagggttgtgaaaggaggcacacccgttgcgaaagtagaataccgccttcgtttcgttcccttgcgaaagtactactactccgttccaggactacgatttcgtctcccgaggattccggattgcccgttggctgggcatttgtggaggagacgtcgtcttgcactttgctgccacggctaggctgtagctttacctgattcagcttgcagcggcggagctgcagcgaacagccatctagagacagctccagagctctggttttaccaaaatgcgtttcttttctagatgactttgccttcgtcagagatgcatctcctggtctcacgagtcacagttccgactccgagacggtcaaggagattatagtctgctaagattatgtaatctaaagtattttttaaaccgg

SEQ ID NO: 61189 - DNA, 2166 bp, Zea Mays
ctccctcccgctcactcgcgcaatccgtcgaactcgaacactgccatggccaccgccgctgccgacgacgatgtcaagctcgaatccttcctccaatggctccagtccaacggcgccgacctccgcagctgcacgatccgcgcatgcggcggcaagggcttgggggttttttccaccgccgcccccgagccgggctccaacgacggtaacgctcctctcctttcccccgagtcgacgaggctcatttggacgatgcgccggcgctgtgcaggggtggcgatggtggtaccgctcgatctcgccatcacgcccatgcgggtgctgcaggacccactcgtcggcccgcgatgccgcgcgctcttagaggacggagtcgtcgacgaccgcctcctcgtcatgctcttcctcatggccgagcgccgacgccctggctcactctggaagccatacttggatatgcttccgagcacctttgggagctccctttggtttactgaggaagagcttgccgaactggaagggacaactttgcaccgagctacgttgattcagaggaagtcattgcaatcctcatttgatgagaaggttaaagggctcgttgaggagcttttgcatgtcgatgaatcagcaagttgaagttttgtttgaggacttcctttgggcaaactcaatcttctggactcgagcactgaacataccattgcctcattcttatgtttttctgggctcatgtggcgatcaacaggccagggctgacaatgatgcccaccaggaaattgatattacagctaaggattgtagtgctgatgagaattctaaaccaagtaacacagagtcaatttgggttgagggccttgtcccaggaattgatttctgcaatcataatgtaaaggcactggcaacatgggaagttgattctgtgggaaatgctaccggaattcctgcttcaatgtacctcttgcttgctgataaaagtcctgctgagactggagcagagatctgcataaactacggcaacaaaggaaatgaggaactactgtacctttatggatttgtggttgacaacaatcctgatgattatctcatggttcattatcctttggaagctcttagacagatccagtctgctgatataaaaatgaagctactagagatgcagaagggagaattgaggtgcctcctacccagaagtttgcttgataatggattttttggtatccgttctagtgaagataaggatagcaagaaaaatactggtccgttttcaagttttagttggagtggtcaacgcaaagttccatcatatcttccaaaaattgttttccctcatgaatttatgagtactctacgtactattgccatgcaagaacatgagcttgaacaggttggatatagtgaagacagagaaacatcttgtgcagcgatccaaagtgctatttgggaggtctgcggtgatcagggtgcactgggtttgcttgtggatcttctcggggtcaaaatggctgaacttgaagagggctctggaacagaagcatctgacgccgaactgctcgagcagttcgattccattcagccagaagactacgcgagtgaaagcggcgagaagcacgaaaggaagtcaaagacaaactaccgttcgtgtgtagtgtaccggagagggcaaaagcagctgacgaggctgttcctgagggaggtagagcatcttctggagctttctgcgaaagaacagagctaagagactctcatctggttagaactgcagggttgtgaaaggaggcacacccgttgcgaaagtagaataccgccttcgtttcgttcccttgcgaaagtactactactccgttccaggactacgatttcgtctcccgaggattccggattgcccgttggctgggcatttgtggaggagacgtcgtcttgcactttgctgccacggctaggctgtagctttacctgattcagcttgcagcggcggagctgcagcgaacagccatctagagacagctccagagctctggttttaccaaaatgcgtttcttttctagatgactttgccttcgtcagagatgcatctcctggtctcacgagtcacagttccgactccgagacggtcaaggagattatagtctgctaagattatgtaatctaaagtattttttaaaccgg

SEQ ID NO: 61190 - DNA, 2906 bp, Zea Mays
ctccctcccgctcactcgcgcaatccgtcgaactcgaacactgccatggccaccgccgctgccgacgacgatgtcaagctcgaatccttcctccaatggctccagtccaacggcgccgacctccgcagctgcacgatccgcgcatgcggcggcaagggcttgggggttttttccaccgccgcccccgagccgggctccaacgacggggtggcgatggtggtaccgctcgatctcgccatcacgcccatgcgggtgctgcaggacccactcgtcggcccgcgatgccgcgcgctcttagaggacggagtcgtcgacgaccgcctcctcgtcatgctcttcctcatggccgagcgccgacgccctggctcactctggaagccatacttggatatgcttccgagcacctttgggagctccctttggtttactgaggaagagcttgccgaactggaagggacaactttgcaccgagctacgttgattcagaggaagtcattgcaatcctcatttgatgagaaggttaaagggctcgttgaggagcttttgcatgtcgatgaatcagcaagctcagttgaagttttgtttgaggacttcctttggtatgtaatattcttgtttgcattaaaagcagaaacaacatactacaaccttcacttaataataccattttaccatcttgattgataatgccaatatgtggagttgtggactgtgggcagcctgtattaatgtaatgttgtaaacagtacatgggaatatgggattggtgaacctccttcagtctgtgggctgtacttacgtacataaacctgataaagactatcctgaaatgacgtaatcaagagaagaagcagaaggatcgtttgtggttatctttgtttatgcagtgtaaattagttaggtttcatctgttacaatagtataataaatagtgcattttcaccatggttagtggtgttgctgttgcataggtatactattgtacctgcaaatataccatgtagttggatgttcagcgtagctacttacataaacgagttagccacacaaaaagcaacagcttaaccaaataaggcaaggtgttactgtattattcatccaaaaaaagttaacatgctttgatatctagcatcgtgtacattgcatccttttcctgtggtcagggtgaaaatttgatcagaatcatggaatctgcaatatgtacttgattaaagtgatggtgtcaaagactagttctttctttagtttacataattaaaagtttaaagaaaatgccatataggcatcccaattttcttatctctagttaatttttactctaattagcagtacgagtctatgacagggcaaactcaatcttctggactcgagcactgaacataccattgcctcattcttatgtttttctgggctcatgtggcgatcaacaggccagggctgacaatgatgcccaccaggaaattgatattacagctaaggattgtagtgctgatgagaattctaaaccaagtaacacagagtcaatttgggttgagggccttgtcccaggaattgatttctgcaatcataatgtaaaggcactggcaacatgggaagttgattctgtgggaaatgctaccggaattcctgcttcaatgtacctcttgcttgctgataaaagtcctgctgagactggagcagagatctgcataaactacggcaacaaaggaaatgaggaactactgtacctttatggatttgtggttgacaacaatcctgatgattatctcatggtaaccctcataatgatgttcattatcctttggaagctcttagacagatccagtctgctgatataaaaatgaagctactagagatgcagaagggagaattgaggtgcctcctacccagaagtttgcttgataatggattttttggtatccgttctagtgaagataaggatagcaagaaaaatactggtccgttttcaagttttagttggagtggtcaacgcaaagttccatcatatcttccaaaaattgttttccctcatgaatttatgagtactctacgtactattgccatgcaagaacatgagcttgaacaggttgcttctttacttggagaggttggatatagtgaagacagagaaacatcttgtgcagcgatccaaagtgctatttgggaggtctgcggtgatcagggtgcactgggtttgcttgtggatcttctcggggtcaaaatggctgaacttgaagagggctctggaacagaagcatctgacgccgaactgctcgagcagttcgattccattcagccagaagactacgcgagtgaaagcggcgagaagcacgaaaggaagtcaaagacaaactaccgttcgtgtgtagtgtaccggagagggcaaaagcagctgacgaggctgttcctgagggaggtagagcatcttctggagctttctgcgaaagaacagagctaagagactctcatctggccctgcctgcatcaaggttagaactgcagggttgtgaaaggaggcacacccgttgcgaaagtagaataccgccttcgtttcgttcccttgcgaaagtactactactccgttccaggactacgatttcgtctcccgaggattccggattgcccgttggctgggcatttgtggaggagacgtcgtcttgcactttgctgccacggctaggctgtagctttacctgattcagcttgcagcggcggagctgcagcgaacagccatctagagacagctccagagctctggttttaccaaaatgcgtttcttttctagatgactttgccttcgtcagagatgcatctcctggtctcacgagtcacagttccgactccgagacggtcaaggagattatagtctgctaagattatgtaatctaaagtattttttaaaccgg

SEQ ID NO: 61191 - DNA, 2765 bp, Zea Mays
cagctccctcccgctcactcgcgcaatccgtcgaactcgaacactgccatggccaccgccgctgccgacgacgatgtcaagctcgaatccttcctccaatggctccagtccaacggcgccgacctccgcagctgcacgatccgcgcatgcggcggcaagggcttgggggttttttccaccgccgcccccgagccgggctccaacgacggggtggcgatggtggtaccgctcgatctcgccatcacgcccatgcgggtgctgcaggacccactcgtcggcccgcgatgccgcgcgctcttagaggacggagtcgtcgacgaccgcctcctcgtcatgctcttcctcatggccgagcgccgacgccctggctcactctggaagccatacttggatatgcttccgagcacctttgggagctccctttggtttactgaggaagagcttgccgaactggaagggacaactttgcaccgagctacgttgattcagaggaagtcattgcaatcctcatttgatgagaaggttaaagggctcgttgaggagcttttgcatgtcgatgaatcagcaagctcagttgaagttttgtttgaggacttcctttggtatgtaatattcttgtttgcattaaaagcagaaacaacatactacaaccttcacttaataataccattttaccatcttgattgataatgccaatatgtggagttgtggactgtgggcagcctgtattaatgtaatgttgtaaacagtacatgggaatatgggattggtgaacctccttcagtctgtgggctgtacttacgtacataaacctgataaagactatcctgaaatgacgtaatcaagagaagaagcagaaggatcgtttgtggttatctttgtttatgcagtgtaaattagttaggtttcatctgttacaatagtataataaatagtgcattttcaccatggttagtggtgttgctgttgcataggtatactattgtacctgcaaatataccatgtagttggatgttcagcgtagctacttacataaacgagttagccacacaaaaagcaacagcttaaccaaataaggcaaggtgttactgtattattcatccaaaaaaagttaacatgctttgatatctagcatcgtgtacattgcatccttttcctgtggtcagggtgaaaatttgatcagaatcatggaatctgcaatatgtacttgattaaagtgatggtgtcaaagactagttctttctttagtttacataattaaaagtttaaagaaaatgccatataggcatcccaattttcttatctctagttaatttttactctaattagcagtacgagtctatgacagggcaaactcaatcttctggactcgagcactgaacataccattgcctcattcttatgtttttctgggctcatgtggcgatcaacaggccagggctgacaatgatgcccaccaggaaattgatattacagctaaggattgtagtgctgatgagaattctaaaccaagtaacacagagtcaatttgggttgagggccttgtcccaggaattgatttctgcaatcataatgtaaaggcactggcaacatgggaagttgattctgtgggaaatgctaccggaattcctgcttcaatgtacctcttgcttgctgataaaagtcctgctgagactggagcagagatctgcataaactacggcaacaaaggaaatgaggaactactgtacctttatggatttgtggttgacaacaatcctgatgattatctcatggttcattatcctttggaagctcttagacagatccagtctgctgatataaaaatgaagctactagagatgcagaagggagaattgaggtgcctcctacccagaagtttgcttgataatggattttttgtactctacgtactattgccatgcaagaacatgagcttgaacaggttgcttctttacttggagaggttggatatagtgaagacagagaaacatcttgtgcagcgatccaaagtgctatttgggaggtctgcggtgatcagggtgcactgggtttgcttgtggatcttctcggggtcaaaatggctgaacttgaagagggctctggaacagaagcatctgacgccgaactgctcgagcagttcgattccattcagccagaagactacgcgagtgaaagcggcgagaagcacgaaaggaagtcaaagacaaactaccgttcgtgtgtagtgtaccggagagggcaaaagcagctgacgaggctgttcctgagggaggtagagcatcttctggagctttctgcgaaagaacagagctaagagactctcatctggccctgcctgcatcaaggttagaactgcagggttgtgaaaggaggcacacccgttgcgaaagtagaataccgccttcgtttcgttcccttgcgaaagtactactactccgttccaggactacgatttcgtctcccgaggattccggattgcccgttggctgggcatttgtggaggagacgtcgtcttgcactttgctgccacggctaggctgtagctttacctgattcagcttgcagcggcggagctgcagcgaacagccatctagagacagctccagagctctggttttaccaaaatgcgtttcttttctagatgactttgccttcgtcagagatgcatctcctggtctcacgagtcacagttccgactccgagacggtcaaggagattatagtctgctaagattatgtaatctaaagtattttttaaaccgg

SEQ ID NO: 61192 - DNA, 2247 bp, Zea Mays
gtcagctccctcccgctcactcgcgcaatccgtcgaactcgaacactgccatggccaccgccgctgccgacgacgatgtcaagctcgaatccttcctccaatggctccagtccaacggcgccgacctccgcagctgcacgatccgcgcatgcggcggcaagggcttgggggttttttccaccgccgcccccgagccgggctccaacgacggtaacgctcctctcctttcccccgagtcgacgaggctcatttggacgatgcgccggcgctgtgcaggggtggcgatggtggtaccgctcgatctcgccatcacgcccatgcgggtgctgcaggacccactcgtcggcccgcgatgccgcgcgctcttagaggacggagtcgtcgacgaccgcctcctcgtcatgctcttcctcatggccgagcgccgacgccctggctcactctggaagccatacttggatatgcttccgagcacctttgggagctccctttggtttactgaggaagagcttgccgaactggaagggacaactttgcaccgagctacgttgattcagaggaagtcattgcaatcctcatttgatgagaaggttaaagggctcgttgaggagcttttgcatgtcgatgaatcagcaagctcagttgaagttttgtttgaggacttcctttgtacgagtctatgacagggcaaactcaatcttctggactcgagcactgaacataccattgcctcattcttatgtttttctgggctcatgtggcgatcaacaggccagggctgacaatgatgcccaccaggaaattgatattacagctaaggattgtagtgctgatgagaattctaaaccaagtaacacagagtcaatttgggttgagggccttgtcccaggaattgatttctgcaatcataatgtaaaggcactggcaacatgggaagttgattctgtgggaaatgctaccggaattcctgcttcaatgtacctcttgcttgctgataaaagtcctgctgagactggagcagagatctgcataaactacggcaacaaaggaaatgaggaactactgtacctttatggatttgtggttgacaacaatcctgatgattatctcatggtaaccctcataatgatgttcattatcctttggaagctcttagacagatccagtctgctgatataaaaatgaagctactagagatgcagaagggagaattgaggtgcctcctacccagaagtttgcttgataatggattttttggtatccgttctagtgaagataaggatagcaagaaaaatactggtccgttttcaagttttagttggagtggtcaacgcaaagttccatcatatcttccaaaaattgttttccctcatgaatttatgagtactctacgtactattgccatgcaagaacatgagcttgaacaggttgcttctttacttggagaggttggatatagtgaagacagagaaacatcttgtgcagcgatccaaagtgctatttgggaggtctgcggtgatcagggtgcactgggtttgcttgtggatcttctcggggtcaaaatggctgaacttgaagagggctctggaacagaagcatctgacgccgaactgctcgagcagttcgattccattcagccagaagactacgcgagtgaaagcggcgagaagcacgaaaggaagtcaaagacaaactaccgttcgtgtgtagtgtaccggagagggcaaaagcagctgacgaggctgttcctgagggaggtagagcatcttctggagctttctgcgaaagaacagagctaagagactctcatctggccctgcctgcatcaaggttagaactgcagggttgtgaaaggaggcacacccgttgcgaaagtagaataccgccttcgtttcgttcccttgcgaaagtactactactccgttccaggactacgatttcgtctcccgaggattccggattgcccgttggctgggcatttgtggaggagacgtcgtcttgcactttgctgccacggctaggctgtagctttacctgattcagcttgcagcggcggagctgcagcgaacagccatctagagacagctccagagctctggttttaccaaaatgcgtttcttttctagatgactttgccttcgtcagagatgcatctcctggtctcacgagtcacagttccgactccgagacggtcaaggagattatagtctgctaagattatgtaatctaaagtattttttaaaccgg

SEQ ID NO: 61193 - DNA, 2043 bp, Zea Mays
ctgcctgtcagctccctcccgctcactcgcgcaatccgtcgaactcgaacactgccatggccaccgccgctgccgacgacgatgtcaagctcgaatccttcctccaatggctccagtccaacggcgccgacctccgcagctgcacgatccgcgcatgcggcggcaagggcttgggggttttttccaccgccgcccccgagccgggctccaacgacggggtggcgatggtggtaccgctcgatctcgccatcacgcccatgcgggtgctgcaggacccactcgtcggcccgcgatgccgcgcgctcttagaggacggagtcgtcgacgaccgcctcctcgtcatgctcttcctcatggccgagcgccgacgccctggctcactctggaagccatacttggatatgcttccgagcacctttgggagctccctttggtttactgaggaagagcttgccgaactggaagggacaactttgcaccgagctacgttgattcagaggaagtcattgcaatcctcatttgatgagaaggttaaagggctcgttgaggagcttttgcatgtcgatgaatcagcaagctcagttgaagttttgtttgaggacttcctttgtacgagtctatgacagggcaaactcaatcttctggactcgagcactgaacataccattgcctcattcttatgtttttctgggctcatgtggcgatcaacaggccagggctgacaatgatgcccaccaggaaattgatattacagctaaggattgtagtgctgatgagaattctaaaccaagtaacacagagtcaatttgggttgagggccttgtcccaggaattgatttctgcaatcataatgtaaaggcactggcaacatgggaagttgattctgtgggaaatgctaccggaattcctgcttcaatgtacctcttgcttgctgataaaagtcctgctgagactggagcagagatctgcataaactacggcaacaaaggaaatgaggaactactgtacctttatggatttgtggttgacaacaatcctgatgattatctcatggttcattatcctttggaagctcttagacagatccagtctgctgatataaaaatgaagctactagagatgcagaagggagaattgaggtgcctcctacccagaagtttgcttgataatggattttttgtactctacgtactattgccatgcaagaacatgagcttgaacaggttgcttctttacttggagaggttggatatagtgaagacagagaaacatcttgtgcagcgatccaaagtgctatttgggaggtctgcggtgatcagggtgcactgggtttgcttgtggatcttctcggggtcaaaatggctgaacttgaagagggctctggaacagaagcatctgacgccgaactgctcgagcagttcgattccattcagccagaagactacgcgagtgaaagcggcgagaagcacgaaaggaagtcaaagacaaactaccgttcgtgtgtagtgtaccggagagggcaaaagcagctgacgaggctgttcctgagggaggtagagcatcttctggagctttctgcgaaagaacagagctaagagactctcatctggccctgcctgcatcaaggttagaactgcagggttgtgaaaggaggcacacccgttgcgaaagtagaataccgccttcgtttcgttcccttgcgaaagtactactactccgttccaggactacgatttcgtctcccgaggattccggattgcccgttggctgggcatttgtggaggagacgtcgtcttgcactttgctgccacggctaggctgtagctttacctgattcagcttgcagcggcggagctgcagcgaacagccatctagagacagctccagagctctggttttaccaaaatgcgtttcttttctagatgactttgccttcgtcagagatgcatctcctggtctcacgagtcacagttccgactccgagacggtcaaggagattatagtctgctaagattatgtaatctaaagtattttttaaaccgg

SEQ ID NO: 61194 - DNA, 2341 bp, Zea Mays
aaaaaactcaactacaatcaggcccacctgcctgtcagctccctcccgctcactcgcgcaatccgtcgaactcgaacactgccatggccaccgccgctgccgacgacgatgtcaagctcgaatccttcctccaatggctccagtccaacggcgccgacctccgcagctgcacgatccgcgcatgcggcggcaagggcttgggggttttttccaccgccgcccccgagccgggctccaacgacggggtggcgatggtggtaccgctcgatctcgccatcacgcccatgcgggtgctgcaggacccactcgtcggcccgcgatgccgcgcgctcttagaggacggagtcgtcgacgaccgcctcctcgtcatgctcttcctcatggccgagcgccgacgccctggctcactctggaagccatacttggatatgcttccgagcacctttgggagctccctttggtttactgaggaagagcttgccgaactggaagggacaactttgcaccgagctacgttgattcagaggaagtcattgcaatcctcatttgatgagaaggttaaagggctcgttgaggagcttttgcatgtcgatgaatcagcaagctcagttgaagttttgtttgaggacttcctttgtacgagtctatgacagggcaaactcaatcttctggactcgagcactgaacataccattgcctcattcttatgtttttctgggctcatgtggcgatcaacaggccagggctgacaatgatgcccaccaggaaattgatattacagctaaggattgtagtgctgatgagaattctaaaccaagtaacacagagtcaatttgggttgagggccttgtcccaggaattgatttctgcaatcataatgtaaaggcactggcaacatgggaagttgattctgtgggaaatgctaccggaattcctgcttcaatgtacctcttgcttgctgataaaagtcctgctgagactggagcagagatctgcataaactacggcaacaaaggaaatgaggaactactgtacctttatggatttgtggttgacaacaatcctgatgattatctcatggtaaccctcataatgatgttcattatcctttggaagctcttagacagatccagtctgctgatataaaaatgaagctactagagatgcagaagggagaattgaggtgcctcctacccagaagtttgcttgataatggattttttggtatccgttctagtgaagataaggatagcaagaaaaatactggtccgttttcaagttttagttggagtggtcaacgcaaagttccatcatatcttccaaaaattgttttccctcatgaatttatgagtactctacgtactattgccatgcaagaacatgagcttgaacaggttgcttctttacttggagagactttattctctaggcgtgaaactacactttttggagatgcagtgatcagtgtttcgttcgctacttctgaactgatctgttgataactgtgtactaaaaaggagtaggagactagtgactccgcacgttggatatagtgaagacagagaaacatcttgtgcagcgatccaaagtgctatttgggaggtctgcggtgatcagggtgcactgggtttgcttgtggatcttctcggggtcaaaatggctgaacttgaagagggctctggaacagaagcatctgacgccgaactgctcgagcagttcgattccattcagccagaagactacgcgagtgaaagcggcgagaagcacgaaaggaagtcaaagacaaactaccgttcgtgtgtagtgtaccggagagggcaaaagcagctgacgaggctgttcctgagggaggtagagcatcttctggagctttctgcgaaagaacagagctaagagactctcatctggccctgcctgcatcaaggttagaactgcagggttgtgaaaggaggcacacccgttgcgaaagtagaataccgccttcgtttcgttcccttgcgaaagtactactactccgttccaggactacgatttcgtctcccgaggattccggattgcccgttggctgggcatttgtggaggagacgtcgtcttgcactttgctgccacggctaggctgtagctttacctgattcagcttgcagcggcggagctgcagcgaacagccatctagagacagctccagagctctggttttaccaaaatgcgtttcttttctagatgactttgccttcgtcagagatgcatctcctggtctcacgagtcacagttccgactccgagacggtcaaggagattatagtctgctaagattatgtaatctaaagtattttttaaaccgg

SEQ ID NO: 61195 - DNA, 2282 bp, Zea Mays
gagggatgcggagactgctggagagcgaaacagtgcctgcgaccgtgcaaaatgcggatgcggagtggtatacggagggttgctggagttggtctaatggtaaaaaactcaactacaatcaggcccacctgcctgtcagctccctcccgctcactcgcgcaatccgtcgaactcgaacactgccatggccaccgccgctgccgacgacgatgtcaagctcgaatccttcctccaatggctccagtccaacggcgccgacctccgcagctgcacgatccgcgcatgcggcggcaagggcttgggggttttttccaccgccgcccccgagccgggctccaacgacggggtggcgatggtggtaccgctcgatctcgccatcacgcccatgcgggtgctgcaggacccactcgtcggcccgcgatgccgcgcgctcttagaggacggagtcgtcgacgaccgcctcctcgtcatgctcttcctcatggccgagcgccgacgccctggctcactctggaagccatacttggatatgcttccgagcacctttgggagctccctttggtttactgaggaagagcttgccgaactggaagggacaactttgcaccgagctacgttgattcagaggaagtcattgcaatcctcatttgatgagaaggttaaagggctcgttgaggagcttttgcatgtcgatgaatcagcaagctcagttgaagttttgtttgaggacttcctttgggcaaactcaatcttctggactcgagcactgaacataccattgcctcattcttatgtttttctgggctcatgtggcgatcaacaggccagggctgacaatgatgcccaccaggaaattgatattacagctaaggattgtagtgctgatgagaattctaaaccaagtaacacagagtcaatttgggttgagggccttgtcccaggaattgatttctgcaatcataatgtaaaggcactggcaacatgggaagttgattctgtgggaaatgctaccggaattcctgcttcaatgtacctcttgcttgctgataaaagtcctgctgagactggagcagagatctgcataaactacggcaacaaaggaaatgaggaactactgtacctttatggatttgtggttgacaacaatcctgatgattatctcatggttcattatcctttggaagctcttagacagatccagtctgctgatataaaaatgaagctactagagatgcagaagggagaattgaggtgcctcctacccagaagtttgcttgataatggattttttggtatccgttctagtgaagataaggatagcaagaaaaatactggtccgttttcaagttttagttggagtggtcaacgcaaagttccatcatatcttccaaaaattgttttccctcatgaatttatgagtactctacgtactattgccatgcaagaacatgagcttgaacaggttgcttctttacttggagaggttggatatagtgaagacagagaaacatcttgtgcagcgatccaaagtgctatttgggaggtctgcggtgatcagggtgcactgggtttgcttgtggatcttctcggggtcaaaatggctgaacttgaagagggctctggaacagaagcatctgacgccgaactgctcgagcagttcgattccattcagccagaagactacgcgagtgaaagcggcgagaagcacgaaaggaagtcaaagacaaactaccgttcgtgtgtagtgtaccggagagggcaaaagcagctgacgaggctgttcctgagggaggtagagcatcttctggagctttctgcgaaagaacagagctaagagactctcatctggccctgcctgcatcaaggttagaactgcagggttgtgaaaggaggcacacccgttgcgaaagtagaataccgccttcgtttcgttcccttgcgaaagtactactactccgttccaggactacgatttcgtctcccgaggattccggattgcccgttggctgggcatttgtggaggagacgtcgtcttgcactttgctgccacggctaggctgtagctttacctgattcagcttgcagcggcggagctgcagcgaacagccatctagagacagctccagagctctggttttaccaaaatgcgtttcttttctagatgactttgccttcgtcagagatgcatctcctggtctcacgagtcacagttccgactccgagacggtcaaggagattatagtctgctaagattatgtaatctaaagtattttttaaaccgg

SEQ ID NO: 61196 - DNA, 1120 bp, Zea Mays
aaaaatataattttctttttaataaatagaagaacatacctacaacaacttttgtcgaaaaggaatagaatgtacgtacctgcatagaccaagtttagcaagtacaaaatgaaacaaaaggtaaaatgccaattatacgcatacatgcttacctctttgacatgagcctccttcttagcttgaacataaatataatttttagatgatccaatgccatgactgactttatctgaaggtttgacttatcgatgatttttttgcatcagacaaatttgcagtctctctctcatgtccaatctgaagtcagagtatgtgctagtagagctgaagtaggccaataaacatccaagaaatgtaataagataaatcttgagcatacatcacatttgaccatccatataaatataatttttagatgatccaatgccacgactaactttatctgatggtctaagcaaaactgaatcttgagcaacctaaatgcagtaaactccaatgaataaatcaccccctaaaaatagaaacaagaattatgtcagtgtacctatcaccactcccaattagcacaaataagcatgcacactccaaggcctatagaatgttgctatacataagagagttaattcctgtgaacatgagcttctatttgaagcataaattttgtagcaaaaaaagtccatgcatatcaccttgtccagcaacgaggctccaaatgctcatacagctatagagaattgcacaaccgaccaccggtggtgggtggagcgagcctgcggagcgagcgtgaaacagtaaggattacagaaggggtggaccagtcaacggcggcaggtggagcgaggctgcttcgtaggcttgagacactacagtgagggaggatacgacggtggtgaggagcagctacgcggcgaggatgtcgtataccttgtggatggcgctctcctcgcacgagatccccgggcacagcgtctcgccggtccggacgccataggccttgcggacgaagccgtactgaagggcacgagggactgcatctctgcgacggcggtggtgaggaagcgtcactgtgaaaccctaggagaggaggggaaaggggagtgttctggtctggaagcgttag

SEQ ID NO: 61197 - DNA, 1364 bp, Zea Mays
tcctacaacaacttttgtcgaaaaggaatagaatgtacgtacctgcatagaccaagtttagcaagtacaaaatgaaacaaaaggtaaaatgccaattatacgcatacatgcttacctctttgacatgagcctccttcttagcttgaacataaatataatttttagatgatccaatgccatgactgactttatctgaaggtttgacttatcgatgatttttttgcatcagacaaatttgcagtctctctctcatgtccaatctgaagtcagagtatgtgctagtagagctgaagtaggccaataaacatccaagaaatgtaataagataaatcttgagcatacatcacatttgaccatccatataaatataatttttagatgatccaatgccacgactaactttatctgatggtctaagcaaaactgaatcttgagcaacctaaatgcagtaaactccaatgaataaatcaccccctaaaaatagaaacaagaattatgtcagtgtacctatcaccactcccaattagcacaaataagcatgcacactccaaggcctatagaatgttgctatacataagagagttaattcctgtgaacatgagcttctatttgaagcataaattttgtagcaaaaaaagtccatgcatatcaccttgtccagcaacgaggctccaaatgctcatacagctatagagaattgcacaacctaacatttaaaaccaagaagtaccaaaaaatcaaggcttgccgctcaaactcattattaagcgcaattattcaacaacaaccgctatgttatatgattattatatattggtatagattatggctaccatcgtcgacctaatgggaggaaaaaaacacgaataaatcacaaacataaacatggtgggtggcaagatgtctcgcccaaccacctgcttagccacccaaatttgagcacaccagcaaaccaaccgaagaatccaaagaaatctgggtacataccgaccaccggtggtgggtggagcgagcctgcggagcgagcgtgaaacagtaaggattacagaaggggtggaccagtcaacggcggcaggtggagcgaggctgcttcgtaggcttgagacactacagtgagggaggatacgacggtggtgaggagcagctacgcggcgaggatgtcgtataccttgtggatggcgctctcctcgcacgagatccccgggcacagcgtctcgccggtccggacgccataggccttgcggacgaagccgtactgaagggcacgagggactgcatctctgcgacggcggtggtgaggaagcgtcactgtgaaaccctaggagaggaggggaaaggggagtgttctggtctggaagcgttag

SEQ ID NO: 61198 - DNA, 1076 bp, Zea Mays
ccctcctctttgacatgagcctccttcttagcttgaacataaatataatttttagatgatccaatgccatgactgactttatctgaaggtttgacttatcgatgatttttttgcatcagacaaatttgcagtctctctctcatgtccaatctgaagtcagagtatgtgctagtagagctgaagtaggccaataaacatccaagaaatgtaataagataaatcttgagcatacatcacatttgaccatccatataaatataatttttagatgatccaatgccacgactaactttatctgatggtctaagcaaaactgaatcttgagcaacctaaatgcagtaaactccaatgaataaatcacccccttgtccagcaacgaggctccaaatgctcatacagctatagagaattgcacaacctaacatttaaaaccaagaagtaccaaaaaatcaaggcttgccgctcaaactcattattaagcgcaattattcaacaacaaccgctatgttatatgattattatatattggtatagattatggctaccatcgtcgacctaatgggaggaaaaaaacacgaataaatcacaaacataaacatggtgggtggcaagatgtctcgcccaaccacctgcttagccacccaaatttgagcacaccagcaaaccaaccgaagaatccaaagaaatctgggtacataccgaccaccggtggtgggtggagcgagcctgcggagcgagcgtgaaacagtaaggattacagaaggggtggaccagtcaacggcggcaggtggagcgaggctgcttcgtaggcttgagacactacagtgagggaggatacgacggtggtgaggagcagctacgcggcgaggatgtcgtataccttgtggatggcgctctcctcgcacgagatccccgggcacagcgtctcgccggtccggacgccataggccttgcggacgaagccgtactgaagggcacgagggactgcatctctgcgacggcggtggtgaggaagcgtcactgtgaaaccctaggagaggaggggaaaggggagtgttctggtctggaagcgttag

SEQ ID NO: 61199 - DNA, 1073 bp, Zea Mays
cactctttgacatgagcctccttcttagcttgaacataaatataatttttagatgatccaatgccatgactgactttatctgaaggtttgacttatcgatgatttttttgcatcagacaaatttgcagtctctctctcatgtccaatctgaagtcagagtatgtgctagtagagctgaagtaggccaataaacatccaagaaatgtaataagataaatcttgagcatacatcacatttgaccatccatataaatataatttttagatgatccaatgccacgactaactttatctgatggtctaagcaaaactgaatcttgagcaacctaaatgcagtaaactccaatgaataaatcacccccttgtccagcaacgaggctccaaatgctcatacagctatagagaattgcacaacctaacatttaaaaccaagaagtaccaaaaaatcaaggcttgccgctcaaactcattattaagcgcaattattcaacaacaaccgctatgttatatgattattatatattggtatagattatggctaccatcgtcgacctaatgggaggaaaaaaacacgaataaatcacaaacataaacatggtgggtggcaagatgtctcgcccaaccacctgcttagccacccaaatttgagcacaccagcaaaccaaccgaagaatccaaagaaatctgggtacataccgaccaccggtggtgggtggagcgagcctgcggagcgagcgtgaaacagtaaggattacagaaggggtggaccagtcaacggcggcaggtggagcgaggctgcttcgtaggcttgagacactacagtgagggaggatacgacggtggtgaggagcagctacgcggcgaggatgtcgtataccttgtggatggcgctctcctcgcacgagatccccgggcacagcgtctcgccggtccggacgccataggccttgcggacgaagccgtactgaagggcacgagggactgcatctctgcgacggcggtggtgaggaagcgtcactgtgaaaccctaggagaggaggggaaaggggagtgttctggtctggaagcgttag

SEQ ID NO: 61200 - DNA, 1320 bp, Zea Mays
atcagttgtcttaaatatacataagatatggttgctgttttgatgggcatgtttgctggttcaggaactcactactttatccctgtgtacttatagcagtccacaactgtgtatgtccttttgcccttgtttggatcttaataaagaaccatggaagtggcaagaggttccgcattttcctacttttcttttgcttgggtatatgtggaattgtggatcaactagcagtacttactgatcttttttgcagcttgtaatttttaaccgtccgttgttgcttgcttgcaaagactgcacctgacgatgaagtggtttgtgacgttgaagctttgaatcgatgcagatttgtggtacctgaagagggagacctgcacgaggttggagggccaccacatcgccgccggctccaccagataccgccggaaaactcccgcccaaccgaaccccatcacctgatgagggtacccaaccggccagttcatgcaagctcccgcttgtttggaggagaactaacaaactcctctcgtcccgtacctggctggtgaggatgaggaggagggcgatgaggaaggacatgtgctggccgtagaagacgcggacagaggtcacaagattcttggcgaacacggtgccggcgccggcgttggcgaagatggtgatgaggacatgctccttcacgctgaagggccccgggttgagggtgaactcgcacgggcggccgcggaagaaggcgcgctccggcagcgccgcggccatgaggcggccgacggggagcacggcgacctgcgccgacacggcggtgacggtgagcggctccttgcggtacccgaagaaggcgttgaggaaggagagcgcggcgcaggacgccgtgcccagcacccacgtccggaacgtcagcgccggcgtcgccgggtcgtcccacgccggcaccgtcagcgccacctgctcgatcggagagccgttgtcgtcccccgcttcagcctccttttcctccgccgagccatgcgggcgccgcgacgacggttgcactgcatgacaaggaacgggaataaagcaaacggagcggtagtgcggtccacttgccaccgcaacgaggaaacggagagctgggaaaggggagcattacgcagcggagaggtgatcagctggatgccatggcgatcgtgctcctctcccgcctcgtcgtgctcctccagttggtggacggacgacgccatgattgggttgggacttgggagttatgactgggacttggccggctgacagtggcaatagcagctgcaggtgttgccgtgctgggctcctttcagctgactcgtc

SEQ ID NO: 61201 - DNA, 1100 bp, Zea Mays
ctccttcgctccttctcatgaagtgccctgcttgtaatttttaaccgtccgttgttgcttgcttgcaaagactgcacctgacgatgaagtggtttgtgacgttgaagctttgaatcgatgcagatttgtggtacctgaagagggagacctgcacgaggttggagggccaccacatcgccgccggctccaccagataccgccggaaaactcccgcccaaccgaaccccatcacctgatgagggtacccaaccggccagttcatgcaagctcccgcttgtttggaggagaactaacaaactcctctcgtcccgtacctggctggtgaggatgaggaggagggcgatgaggaaggacatgtgctggccgtagaagacgcggacagaggtcacaagattcttggcgaacacggtgccggcgccggcgttggcgaagatggtgatgaggacatgctccttcacgctgaagggccccgggttgagggtgaactcgcacgggcggccgcggaagaaggcgcgctccggcagcgccgcggccatgaggcggccgacggggagcacggcgacctgcgccgacacggcggtgacggtgagcggctccttgcggtacccgaagaaggcgttgaggaaggagagcgcggcgcaggacgccgtgcccagcacccacgtccggaacgtcagcgccggcgtcgccgggtcgtcccacgccggcaccgtcagcgccacctgctcgatcggagagccgttgtcgtcccccgcttcagcctccttttcctccgccgagccatgcgggcgccgcgacgacggttgcactgcatgacaaggaacgggaataaagcaaacggagcggtagtgcggtccacttgccaccgcaacgaggaaacggagagctgggaaaggggagcattacgcagcggagaggtgatcagctggatgccatggcgatcgtgctcctctcccgcctcgtcgtgctcctccagttggtggacggacgacgccatgattgggttgggacttgggagttatgactgggacttggccggctgacagtggcaatagcagctgcaggtgttgccgtgctgggctcctttcagctgactcgtc

SEQ ID NO: 61202 - DNA, 1068 bp, Zea Mays
taccttttctccttcgctccttctcatgaagtgccctgactgcacctgacgatgaagtggtttgtgacgttgaagctttgaatcgatgcagatttgtggtacctgaagagggagacctgcacgaggttggagggccaccacatcgccgccggctccaccagataccgccggaaaactcccgcccaaccgaaccccatcacctgatgagggtacccaaccggccagttcatgcaagctcccgcttgtttggaggagaactaacaaactcctctcgtcccgtacctggctggtgaggatgaggaggagggcgatgaggaaggacatgtgctggccgtagaagacgcggacagaggtcacaagattcttggcgaacacggtgccggcgccggcgttggcgaagatggtgatgaggacatgctccttcacgctgaagggccccgggttgagggtgaactcgcacgggcggccgcggaagaaggcgcgctccggcagcgccgcggccatgaggcggccgacggggagcacggcgacctgcgccgacacggcggtgacggtgagcggctccttgcggtacccgaagaaggcgttgaggaaggagagcgcggcgcaggacgccgtgcccagcacccacgtccggaacgtcagcgccggcgtcgccgggtcgtcccacgccggcaccgtcagcgccacctgctcgatcggagagccgttgtcgtcccccgcttcagcctccttttcctccgccgagccatgcgggcgccgcgacgacggttgcactgcatgacaaggaacgggaataaagcaaacggagcggtagtgcggtccacttgccaccgcaacgaggaaacggagagctgggaaaggggagcattacgcagcggagaggtgatcagctggatgccatggcgatcgtgctcctctcccgcctcgtcgtgctcctccagttggtggacggacgacgccatgattgggttgggacttgggagttatgactgggacttggccggctgacagtggcaatagcagctgcaggtgttgccgtgctgggctcctttcagctgactcgtc

SEQ ID NO: 61203 - DNA, 2507 bp, Zea Mays
aaaaccagcttatacacaagaactaaggtgccgtttggttcacaaatttgtaacgtaatgggtaacgaataacgttaaatcatgtttgttttagtccaaccgtaatcagatactacactaaaaattgataccagcctattcaaatttgttaccaccagtaatcgaacgtaaaccattaccattaccatttgcgttacatttcttgaaccaaacagtacctaagaaattctgtgagaagccgagctgagctgatggtctgtatccaggttcattccggttcgtccctgctcccggtatcctcatgtgctccgtgctggcccgaccgccatcgcgtggccatggccgcccaacaggcccgccgtctgccgaatcacccactcgcccggggagcggggacgcacctcgtgcatgtttcttcgccaccccatgacgtcgcccccctcggcgcctcgcgcgagccggtgctcgtgattggtgaccccggcgtgctcgacgaaatgcctgaacgcgggggactgttccgggtgctgcagtgtagccccacgagcagcggttggtcggaactaggggacgcaggcatggctgcgccatctgtgctgtgcatgaggtgaactcgtggagggcctcgggagcgttagtgttcagcagatgatcgacctgtgctgacagctgacatgcgacaattaccaactgttacagtggtgctgcaatgctactcctgtcagactccagccatttgtattcattaatggctgctattcctgctgattagttctaatctgaatctggttagttcttatctgaaatacactcacacttctgactgtgtcttcatcatgtagttgagatcttttataatttggcaaagactacattgatctttgatggtgtcatcaagatataatctagttttatcccccagtactggcaatgattagaatactctcaattatgcaccagacatctatgtgaagttcaatgtgctttgcagcgtggcatgaagccatccatccaaaccattgtcctagcaaaaacttttgttctccactcctaggcatggatgcagcaataagggaacctctcaattatctgtatggttcagtgatctgtgcatatgtccctttagagataatgtaattctaccctcaaatactgaatggtgacctctctcagttatgcactggacatccatccacagttataccctttgcagtggggcatgaagcaagagggcatccgtccagatcattgccccaccagttcaaacttttattctccagtcccaggcatagatagagcaacacagccatgaacgccaaaccggcgtcaagggcacctgacagcagataattgtgtcgctcccaccagttacgccggtacttatagaccacgtaacctgacagaaacgcaacgagtatccacgtggtatagttggctgcagtggcaggtggcatgaaggtggttgcgccaatcagtacaggcgcattgacatgccggatccatttctgagctgggaatgccttgtgtgtacaccagacaaggaggggagcaatggcaccgcccaggaagaaccagttcacagcggagtaagtgcctaaatcaccaaatattctgcgtgggccgataaggccccataatacggatgcatcgtagaacacatgatcgtaagggcatgtccaagggctgcctgctgggagaagctctgtgttgcacacatcaggtattgtgtccaggagccaccatattgttccaaggtatacggagcccgcaatcaaagtgcccacaacctgttattttccaatatggacaacattatagatgtaactggagcatgtagttatcattcttttgttagtgtaatacttatagttggtgtggctagttgaactgacctgagccgtgaacatggcccttgggggtatcttcatgtagtggcccaacttaaaatcttgcaaaaactctagtgcttgatgtgggccaacgtagccgtatactttgaagcacatgttcgccatgggtcgtccgggatataggtaccccatgatgtactctgtgatgacattcaagcctggagcctgttacacttgtgttgttagctgtgttcctgctcctgggctgtatgttgctgctatatactatgtagttttgcacctgcattcatgtttgtttggagtccatacctggttggttgttgctttgagaattccaataggaagggtgtagaaaatggcaagggcacatgcaagcagtactccccaccaaggaagctgcagttgctcaatgtagtactcgcaggtaagcatggtggctgaaacactagccacaaggatgcagatgaaccaccactcggggacctgcctgtatctcctcataagcttgcagagtggaccaagatgggcaattgacagcaaaaaaagaaaataccttccatggaaaaggagaacgtgggaaaccgtcgcggtaaggcatgcaaaactaagaccgtagctggaagcgaagaacgtgct

SEQ ID NO: 61204 - DNA, 1426 bp, Zea Mays
ggacttgttggtaaagtggacttcactgtgaggcacctatcttcatcggtccagacatttccaaactcattttctggattctcaagtggccagccttgctttagtccattgactcgtcagtgtgcggcttctactgcaccggctaactcgcaaacaacttggacaatgcgtgctaccttccctgaatatgtggttgctcttactacaattgttggatctgtgcttttcacgatatttggtggtgtcggaattgcctgccttccattgggacttatattctcatttgttcgtcgtccaaaagctgtaattacacgctcacaatatataaaggaagcaactgaactgggaaagaaggccagggagttaaaaaaagctgctgaagccctacaccaagaagaaagaagtgggaacaagggccggaaatggcgcaaaaatgtgaaggctttagaaaaggagttattactcctggaagatgacatgaaggctctagaagagatgtatcctcaaggagaacaggctgaggctacttgggcattcacagttcttggtgattgctggggagatgatgcttggattgaagctagtttttatcacaattcacccgatgaaatggggaggcactttaatgaactccttcctgtttaatgttgggctcatactactttgctccatcagtgtgattcagttctgtgccacggcttttgcctactacgcacaagcaactgcagctcaagagatatttggccacactttgcaatcccttcgtggaattaagtatctttacaagtacaatgttttccagtatggctttgttgctcttgccatcctcactctcttctactatgctatatttggatggagaaagaggaaaccaacaggaagattccagctctcaaattgatttgctctgtaagtgaagtttgacggattcatcatatgtgccccctgagtggtagttcagttagcatcttagaaatgtatatgatcaacaaaaccaaaccaatccaaaccaaatcatcttcccaaagagttgaggaactgcaaatgatcaactctgagaccttaaaggccagaattatcaactctgagactttgaaggcaagaatggggcaactgttggttaccacggacatggatgttaaagtagaacccagttgactttgcaatgtacacatttcttgtatcggctcttcatttacgtctgtattatcgcttttatgattggatgatgatgttattcttgagagatgttcggtgtgtttgggggcgcttagcccccctttgatattcattcgtgttgggagttaggtcaattcattgcttttatatgtgttatatactgtgattacaatgcaagattctaggttgtattaatgatgccttgatcattcatgtgcttgtctgtgatcactgcttgtgtttcaac

SEQ ID NO: 61205 - DNA, 1495 bp, Zea Mays
ttactgtcgatagaaaaacacgtcactgcctcactggctgccatcttgctctgagtcagcgcggcaaccttctgcaccgcagcagctccagctctccaatggcttcccagctaccctccctcgccgcgccggcaggactgtgcctgctgtcagctcttgccgcagcgctgctggtgctcaccctctacgtcctgggcgccgtcgcgtcattcgctgtcttctgcgccggagagttcgcccggagagacccgggccggccgccgctcacggggacgatgctccggcagctcaagaacttcgacaggctgttcgacgagcatgtcaggtacgcgctggcgcatcgcaccagccggctggtctaccctggacacagcgagctcttcacagccgaccccgctgtcgttgagcatgtcctcaggaccaacttcagcaaatacagcaagggagcctacaatattggagtaatgaaggatctcttcggggatggaatttttgcaatagatggggatagctggaggcaccagaggaagctggcaagccatgaattctcaaccaaagtgctacgtgaattcagcagcgttgtcttcagagcaaatgctacaagactggtagataagatatcatctgcagcagctaacagaactattctaaacatgcaggatcttttgatgaaaacaactatggattcaatctttaaagtgggatttggtttcgagctgaacacgctatctggatcagataaatccagtgttcagttcagcaacgcctttgatgaggcaaactgtattgtctaccaccgctatgtcgatctgttctggcagctgaaacgttatttcaatattggatcagaagcgaagctcagaaagaacattcagatcattgatgactttgtgatgaatttgatacaccaaaagagagagcaaatgaacgggcaagataatgatggtaagatggcagaagacgatgatgtactacctaatggctataaagtgataaaaggagatggcatcaactacatgatttatgcaatggggaggatgacatacctctggggtgaagatgctgaagatttcaggccagaaagatggattgcaaatggagtcttccagcaagagagtccttacaagtttgtgtccttcaatgcgggacctcgcacatgcttggggaaggattttgcatataggcagatgaagatcatggcagccaccctgatacacttcttcaggttcaaactgacagatgaatccaaggatgctacatacaaaacaatgtttacccttcacatggataaagggctcaagctgtatgcgtacccacgttcaatttgaaatgaccaaacaagtttttttaatcatttgttactgttggagacatgtacatattccacaactatacttggggaggttggaaaaaactcactgagtataggtatgctgaataatgagtttattatgctccaattgccatctcaaagaatggactagaaccaaatatg

SEQ ID NO: 61206 - DNA, 2440 bp, Zea Mays
atgggcgcatggtgtgaccccttgtgttgtgagccacagcgtgggagacataaatcatatatacagatggaaataggaccgcttgatcatcatcaggcacaggcagtgcgagccgccgtcagctcgaaccaaattcctcgttccatttctcaagctcgtcccatttgctcttctgcaagcttggcctgatcaccgccatcgcgttcttgaaatcctcgtacttcaaaggtcgcaactgaagatacaaggttagagacagggtcaactgctccgcttgccgacattcccaagtttcactgggcaatgaatactaaggctatgttacctgtgaagatacctacaactacaatgcttgagctgctattttaacagtgataaaattcagaacaattgcacctaagttcagcctgtttaaaaacgtacctgatttgctttaatagcaagaatactctgtggcccgagctctcttattggcatcattgcagcttcttcgcacacggctctcaggtcacttccagaataccctacaaacaaacaaggttgtcagaaagcacatagctgatgtgtccaatacagccatatactagaaatgcgatataataccttcggtctccacaactaatctttcgaaatcatggtctgccagggatcagttccaggttggctaccgtgccaaacataaaaagactgtgctacatatacaaccaccacaatcaagtagttatacagagaaaccctggagcacttactcgacaatttgaatgcttgtcctttgagctgatttttcagaagtagcctccgtacgtttggatcaggtagtggcacatatattcttttcacctgtttatcagatagcaaaaacagtgacattcaagatatagggaaacaatgcatcatagtaaggtattaactaatgagaaaatgagtgcacagcagtccaccaatgatcccaaaggcccatatatcaactcctgactcattcactgactaataccacaccatacatatgttagaatagatcttaccagtcttcgaagaacagcatcatccaactcttgaggtttattagtagctcctggacagagaattgacatcaacaaaacatagataaaacaagaaaagataattcagcataaaaaacacttgtaatcctgtatataaataatgtcatgtcaaaaagaatccatacacagtgtacacagctaaccgagagttctcttttaaaatcagaccctataaaaagatgacaaaaataaaggtcatattgtggtaatgcaaagaacaatcattagtttccatgctcctttttctttactaaaaaagtaaacatgagaaaatgtggccgccaaaatctgagaaggtaaagtggcatattaattagactaatttagtgatgacaactcctgcccaataaggctcaaaactgtttcaaaaatgacagaccacagaactgacaccccaagaagcaaaaaaacgaagcaaaattcctacatatcctacccaaggttacttaagtaattgaagccaaataataggagttgaacttaagaatcattacattgaaattgaagtagctgccaaatactggatatcaaatccaaaatagcagaactgaatcaaatccaaaatacttgtaactatttgaaaactgaaaaaacttgtaccccaggagcacaagaggacgcctcacccccacctcaacatagcctaacaagtagaccattgcaccatgacaacctatcaccgaatatagggttagttaggcaatgagaaaaaaatcatatagtacagacctgttttaattgcactcaaaacaatctaggtacgtcacattacattatataagcgtacatgccaaacagtgaaagaacctagatgaaggcatcaaaattcagaaggtaacaaatatttaagctatgaaacaaaagtccgatacaagataacacggaattccagataacacacccacatgcagctagaagtccacaaactattaccttcttaggcactactgcagcagtggcacctgaaaaatcacagacaaggtaacacaaatgaactcccaaggaagtacagtgcacaagaaacccaggaaaaaacatatgctgaaacaaaataaggtttgaagcccttactcaacgacactgctgactaataatcagataacaaaataccaaacttttgaacagctcacacaagtgaatgtctagatgacagcgcatactttcaagcggataacagagtgaacaatggctgtagagtaggttatcctagatgcaaagcgcacatagctgataataacatttagcgaaatttgcagtggcttatcatagtggaactgaactggcaaaaaaaaaaaaggagcgcacaccttcagcacttctctgaccaagcactctgagccgctcctcgacctgcgcctgccacttggcgatcttct

SEQ ID NO: 61207 - DNA, 553 bp, Zea Mays
gcggctgcaatccggctgcggctgcggcttctacagtatttttctctctatggattgcagctgcagcagtccaaacagctgcaacagtgtcggcttgtagccagccgaacacgcccattaagtgttgtctgctatttttttacaacgcatagacgcaggtgttgctgcggatgcgatgctataggggggtttgtgttgtagtgatagtaaagatgtgacaatcgtttatatatcatgagttatcatatgtgtgaaacttgatcatatgtgtgagacttaattcgggatcgggtttatccttaaatttaggtgtcacaaagataagagaagaggttacagataaacaaacaaaatatacaacagctgtatacagacagcctagcaggcattatctatgtatgttgtacaacgcatatcagcagataagcctttagctttttgtgtttgtctttctagacaacgacgacacagatttcgcccttcggcccaagcagctccgagcctccgacctaataatctgtattgtgtgttgtttatttatgtcttaacttat

SEQ ID NO: 61208 - DNA, 369 bp, Zea Mays
atgcaggagaggtatattgctgcacactcagccaatgggggaaaagagatcagagaagaaggggggcagcagtggcgtcggatggaggcacaagagaagaaggggactctaccgttggactccggcaccagagaagaaggggagggtagcagcaccgtcggatgcctgcaccgaagaagaaggggagggcagcagcgccgtcggacgccagcaccgaagaagaaggggagggcagccgtcgggcaccggcaccaaagaaggagagggcagtcgtcggacaccgacaccggagaaggggatggtagttgtcggccgctggacgtccagagatcaggaactcgtgatcccctaccgcccttatgcatctga

SEQ ID NO: 61209 - DNA, 260 bp, Zea Mays
agcgccaggaagttctccgccgtgcgcggcacctggtcgcagaacacctcgcacttgatgtcgcccaggttcgtgtgcagcgtcaccgacatggcgcccgcgcggagcggagaaggccggagagggggaggcggcggggcgggattacgactaggaggcggccaggcaggcgacgggtcaaaatcaaattgtggtttgtgctgtgctcggtccggaggagactggtggagtctggaggaaggcgacgtgggccgtgttcg

SEQ ID NO: 61210 - DNA, 4314 bp, Zea Mays
cgtcaccggtagcgcgccgccgtcacctgcacagtgttccgctagggttcctccctcgcagctggttgcctggttcgtgccgtgtgtgcctgggcgttgctctgttggctcttggttgtgcagcttctgctcacgtggtgggaatcgggaaaaaggaagctggtctgggccgctgggcgaaatttcaatccagccagccaggctgatcgttcctaaactaattggacgattagtcgcgccgactaatcggatgatctgatcgcgtcgttacccttgatcgggagttacgatcagcccattaatcgcggctaatcggacgttctgaaaacatttaccaagtgcagaaagattgggagttgagacaggcagtgggttatcttctcccgttcgctagttctctcgctctcctggcgagacttggaccactgccaccatatgtcaggtacccaggtctttgtgagcaaggctaatgatttgtcctgttgatgctctaccatgatctaagaatgctcttcttcacttgccttcctgctgtatttgattctgggacctgggtcaatgtttgtgggactaatatgcctggtcagttgcatcccataagctcctgcccaagtgccatcgagatcaaagccataaaaatttccttatgggggcaatgatcaataaccatggctgacatatgcgcctttgagcaatcaaggctgctatgggtatcaaactggagcccttcctcttctctcctgggaaccttttcagttatgttctaatgatagtggttctgtccttggatggtcatgccattctgtgtgtgataaccagggcagctccacttataacatcaggacaagttgatctggtgctcggagatggtggggttaccagttaaatgattgagcaaaggcgaagctgagcccccctcaacacacacgcgcgcgcgcacacacacaacgaaaagggaagaagaaagcacattatgttgtatcttcacttcttctgttgagtatgttgttgctccatgttttctttccaaacctacatattttatgactccattacttttgttgcatttgtggaacacaccaatcatttacatttggattctgttcattagtaggttgagatgttccctagtttctgatgttgattctgctataattgtttgcgatagtattgttttgcttgatggaaactttttgataattttgttcatccagaatttatttcagtaatttcttgagttatgtctcagtactcctgttgtagctgggtgactttggacttaggagagcattgtgttttagcaattacttcctgtaggccatcacaactattataggcttgcaaggtgcatcattgatccattttggtagttcctatgcattcctttgttttccagatatttttttgttgcttatctgttgatcttcctttcttgtttggaactattcatcagcggctgtgatgtcaaatattaagatgaatgagcaaaggcgaaactgatccctcccccccttacccacccacccatacaaacaccccaaaagaagctgtgcagggtgcagcattgattcattttggtagtttctatacatctctttgttttttctgacgtttttttgttgcttatctgttgatcttgctttcttgtttggaactcttcttctgtggctgtgatgacgctctatgcattcctttattttctagatatttatttgtcgcttatctgttgatcttcctttcttgtttggaactactcttcggtggctgtgatgtcaaatgtcccatccccattgagctattactttttagcgtcttgaattgtttagggtttaggatttagggtttgatattgtgctcaatacactgttaaacttggatggcttgtaccatatacaagcaaccagtttgcaactgattgcctcattgccgtggcggtggtgtaccatatacaagcaaccagtttatttccaaatgaacaatcctattcaaaagttcatttagagtaggatgtgtcgtgttgatattggggcaaatctgagccgttcaacataatatttctctttctattctgtcatatactttcgtttgtgattctatttccttcattcatcctactttttcctgtgatttcaacttgggacatggatttcaagtaatgggatgaatgtgttgaattgtttagggtttaggatttagggtttggtattttgctcaatatattgttaaacttggatggcttgtaccatatacaagcaaccagtttgcaactgattgttgccattgctgtggcggtggtgtcgtttatatttccaagtgaacaatcctactcaaaagttcgtttagcgtgtggagggaggagttcatgtttcttctgcgagtgttgtgttgatgttggggcaaatctgagccattcaatgtgacattactctttctattctgtcatatacttttgtctatgattctatttccttcatgtatccttcttttgctgtgatttcaacttgggacctggatcatgataccgatgggacaaatctgagttcgatttgatgtcatataagattcttgactcgggtagatttgatgcatatattcttcatgtttttggttgggatgcccaagcttaactggatgagttgctcattttgttctaaagaatgattttatttcttctccacactcttatttactacttttattcttccaccaatacttataactggttccctaatgcgtctttacttctgtgtcctgaggcactagcttggaaatccctttgggtaactggcattggtgttagtggtcctaattttgtgccatggctttgatcaatctggattgatcaatccaaatgatagacatgctaaattattgtcatgagcttggttgtgctttttttggtcatgtttgtgaaaagcttctctacgtttgtgctgtttctatgctgttcacgcatgtatcgatctattttcccaagtgcagagacattgggagttatgatgcagagttgttggagagctttctttccatcctgccataaaaccaagattgggagtgtgtttctgggaactactggagatgctctgatagggagtagcgttcacaagcatgttttcactactactacttgatggatggaacatgtatactttcctcctaatgtgttgcagtggtgatcttcttttcttcccttttagtttcctgtgggacatttaaatttttttccatcttctctccttcaccccccttctttccttctcccttcctcttctccctgcgtgctctctctctctcccccctctcgtggcgatgactgggtggccgccaccaccctacgccaggtgcccaggtctcgttgggcccttcgccaggttttccaacccacccaaaatcatgcacttcctggcaacgagcacccaaccaggttttccaacccacccaaactctaacttaagctatctggtgtatttggatctgatctaattacaagtgtattcttggattatgcttactaactttgatcccttttaaagattatcacttatcaggcatacatgtggacacccatgttctttacttgatccacgcctgcagtcctgtgtgctttgatgtgctttgctctgaacgttcgtagcccttctgctcctcacccccacacctcggtggcacatggataggcagtgcatatgggatcagaatatgtgattatgagatataaagaggcagttttctggcttgggagaaagtaccagtggccattgcaagtgaaatttgcttagggtgaccgtgctgggcctggaaatgagcctgaacctatgaatggattgctgatggagggcaatgatgttctccctttttctgaattgcatgccattgagctgaccctctaccctcctgaagcatatttgatcagcgctttttgtttgtggttctgcctaggaagatcatttggatgtgacaaccagcacagttacacttagagcatctccaacagtaccttaaaagaaatactacgccagccccaaaagaaaagcacttctagaattgcttgtttattccaatgctgagtaacaattgcacttaggaagtagagaatgtaaaaaaatatactaaagctaggtggtcccatacctatatgtgcacttggtgtgggacgaaatttgaatgctagaagtgcacttattttgggacaaagggagtaatcctgaaaaatctgtttttgcaacctttccaatagatattaactagtagcggtcatccacatatctttgcccccccatgataagtagaggtcgtctgcatatctttgcgcgt

SEQ ID NO: 61211 - DNA, 6951 bp, Zea Mays
cggacatgagcgctctcactactctccttccctctacactcatatgactctcgaaccaaataaagaatcgaacggctccgatctattctactgttcaaccaaactctatttgactcttcaaccaaacgcatagccgctccgctctcctcttcccccactaccaaacgcaccgcttctcatagtggcataattccaaacttctccgcccatcctcctcccaaatctgaacctcgcataaaacctcgccgtctccgaccaaaccaccgctcaatcgttagtttaagtgtgaggccaccgcgtgtggccgggtgggcagcggcggcggcacatgcgaggcgctctaaacctgctgcctgatcccactcgcggcggccggtgaccacaccattgaaaccaacagcccttggaacaaaagcggcgatgaagaagggcaccgcagcttggcgccgggccggtttccgaccggcgctcgttgccggatccgcgcctccccggggccactctggtccccgccccgctgcgccgcgccggattgcggaccctgtggcgggcgacggttctgcggcggtaggggctggggttggggaccgtggcggcggggtccgtgccggcttctggtcggggccgtggtcgagcagcgcgggatctgagccgcctttgatggacctttttcgagccttttgttgcgaatgagtggttttggtatgctctctgactcttccttgccttgccgtcgccgttcgccgttcgccgttcttttggatgctagattgcaatctctccaggacggtggacggatgcagtagcatgctggatgtagcagtatgtatgtatgtatgtatgtgtgtgtgtgtgtgttcgcacattccctgaacccaaaccctagatcgaatcgagggcactgcgcggtccattctccggagcagccgtcgcgtcaggtgtccatccatacggtgccgcctcacagccgttacattgcttggcctcgaccatgcggagccgcctaggcggcttccgagtcaggtttggcctgccgcgctgccctcattcgctactcctgatggatttttgtcgacatgaggctctggccaacagatcgtgactgtttgtagactgcactaaggctgctggctgaggatgatcttatttccatttatcaaacggaaatttgttctcattcgcggtcgcggagcactgaaacccacagcccttgggaacaaaagcggcggtgatgaggaagggtgccgcggttggcgccgggcctgctcctgagtggaaactgtcctcagatccgtgcctccatggggctacccttgtccccgctccgccgctcctcatcagactgtgtacccttgggcgggtgactatgctatggtggctggggctagggttggggaccgtgggggtgtggtccttggcgcggttccagtcagggctgtgatctgtggtgacacgggatctgagccgtccttgatggactcttcttgagtcttggttgcgatgtttcgttttggtgcactctctatctctttgttgctaattattcttcaccatgtccttccatttcgggactggcagatcgatacgcctgtatatttccgtgcgattggattgatttttaccaagtgcggaaagattgggagttgagatagtgagtgggttttcttctcctgttcgctctgcctgctctctcgctcacctggtgagactaggaccactgccaccatatgtcaggtgccaggcctttgtgagcaagtttaataatatgtcctgttgatgctctaccacgatctaaggatgctcttcttcacttgcctaactattggatctgatcctgggacctgggtcaatgtttgtgggactaatataccaggtcagttgcatcccataagctcctgcctaagtgccatcaagaacaaagccataaaaaattccttacgggggcaatgatcaacaaccatggctgacataagcgcctatgagcaatcaaggctgctatgggtatcaaactggagccctccctcttctctcctgggaaccttttcagttatgttctaatgatagtggttctgtccttggatggtcatgccattccgtgtgtgataaccagggcagctccacttataatatcaggacaagttgatctggtgctaggagatggtggggttgccagttaaatgattgagcaaaggcgaagctgagcccccctcaacacacacacacacacacttctgttgagtatgttgttgctctgtgttttctttctaaacctacatattttatgactccattacttttgttgcatttgtgtaacacaccaatcatttacatttggattctgttcattagtaggttgagatgttccctagtttctgatgttgattctgctataattgtttgcgatagtattattttgcttgatggatactttttgataattttgttcatccagaatttatttcagtaatttcatgagttatgtctcagtactactgttggtgctgagtgcctttggacttaggagagatttgtgttttagcagttacttcctttgggccatcacaactattatagccttgcaaggtgcagcattgatccattttggtagttcctatgcattcctttgttttccaaatattttcttgttgcttatctgttgatcttccttttttttgtaactattcttcaacggctgtgatgtaaaatgccccagtcccatagatggcattagtggtactaatcgtgtgccatggccttgatgaatcttgattaatcaatcaaaatgatatacatgctaagttattgtcatgagtttggttgcgcttttttggtcatgttcgtgaaaagcttctctatgtttgtgctgttcatatgtgagcaggccattctttctatggtctgttcacgaatgtatcgacctattttctcaattgcagagacattgggagttgggaggagttgttggagagttctctttccatcctgccgaaaaaaccaaatttgggagtgagttttgggaactattggagatgctctgtgcatattttcactactgctgactgatggatggaacatgcatacttttctcctgatgcgatgcagtggtgattcagattcttcttgggcatttaaatttttttgccatattctctccttcactccccgcctttccttctccccttcctcttctccctgcgtgctctctgctctcgtggtgatgactgggtagccaccaccaccctaagtcaggtgcccagctctcgttgggcccttcgccaggtcttaaccgggcaattttctggcgccgagcacccaccaggtgtaccaacgccttctcttcccttcctgttgtgtggaactgagcacccaaactcttaagctatttggctatttccattcgtatcccttttaaagattatcacttatcagggcatacatggggacacccatgtcctttacttgacccgcgccttcagttctgtgtgctttgatctgctttgctctgaatgtaggtgttaggcagtgcaaatgggatcaggatatgtgatgatgatatataaagtggtggtttaaaagctttgatgaaattacctagtggccattgcaagtgaaatttgcttagggtgaccgtgctgggcatggaaatgagcctgaacctatgaatggattgctgatggaaggcaaggatgttctaccttttcctgaattgcatgccattgagcaagcgaggcagctgcgagtacctaactagagctgaccctctatcctcctgaagcatatttaatcagcgctttttgtttgtggttctgcctaggaagatcatttggacgtgacaatcagcacagttacagttagagcatctccaacagtaccttaaaagaaatactacgccagccccaaaagaaaatcacttctagaattgcttgtttattccaatgttgagtaacaattgcacttaggaaatagagaatgtaaaaaaactactaaagctaggtggtcctatacctatatgtgcacttggtgtgggacgaaatttgaatgctagaagtgcacttattttcggacagtgggagtaatcgtgaaaattctgtttctgcaacctttccaatagatttttttcttgaaccctcaagagatatgcacatcatttcattaagaagagcagaaaaaagatccataaataatcaatacagggagacaaaagaccccattacggtggccaaaaacaaagaaacaaaaagacacccatggtaggaaccaggaactaccctgacctaaagacctgggattggatgctctaagtgtaactgtgctggttgtcacatccaaatgatctttgtttttctgatgttttttgttacttgtctgttgatcttgctttcttgtttggaactcttcttctctggctgtgatgactgatgaccaaacaccctatgcattcctttattttctagatatttatttgtcgcttatctgttgatcttcctttcttgtttggaactactcttcggcggctgtgatgtcaaatgccccatccacttgaattgtttagggtttaggatttagggtttggtattgtgctcaatacaatgttaaacttggatggcttgtaccatatacaagcaaccagtttgcaactgattgtctcattgccgtggcggtggtgtaccatatacaagcaaccagtttatttccaaatgaacaatcctactcaaaagttcatttagagtaggatgtgtcgtgttgatattggggtaaatctgagccgttcaacataatatttctctttctattctgtctctttcttttctgtcatatactttcgtttatgattctatttccttcatgcatcctactttttcttttgatttcaacttgggacctggatttcaactaatgggatgaatatgtcaaagtttgatttgatgtcatatacgattcttgacctgggtagatttgatgcgtagattcttcgtgttttctaaagaatgattttatttcttctgcacactcttatttaactacttccattctttcaccaatatctataagggcttgttcgttttgctctcaatccatgtggattcgatgggattgagtgggtttcaatcccaaataagtcaaaatctttgatatttttttcaatcccatccaatccatatgggataggaataaccaaacaaggcctaagtgattccctaatgtgtccttctgtggcccgaggcattggcttggaaatccctttgggcaaccagtgttggcgttaatggtcctaatcgtgtgccatggccttgatgaatcttgattgatcaatcaaaaggatagacatgctaaattattgtcatgagcctggctgtgcttttttggtcatgttcgcgaaaagctcctctatgcttgtgttgttcatatgtgagcaggccatctgtttttatgtgttgttcacacgtatcggtttattttccaaagtacagagacattgggagtgggatgaattgttggagagctttctttccatcttgccaaaaaaccaggactgggatggtgaatagtggtgaaaacggtctggatatatctcgttccgttccgctctgatttctacattgacccattggacggaggagacattgggagttatgatgcagagttgttggagagctttctttccatcctgccataaaaccaagattgggagtgtgtttctgggaactactggagatgctctgatagggagtagcgttcacaagcatgttttcactactactacttgatggatggaacatgtatactttcctcctaatgtgttgcagtggtgatcttcttttcttcccttttagtttcctgtgggacatttaaatttttttccatcttctctccttcaccccccttctttccttctcccttcctcttctccctgcgtgctctctctctctcccccctctcgtggcgatgactgggtggccgccaccaccctacgccaggtgcccaggtctcgttgggcccttcgccaggttttccaacccacccaaaatcatgcacttcctggcaacgagcacccaaccaggttttccaacccacccaaactctaacttaagctatctggtgtatttggatctgatctaattacaagtgtattcttggattatgcttactaactttgatcccttttaaagattatcacttatcaggcatacatgtggacacccatgttctttacttgatccacgcctgcagtcctgtgtgctttgatgtgctttgctctgaacgttcgtagcccttctgctcctcacccccacacctcggtggcacatggataggcagtgcatatgggatcagaatatgtgattatgagatataaagaggcagttttctggcttgggagaaagtaccagtggccattgcaagtgaaatttgcttagggtgaccgtgctgggcctggaaatgagcctgaacctatgaatggattgctgatggagggcaatgatgttctccctttttctgaattgcatgccattgagctgaccctctaccctcctgaagcatatttgatcagcgctttttgtttgtggttctgcctaggaagatcatttggatgtgacaaccagcacagttacacttagagcatctccaacagtaccttaaaagaaatactacgccagccccaaaagaaaagcacttctagaattgcttgtttattccaatgctgagtaacaattgcacttaggaagtagagaatgtaaaaaaatatactaaagctaggtggtcccatacctatatgtgcacttggtgtgggacgaaatttgaatgctagaagtgcacttattttgggacaaagggagtaatcctgaaaaatctgtttttgcaacctttccaatagatattaactagtagcggtcatccacatatctttgcccccccatgataagtagaggtcgtctgcatatctttgcgcgt

SEQ ID NO: 61212 - DNA, 6245 bp, Zea Mays
cggacatgagcgctctcactactctccttccctctacactcatatgactctcgaaccaaataaagaatcgaacggctccgatctattctactgttcaaccaaactctatttgactcttcaaccaaacgcatagccgctccgctctcctcttcccccactaccaaacgcaccgcttctcatagtggcataattccaaacttctccgcccatcctcctcccaaatctgaacctcgcataaaacctcgccgtctccgaccaaaccaccgctcaatcgttagtttaagtgtgaggccaccgcgtgtggccgggtgggcagcggcggcggcacatgcgaggcgctctaaacctgctgcctgatcccactcgcggcggccggtgaccacaccattgaaaccaacagcccttggaacaaaagcggcgatgaagaagggcaccgcagcttggcgccgggccggtttccgaccggcgctcgttgccggatccgcgcctccccggggccactctggtccccgccccgctgcgccgcgccggattgcggaccctgtggcgggcgacggttctgcggcggtaggggctggggttggggaccgtggcggcggggtccgtgccggcttctggtcggggccgtggtcgagcagcgcgggatctgagccgcctttgatggacctttttcgagccttttgttgcgaatgagtggttttggtatgctctctgactcttccttgccttgccgtcgccgttcgccgttcgccgttcttttggatgctagattgcaatctctccaggacggtggacggatgcagtagcatgctggatgtagcagtatgtatgtatgtatgtatgtgtgtgtgtgtgtgttcgcacattccctgaacccaaaccctagatcgaatcgagggcactgcgcggtccattctccggagcagccgtcgcgtcaggtgtccatccatacggtgccgcctcacagccgttacattgcttggcctcgaccatgcggagccgcctaggcggcttccgagtcaggtttggcctgccgcgctgccctcattcgctactcctgatggatttttgtcgacatgaggctctggccaacagatcgtgactgtttgtagactgcactaaggctgctggctgaggatgatcttatttccatttatcaaacggaaatttgttctcattcgcggtcgcggagcactgaaacccacagcccttgggaacaaaagcggcggtgatgaggaagggtgccgcggttggcgccgggcctgctcctgagtggaaactgtcctcagatccgtgcctccatggggctacccttgtccccgctccgccgctcctcatcagactgtgtacccttgggcgggtgactatgctatggtggctggggctagggttggggaccgtgggggtgtggtccttggcgcggttccagtcagggctgtgatctgtggtgacacgggatctgagccgtccttgatggactcttcttgagtcttggttgcgatgtttcgttttggtgcactctctatctctttgttgctaattattcttcaccatgtccttccatttcgggactggcagatcgatacgcctgtatatttccgtgcgattggattgatttttaccaagtgcggaaagattgggagttgagatagtgagtgggttttcttctcctgttcgctctgcctgctctctcgctcacctggtgagactaggaccactgccaccatatgtcaggtgccaggcctttgtgagcaagtttaataatatgtcctgttgatgctctaccacgatctaaggatgctcttcttcacttgcctaactattggatctgatcctgggacctgggtcaatgtttgtgggactaatataccaggtcagttgcatcccataagctcctgcctaagtgccatcaagaacaaagccataaaaaattccttacgggggcaatgatcaacaaccatggctgacataagcgcctatgagcaatcaaggctgctatgggtatcaaactggagccctccctcttctctcctgggaaccttttcagttatgttctaatgatagtggttctgtccttggatggtcatgccattccgtgtgtgataaccagggcagctccacttataatatcaggacaagttgatctggtgctaggagatggtggggttgccagttaaatgattgagcaaaggcgaagctgagcccccctcaacacacacacacacacacttctgttgagtatgttgttgctctgtgttttctttctaaacctacatattttatgactccattacttttgttgcatttgtgtaacacaccaatcatttacatttggattctgttcattagtaggttgagatgttccctagtttctgatgttgattctgctataattgtttgcgatagtattattttgcttgatggatactttttgataattttgttcatccagaatttatttcagtaatttcatgagttatgtctcagtactactgttggtgctgagtgcctttggacttaggagagatttgtgttttagcagttacttcctttgggccatcacaactattatagccttgcaaggtgcagcattgatccattttggtagttcctatgcattcctttgttttccaaatattttcttgttgcttatctgttgatcttccttttttttgtaactattcttcaacggctgtgatgtaaaatgccccagtcccatagatggcattagtggtactaatcgtgtgccatggccttgatgaatcttgattaatcaatcaaaatgatatacatgctaagttattgtcatgagtttggttgcgcttttttggtcatgttcgtgaaaagcttctctatgtttgtgctgttcatatgtgagcaggccattctttctatggtctgttcacgaatgtatcgacctattttctcaattgcagagacattgggagttgggaggagttgttggagagttctctttccatcctgccgaaaaaaccaaatttgggagtgagttttgggaactattggagatgctctgtgcatattttcactactgctgactgatggatggaacatgcatacttttctcctgatgcgatgcagtggtgattcagattcttcttgggcatttaaatttttttgccatattctctccttcactccccgcctttccttctccccttcctcttctccctgcgtgctctctgctctcgtggtgatgactgggtagccaccaccaccctaagtcaggtgcccagctctcgttgggcccttcgccaggtcttaaccgggcaattttctggcgccgagcacccaccaggtgtaccaacgccttctcttcccttcctgttgtgtggaactgagcacccaaactcttaagctatttggctatttccattcgtatcccttttaaagattatcacttatcagggcatacatggggacacccatgtcctttacttgacccgcgccttcagttctgtgtgctttgatctgctttgctctgaatgtaggtgttaggcagtgcaaatgggatcaggatatgtgatgatgatatataaagtggtggtttaaaagctttgatgaaattacctagtggccattgcaagtgaaatttgcttagggtgaccgtgctgggcatggaaatgagcctgaacctatgaatggattgctgatggaaggcaaggatgttctaccttttcctgaattgcatgccattgagcaagcgaggcagctgcgagtacctaactagagctgaccctctatcctcctgaagcatatttaatcagcgctttttgtttgtggttctgcctaggaagatcatttggacgtgacaatcagcacagttacagttagagcatctccaacagtaccttaaaagaaatactacgccagccccaaaagaaaatcacttctagaattgcttgtttattccaatgttgagtaacaattgcacttaggaaatagagaatgtaaaaaaactactaaagctaggtggtcctatacctatatgtgcacttggtgtgggacgaaatttgaatgctagaagtgcacttattttcggacagtgggagtaatcgtgaaaattctgtttctgcaacctttccaatagatttttttcttgaaccctcaagagatatgcacatcatttcattaagaagagcagaaaaaagatccataaataatcaatacagggagacaaaagaccccattacggtggccaaaaacaaagaaacaaaaagacacccatggtaggaaccaggaactaccctgacctaaagacctgggattggatgctctaagtgtaactgtgctggttgtcacatccaaatgatctttgtttttctgatgttttttgttacttgtctgttgatcttgctttcttgtttggaactcttcttctctggctgtgatgactgatgaccaaacaccctatgcattcctttattttctagatatttatttgtcgcttatctgttgatcttcctttcttgtttggaactactcttcggcggctgtgatgtcaaatgccccatccacttgaattgtttagggtttaggatttagggtttggtattgtgctcaatacaatgttaaacttggatggcttgtaccatatacaagcaaccagtttgcaactgattgtctcattgccgtggcggtggtgtaccatatacaagcaaccagtttatttccaaatgaacaatcctactcaaaagttcatttagagtaggatgtgtcgtgttgatattggggtaaatctgagccgttcaacataatatttctctttctattctgtctctttcttttctgtcatatactttcgtttatgattctatttccttcatgcatcctactttttcttttgatttcaacttgggacctggatttcaactaatgggatgaatatgtcaaagtttgatttgatgtcatatacgattcttgacctgggtagatttgatgcgtagattcttcgtgttttctaaagaatgattttatttcttctgcacactcttatttaactacttccattctttcaccaatatctataagggcttgttcgttttgctctcaatccatgtggattcgatgggattgagtgggtttcaatcccaaataagtcaaaatctttgatatttttttcaatcccatccaatccatatgggataggaataaccaaacaaggcctaagtgattccctaatgtgtccttctgtggcccgaggcattggcttggaaatccctttgggcaaccagtgttggcgttaatggtcctaatcgtgtgccatggccttgatgaatcttgattgatcaatcaaaaggatagacatgctaaattattgtcatgagcctggctgtgcttttttggtcatgttcgcgaaaagctcctctatgcttgtgttgttcatatgtgagcaggccatctgtttttatgtgttgttcacacgtatcggtttattttccaaagtacagagacattgggagtgggatgaattgttggagagctttctttccatcttgccaaaaaaccaggactgggatggtgaatagtggtgaaaacggtctggatatatctcgttccgttccgctctgatttctacattgacccattggacggagggcattgttttgtataaaaaaacttgccggggaggaatagaccgtcctcccggtttggctggcactcaaggcgcacacacccccttcacgggctgaagaagagaaggtcccgaacgagaaaatcctgacccccatcactcacgggtctaccggcccaaggcagcagggacatgcccaaggcagcagcgacatgccagtgtctgctagttctgaaactagtttttattgtgccagatatcagttgcgagtttagtctatatagatcctcaaatgaagtaattacacaggtattaggtcgtggcaacccattgtcatccaatcaggctgtatatgttcgatgcggtatccggttgcagaccgtaagaattatattttctatttgtcttttgatttggttttcctctaaacttgtgggccctattgggatggcaatgggtgagtttggtgtaaggatggtagcatgtggagtttgggtcggttagagtaaaaacctatatgcggtcttacctacctaaactggcatgtgatcacacccgggtgtaattacaaacttgcactcgaccttgctactcgtaggttttacttaatgtattcttttaaataataattgaacataagcaattaaat

SEQ ID NO: 61213 - DNA, 1192 bp, Zea Mays
gcttctcatagtggcataattccaaacttctccgcccatcctcctcccaaatctgaacctcgcataaaacctcgccgtctccgaccaaaccaccgctcaatcgttagtttaagtgtgaggccaccgcgtgtggccgggtgggcagcggcggcggcacatgcgaggcgctctaaacctgctgcctgatcccactcgcggcggccggtgaccacaccattgaaaccaacagcccttggaacaaaagcggcgatgaagaagggcaccgcagcttggcgccgggccggtttccgaccggcgctcgttgccggatccgcgcctccccggggccactctggtccccgccccgctgcgccgcgccggattgcggaccctgtggcgggcgacggttctgcggcggtaggggctggggttggggaccgtggcggcggggtccgtgccggcttctggtcggggccgtggtcgagcagcgcgggatctgagccgcctttgatggacctttttcgagccttttgttgcgaatgagtggttttgatcgatacgcctgtatatttccgtgcgattggattgatttttaccaagtgcggaaagattgggagttgagatagtgagtgggttttcttctcctgttcgctctgcctgctctctcgctcacctggtgagactaggaccactgccaccatatgtcaggtgccaggcctttgtgagcaagtttaataatatgtcctgttgatgctctaccacgatctaaggatgctcttcttcacttgcctaactattggatctgatcctgggacctgggtcaatgtttgtgggactaatataccaggtcagttgcatcccataagctcctgcctaagtgccatcaagaacaaagccataaaaaattccttacgggggcaatgatcaacaaccatggctgacataagcgcctatgagcaatcaaggctgctatgggtatcaaactggagccctccctcttctctcctgggaaccttttcagttatgttctaatgatagtggttctgtccttggatggtcatgccattccgtgtgtgataaccagggcagctccacttataatatcaggacaagttgatctggtgctaggagatggtggggttgccagttaaatgattgagcaaaggcgaagctgagcccccctcaacacacacacacacacacttctgttgag

SEQ ID NO: 61214 - DNA, 3651 bp, Zea Mays
cccagccgccgccccatcgatcctcagcttcctccccatccctcttccttgtcgccgccccatccatcctcctcgtcgatcggcatcttgctgcttggccctaatcaagatgccctctggaaggttggtcgcacataccttgatggtaaggggctctttcgattattctctcagtaattgcccccaccgcgtcacccgccgtcgtgccttgctgcacgctcctttcccatccgcaacaaccaaccttgcatcgaaaggtggaaatgacgacaacaatctccaatctactgtccctctaatctctaatctgctagcatcgacctccaatctgcttcccatctctgtcctcttccgaacatagtggaaatggtgacgctggtgctagagtgggctaccaaggagccctgcctcatgaccatgggggttgatgaggcaggtcatggccctatccttgataaacacttgtctttcttctgaccggttaatatgcaatattgctttttttgagttttcttactacattgtatgtataaatgttcattatgtttgaggtcctggaggtttcatgggctcatttctctaatgaaatggatgctacaaaggatttagtaaaatggatgctacaactcgatactagagaaggccctgcttggtaaacgctaccatgcaattttgagaaatctctttgaattgtttgacatcatcttatagctttggagccgtgttgatcgatggttcaaacgaatatatgagttgcagctaaggttagattattgcagaatcatatattgttattccatctttactttaaaatcttatctcatatatattgtttgatttactccaaagtttcatttttaccgcatgggaaggggtcaaccaaaaccaaaatctaaggatacaggttcatggcttgatagcgacagaaaatctatgcccaaaaatgttggttccggttttcccatagtagtgaattcatatgagatggccctgtatgatgctaaatttcttgctgcccataagtggaagtatgttgttgttaatgaggtgatggaaaacatattttctaaattatcacccatttgttttctccttttttgtatttacatgtcagttccatatttctttctctagggcatcggtcgaaaaattctaagtgtctattattaagggagctgaagcgcgtaccaatgtataataagctttttttacttggcaccccttctgtataatctagcgtagctctggtcactattgaacttcattttgcccattatattctcatcaaatcaagaacatgtcatgatataattcacacacgctttcctatttgcccctttcagtattttattcatgttattcaattcgtacttgcaactgatttatgccaacatgactaaacatcgtaaacaaatccaacgtcacttggttgaaaaaacatttgataattacttgcatgaggaatgagatattagtatgttgtcataataatgcttacatatttatgtagacttgtagtaatccagttgttggagacttgttctcaaatgctatgagttaagaaacaaggcaacacaaatgttaatggttaaaggttcttcgtccttcgaagcattatttttcttaggatataatgatcttcggacgaaggttatgaaggacttaccttcatcatcacaacatgtgttaatgaaagaagaagcatatgaaacatataagagacaatatgaataatcatatgacattattaatataccttctttatattaacatgaatagacagaaacaatattgaattacatttgtaccttcggcttggtagaaggtaaaagtccaagcgtgactcataaaatgaatacaagtcagcgtgaacagtacgggggtactgttcatctatttataggcatagggtgcagcctgtgtaaatttacattcatgcccttcatactttctattgtcttatggacaacccaatggggactagatagtcttttcctctttaagttggttcctttttccgccgttgtgccaaagctcccttgcgcgtagcttcggagcagtatgcgtcttcgtctcggtcacacttttcacatcgtatatagttttggtccaagtccgaaggtacctgttcacgtgttacacttggaaagcattgttaaatcatgtttttgaggaccttcggaagacgaaggcccccaacagtagcccctcgcagtattaatatgttaagataacgaattcagactgcgacatgaacgaagaccttaagccgaaggtccgaaaaaacaccttccctttgctagaatagcaataaacaatgacagatgggaccctccacttttgcatcgcgctgggcatataaataagaactcacaccagctgcaattgatacgctgcttgtgccatttgcattattttctcaattttatagctcttgctcactagcgcttgctagattttcaagctctctgagcttcggttcaaaagacacgttttcaccatatctggagaaaaatgtctccgaaaaagaaggttgctgcggagacgaagctaactaaagaggcgaagctgtttgaggagaagaaggctgtggatccttatattgctgtatttgttaagtcgatggcaaaaacaaacacagagaaaattactaaagagatactggaaggcttatctgaagatactggtgacaatgatagctatgatgtgggaagtggggatgaagattctgaggatcggccctggaggccaagtcattcaatcttcggaaaatcgaccatcaaaaagagtcatcttgaaaacatgagaggaaggtactttcaggatatgtctactgtgagggctggtggagacaacaacgtctctgcccctgaagaaaacgaagttgttatttaccgaagcttcttcagggctgggcttcggttccctttgagcaagtttgtagttgaagtgttgaaaacctaccagatcttcctccatcagattacccccaaagctataataaggatggagatttttgtctgggaagtaaggagtcaagggctagagccaagcgcaaagtgcttctgcagtatgcacgaacttctatatgagacaaaggccatgggtaaagaacagtaccacaacaacttcagttgttatggttttatcgctcgccctaacgcaagccacccggtgccaacattttggaagagatggcctggagcttggatggaagaatggttttatgtgaagaatgatttgaaagcgagggaagacattaaggaagtcatcatgcgccccatttggtctcgcttcggcctccgaaggctgaagatagaaattgatgagacaattgaagagtgtcagagggccttcatcactatttgctcctttattggaacaagagatttaattcaagaacatatagcctttagggtatggccacttgtagatagctgggaaatgccgaaggagaccattactgactctagcgaaggtggtttgatccgactgaagtataccttcaggttcggagataagtttgatgaaccagatgatgactggctgaagtgtatcgaggctacaagtgacgaactgcttggagcatattccaaggcagaagataacgcgctgtccgtagccttcgaaggtcggggaaagaaaagactg

SEQ ID NO: 61215 - DNA, 2208 bp, Zea Mays
cttatccgcgccgcgtcctcccgtccccttccactcatcagaaacccccgcaccctctaactaaaccctcaccggccgccacccatggcgatggccggcgccgccgccgccgccgccggtcgctgcctcctcctctcccgcccgtcccccctccggctccgcctcctccacgctgccctctccaccgccgcccccaccctcggccccacctccactccggctccccctccgcggcacgagctcctcctcgagcgcctccgcctccgccacctaaaggacgcctcctcccccggcgccccgaggcctacctcgaggagctcggagcggagctcgcagcaggggaaggggaagagggtcgaggccgcggagagcttcgaggagctcggtctcggggaggaggtgatgtccgcgctgggggagatgggcatctccaagcccacggagatccagtgcgttggcgtgccggcggtgctggccggaaccagcgtcgtgctcggctcccacaccggatccgggaagacgctcgcctacttactccctcttgttcagctacttcggcgtgatgaggcaatgcttgggatgtcaatgaagccaaggcgtccaagagcagtagtactctgccccaccagggagctaactgagcaggtttatcgagtagcaaagtctatcagccatcatgcacgttttcggtcaacgatggttagtggaggcacccgtctaagaccccaggaagattctttgaacatgcccgttgacatggtcgttggcactcctggaaggattcttgatcatatcaaggatggtaacatggtttatggtgatattaagtatctggttctggatgaggcagatacaatgtttgatcaaggctttggaccagacatacggaagtttcttgctccgttgaagaatcgtgctgcaaagcctgatgatcaaggtttccaaacagctgtgcaaaagttgattgatgaggaatttgaaggtattgtccatttgcggacatcatcatttcaaaagagagtttcaacagcacggcatgactttatcaaactttctggagcagaaaacaaacttgaggctcttctgcaggttcttgagccaagcttgggcaaagggaaacaaagttatggtgttctgtaatactttaaattcaagtcgtgcagtggatcattttttaactgaaaatcatatatccactgttaaactatcatggagaggttccagctgaagagagagttgagaacctgaacaagttccgcaatgaagagggggattgtccaacattagtatgcactgatctggcagctagaggcctggacctggatgttgaccatgtcatcatgtttgacttcccatcgaattctattgattaccttcacagaaccgggagaactgcacgcatgggagccaaagggaaagttacaagcattgtggctaagaaggacgtagctttagctacacggattgaagaggccatgaagaaaaatgagagcttggaagctctcacgactaacaatgtcagaaggccaaccagctcgcagagtgtgaacacgaaagggaggccctcaaggttggttaagacttcaaatgctcttaaagttgtcagtcagaagggtagaaggggagtatcgctatctagcaggtcatcccgggctccccaaggatacaacttcaacccgaaggcgctcgccaccgaagagccaggcaaaggcaacaaaatcgtcagcccctcggaaagccaagccggtgaaacccactcagagcagcgcaaaggtctcgaagagcaaagcaaaacctgaggggcgaagatcaaagagtgacactctgaacaagctgggaactaagctcagtgtggttggatttagagggcgcagctcaggcaaatcagcacaatcttcataaggctttggtatttttttttattattgttatgctaaaaaggttcttggaggatttgcagcctgtaaatatctgagactaagtttcatcatttctttttctccttgcgggtttataagtgaagaccacaatctgagatatgaacgcagcactgctatgtaatattgtactgcactcagcagaatgttggaagaatacttttcattaccgcctcgtttggatcattggaattgaattccattctaataatagtaatttaggcatatatcaattaagttaattcggttttatgtaaaatatatttgtata

SEQ ID NO: 61216 - DNA, 512 bp, Zea Mays
agatgttggcaaaaagccagtgatagaggtcattgttgtgcgatccaaacccgaattcgcccgctaactctgaagccgcccgcatgttcagcgagaacaagcgagagtacaaccgcaaagttcgggaggtcgtggagcagagctggacggcggactgatgatgccctgtgttgcgtcgcgctgtgctgcgcagctgctcactgcgccccgcgtccgtccattccataccaaaaaaagaaaatggcaaagccgaactcagctgttgctgctttcgttgccctgtgtcaagacgactgcttctctatgaacattttaccttcctgtgctgtatctggaatacaaacttaattatctctagcactgtggcaacatcttatcttatatgaaatttcctccgggaaaacgagaatgatttgcttgggtgattatttcatgaccagccaggttgctgtactaaactatggtacttatttcagctaattttgaatttgaactgctctccgtcttaaatt

SEQ ID NO: 61217 - DNA, 2276 bp, Zea Mays
ggaggcgccgccctgcgctctctggcgctaatggcgccgccgcgtccacccacaggaccgatcctcttcctgcccctcgtcttcctcttcctctttaccaccgccgcggcgtctgcggcggcgcctgaggatgaaaagttcactgaggagctgctcctgcggccgctcccggaccgcaaggcactggcacacttccacttccgctcctctgcgccccccgctgcctccgttggtcggcaccaccacctcttccccaaggccatctcccagctggttaagaaatatcatattagcgagttggagctatctttcacccagggaagatggaactatgagcagtggggtggatttgatcctatgtcaactaataatgcaaagcctcctggtgttgagctgtgggcagtttttgatcttcctttgtctgagatcgatgcaacatggaagaacctgacacatacactctctggcctgttttgtgcatccatcaactttttggagtcctccactgcattttctgctcctcgctggggcttcaaactgaacgaaggcaatttgcgatatggtgcattgcctcgtgaagcagtatgcactgagaatctgacaccttggttgaaacttcttccatgtcgtgacaaagctgggatagcttctttgctgtacaggccttcaatttacaaaggatattaccattcacaaaaactgaaactgagatcctcccagtcacttggtattattcttgatcaaactctgactgttgtgctgcaaccaaataatgtacatggcgaacagctacattccaatcatggtcaacttcagcccaactggtccatgagacatcttttcaacagaaagttgtcagggaaatgccttgtttctaaatccagcagagtattcattgaggttgataaaggcattgctgacgaagttaacatatctggaagtgttcattcttggagtaatgaattctttgtattgtccaatagcccggacaagttgatcaaaggtcaaaatcacttagaaatgcaatcttcttttttatatgtttatgatgctagtaactacagtgaggaacaacctttggatttgggcataacttggaagcttcccctgatatggacttgcaccccatcaccttttcatgcaagcagatttcttatgggcagtggcaatgaaagagggtcaattgctctgtcgtttatgtccactaatcttcataagaagatatctggcagcgcaaatgattgttcaataaaggcagttattttccaggttgttccatggtatgttaaggtctattatcacagcctagaaatatttatagatgggagcaggaagactgtgtcagaagtagttgacaagattcatgtcattccttcagaagacaagcttttgcctggtaccttggagatgctactaagattcccttgcagtatgcagtcgggaactctgacattggattttgacaaggggttcctgcatatagatgaatatcctcctgatgctaatcaaggatttgacattccttcagctttggttagctttcctgagttcagttctgctcgaagttaccctgaaattgatccagtacttggatcacctttactagaaaatttccaggaagatagtgttgtgaagtcgtatacagaagtattgctcgttcccctgacaactccggatttcagcatgccatacaatgtcatcaccttcacatgcactgtcttagctctttactttggttcattattgaatgctttgagacgaaggattggcgaggaagagagggagttgaagaaaagagccacaaggcatgggctcatttctcggttgctagccaagttaagggggcagaaggtggatccatcggagtcagggtcttcatttgaatcgactgggtcaaagaagctgctattcaaggttaaattttcttttgaggaacccactacattttttacgttgatctaaagctgactccaactagagcctgtaaagctgctctgttttgaggtaaaattcttgtcccaatctttttcgttagtgtactctaaatataaatagtccctatttattttagcttctagttagattctggccataagtggcagccaaacactttgcttctgatctgcttatgtgaaaatcatttatatggaaatcgtttaaatcaacgtgaatgcagaatccgttgagtcgtgtgatatgaggaattcgtcgctcctaaacctggaaatcgtttaaatcaatgtgaatgcagaatctgccaaatcgttcgatgagag

SEQ ID NO: 61218 - DNA, 2959 bp, Zea Mays
caacatctctttccttcttcccgcaacgactgctcgcgccgtctccggctctccgctcaccgtgaccgcgtcgccccgtacgcctccgccccgaggcccctcgtccggccacctccgctcgcgtacgccgttgtacactgggaggccctcgcccggccatctccgctcgcgtacgctgccgcccacggggccaccctgccccggccatctccgcccgccccggcctcggaggcgccgccctgcgctctctggcgctaatggcgccgccgcgtccacccacaggaccgatcctcttcctgcccctcgtcttcctcttcctctttaccaccgccgcggcgtctgcggcggcgcctgaggatgaaaagttcactgaggagctgctcctgcggccgctcccggaccgcaaggcactggcacacttccacttccgctcctctgcgccccccgctgcctccgttggtcggcaccaccacctcttccccaaggccatctcccagctggttaagaaatatcatattagcgagttggagctatctttcacccagggaagatggaactatgagcagtggggtggatttgatcctatgtcaactaataatgcaaagcctcctggtgttgagctgtgggcagtttttgatcttcctttgtctgagatcgatgcaacatggaagaacctgacacatacactctctggcctgttttgtgcatccatcaactttttggagtcctccactgcattttctgctcctcgctggggcttcaaactgaacgaaggcaatttgcgatatggtgcattgcctcgtgaagcagtatgcactgagaatctgacaccttggttgaaacttcttccatgtcgtgacaaagctgggatagcttctttgctgtacaggccttcaatttacaaaggatattaccattcacaaaaactgaaactgagatcctcccagtcacttggtattattcttgatcaaactctgactgttgtgctgcaaccaaataatgtacatggcgaacagctacattccaatcatggtcaacttcagcccaactggtccatgagacatcttttcaacagaaagttgtcagggaaatgccttgtttctaaatccagcagagtattcattgaggttgataaaggcattgctgacgaagttaacatatctggaagtgttcattcttggagtaatgaattctttgtattgtccaatagcccggacaagttgatcaaaggtcaaaatcacttagaaatgcaatcttcttttttatatgtttatgatgctagtaactacagtgaggaacaacctttggatttgggcataacttggaagcttcccctgatatggacttgcaccccatcaccttttcatgcaagcagatttcttatgggcagtggcaatgaaagagggtcaattgctctgtcgtttatgtccactaatcttcataagaagatatctggcagcgcaaatgattgttcaataaaggcagttattttccaggttgttccatggtatgttaaggtctattatcacagcctagaaatatttatagatgggagcaggaagactgtgtcagaagtagttgacaagattcatgtcattccttcagaagacaagcttttgcctggtaccttggagatgctactaagattcccttgcagtatgcagtcgggaactctgacattggattttgacaaggggttcctgcatatagatgaatatcctcctgatgctaatcaaggatttgacattccttcagctttggttagctttcctgagttcagttctgctcgaagttaccctgaaattgatccagtacttggatcacctttactagaaaatttccaggaagatagtgttgtgaagtcgtatacagaagtattgctcgttcccctgacaactccggatttcagcatgccatacaatgtcatcaccttcacatgcactgtcttagctctttactttggttcattattgaatgctttgagacgaaggattggcgaggaagagagggagttgaagaaaagagccacaaggcatgggctcatttctcggttgctagccaagttaagggggcagaaggtggatccatcggagtcagggtcttcatttgaatcgactgggtcaaagaagctgctattcaaggttgtatttgttgcagtagctgcggttctatttcactatttctcaaacaacagttaatacttaacatcggtgtctaaaattttgggtgacttttgtggagccacggcagtagaatgtaccatgttgtgtagcatatgtattgcctgtaagttcgcttgcttccaggcgctattttgccatcctagattcttgaaagccgagggccatgcaatttggacccttctgttgtcgtttttttttggtatggttcgtttcgttttctggccggatgtaatgtaatcccctgacggctgttccctgggcgaacagtgtcagtgtgatccgtttggcaatgtttttattcatgaacgccacgcactgaattctgtaatttcgttactactgtaatgaatttttggtttttaccggttttgaaaaaaaaagaaagcagaggttgatgtcccttgattgcaccaggttaaattttcttttgaggaacccactacattttttacgttgatctaaagctgactccaactagagcctgtaaagctgctctgttttgaggtaaaattcttgtcccaatctttttcgttagtgtactctaaatataaatagtccctatttattttagcttctagttagattctggccataagtggcagccaaacactttgcttctgatctgcttatgtgaaaatcatttatatggaaatcgtttaaatcaacgtgaatgcagaatccgttgagtcgtgtgatatgaggaattcgtcgctcctaaacctggaaatcgtttaaatcaatgtgaatgcagaatctgccaaatcgttcgatgagag

SEQ ID NO: 61219 - DNA, 2122 bp, Zea Mays
caacatctctttccttcttcccgcaacgactgctcgcgccgtctccggctctccgctcaccgtgaccgcgtcgccccgtacgcctccgccccgaggcccctcgtccggccacctccgctcgcgtacgccgttgtacactgggaggccctcgcccggccatctccgctcgcgtacgctgccgcccacggggccaccctgccccggccatctccgcccgccccggcctcggaggcgccgccctgcgctctctggcgctaatggcgccgccgcgtccacccacaggaccgatcctcttcctgcccctcgtcttcctcttcctctttaccaccgccgcggcgtctgcggcggcgcctgaggatgaaaagttcactgaggagctgctcctgcggccgctcccggaccgcaaggcactggcacacttccacttccgctcctctgcgccccccgctgcctccgttggtcggcaccaccacctcttccccaaggccatctcccagctggttaagaaatatcatattagcgagttggagctatctttcacccagggaagatggaactatgagcagtggggtggatttgatcctatgtcaactaataatgcaaagcctcctggtgttgagctgtgggcagtttttgatcttcctttgtctgagatcgatgcaacatggaagaacctgacacatacactctctggcctgttttgtgcatccatcaactttttggagtcctccactgcattttctgctcctcgctggggcttcaaactgaacgaaggcaatttgcgatatggtgcattgcctcgtgaagcagtatgcactgagaatctgacaccttggttgaaacttcttccatgtcgtgacaaagctgggatagcttctttgctgtacaggccttcaatttacaaaggatattaccattcacaaaaactgaaactgagatcctcccagtcacttggtattattcttgatcaaactctgactgttgtgctgcaaccaaataatgtacatggcgaacagctacattccaatcatggtcaacttcagcccaactggtccatgagacatcttttcaacagaaagttgtcagggaaatgccttgtttctaaatccagcagagtattcattgaggttgataaaggcattgctgacgaagttaacatatctggaagtgttcattcttggagtaatgaattctttgtattgtccaatagcccggacaagttgatcaaaggtcaaaatcacttagaaatgcaatcttcttttttatatgtttatgatgctagtaactacagtgaggaacaacctttggatttgggcataacttggaagcttcccctgatatggacttgcaccccatcaccttttcatgcaagcagatttcttatgggcagtggcaatgaaagagggtcaattgctctgtcgtttatgtccactaatcttcataagaagatatctggcagcgcaaatgattgttcaataaaggcagttattttccaggttgttccatggtatgttaaggtctattatcacagcctagaaatatttatagatgggagcaggaagactgtgtcagaagtagttgacaagattcatgtcattccttcagaagacaagcttttgcctggtaccttggagatgctactaagattcccttgcagtatgcagtcgggaactctgacattggattttgacaaggggttcctgcatatagatgaatatcctcctgatgctaatcaaggatttgacattccttcagctttggttagctttcctgagttcagttctgctcgaagttaccctgaaattgatccagtacttggatcacctttactagaaaatttccaggaagatagtgttgtgaagtcgtatacagaagtattgctcgttcccctgacaactccggatttcagcatgccatacaatgtcatcaccttcacatgcactgtcttagctctttactttggttcattattgaatgctttgagacgaaggattggcgaggaagagagggagttgaagaaaagaggcagattggcaaagacggggttgccatttctggcgtcttgcccactgttacctagctcctgaaagtatcaaccatctgttggtctgtgtggttgcaa

SEQ ID NO: 61220 - DNA, 2043 bp, Zea Mays
catctccgcccgccccggcctcggaggcgccgccctgcgctctctggcgctaatggcgccgccgcgtccacccacaggaccgatcctcttcctgcccctcgtcttcctcttcctctttaccaccgccgcggcgtctgcggcggcgcctgaggatgaaaagttcactgaggagctgctcctgcggccgctcccggaccgcaaggcactggcacacttccacttccgctcctctgcgccccccgctgcctccgttggtcggcaccaccacctcttccccaaggccatctcccagctggttaagaaatatcatattagcgagttggagctatctttcacccagggaagatggaactatgagcagtggggtggatttgatcctatgtcaactaataatgcaaagcctcctggtgttgagctgtgggcagtttttgatcttcctttgtctgagatcgatgcaacatggaagaacctgacacatacactctctggcctgttttgtgcatccatcaactttttggagtcctccactgcattttctgctcctcgctggggcttcaaactgaacgaaggcaatttgcgatatggtgcattgcctcgtgaagcagtatgcactgagaatctgacaccttggttgaaacttcttccatgtcgtgacaaagctgggatagcttctttgctgtacaggccttcaatttacaaaggatattaccattcacaaaaactgaaactgagatcctcccagtcacttggtattattcttgatcaaactctgactgttgtgctgcaaccaaataatgtacatggcgaacagctacattccaatcatggtcaacttcagcccaactggtccatgagacatcttttcaacagaaagttgtcagggaaatgccttgtttctaaatccagcagagtattcattgaggttgataaaggcattgctgacgaagttaacatatctggaagtgttcattcttggagtaatgaattctttgtattgtccaatagcccggacaagttgatcaaaggtcaaaatcacttagaaatgcaatcttcttttttatatgtttatgatgctagtaactacagtgaggaacaacctttggatttgggcataacttggaagcttcccctgatatggacttgcaccccatcaccttttcatgcaagcagatttcttatgggcagtggcaatgaaagagggtcaattgctctgtcgtttatgtccactaatcttcataagaagatatctggcagcgcaaatgattgttcaataaaggcagttattttccaggttgttccatggtatgttaaggtctattatcacagcctagaaatatttatagatgggagcaggaagactgtgtcagaagtagttgacaagattcatgtcattccttcagaagacaagcttttgcctggtaccttggagatgctactaagattcccttgcagtatgcagtcgggaactctgacattggattttgacaaggggttcctgcatatagatgaatatcctcctgatgctaatcaaggatttgacattccttcagctttggttagctttcctgagttcagttctgctcgaagttaccctgaaattgatccagtacttggatcacctttactagaaaatttccagtataccaatatctgtctgttctgcaggaagatagtgttgtgaagtcgtatacagaagtattgctcgttcccctgacaactccggatttcagcatgccatacaatgtcatcaccttcacatgcactgtcttagctctttactttggttcattattgaatgctttgagacgaaggattggcgaggaagagagggagttgaagaaaagagacatcactcatgtgggagccttcggcactgggtctgcctccctttttttgcccttcattatagttgatgtctatggtaccacacagcttgtgctctagtatgtaggggaactaatcatacttgtataacagctacattcatttcagaataaattttgttttcattgtgcagttaccatggccatgcctgctcttttt

SEQ ID NO: 61221 - DNA, 2063 bp, Zea Mays
ccttcttcccgcaacgactgctcgcgccgtctccggctctccgctcaccgtgaccgcgtcgccccgtacgcctccgccccgaggcccctcgtccggccacctccgctcgcgtacgccgttgtacactgggaggccctcgcccggccatctccgctcgcgtacgctgccgcccacggggccaccctgccccggccatctccgcccgccccggcctcggaggcgccgccctgcgctctctggcgctaatggcgccgccgcgtccacccacaggaccgatcctcttcctgcccctcgtcttcctcttcctctttaccaccgccgcggcgtctgcggcggcgcctgaggatgaaaagttcactgaggagctgctcctgcggccgctcccggaccgcaaggcactggcacacttccacttccgctcctctgcgccccccgctgcctccgttggtcggcaccaccacctcttccccaaggccatctcccagctggttaagaaatatcatattagcgagttggagctatctttcacccagggaagatggaactatgagcagtggggtggatttgatcctatgtcaactaataatgcaaagcctcctggtgttgagctgtgggcagtttttgatcttcctttgtctgagatcgatgcaacatggaagaacctgacacatacactctctggcctgttttgtgcatccatcaactttttggagtcctccactgcattttctgctcctcgctggggcttcaaactgaacgaaggcaatttgcgatatggtgcattgcctcgtgaagcagtatgcactgagaatctgacaccttggttgaaacttcttccatgtcgtgacaaagctgggatagcttctttgctgtacaggccttcaatttacaaaggatattaccattcacaaaaactgaaactgagatcctcccagtcacttggtattattcttgatcaaactctgactgttgtgctgcaaccaaataatgtacatggcgaacagctacattccaatcatggtcaacttcagcccaactggtccatgagacatcttttcaacagaaagttgtcagggaaatgccttgtttctaaatccagcagagtattcattgaggttgataaaggcattgctgacgaagttaacatatctggaagtgttcattcttggagtaatgaattctttgtattgtccaatagcccggacaagttgatcaaaggtcaaaatcacttagaaatgcaatcttcttttttatatgtttatgatgctagtaactacagtgaggaacaacctttggatttgggcataacttggaagcttcccctgatatggacttgcaccccatcaccttttcatgcaagcagatttcttatgggcagtggcaatgaaagagggtcaattgctctgtcgtttatgtccactaatcttcataagaagatatctggcagcgcaaatgattgttcaataaaggcagttattttccaggttgttccatggtatgttaaggtctattatcacagcctagaaatatttatagatgggagcaggaagactgtgtcagaagtagttgacaagattcatgtcattccttcagaagacaagcttttgcctggtaccttggagatgctactaagattcccttgcagtatgcagtcgggaactctgacattggattttgacaaggggttcctgcatatagatgaatatcctcctgatgctaatcaaggatttgacattccttcagctttggttagctttcctgagttcagttctgctcgaagttaccctgaaattgatccagtacttggatcacctttactagaaaatttccaggaagatagtgttgtgaagtcgtatacagaagtattgctcgttcccctgacaactccggatttcagcatgccatacaatgtcatcaccttcacatgcactgtcttagctctttactttggttcattattgaatgctttgagacgaaggattggcgaggaagagagggagttgaagaaaagagatgataatttggttgatgccttgatggtattctttccttttatctcaaat

SEQ ID NO: 61222 - DNA, 1420 bp, Zea Mays
cgtcgctacccttctctggtgcttgctcggcatcttccccatctccttcctcaccatctcccatggcgcccggcccagctcggactccgccctactctcagcgctcggtcgttctctgctcccctcggcagcagccaccaactcctcgtgaggaacttgctgcccgaccccaagctgtagctcaccttctcgcgctcagatccctggtgtggatctcctcgccggaagctcttgggccggccatgggtgcccagccgaccaacgccgactagcactcgcgtcggttctccatgttctcgccggggaggctcagccatcgcgccctcaagctcgtcctagccggcgtcctcctctaccatggatctcccctgcgtgctggactttcctccgctcctccatccatggcgctcggctgttccaaatccctcccctattcgctcatagaagccgcgcgccacctctctgctcggccgcatctccctgtgctcgagctcgtcggcttctcctccacgcgctccagcccttgctcctcgttcctcccggctgcgcgcgtcaacttcctacgcgctgagctctcttgcacgcctctacactcgcccaagtcgccaccgttctccctgctcgcacgtgcagccgcgccccagctgctcgccgtcgcctgtgcactttttcttccgaacagtagcccctttttcttccgaacagcagccccggatctgcgcagctctgaccttgttgtccacctcactcgctatcgatgtcgtggctgcacctcgtgttcgacaaaagcccagcgtgatggacatgcttacgcgattcgagtcgattccaacagtccgtatacaagagagcgacatgtatgtgttcacgatttagagtgccacaagtcccctcattcttcgtcgtcgatccaagccgtttccccaacgtgcccgtcgaccccaacgatctatctttcaactgcacgctacttgcgtcgggatccgaagctctctgtcgtgctcgaccttacaagtctcaaactcgtcgacatcccttgcgtcgtcgaaaaatcatgagagtttggataaagcaacaagtcctgcgtggtgctcaccatgtgctcgacgtaatggcagaatcagaaatcatagccgtgctcgtggccttcaagacggatcaaattattggtacgtttattgattacgtgatgcgaagaaccaaggctgagtcgaccaaaagctgatgtaaagcgtgagccactcgcgaggtgatgctgatggatgaacctgaagatggataaactgaacgagtgccaagacaaaggatgttcgtcaagtggacgtcatctaacaaacactaacgtaatgtttattccaggcaagccccggtgcatgcaaccccttccttgtgtttttaaatgatttttacacactttaag

SEQ ID NO: 61223 - DNA, 822 bp, Zea Mays
cgccttgcgatcgctctcctgttcctctcatccacttgtctctcccctgcgtactcctaagagaagaagtagactacatcagatttctatagaaagttgcctgaaaagactaggatacctgaatgtggattgcttcagaattgtttggaagaattggctactaggtatccagcgacgaagtttgttaaaattatctccacagactgcatccccaactacccagataggaatgttcctacaatactggtgtataacaacagtgctgtcaaagggacttatgttggtttgcagaagtttggtggaaagagatgcacacctgaatctgttgcgttagccctttgccagtcagacccggtactgaatgatgggcatggtggcagcgattcatctcggggcaatgtcttcgaaggtgttcgcaggaagttcatagagaaggttgtggcccagcatgaagagcgggaagaagaggacagtgactaagctaatacttgtgtttgttttccgcagctggcggatccaatttggttccaatgtttactgatcttatgtgatttttgtgggtgaaatttgccagagttttctgatacctggctgtgcggctgaagtttttgaaagttcacgggtcttattgcctacctttcagctgtaacacagctccattattatattgttaagagatcagagatgattagtgcacttgtataattgcatgagaaaaaatccagccaaactttgaatccacagtatttcactatcttgaacatttctcaacacaaaacatcatgagtcatgactaatttgtgtatatgcatgtttatgatt

SEQ ID NO: 61224 - DNA, 893 bp, Zea Mays
ccgcgtttgattgatctgacctgactagagtggctgattggaagatgaggctcgcagagctgagggaagccgcaaaagccgcgcgatttggtactatacttcccatcactggctccgacttcgtgcgggaggtatcgcaggcacaatcagatgtttgggttgtggtcttcctctacaaggatgggatacctgaatgtggattgcttcagaattgtttggaagaattggctactaggtatccagcgacgaagtttgttaaaattatctccacagactgcatccccaactacccagataggaatgttcctacaatactggtgtataacaacagtgctgtcaaagggacttatgttggtttgcagaagtttggtggaaagagatgcacacctgaatctgttgcgttagccctttgccagtcagacccggtactgaatgatgggcatggtggcagcgattcatctcggggcaatgtcttcgaaggtgttcgcaggaagttcatagagaaggttgtggcccagcatgaagagcgggaagaagaggacagtgactaagctaatacttgtgtttgttttccgcagctggcggatccaatttggttccaatgtttactgatcttatgtgatttttgtgggtgaaatttgccagagttttctgatacctggctgtgcggctgaagtttttgaaagttcacgggtcttattgcctacctttcagctgtaacacagctccattattatattgttaagagatcagagatgattagtgcacttgtataattgcatgagaaaaaatccagccaaactttgaatccacagtatttcactatcttgaacatttctcaacacaaaacatcatgagtcatgactaatttgtgtatatgcatgtttatgatt

SEQ ID NO: 61225 - DNA, 1289 bp, Zea Mays
gataaatatattaatttaattaattttatctaaattataattattagaatgaaattcgatttcaacaaaacaaactgaccgtagtggttttataaacatcgtggaagggagtaatttgcttcgtccaaaaaaaaaaaatctccaactcgtcacttcgcttccccacttctccattccattgcggttctgcgagcccctacctccctgtggtgcttggccatggcggactaccacttcgtgtataaggacgtggagggggcgagcacagagtgggacgacatccagcgccgcctcgggaacttgcccccgaagccggagcccttcaagccgccgcccttcgccccgaaggttgacgccgacgagcagcccaagtccaaggaatggcttgacgtgcgcgagcccgaagagctcgaggaactagaggacgatctggatgacgaccgcttcctcgagaagtacaggaagatgaggctcgcagagctgagggaagccgcaaaagccgcgcgatttggtactatacttcccatcactggctccgacttcgtgcgggaggtatcgcaggcacaatcagatgtttgggttgtggtcttcctctacaaggatggaattgtttggaagaattggctactaggtatccagcgacgaagtttgttaaaattatctccacagactgcatccccaactacccagataggaatgttcctacaatactggtgtataacaacagtgctgtcaaagggacttatgttggtttgcagaagtttggtggaaagagatgcacacctgaatctgttgcgttagccctttgccagtcagacccggtactgaatgatgggcatggtggcagcgattcatctcggggcaatgtcttcgaaggtgttcgcaggaagttcatagagaaggttgtggcccagcatgaagagcgggaagaagaggacagtgactaagctaatacttgtgtttgttttccgcagctggcggatccaatttggttccaatgtttactgatcttatgtgatttttgtgggtgaaatttgccagagttttctgatacctggctgtgcggctgaagtttttgaaagttcacgggtcttattgcctacctttcagctgtaacacagctccattattatattgttaagagatcagagatgattagtgcacttgtataattgcatgagaaaaaatccagccaaactttgaatccacagtatttcactatcttgaacatttctcaacacaaaacatcatgagtcatgactaatttgtgtatatgcatgtttatgatt

SEQ ID NO: 61226 - DNA, 1087 bp, Zea Mays
cccccccccccagttgctccttccaccgttccacgcgtccacggtccacccacacgcaaggtcgcaggtcgcaacccgcgggcggagggtcaggcacaggaccgttgcgttgctgccgccgccggcacgagatcgaggagggatcccccgctctcacgccgctccaggtcgagggccgagcgagatggataatgtcttcgtccaactgatctgcacaatccagtaccgtgttgtcaaggaaaatgcagatgatgctttctatgagttgcagaatccccagcagcaaatccaggcctacgtctttgatgttgttcgggccatagtgccgagaatgaatctggacgatctctttgagcagaagaacgatgtggccaaagctgtattggaggagcttgaaaaggtgatggcagattatggttacagcattgagcacattctcatggttgatatcatccctgacgctgctgttcgtaaggcaatgaacgacataaatgcagcccaaaggcttcaactggcaagtgtttacaagggagaagcagagaagatccttatggtgaagaaagcggaggcagaagcagaggcgaaatatctttctggtgtcggtatcgctaaacagcggcaggcgataaccgacggccttagagagaacatcctgaacttctcacactcggtgtcgggcaccagcgcgaaggaggtcatggacctgatcatggtcacgcagtacttcgacaccatcaaggagctcggggacggctccaagaacaccacgatcttcataccccacggaccaggccacgtgaaggacatcagcgagcagatccgcgacggcatgatgcaggcctcaagcagcaacgtgtaaatcaccgactctctgcacgattggagacggctcggctcaggatgaggcctggagtaccatgttcatagtgttaggttgttgttagtggtaaataatgagtgctggggcttttggcgagtcttgagttacatgcggttgtacaactagtgtggtttgttttatatataaaaatgtatatttacatggttctgctcctggaattttgactttttatggtttggacattaa

SEQ ID NO: 61227 - DNA, 1619 bp, Zea Mays
cccccccccccagttgctccttccaccgttccacgcgtccacggtccacccacacgcaaggtcgcaggtcgcaacccgcgggcggagggtcaggcacaggaccgttgcgttgctgccgccgccggcacgagatcgaggagggatcccccgctctcacgccgctccaggtcgagggccgagcgagatggtgaacaccttcttcctcttctgcgggtgcgtggaccaggccagcgtggcggtggtggagaagtggggccgcttcctccgcctcgccgacccgggcctccacttcttcaaccccctcgccggggagtgcgtcgcgggctccctcaccacacgcgtccagtccctcgacgtccgcgtcgagaccaagaccaaggtccgtctcgcgggcgctctcgcccctcccgcgctctattaggcttacctttctgggtcgcgcataggctgcgatcgctttccagacttcctagccggcgatcggtttccatactttctagccggattgcccgtgttccattcttgcgaatctcgctcggtgacagattttcagtgctccttgtgctagattgcatcatgttgggattggggatctgtgtttggtccaggttgtgtgcctccattcattcgtataaggggattggaattgcttcatcgcgaatggagtagtagcagtaccctgttctcgctgcacagtggcgctaggattttttcatgaggataatgtcttcgtccaactgatctgcacaatccagtaccgtgttgtcaaggaaaatgcagatgatgctttctatgagttgcagaatccccagcagcaaatccaggcctacgtctttgatgttgttcgggccatagtgccgagaatgaatctggacgatctctttgagcagaagaacgatgtggccaaagctgtattggaggagcttgaaaaggtgatggcagattatggttacagcattgagcacattctcatggttgatatcatccctgacgctgctgttcgtaaggcaatgaacgacataaatgcagcccaaaggcttcaactggcaagtgtttacaagggagaagcagagaagatccttatggtgaagaaagcggaggcagaagcagaggcgaaatatctttctggtgtcggtatcgctaaacagcggcaggcgataaccgacggccttagagagaacatcctgaacttctcacactcggtgtcgggcaccagcgcgaaggaggtcatggacctgatcatggtcacgcagtacttcgacaccatcaaggagctcggggacggctccaagaacaccacgatcttcataccccacggaccaggccacgtgaaggacatcagcgagcagatccgcgacggcatgatgcaggcctcaagcagcaacgtgtaaatcaccgactctctgcacgattggagacggctcggctcaggatgaggcctggagtaccatgttcatagtgttaggttgttgttagtggtaaataatgagtgctggggcttttggcgagtcttgagttacatgcggttgtacaactagtgtggtttgttttatatataaaaatgtatatttacatggttctgctcctggaattttgactttttatggtttggacattaa

SEQ ID NO: 61228 - DNA, 1595 bp, Zea Mays
ccagcgcgcagcggcgcatccaccgatgatgtgatatatgaggccttggagttgagggatggaggatctgattatcttggcaagggtgttcttaaggctgtgaacaatgtaaatagcattattggaccagcaattgttggaaagcttgatggaacctccaacgaatggggctggtgcaaacagaagcttggagcaaatgccattcttgcggtctcacttgctgtgtgcaaagctggagctatggtgcagaagattcctctttaccagcacattgcaaatcttgctggaaacaaaactctggtgctccctgtacctgcctttaatgtgattaatggaggatcacatgctggaaacaagcttgccatgcaggagttcatgatcctcccaactggtgcctcattcaaggaggccatgaagatgggagttgaggtgtaccaccatctgaaggaatatgcagctggaacgctaatgtttctgtatgcagagcataatcaagaagaactgaagaagtatggtcaagatgctacaaatgttggggatgaaggtggttttgcacctaacattcaggaaaacaaaaaaggccttgaactactgaaggcggctatagaaaaggctggctacactgggaaggtgttcattggaatggatgttgctgcttctgaattcttcagtgagaaggacaagacttatgatcttaatttcaaggaggagaacaacgatggttcgaacaaaatatcaggtgacagcctgaaagatctgtacaagtccttcgtttctgagtaccctattgtgtcgatcgaagacccatttgatcaggatgactggaccacttacgccaaactcactggtgagattggacagcaagtgcagattgtaggagacgatcttctcgttactaatcccacaagggtcgccaaggccatcaatgagaagacctgcaacgctcttctcttgaaggtgaaccaaatcggctctgtgaccgagagtatcgaggctgtcagaatgtccaagcgtgctggatggggagtgatggcaagccacaggagtggcgagacagaggacaccttcatttctgacctctcagttggcctggctacgggccaaatcaagacaggagctccctgccggtctgagcgcctggccaaatacaaccagctgcgcttaggatcgaggaagagctcggtgttgccgcagtccacgccggagcgaagttcagagcaccagtggagccctactgaaccacgtgtgcctagagcctggagaaagaagatgaggatgtttccccactagttcgctgctgctttttgatagaatgcctgtacgatcacagtaatagaagtttggccttgtttgccgaatagctacactagtgggtttttttttctcgtggaaaaaaagaaagaaataaaacctttttttattctgaggagtgacgactgacgagtggtggtccgcactcgtggtaatatcgttgcccaaaatgattttgatggaacgggaaaatgttgctggtctttgccatatatgagtaggggatccaaatgtttcttcacaaaatattaagactctaaataaattttagttaaaaataaata

SEQ ID NO: 61229 - DNA, 1658 bp, Zea Mays
gccccagtcacaccatccctccgctgcatcttcaacaaatagcctccggcgcaggtggacgtgggcctcagcgacggcagcttcgcgaggggggccgtgcccagcgcgcagcggcgcatccaccgatgatgtgatatatgaggccttggagttgagggatggaggatctgattatcttggcaagggtgttcttaaggctgtgaacaatgtaaatagcattattggaccagcaattgttggaaagcttgatggaacctccaacgaatggggctggtgcaaacagaagcttggagcaaatgccattcttgcggtctcacttgctgtgtgcaaagctggagctatggtgcagaagattcctctttaccagcacattgcaaatcttgctggaaacaaaactctggtgctccctgtacctgcctttaatgtgattaatggaggatcacatgctggaaacaagcttgccatgcaggagttcatgatcctcccaactggtgcctcattcaaggaggccatgaagatgggagttgaggtgtaccaccatctgaagagcataatcaagaagaactgaagaagtatggtcaagatgctacaaatgttggggatgaaggtggttttgcacctaacattcaggaaaacaaaaaaggccttgaactactgaaggcggctatagaaaaggctggctacactgggaaggtgttcattggaatggatgttgctgcttctgaattcttcagtgagaaggacaagacttatgatcttaatttcaaggaggagaacaacgatggttcgaacaaaatatcaggtgacagcctgaaagatctgtacaagtccttcgtttctgagtaccctattgtgtcgatcgaagacccatttgatcaggatgactggaccacttacgccaaactcactggtgagattggacagcaagtgcagattgtaggagacgatcttctcgttactaatcccacaagggtcgccaaggccatcaatgagaagacctgcaacgctcttctcttgaaggtgaaccaaatcggctctgtgaccgagagtatcgaggctgtcagaatgtccaagcgtgctggatggggagtgatggcaagccacaggagtggcgagacagaggacaccttcatttctgacctctcagttggcctggctacgggccaaatcaagacaggagctccctgccggtctgagcgcctggccaaatacaaccagctgcgcttaggatcgaggaagagctcggtgttgccgcagtccacgccggagcgaagttcagagcaccagtggagccctactgaaccacgtgtgcctagagcctggagaaagaagatgaggatgtttccccactagttcgctgctgctttttgatagaatgcctgtacgatcacagtaatagaagtttggccttgtttgccgaatagctacactagtgggtttttttttctcgtggaaaaaaagaaagaaataaaacctttttttattctgaggagtgacgactgacgagtggtggtccgcactcgtggtaatatcgttgcccaaaatgattttgatggaacgggaaaatgttgctggtctttgccatatatgagtaggggatccaaatgtttcttcacaaaatattaagactctaaataaattttagttaaaaataaata

SEQ ID NO: 61230 - DNA, 693 bp, Zea Mays
attacatctacatttggtggaactttacctcatggatgatatgccagatggggagggcgcgcaaggatagccccgacggtttcgtcacgaagccagagacactgaccgatgggatagtgaagctgatgatttggcaccgcaccatccccagcatgcaaggaattggaagaccagcttctctacacatatagatgccattgtctcgatggggagtttagtgatttcaaggcgctgcctagagcaagtggataattgagtgattttcaggagctcctacactatctgtatgaactaactctttctgatcataagtgggatgatgcgaactatctggagcccaaacagatcaacagatcacaaagctatgccaactcgaaaccactgcaccacgtggtcgagtatttacaaaagtcgtcatcggtttctgtgaggagttggagccggccggtgacatattgagaagatgctcggcactgcttgctccattgccgcatggatagcagaaaaggaaggtagaagatgaccacaactaaatcccatatattaagtctatttattccgtaattctttatgccaaccaatcagatcgtgtcatgtcacctatgtctgtgcaaccttactaatttattaaacatgtgatctattttgcgttagatatcttatttattccattcaaattgtgctatatttata

SEQ ID NO: 61231 - DNA, 1058 bp, Zea Mays
atttgttaactattaactaaaatatatgagtgaagaaaaggattcacacatgcactagatgctttgatatatctaccaatcacaaccatttagccacctgtgaaatctctcaggttggtggttgatactcatgcttacactttttgctaggaccattttgattctataaagctaaactatgatttcctattttttcaaactcgccggagttgcacgattatcttgaccgagctaatatctatgccttccaacatgctggagatggggagggctgcaatgattacatctacatttggtggaactttacctcatggatgatatgccagatggggagggcgcgcaaggatagccccgacggtttcgtcacgaagccagagacactgaccgatgggatagtgaagctgatgatttggcaccgcaccatccccagcatgcaaggattttgttcattgggtctgcgtgggctaccagggattaaggtcagaacagaattggaagaccagcttctctacacatatagatgccattgtctcgatggggagtttagtgatttcaaggcgctgcctagagcaagtggataattgagtgattttcaggagctcctacactatctgtatgaactaaccaaaattgtaagtcttcattttccctttcgttccagtctttctgatcataagtgggatgatgcgaactatctggagcccaaacagatcaacagatcacaaagctatgccaactcgaaaccactgcaccacgtggtcgagtatttacaaaagtcgtcatcggtttctgtgaggagttggagccggccggtgacatattgagaagatgctcggcactgcttgctccattgccgcatggatagcagaaaaggaaggtagaagatgaccacaactaaatcccatatattaagtctatttattccgtaattctttatgccaaccaatcagatcgtgtcatgtcacctatgtctgtgcaaccttactaatttattaaacatgtgatctattttgcgttagatatcttatttattccattcaaattgtgctatatttata

SEQ ID NO: 61232 - DNA, 1054 bp, Zea Mays
atggccgggcaagcccatcctgcccacgctgctctccatggaatagcggtcccagcagatctcctctccctcgcggtccactcccccaacgagctgctctccatggaacaccggggtcgcggtctcctactcggcgagatccatggctggcgtcctcctctgctgctgagcccacctcccgcatctctgatcgaggctctgctcgattcggtgcttcgttgtgtccatgggggtttcagctgggcctctggaggcttttgcgcagcgaggaggtcggcgctgggactcagattcatggtgctcctaatgcacgtgctgttcgttggcgctgtcttcatcctcaatccgacctcggctggcgaatccacgggaagtcgtgatgagggattcacgatggctaagtcgaaggaccacatggcacataaccagtcgtacaaggcgcacaagaacaacatcaagaaacccacgcgcggctgccagacctccaccaaggggactgctatcccattccatacttggcggactgctattaaaatgatggatagaggcgaggcctccaacccatccccactcctcggattcaccgattcactgtcgttttgttcaccgatttgccgcagttctgttcaccgattcgccgcagttctactcatctcataaataagatggggagggctgcaatgattacatctacatttggtggaactttacctcatggatgatatgccagatggggagggcgcgcaaggatagccccgacggtttcgtcacgaagccagagacactgaccgatgggatagtgaagctgatgatttggcaccgcaccatccccagcatgcaaggtctaatgccattaaattttgagggtagcgatattgttttcaccctattgaatagggtatatgatgatattggcaagcgctggagtagtctttctgatcataagtgggatgatgcgaactatctggagcccaaacagatcaacagacgtttggtcttttcaatgccaaaccaaggggtgtcattgattttggtgatttcatccgagatgtaa

SEQ ID NO: 61233 - DNA, 1076 bp, Zea Mays
cacccctcctctcaagcggcccctcctcggtagtctgcagtctgcacgccgcccttatcaatctgcaggaacctagtgacttgtttctagtagagtaagggttgctgtaaggcttaggcctaggaatgcagaagagttggcggcagatgcagattttggtgattgtgttgaacttcagccagagctcaaaaggttaaggcttcgtaaaaataattgggagtcggaaacatacgaattcgatgaagtgcttacagacttctcttctcaaaagcgagtgtacgaagttgttgcgaaaccagttgtggagagttctctgtgtttggcagagtgttatggagggatataatggtacagttatggcatatggccagactggtactgggaaaacttttacactgggaagacttggtgaagaagacactgctgctaggggaatcatggttcgtgcaatggaggatattctagcagacataacacctgggactgattctgtctcagtatcatatcttcagttgtacatggagatgatacaagatctccttgatcctgtaaatgataatatagccattgtagaagacccaaggactggggatgtttcattgcctggagccacagtagttgaagttagagatcaaaaaagctttgtggatcttctaagggtgggtgaggctcatcgtgttgctgcaaatacaaagttaaacacagagtcatctcgaagtcatgcgatcctcatggtgaatgtcaggaggtctgtaaaaggtagaactgaaatggatgtcagcatttctggtgaaaatgggctctcatcatccttggtagggtctttgagaccacctattgttaggaaaagtaagcttgtagttgtcgatttggctggatcagagcgcatagacaagtcaggaagtgagggtcatacgttagaagaggcaaagtctatcaatttgtctttaagtgctctgggaaaatgcatcaatgcacttgctgaaagcagtcctcatgtgcctgttcgtgattctaaacttacaagattgcttaaagattcatttggagaaagaatcagtgtgctatacttatga

SEQ ID NO: 61234 - DNA, 2487 bp, Zea Mays
ctctgccttcgtcctccccgtcccgtcctagctaggctcttcagtcttcccccacaccaactcgctcgccggccaagcttccttctcatcctctctctctcgctgtcgctgggccccgcggcgccctccccctccccgcatttaatcctcgggcgtccgtgctcccccggtccgctcacgccccgcccgtgatctcggccgccgtctcccactctgtctcaccgcacgagccccgcgtggtggtggtggtggcgctaaatggcgagcagcggggtgaggaacggcgtggggcccaggatgagcgcgaaaccggaccgtcagggcgccggcgccacgcccaagacggccgcggggaagcaccgcgtctcctcggcgggcggcgccggcgcgtaccgccggaccagctccggcccgctccccgcggcggcgggcggccgcgcggcgtcggacggagagaggctacgtcaaaaccagggtttttggctcaatggaatctacccaatagaagaattactaaaaaatgatctcattcctattaattcttctattgggttgattaaattgtttcattttgtatttattctgactgcgtgccaagtgtacaaattgtctctcattgttgatcatgtggcaactagcgttttgaggcttcaaatgaggtaagacttgatgtttatttcagtttcgttcaatttcagacttcaaaagaggtaaaacatcctctttcttcatatataaatgatatattgtctatatgaagccattatacaggcaaaacaaccactatattggcaagtcgacgactagtcgactgacttatcgactagtcaccaagtcggtaccttgtcgactcgactcgacttaccgacttgaaaaccttgatgttgataactactctgctagtgcattgtcaagggcgtcgagcccccgactagccggaccgcgtctacgcagctcgtagccgtcggccgtcctctccggtgaggttatccccctcaactgcaggcttaacagaaagagagagagagattaaggatataattcttgcctaattgattgtcaagtgcttacaagtatatatagccaatggcccaaccgacatggagaaggttctccttgattctagggatttccaaaacaactcttcttgattctagggattcccaaaacaactctccttgattctagggatttccaaaacaacttactaatctaacacttgcagcgcctgcccagcgtgctcagtcgcgctcagctgcgctgtgcgtccgcacatgacatgcatagatggttaaatttcatattgcattttttttcactccatgttgtgcgccactatttccttacatgatggttccaaaaatttgaggattgaattattggttgatattacgtgtattgttgaaattataaataacactctattcttgttgtgctttctggcaattttgatttgaccaagtatctatatttttggtcaactgaagaatctattcctccctggtcccagcagtttctagtagagtaagggttgctgtaaggcttaggcctaggaatgcagaagagttggcggcagatgcagattttggtgattgtgttgaacttcagccagagctcaaaaggttaaggcttcgtaaaaataattgggagtcggaaacatacgaattcgatgaagtgcttacagacttctcttctcaaaagcgagtgtacgaagttgttgcgaaaccagttgtggagagtgttatggagggatataatggtacagttatggcatatggccagactggtactgggaaaacttttacactgggaagacttggtgaagaagacactgctgctaggggaatcatggttcgtgcaatggaggatattctagcagacataacacctgggactgattctgtctcagtatcatatcttcagttgtacatggagatgatacaagatctccttgatcctgtaaatgataatatagccattgtagaagacccaaggactggggatgtttcattgcctggagccacagtagttgaagttagagatcaaaaaagctttgtggatcttctaagggtgggtgaggctcatcgtgttgctgcaaatacaaagttaaacacagagtcatctcgaagtcatgcgatcctcatggtgaatgtcaggaggtctgtaaaaggtagaactgaaatggatgtcagcatttctggtgaaaatgggctctcatcatccttggtagggtctttgagaccacctattgttaggaaaagtaagcttgtagttgtcgatttggctggatcagagcgcatagacaagtcaggaagtgagggtcatacgttagaagaggcaaagtctatcaatttgtctttaagtgctctgggaaaatgcatcaatgcacttgctgaaagcagtcctcatgtgcctgttcgtgattctaaacttacaagattgcttaaagattcatttggagaaagaatcagtgtgctatacttatga

SEQ ID NO: 61235 - DNA, 925 bp, Zea Mays
catcttgcaatgttgatctctgttttcaagtcgtcgactagtcgccgactagtcgtccggtcggtcctgggagctcgacttgggggaccggctcgacttttctggcaagtcgggcgacttgtcaacgactgaaatttctgagtcgactagtcgtcgacttgttctagctagtcggccgacttatccccaattcggcccaagcagcccattacacaacttaaaccctaacctaacccacaactgaagccgcccctcatctgcacagagccacacgccgccgaccacccctcctctcaagcggcccctcctcggtagtctgcagtctgcacgccgcccttatcaatctgcaggaacctagtgacttgcagtttctagtagagtaagggttgctgtaaggcttaggcctaggaatgcagaagagttggcggcagatgcagattttggtgattgtgttgaacttcagccagagctcaaaaggttaaggcttcgtaaaaataattgggagtcggaaacatacgaattcgatgaagtgcttacagacttctcttctcaaaagcgagtgtacgaagttgttgcgaaaccagttgtggagagtgttatggagggatataatggtacagttatggcatatggccagactggtactgggaaaacttttacactggaaagacttggtgaagaagacactgctgctaggggaatcatggttcgtgcaatggaggatattctagcagacataacacctgggactgattctgtctcagtatcatatcttcagttgtacatggagatgatacaagatctccttgatcctgtaaatgataatatagccattgtagaagacccaaggactggggatgtttcattgcctggagccacagtagttgaagttagagatcaaaaaagctttgtggatcttctaagg

SEQ ID NO: 61236 - DNA, 1677 bp, Zea Mays
gataatgaagagccacagttggtaaatgtgtcttcctgctggttctgtatgcatctcgtggttagtttaccttgcataggacgacaccaagtgaatattactatgtgtagaattagtgagttacaaattgtcctgtttagaagcaacctagtttttaagaaaccagtttttattttttagttaacagagaccagcttcttagtttttaagaaactgagaatttaattcctttaaactgaggcataaacagtatgtttggaaccatcccaattcttataaaccagtttcttaaaaactgggtgtttccaaagtccaaacaggccctgagacacttggtccgtgtaagagaccatcctagattcatatgaaaccagtagcagcaacagtctattagttacaccggatgtggatgttctagtcccagtgaatttcttatcagctatggtgaagtgcaagtgtaaaatgatttgcttttttagacaccgtttaaagtttctcctcagtttgctttggatacttcgttttgaagttcctgtcatactatgtttggtcgttctcttgtgttctgtcagtttgtcatgcctgtgagattgtgcacggctgttcaagtacttaactctactaccatgcctggaaaagtaccctatcggaagtcgctttatgggagttgatgtttagaagaactacttagcagtaatgatattgagtagtagtttacattctctgcttatccctactttgttttactatatgctgtgttatgatcgtttccattgagtcttctttaatctactcaatagaaaaaaaaaggatagacctaatgctgatggcttccacatgagtggggtctgcggaaggaataacaatccttacccctgccattttgcagagaggctacgtcaaaaccagggtttttggctcaatggaatctacccaatagaagaattactaaaaaatgatctcattcctattaattcttctattgggttgattaaattgtttcattttgtatttattctgactgcgtgccaagtgtacaaattgtctctcattgttgatcatgtggcaactagcgttttgaggcttcaaatgagaatctattcctccctggtcccagcagtttctagtagagtaagggttgctgtaaggcttaggcctaggaatgcagaagagttggcggcagatgcagattttggtgattgtgttgaacttcagccagagctcaaaaggttaaggcttcgtaaaaataattgggagtcggaaacatacgaattcgatgaagtgcttacagacttctcttctcaaaagcgagtgtacgaagttgttgcgaaaccagttgtggagagtgttatggagggatataatggtacagttatggcatatggccagactggtactgggaaaacttttacactggaaagacttggtgaagaagacactgctgctaggggaatcatggttcgtgcaatggaggatattctagcagacataacacctgggactgattctgtctcagtatcatatcttcagttgtacatggagatgatacaagatctccttgatcctgtaaatgataatatagccattgtagaagacccaaggactggggatgtttcattgcctggagccacagtagttgaagttagagatcaaaaaagctttgtggatcttctaagg

SEQ ID NO: 61237 - DNA, 881 bp, Zea Mays
gagcaatctgcgtccgttggtgatgtggtgcaagtgtgtaacgtacgttacgtatctgcagaggcagcagagcagtcgcaccgtttcggaactgacggtgtgcgattcatttcttttacagtacttttccatattggagtggtgtattgttttggtcacgccactatcgcgcgtttcatatttttgttgttgcataaatgtcgtgcgctacccaccacagccaaccatctcatttaaagctgcgaaactgatacagctgttgaggataatgaagagccacagttggtaaatgtgtcttcctgctggttctgtatgcatctcgtgtttctagtagagtaagggttgctgtaaggcttaggcctaggaatgcagaagagttggcggcagatgcagattttggtgattgtgttgaacttcagccagagctcaaaaggttaaggcttcgtaaaaataattgggagtcggaaacatacgaattcgatgaagtgcttacagacttctcttctcaaaagcgagtgtacgaagttgttgcgaaaccagttgtggagagtgttatggagggatataatggtacagttatggcatatggccagactggtactgggaaaacttttacactggaaagacttggtgaagaagacactgctgctaggggaatcatggttcgtgcaatggaggatattctagcagacataacacctgggactgattctgtctcagtatcatatcttcagttgtacatggagatgatacaagatctccttgatcctgtaaatgataatatagccattgtagaagacccaaggactggggatgtttcattgcctggagccacagtagttgaagttagagatcaaaaaagctttgtggatcttctaagg

SEQ ID NO: 61238 - DNA, 2062 bp, Zea Mays
ctctgccttcgtcctccccgtcccgtcctagctaggctcttcagtcttcccccacaccaactcgctcgccggccaagcttccttctcatcctctctctctcgctgtcgctgggccccgcggcgccctccccctccccgcatttaatcctcgggcgtccgtgctcccccggtccgctcacgccccgcccgtgatctcggccgccgtctcccactctgtctcaccgcacgagccccgcgtggtggtggtggtggcgctaaatggcgagcagcggggtgaggaacggcgtggggcccaggatgagcgcgaaaccggaccgtcagggcgccggcgccacgcccaagacggccgcggggaagcaccgcgtctcctcggcgggcggcgccggcgcgtaccgccggaccagctccggcccgctccccgcggcggcgggcggccgcgcggcgtcggacggagagaggctacgtcaaaaccagggtttttggctcaatggaatctacccaatagaagaattactaaaaaatgatctcattcctattaattcttctattgggttgattaaattgtttcattttgtatttattctgactgcgtgccaagtgtacaaattgtctctcattgttgatcatgtggcaactagcgttttgaggcttcaaatgaggtaagacttgatgtttatttcagtttcgttcaatttcagacttcaaaagaggtaaaacatcctctttcttcatatataaatgatatattgtctatatgaagccattatacaggcaaaacaaccactatattggcaagtcgacgactagtcgactgacttatcgactagtcaccaagtcggtaccttgtcgactcgactcgacttaccgacttgaaaaccttgatgttgataactactctgctagtgcattgtcaagggcgtcgagcccccgactagccggaccgcgtctacgcagctcgtagccgtcggccgtcctctccggtgaggttatccccctcaactgcaggcttaacagaaagagagagagagattaaggatataattcttgcctaattgattgtcaagtgcttacaagtatatatagccaatggcccaaccgacatggagaaggttctccttgattctagggatttccaaaacaactcttcttgattctagggattcccaaaacaactctccttgattctagggatttccaaaacaacttactaatctaacacttgcagcgcctgcccagcgtgctcagtcgcgctcagctgcgctgtgcgtccgcacatgacatgcatagatggttaaatttcatattgcattttttttcactccatgttgtgcgccactatttccttacatgatggttccaaaaatttgaggattgaattattggttgatattacgtgtattgttgaaattataaataacactctattcttgttgtgctttctggcaattttgatttgaccaagtatctatatttttggtcaactgaagaatctattcctccctggtcccagcagtttctagtagagtaagggttgctgtaaggcttaggcctaggaatgcagaagagttggcggcagatgcagattttggtgattgtgttgaacttcagccagaggttaaggcttcgtaaaaataattgggagtcggaaacatacgaattcgatgaagtgcttacagacttctcttctcaaaagcgagtgtacgaagttgttgcgaaaccagttgtggagagtgttatggagggatataatggtacagttatggcatatggccagactggtactgggaaaacttttacactggaaagacttggtgaagaagacactgctgctaggggaatcatggttcgtgcaatggaggatattctagcagacataacacctgggactgattctgtctcagtatcatatcttcagttgtacatggagatgatacaagatctccttgatcctgtaaatgataatatagccattgtagaagacccaaggactggggatgtttcattgcctggagccacagtagttgaagttagagatcaaaaaagctttgtggatcttctaagg

SEQ ID NO: 61239 - DNA, 1014 bp, Zea Mays
ctctgccttcgtcctccccgtcccgtcctagctaggctcttcagtcttcccccacaccaactcgctcgccggccaagcttccttctcatcctctctctctcgctgtcgctgggccccgcggcgccctccccctccccgcatttaatcctcgggcgtccgtgctcccccggtccgctcacgccccgcccgtgatctcggccgccgtctcccactctgtctcaccgcacgagccccgcgtggtggtggtggtggcgctaaatggcgagcagcggggtgaggaacggcgtggggcccaggatgagcgcgaaaccggaccgtcagggcgccggcgccacgcccaagacggccgcggggaagcaccgcgtctcctcggcgggcggcgccggcgcgtaccgccggaccagctccggcccgctccccgcggcggcgggcggccgcgcggcgtcggacggagcagtttctagtagagtaagggttgctgtaaggcttaggcctaggaatgcagaagagttggcggcagatgcagattttggtgattgtgttgaacttcagccagagctcaaaaggttaaggcttcgtaaaaataattgggagtcggaaacatacgaattcgatgaagtgcttacagacttctcttctcaaaagcgagtgtacgaagttgttgcgaaaccagttgtggagagtgttatggagggatataatggtacagttatggcatatggccagactggtactgggaaaacttttacactggaaagacttggtgaagaagacactgctgctaggggaatcatggttcgtgcaatggaggatattctagcagacataacacctgggactgattctgtctcagtatcatatcttcagttgtacatggagatgatacaagatctccttgatcctgtaaatgataatatagccattgtagaagacccaaggactggggatgtttcattgcctggagccacagtagttgaagttagagatcaaaaaagctttgtggatcttctaagg

SEQ ID NO: 61240 - DNA, 1016 bp, Zea Mays
cccagctctgccttcgtcctccccgtcccgtcctagctaggctcttcagtcttcccccacaccaactcgctcgccggccaagcttccttctcatcctctctctctcgctgtcgctgggccccgcggcgccctccccctccccgcatttaatcctcgggcgtccgtgctcccccggtccgctcacgccccgcccgtgatctcggccgccgtctcccactctgtctcaccgcacgagccccgcgtggtggtggtggtggcgctaaatggcgagcagcggggtgaggaacggcgtggggcccaggatgagcgcgaaaccggaccgtcagggcgccggcgccacgcccaagacggccgcggggaagcaccgcgtctcctcggcgggcggcgccggcgcgtaccgccggaccagctccggcccgctccccgcggcggcgggcggccgcgcggcgtcggacggagtttctagtagagtaagggttgctgtaaggcttaggcctaggaatgcagaagagttggcggcagatgcagattttggtgattgtgttgaacttcagccagagctcaaaaggttaaggcttcgtaaaaataattgggagtcggaaacatacgaattcgatgaagtgcttacagacttctcttctcaaaagcgagtgtacgaagttgttgcgaaaccagttgtggagagtgttatggagggatataatggtacagttatggcatatggccagactggtactgggaaaacttttacactggaaagacttggtgaagaagacactgctgctaggggaatcatggttcgtgcaatggaggatattctagcagacataacacctgggactgattctgtctcagtatcatatcttcagttgtacatggagatgatacaagatctccttgatcctgtaaatgataatatagccattgtagaagacccaaggactggggatgtttcattgcctggagccacagtagttgaagttagagatcaaaaaagctttgtggatcttctaagg

SEQ ID NO: 61241 - DNA, 1590 bp, Zea Mays
cacccacccagctctgccttcgtcctccccgtcccgtcctagctaggctcttcagtcttcccccacaccaactcgctcgccggccaagcttccttctcatcctctctctctcgctgtcgctgggccccgcggcgccctccccctccccgcatttaatcctcgggcgtccgtgctcccccggtccgctcacgccccgcccgtgatctcggccgccgtctcccactctgtctcaccgcacgagccccgcgtggtggtggtggtggcgctaaatggcgagcagcggggtgaggaacggcgtggggcccaggatgagcgcgaaaccggaccgtcagggcgccggcgccacgcccaagacggccgcggggaagcaccgcgtctcctcggcgggcggcgccggcgcgtaccgccggaccagctccggcccgctccccgcggcggcgggcggccgcgcggcgtcggacggagagaggctacgtcaaaaccagggtttttggctcaatggaatctacccaatagaagaattactaaaaaatgatctcattcctattaattcttctattgggttgattaaattgtttcattttgtatttattctgactgcgtgccaagtgtacaaattgtctctcattgttgatcatgtggcaactagcgtgtaagctattaaatatttaaattgcatcttgcaatgttgatctctgttttcaagtcgtcgactagtcgccgactagtcgtccggtcggtcctgggagctcgacttgggggaccggctcgacttttctggcaagtcgggcgacttgtcaacgactgaaatttctgagtcgactagtcgtcgacttgttctagctagtcggccgacttatccccaattcggcccaagcagcccattacacaacttaaaccctaacctaacccacaactgaagccgcccctcatctgcacagagccacacgccgccgaccacccctcctctcaagcggcccctcctcggtagtctgcagtctgcacgccgcccttatcaatctgcaggaacctagtgacttgtttctagtagagtaagggttgctgtaaggcttaggcctaggaatgcagaagagttggcggcagatgcagattttggtgattgtgttgaacttcagccagaggttaaggcttcgtaaaaataattgggagtcggaaacatacgaattcgatgaagtgcttacagacttctcttctcaaaagcgagtgtacgaagttgttgcgaaaccagttgtggagagtgttatggagggatataatggtacagttatggcatatggccagactggtactgggaaaacttttacactggaaagacttggtgaagaagacactgctgctaggggaatcatggttcgtgcaatggaggatattctagcagacataacacctgggactgattctgtctcagtatcatatcttcagttgtacatggagatgatacaagatctccttgatcctgtaaatgataatatagccattgtagaagacccaaggactggggatgtttcattgcctggagccacagtagttgaagttagagatcaaaaaagctttgtggatcttctaagg

SEQ ID NO: 61242 - DNA, 2227 bp, Zea Mays
ggcagtcggcggatcccacattcccacccacgtcactgtccggtgggacctacgcatcgctagcccagaatgagatgactggggtctgcgccgacgtggcaagctccgggggacgcaggccgcgacacagctcactccgctccacccacccacccagctctgccttcgtcctccccgtcccgtcctagctaggctcttcagtcttcccccacaccaactcgctcgccggccaagcttccttctcatcctctctctctcgctgtcgctgggccccgcggcgccctccccctccccgcatttaatcctcgggcgtccgtgctcccccggtccgctcacgccccgcccgtgatctcggccgccgtctcccactctgtctcaccgcacgagccccgcgtggtggtggtggtggcgctaaatggcgagcagcggggtgaggaacggcgtggggcccaggatgagcgcgaaaccggaccgtcagggcgccggcgccacgcccaagacggccgcggggaagcaccgcgtctcctcggcgggcggcgccggcgcgtaccgccggaccagctccggcccgctccccgcggcggcgggcggccgcgcggcgtcggacggagagaggctacgtcaaaaccagggtttttggctcaatggaatctacccaatagaagaattactaaaaaatgatctcattcctattaattcttctattgggttgattaaattgtttcattttgtatttattctgactgcgtgccaagtgtacaaattgtctctcattgttgatcatgtggcaactagcgttttgaggcttcaaatgaggtaagacttgatgtttatttcagtttcgttcaatttcagacttcaaaagaggtaaaacatcctctttcttcatatataaatgatatattgtctatatgaagccattatacaggcaaaacaaccactatattggcaagtcgacgactagtcgactgacttatcgactagtcaccaagtcggtaccttgtcgactcgactcgacttaccgacttgaaaaccttgatgttgataactactctgctagtgcattgtcaagggcgtcgagcccccgactagccggaccgcgtctacgcagctcgtagccgtcggccgtcctctccggtgaggttatccccctcaactgcaggcttaacagaaagagagagagagattaaggatataattcttgcctaattgattgtcaagtgcttacaagtatatatagccaatggcccaaccgacatggagaaggttctccttgattctagggatttccaaaacaactcttcttgattctagggattcccaaaacaactctccttgattctagggatttccaaaacaacttactaatctaacacttgcagcgcctgcccagcgtgctcagtcgcgctcagctgcgctgtgcgtccgcacatgacatgcatagatggttaaatttcatattgcattttttttcactccatgttgtgcgccactatttccttacatgatggttccaaaaatttgaggattgaattattggttgatattacgtgtattgttgaaattataaataacactctattcttgttgtgctttctggcaattttgatttgaccaagtatctatatttttggtcaactgaagaatctattcctccctggtcccagcagtttctagtagagtaagggttgctgtaaggcttaggcctaggaatgcagaagagttggcggcagatgcagattttggtgattgtgttgaacttcagccagagctcaaaaggttaaggcttcgtaaaaataattgggagtcggaaacatacgaattcgatgaagtgcttacagacttctcttctcaaaagcgagtgtacgaagttgttgcgaaaccagttgtggagagtgttatggagggatataatggtacagttatggcatatggccagactggtactgggaaaacttttacactggaaagacttggtgaagaagacactgctgctaggggaatcatggttcgtgcaatggaggatattctagcagacataacacctgggactgattctgtctcagtatcatatcttcagttgtacatggagatgatacaagatctccttgatcctgtaaatgataatatagccattgtagaagacccaaggactggggatgtttcattgcctggagccacagtagttgaagttagagatcaaaaaagctttgtggatcttctaagg

SEQ ID NO: 61243 - DNA, 1744 bp, Zea Mays
ggcagtcggcggatcccacattcccacccacgtcactgtccggtgggacctacgcatcgctagcccagaatgagatgactggggtctgcgccgacgtggcaagctccgggggacgcaggccgcgacacagctcactccgctccacccacccacccagctctgccttcgtcctccccgtcccgtcctagctaggctcttcagtcttcccccacaccaactcgctcgccggccaagcttccttctcatcctctctctctcgctgtcgctgggccccgcggcgccctccccctccccgcatttaatcctcgggcgtccgtgctcccccggtccgctcacgccccgcccgtgatctcggccgccgtctcccactctgtctcaccgcacgagccccgcgtggtggtggtggtggcgctaaatggcgagcagcggggtgaggaacggcgtggggcccaggatgagcgcgaaaccggaccgtcagggcgccggcgccacgcccaagacggccgcggggaagcaccgcgtctcctcggcgggcggcgccggcgcgtaccgccggaccagctccggcccgctccccgcggcggcgggcggccgcgcggcgtcggacggagagaggctacgtcaaaaccagggtttttggctcaatggaatctacccaatagaagaattactaaaaaatgatctcattcctattaattcttctattgggttgattaaattgtttcattttgtatttattctgactgcgtgccaagtgtacaaattgtctctcattgttgatcatgtggcaactagcgtgtaagctattaaatatttaaattgcatcttgcaatgttgatctctgttttcaagtcgtcgactagtcgccgactagtcgtccggtcggtcctgggagctcgacttgggggaccggctcgacttttctggcaagtcgggcgacttgtcaacgactgaaatttctgagtcgactagtcgtcgacttgttctagctagtcggccgacttatccccaattcggcccaagcagcccattacacaacttaaaccctaacctaacccacaactgaagccgcccctcatctgcacagagccacacgccgccgaccacccctcctctcaagcggcccctcctcggtagtctgcagtctgcacgccgcccttatcaatctgcaggaacctagtgacttgtttctagtagagtaagggttgctgtaaggcttaggcctaggaatgcagaagagttggcggcagatgcagattttggtgattgtgttgaacttcagccagagctcaaaaggttaaggcttcgtaaaaataattgggagtcggaaacatacgaattcgatgaagtgcttacagacttctcttctcaaaagcgagtgtacgaagttgttgcgaaaccagttgtggagagtgttatggagggatataatggtacagttatggcatatggccagactggtactgggaaaacttttacactggaaagacttggtgaagaagacactgctgctaggggaatcatggttcgtgcaatggaggatattctagcagacataacacctgggactgattctgtctcagtatcatatcttcagttgtacatggagatgatacaagatctccttgatcctgtaaatgataatatagccattgtagaagacccaaggactggggatgtttcattgcctggagccacagtagttgaagttagagatcaaaaaagctttgtggatcttctaagg

SEQ ID NO: 61244 - DNA, 1466 bp, Zea Mays
gaagtaacggcgatccgaatcgattaatactcagctgaggatgtccaaccacacgacatatgtagcacttaacccttgcatatgtcaactcgcccacaggtttctcaagaccagaacgggttcacgcgacccgagagcacagtactccaccgtccagccattggcctggttggtacacgttactctcgccatggtgcccgccatgtttccgagagtacagcaccccaccttccagtctctgccacggagggtacaagctactctcgccatcgctccactcccagtgcgtgcgagctgttctggtattggtccgaccgaggcaaagcttacccatgatgaggcatgtggccagttaaagggtcctagatcagcaggccaacaatcggaacggtccttaagcgacacagacgggcgacctttcctgctcaacgtctggtctcatcttattatttaacacccaaaccatgtacctgacagaggtacaatacttgaataatgaattcatcatcgcgagtgatgccttcattactgcaagtttcttttttataaaacccatatccagtgttacataatattcttttaaaaaggaacaagttttaattttctaggcagggctaagcctcattagttctttttgtaaaacaggtatcaaggaggataatcaaattccaaggaatggtaatgcatcaactgtttcatcactcaactcctatcacctaatgcagcatataagtgataaaagttttaaaaacaacaaggaggtggcaaatgcaccggggcttgcctgggataacactaagttagtgttgttaattgacgaccacttggtgagcatctcccattctggcactctatcagatcatccatccttaggttcgtcactagcatcattttgggatcaactcggctcttgtccttcgcatcacgtgtaacgaaccacatcatgctccgactcgatttcagcaagaacgaagacggccaccagttcgagcatatcatcgaacacctaatgagtgttgaacttaaccttcttctccacctaattctccaaggattttacatggaagcagcagaggtggccggccatgggaacaaaggaggggctgggggcacccacttgctgcagaaaggggagggcactgcttgctgcaggggagggcatcgagctacagcagggaggggcgtcggccatggcaggaaggggagagagctcggctgggcaccatagcaagaggaggatggggagggctggagcgcggaccagggcgtggttgtggttgggggcgagcttggaggaagccaggcaccgcgggagagggaagcaggagctcggctgggcgtgcgtggtgcgtgtgaccagcgtcgagcgagagatttgattggcagtggtgaaaggcctggaagttggcgtgcatgagctgagaggaggagctgaacgcgcatcagaggagacgcacaggtttcca

SEQ ID NO: 61245 - DNA, 1733 bp, Zea Mays
ggcgatccgaatcgattaatactcagctgaggatgtccaaccacacgacatatgtagcacttaacccttgcatatgtcaactcgcccacaggtttctcaagaccagaacgggttcacgcgacccgagagcacagtactccaccgtccagccattggcctggttggtacacgttactctcgccatggtgcccgccatgtttccgagagtacagcaccccaccttccagtctctgccacggagggtacaagctactctcgccatcgctccactcccagtgcgtgcgagctgttctggtattggtccgaccgaggcaaagcttacccatgatgaggcatgtggccagttaaagggtcctagatcagcaggccaacaatcggaacggtccttaagcgacacagacgggcgacctttcctgctcaacgtctggtctcatcttattatttaacacccaaaccatgtacctgacagaggtacaatacttgaataatgaattcatcatcgcgagtgatgccttcattactgcaagtttcttttttataaaacccatatccagtgttacataatattcttttaaaaaggaacaagttttaattttctaggcagggctaagcctcattagttctttttgtaaaacaggtatcaaggaggataatcaaattccaaggaatggtaatgcatcaactgtttcatcactcaactcctatcacctaatgcagcatataagtgataaaagttttaaaaacaacaaggaggtggcaaatgcaccggggcttgcctgggataacactaagttagtgttgttaattgacgaccacttggtgagcatctcccattctggcactctatcagatcatccatccttaggttcgtcactagcatcattttgggatcaactcggctcttgtccttcgcatcacgtgtaacgaaccacatcatgctccgactcgatttcagcaagaacgaagacggccaccagttcgagcatatcatcgaacacctaaggagtgttgaacttaaccttcttctccacctaattctccaaggattttactccatatcgcacacatcaacacacataaaacctcacatcagcagggtattaacaagaactagtaaaacaacaaagggatttagagatcaccatggaagcagcagaggtggccggccatgggaacaaaggaggggctgggggcacccacttgctgcagaaaggggagggcactgcttgctgcaggagagggcatcgagctacagcagggaggggcgtcggccatggcaggaaggggagagagctcggctgggcaccatagcaagaggaggatggggagggctggagcgcggaccagggcgtggttgtggttgggggcgagcttggaggaagccaggcaccgcgggagagggaagcaggagctcggctgggcgtgcgtgtgaccagcgtcgagcgagagatttgattggcagtggtgaaaggcctggaagttggcgtgcatgagctgagaggaggagctgaacgcgcatcagaggagacgcacaggtttccagggatttgaacacatgcacaggataaggctgggaattttctaggagcgcctgctctatccgtttaggagggatgagcagtgttttctggcctaggagtttgacgtggtgaaggagatttccagggagttggctaatggagtgacacggcgaggatgacgtgccaacgaagatgtttccaggagccgaacgc

SEQ ID NO: 61246 - DNA, 579 bp, Zea Mays
actttgagggagaatctcatggtgttatgcagatattccctaaaatcaagaagtttaacaacaacaaggcaactttcccgctctttgatgctttgggagagctttatgatgatgatgaagttgatgatgcactcaatgaaaggaatgaagatgtgctgaaaggaagggctaatactctatcacgagatgaagaaagtggacaacaaatatctattgcgtcaagaaacaaacaagaaaaggaattaaagaagcttagaaagagtgacaacatagaaaatatgatgggcagatacctaaaaatgaggagcaagcaagtagaatatgaatctgcaagagaaaaggaagcaagagaaaatgaggcaagagaaatggaggtaactcaaagtgatgatttctccatcaaaaggtgcatatcagttatgaacacaatagaagaagtgaccaaattggagaaggcaaaagcatattcaatcttcgccaagaccaaagagaatagagaaactttcatatgtgcttgtgaagcagatcaagaatcagctttgatttggctaagaaatgggatgtcttaatagctttgat

SEQ ID NO: 61247 - DNA, 643 bp, Zea Mays
gtccgattgccccaaggacatcggataaaccactttcaaccagaaccgcgggattaagtaacacaaatcacacacaccaatattattgcagcggaaatcttactaccaaattttacaagttacaaaaattttatattattttatcggagtgattacaaaagtataagtttgaaatatatgctagcttaagtgaccatccacaataagaagtatagaaggagtacttagacttataagaaggccgagcccaccggcacttaacaccatcaacaacagcacaaagttagaacctgaaaaacaacagggaataaaaccctgagtatggaattactcagcaagacttacccgactaaagaaaagactctcaagggtatgctggttgtaagggagccaaggtaaggcttctcaataatcaaagactctgttttgcagaaatgcttactaaagtggatccttaaaatccaattttatttgtcaagttaagttcaattacctgcaactagagttctttctaccctagttcaatcactttgcctatactagccaattttcttaacaaagacccatcatctttagtggaatgctacgtgtagggcagtgaccaagtcttcataaccgcgaaggtacggcgatccgaatcgat

SEQ ID NO: 61248 - DNA, 560 bp, Zea Mays
cgacccctgcttgccgcgttcctgcgcgctgtcgccttgctgcgtgcgtcgtggttttcttcctctgcgcgccaggctgttccggagcttcctttgctccattccttggttgcgtgacgagcccctcgcgcaggcgcgagctgtctgttcggcgtagtcgagccgttctcagttgctcgctgtaacaccctgaatctggggtataaaatttctttgctcatattcacaaattcaggtgttacttcccttttctcatcctttctcattcttttctttctcatttctataggagaaaagtgcttattttatttgtaattatagtttaatatggttaaaccctaagggagtatgagttgttgcatcatgttgaaccctagatttcacttttgcttggtgcataattcttggaaagtctaatttgaatttgtggcttatttggatttgaatcaaatagagaaaataaaaagaaaagagaaaacaattccagaataaaagaaaaaaaggaaagaagcccactcccccgccccctcagcctttcggcccaactaggcccatccccc

SEQ ID NO: 61249 - DNA, 416 bp, Zea Mays
ctggatctttcttcaccagtgcttatctcctccagccgagcgctccaatcttcatccgtgcacacatttgttatccaccgccgttctctctccgtggaaaaatcttgccgccgttcatggaaggagattccgccgcccctgtggatttttttggcgccgttcttatccctggcggcattcatctcttgctcgcgcttatcttcctctctgctctctgccgttcagaagctcccagccgaagcccatggcgctcggtcgcccggctgcctagcccagcgccgatctcccttcagctccaaccccctctgcgcgcggacctctctcatccccatggcgtcttcccctgctggtttgccggcgcccgagctccctctgcccatcaatggcctcagcccaggagttcgtctgctttcccc

SEQ ID NO: 61250 - DNA, 1882 bp, Zea Mays
ctaaaacagaccctaacacgcccctttcttgcgagtgaggccaaagccgagcaaacaaaacgatatgccgctgccctgaaccgagaccaccaccgctctgcctcgcctcgcctcgcgtcgtctcacctcacctcacctcgccgactagggttttgtaccgccgtggatctcgccgtccccgccatggacgtctcgcacgcgggatcctccgtcgccggcgaggctccgaccaccggggagcaccggatggggactaccatcgtcggggtctgctacgagggcggcgtcgtcctgggcgccgattccaggaccagcactggaatgtatgtagccaaccgtgcttcagacaagattactcaactgacagacaatgtgtatgtctgtcgctctggatctgctgctgatacacaagtcatttcggattatgtacgctatttcctccaccaacacacaatccagcttggacaaccagctaccgttaaagttgcagccaacttgattaggttgctagcttatcagaacaaggtatgttccatagcattccagcacgtactgttaaaacacgcttcacttttctcactgataagcacctggtgtcggaattttatgttgaactcttgtttagctatgaaaatgaatgtttggtattaatattcagaacatgttgcaagctggcatgattgttggaggatgggacaagtacgagggaggccaaattttctcagtccctcttggtggaacgatcttgaagcaaccatttgcaattggaggttcaggttccagttacctatatgctcttcttgatcatgaatggaaagagggaatgagtcaggaagaggcagagaaatttgtggtgaaggtagtttcccttgctatggcccgtgatggtgctagtggaggggttgtccgtacagttacagtaagttctctctctattttttatgtaaattttcatgctcagttcccttagaaatattgaaacatagcagttagctaaactagttgggtgtcatggattgtcttatgttggttttggcacttacatctagcatgatgcttttggtagctttcaaagtgaaacttaaccagctgtaactgaaaagtcgtaactttggataagttaactcctttgtggtgcgatacattgattgtaccaatatgaattggaacggaggtatgggatctattggaatgtctttctcaatgctgacaacctggcagcctgctataacatttatactcttctgttacttgattcattcacttgcttacatcattcacccagtgaattctttcaatttgctgggatttcatgttcttgaggtttaacttgcaaaaaattattgttcggtctgtgaaaaagtgtgtttgtgttttgcctatacttatctcttactaccatttcctatgtttgcttgtgttctcttcctctgtggcatagacccttttttgtggttcaaaacaaactctcttggctatgctgcagataaatgcggatggcgtgaagaggaacttttaccctggcgacaagctacccctgtggcacgacgagctggaaccccagaactcgttgcttgatattcttgctgctgggaaccctgatcccatggtgcagtgaactcgccctccacttactttgtgaacttttcactgtatctgacttgttcttgattatttctccttgaactatgtcagaccagagtaatttacgaattgttgttatcgcaccttaataaattcatgtttagctgggtgattggcgttttgagttaatggttactggtaagcgtgctactgctgtagttaagcctgtggcaagtattcaaattttcagtaatgaatcccccgtagcagccagcaccattctatctgctacaacaga

SEQ ID NO: 61251 - DNA, 1512 bp, Zea Mays
ctaaaacagaccctaacacgcccctttcttgcgagtgaggccaaagccgagcaaacaaaacgatatgccgctgccctgaaccgagaccaccaccgctctgcctcgcctcgcctcgcgtcgtctcacctcacctcacctcgccgactagggttttgtaccgccgtggatctcgccgtccccgccatggacgtctcgcacgcgggatcctccgtcgccggcgaggctccgaccaccggggagcaccggatggggactaccatcgtcggggtctgctacgagggcggcgtcgtcctgggcgccgattccaggaccagcactggaatgtatgtagccaaccgtgcttcagacaagattactcaactgacagacaatgtgtatgtctgtcgctctggatctgtaagtgccattgtcttctaatgatagtgttgaattatgatgtttgagtagaagcttttttcttactttgtcggtttgtccctttgacaagttatataaatggatattccttgacggtagacggcttatatcttactgtttgatctgaactagtcaaacaacaacctacaagctagtagttattctcttctcattgctgtttttataccaccttattttgttttgttttaatagaaagtaattcctccttttcatggtgccagagatgacacattcctttttgcaagtttttagttcacatgtaaaactcttgctattttaataccacaggctgctgatacacaagtcatttcggattatgtacgctatttcctccaccaacacacaatccagcttggacaaccagctaccgttaaagttgcagccaacttgattaggttgctagcttatcagaacaagaacatgttgcaagctggcatgattgttggaggatgggacaagtacgagggaggccaaattttctcagtccctcttggtggaacgatcttgaagcaaccatttgcaattggaggttcaggttccagttacctatatgctcttcttgatcatgaatggaaagagggaatgagtcaggaagaggcagagaaatttgtggtgaaggtagtttcccttgctatggcccgtgatggtgctagtggaggggttgtccgtacagttacaataaatgcggatggcgtgaagaggaacttttaccctggcgacaagctacccctgtggcacgacgagctggaaccccagaactcgttgcttgatattcttgctgctgggaaccctgatcccatggtgcagtgaactcgccctccacttactttgtgaacttttcactgtatctgacttgttcttgattatttctccttgaactatgtcagaccagagtaatttacgaattgttgttatcgcaccttaataaattcatgtttagctgggtgattggcgttttgagttaatggttactggtaagcgtgctactgctgtagttaagcctgtggcaagtattcaaattttcagtaatgaatcccccgtagcagccagcaccattctatctgctacaacaga

SEQ ID NO: 61252 - DNA, 1001 bp, Zea Mays
actggagatccaccccacgagcgcccagctcatcattgtcgaccacttgcatcagctacagacgtcgtctctctctcctccacttcaacaaacacttgatctcgcgcgaatgcgcgatccctctatttataccccgcttctctcacattccgtcttcaacaactctggcgagcagcagtgaacgtacttacgtcttcccccagctagctagctatctaccttggtggtggcgattgatatatagattaaacatggcgcctcaaagcctggatctcgggctgagtctcggcctgggcgtggcggcattccagcccagcttctgccacccggccggcaatgacgcggcggagcgggaggccagcccgaccgcggacgagagggagcggaggtgctcgcccgccggcagcccgacgtcgagcggcagcgggaagcgcgtcgcggcggagaggtcggccggcagcggcagcggcgacgaggacgacgacgggggcgctcgcaagaagctgcggctgtccaaggaccaggccgccgtgctcgaggagtgcttcaaaacgcaccacaccctcactccgctggcactggcaggagcgtggcggcggcggcggcgacgacgttgcccgcccaccggcagttcttgtgcgggttcagagacggcggggcggccgccgccgcagtgtacgggacctcatcggctctcgcaaaggccctcagggcggccagataggcgcagtcgtcgtcactagctctctccgctgatctggacttgctctgctcaccggagctccggcgatcgagcgatgccacggaagtgcgtggccccaagttgcaactaattgcaactgcagagcaagtgttgtagctgaatcatctttagttttttttcctccgtatctttagagcggaatgccgcatgcaaatgttctttagaatcgatttcatgtgggtgtatgattgtactcatgctgtggaaattaataacggtttgtagatgaggtaacgag

SEQ ID NO: 61253 - DNA, 1237 bp, Zea Mays
actggagatccaccccacgagcgcccagctcatcattgtcgaccacttgcatcagctacagacgtcgtctctctctcctccacttcaacaaacacttgatctcgcgcgaatgcgcgatccctctatttataccccgcttctctcacattccgtcttcaacaactctggcgagcagcagtgaacgtacttacgtcttcccccagctagctagctatctaccttggtggtggcgattgatatatagattaaacatggcgcctcaaagcctggatctcgggctgagtctcggcctgggcgtggcggcattccagcccagcttctgccacccggccggcaatgacgcggcggagcgggaggccagcccgaccgcggacgagagggagcggaggtgctcgcccgccggcagcccgacgtcgagcggcagcgggaagcgcgtcgcggcggagaggtcggccggcagcggcagcggcgacgaggacgacgacgggggcgctcgcaagaagctgcggctgtccaaggaccaggccgccgtgctcgaggagtgcttcaaaacgcaccacaccctcactccgaagcagaaggcagcgctggccagccgcctgggcctccgggcgcggcaggtggaggtgtggttccagaaccggcgcgcccggaccaagctgaagcagacggaggtcgactgcgagtacctcaggcgctggtgcgagcagctcgccgaggagaaccggcgcctgggcaaggaggtcgccgagctcagggcgctgagcgccgcgcccgcgccagcggcccctctcaccgccctcacaatctggcactggcaggagcgtggcggcggcggcggcgacgacgttgcccgcccaccggcagttcttgtgcgggttcagagacggcggggcggccgccgccgcagtgtacgggacctcatcggctctcgcaaaggccctcagggcggccagataggcgcagtcgtcgtcactagctctctccgctgatctggacttgctctgctcaccggagctccggcgatcgagcgatgccacggaagtgcgtggccccaagttgcaactaattgcaactgcagagcaagtgttgtagctgaatcatctttagttttttttcctccgtatctttagagcggaatgccgcatgcaaatgttctttagaatcgatttcatgtgggtgtatgattgtactcatgctgtggaaattaataacggtttgtagatgaggtaacgag

SEQ ID NO: 61254 - DNA, 1172 bp, Zea Mays
actggagatccaccccacgagcgcccagctcatcattgtcgaccacttgcatcagctacagacgtcgtctctctctcctccacttcaacaaacacttgatctcgcgcgaatgcgcgatccctctatttataccccgcttctctcacattccgtcttcaacaactctggcgagcagcagtgaacgtacttacgtcttcccccagctagctagctatctaccttggtggtggcgattgatatatagattaaacatggcgcctcaaagcctggatctcgggctgagtctcggcctgggcgtggcggcattccagcccagcttctgccacccggccggcaatgacgcggcggagcgggaggccagcccgaccgcggacgagagggagcggaggtgctcgcccgccggcagcccgacgtcgagcggcagcgggaagcgcgtcgcggcggagaggtcggccggcagcggcagcggcgacgaggacgacgacgggggcgctcgcaagaagctgcggctgtccaaggaccaggccgccgtgctcgaggagtgcttcaaaacgcaccacaccctcactccgaagcagaaggcagcgctggccagccgcctgggcctccgggcgcggcaggtggaggtgtggttccagaaccggcgcgcccggaccaagctgaagcagacggaggtcgactgcgagtacctcaggcgctggtgcgagcagctcgccgaggagaaccggcgcctgggcaaggagctggcactggcaggagcgtggcggcggcggcggcgacgacgttgcccgcccaccggcagttcttgtgcgggttcagagacggcggggcggccgccgccgcagtgtacgggacctcatcggctctcgcaaaggccctcagggcggccagataggcgcagtcgtcgtcactagctctctccgctgatctggacttgctctgctcaccggagctccggcgatcgagcgatgccacggaagtgcgtggccccaagttgcaactaattgcaactgcagagcaagtgttgtagctgaatcatctttagttttttttcctccgtatctttagagcggaatgccgcatgcaaatgttctttagaatcgatttcatgtgggtgtatgattgtactcatgctgtggaaattaataacggtttgtagatgaggtaacgag

SEQ ID NO: 61255 - DNA, 1489 bp, Zea Mays
aaatccacacttctctctcttcctcgcatattctggacaacgatcatactttccctttcgtccgttcccttcctctggccaccctatttcgcccacggcggcgatcgatctggagattccggggccctcctgcaaacggtgccggtcgggtagcagggggtgttctcatcacggtaagcgccgccggcagaatcggcggtccgaatctccaggaaccggcgattccacctcaacgactcccacatctgtgcgaagatggcgtacactcctttggataccctcaaatgggttgtaaaggaaatggagatgaactcggtcgaggttaggcagacggttggtcatcctaccaactcatcttatgaactccagcagcttattgacaagatcctagacttatcggattggttggacatggttgccattcaatgtgcataagttattaccaattacaacccaccccctcacccactacagaagagttagaagttgccgaggaatttggacgagagcctccttcataatcttcaattcgaataggttccatgccatgctcgtactcagtgcccatattgtgtagaatgataacacaatcaacaatgaatttgagatcaatggggttccaattgcgagcatgattctttataatttggtatttgtcttgtaagactccaaatgctcgttccacgtccttttggtactcatcatgtttggcggtaaaatacttgtgcttattgctaaatgggcaagagataggttaaatcaaagtagtccacgacagataaatgccgtcagcaaggtagtaagccatatggtattgttgaccattcagttggtaactaaccgaaggaccaactccattggctaagttgtcgaagactggtgaatgatgcaggacgttaatgtcattgcaagatccaggcattccaaaaaatgcatgccaaatccaaaggttatggcttgcaacagcctctagaatcaatgtaggtttcttgtagtaacctctgtactgaccttgccaggtcgtggggcaattttcccactcccagtgcatgcaatcaatacttccgatcatacctggtgttgggggccttcggcttacgaaggtcctcaaaaacaggatttaacagtatttctggagcataatgtgtgaacaggtaccttcgggctcgagtcggaatcacagtaggagaagcctaaaataatacgaaggttgatacagcgccaaagatgtgagcgggaaagcttcggcgtgctagcagaaaatgaaaccgacttaaagataaaaaggctattcagacctcggcggattactatagaattattaccaaatgtaatgggcatgaatgtaattttgtatgagccgtgtcccgtgtctataaataggtgaacagtacccccgtactgttcacgctgattttgcattttgcctttgcgtcacacctgtactttcatttccttccaagctgaagcatttgagaacaagtctcca

SEQ ID NO: 61256 - DNA, 2220 bp, Zea Mays
cttcttctccctcccgctgagcgctggccccgcttctcagaatcgtgcgcgttgaattgagccatgcctgtcgccgggtcaaccgcactaccatttcaactcctctctgccctgttggcctgttcaaccacgacaacaacaaccaagctagtgcctagtgcgagtgcgtgctgccgcacaccttctccgcttgcattgcctattatactccatccatctaccgtattgccgtatatatttctcacctcgagcgaggagcatccgactccgagtggaggggtgagagggaggccatgaagtccaaccggaacctgtcgagggcggaggggaagaggctggggaatgtggcactcatagccttcatgctcggatccctcctgctgctctccctcgccagggccaagttctccccgatcgttgggtatgcgcaggtaaaacaggggacaccatcaaggcagaggagcagcaggcaatggcgaaggcgagcggcgagatggccaccgcccatgacgctgcagctgaggaggaggaagaggagactcggtccaagccgaccgactccgatatttcaggcgcagccattgcggtaggcgacgaccacgccgagagggcgcgcaggccggtgtgctacgagtcgagccggcggtcggacacctgcgaggcggccggcgacgtgcgcgtggtggggcgcgcgcagacggtgctcgtgggcgcgctggaccgggagtggaaggtgaagccctactgccggaagcacgacgcgttcgcgctgtcccacgtcaaggagtggacgctccgtccgcttgtcggcggcagcgacggtgacgaggcgccgcggtgcacggtgaacagctcggccacggcgttcgtgctgtccacgggggggttcacggggaacctgttccacgactacacggacgtgctgatcccagcgttcatcacggcgcggcggtacggcggcgacgtgcagctgctggtgagcagccacaagccgtggtgggccgccaagtacatgccggtactgcagcagttgagccggcacgagctggtggacgcggacgccgacggcgaggtccggtgctacccgcgcgtggtggtggggccgacgttccaccgggagctgggcgtgggcgcggagacgaaggcgcccggtggcgaggaggagggggtgtcgatgccggagttccgcgcgatgctgcggcgcgcgctggggctggagcgcgcggcggcggcgccgagcggggaccggtgggacgtccggcggcggccgcggctgctgatcatctcgcggcggcagtcgcggcggctgctgaacgagcgcgccatggcggacatggcgacgagcctggggttcgacgtgcgcgtgggcgacccggaggcgagcacggacgtggcgcggttcgcgcggctggtgaactcggcggacgtgatggtgggcgtgcacggcgacgggctcaccaacatggtgttcctccccgcgggggccgtgctggtgcaggtggtgccgtacggcgggctggagtggctggcgcgcggcatgttccgggaccccgcggccgggatgcaggtgcactacctcgagtacgtggtgcgggcgggcgagacgacgctgagcgaggagtacggcgaggacgacccggtcatcagggaccccgccgccgtccacaggaaagggtgggacgcgctcaaggccgtgtacctggacaagcaggacgtccggccgcacctgggcaggctcaggaacaccttgctccaggcgctcaagctgctgccccatggacggcagagcaccgactgatcatccttggcttgctggcgtcagtggtcacggtcgtgcagatggtgtggtccaaagctaagattaattggcaaggaccttgaattcgaatgggccgtgggtttgttctgtaggtagatgctacatagctacagtagataggttttaatgatgtcattacatgacagatcatcatgtggtcattaatcttctttttttttaaaaaaagaatttgttgtactcttttgcccttgccatgtaaacacaatcacgttgtgctaggtttttttttgacaatttagctgttacgaaaatctagatatcgcatggcttgaatacggaggaagataaaggactcttcttagtttaggatacaaattggcggtttactcgtgtcgtgacgactcgatgaatgctgcatttttgttaatttcttaaacgat

SEQ ID NO: 61257 - DNA, 1820 bp, Zea Mays
caatcattaacgagagtgctctggcctctggctagctatctcgtccggtcctgcatcaggtcgtagatatagtggggatagttttgttgttggtctggaaagaagagagggaaaaaaaaagatccatggcgacggaggaggccggccgtgccctggcgacgaaggcgaagctggtggcggcggtgctggtgctggagctgctcgtcgcgggcttccacgtcgtgtcgagggcggcgctcgacatgggcgtcagcaagatggcgttcctcgtctaccggaacgccgcagccctgctcgtggtcgcccccgtcgcctacttcctcgacaagaaagataggccgcccttcacgctacgcttgctgatggacttcttcttgctggctgcagtcggggtaaccttcacacaggggctctacatcctcggcctgtactacctgtcaccaacctacgtctctgtcatccagaactcagtccctgcgatcaccttcgtcatggccgctagtttgagaatcgaacaggtaaatgtgaggagcagatacgggctggcaaagatgctaggcacggtggtcaccatagcgggggcaaccgtcataaccctctacaaagggacgccattattgacagaaacagctcatgcagagggcaccacgcacacgctggaaggcacccacacgctcggaggatgggtcgcaggatgcctcatcatgttcgcgaactgcatttgcttgtctgcgtggatggttctgcaggtcccggttctgaagaaatacccagctaagctgtcgtctttcaccatcactctggcgttgggtttcgtccagctcgctgtcgtcgcgccgtttttcgagagcgacgttgagaggtggaagatcagctcaggaggcgagcttttcaccatcctggcgttgtggtgcttggaatcgcctggtatctcatgatctggtgcataaacaaaggagggcctcacttcgtttccgtcttccagccactgcaaaccgtcatggtcgccatcatggccgccatcttccttggcgacacactctacattggaggagtcataggtgcggtgatcatagtcgcgggtctgtactgtgtactgtgggcgaagagcaaggagaccaaaagcagcggcgatctcctagtccttcctgaaagaagccccgcgcagcagaatctcctccagcgtgaagattgaagcgagaccactcactgtactgtacggttctcggccggctgtagctgccccaacaagaaatatgggggtgtttggtttgagaaatcacttcatccaaaatgtggtggtgcatcatgagtccattactcaaatttggtgggatgaccttatgcctcatattagtactaactaaataactataagaaatggggtgatgatggatcaactcaatccattccacaaaccaaacaaaaaagtgaggagtgagaagacgatggactagatcattcctcaaaccaaacagcttatatattccttgtatcgtcagttggacaggccaatagatgatgtcgcctgtgcaaccttgttggccgagggccactttcgattttgtctattggttcttttagagcaaccatcccgatgcgatgacactgtagctctcttaggatgtgtttggttgcaatgacagaacgggacgggataggacgatctctcgaataaggttgtttggttcagagccaaaggttaggacataactatccgaatgttgtccccagttgtccctcaattttggagggacgggagaggacgccaggggacgtctctgtcctagcttgatgcaaataagaaattttaaaatttc

SEQ ID NO: 61258 - DNA, 2240 bp, Zea Mays
caacaatcattaacgagagtgctctggcctctggctagctatctcgtccggtcctgcatcaggtcgtagatatagtggggatagttttgttgttggtctggaaagaagagagggaaaaaaaaagatccatggcgacggaggaggccggccgtgccctggcgacgaaggcgaagctggtggcggcggtgctggtgctggagctgctcgtcgcgggcttccacgtcgtgtcgagggcggcgctcgacatgggcgtcagcaagatggcgttcctcgtctaccggaacgccgcagccctgctcgtggtcgcccccgtcgcctacttcctcgacaagaaagataggccgcccttcacgctacgcttgctgatggacttcttcttgctggctgcagtcggggtaaccttcacacaggggctctacatcctcggcctgtactacctgtcaccaacctacgtctctgtcatccagaactcagtccctgcgatcaccttcgtcatggccgctagtttgaggtcgtagcaaggggaggacgtttgtttgggattatatataatcttcctagattatatttataatccgacaaatctttaactaacacttggttggttgaaacagaatcgaacaggtaaatgtgaggagcagatacgggctggcaaagatgctaggcacggtggtcaccatagcgggggcaaccgtcataaccctctacaaagggacgccattattgacagaaacagctcatgcagagggcaccacgcacacgctggaaggcacccacacgctcggaggatgggtcgcaggatgcctcatcatgttcgcgaactgcatttgcttgtctgcgtggatggttctgcaggtcccggttctgaagaaatacccagctaagctgtcgtctttcaccatcactctggcgttgggtttcgtccagctcgctgtcgtcgcgccgtttttcgagagcgacgttgagaggtggaagatcagctcaggaggcgagcttttcaccatcctgtatgctgtaattctctttttccttataagctcatcatgcgttgcctgcctcgctaactgtgtgcgattattattcaagacctttttgctaagatatcttatttactgtctaaatagaagtctgtggctacgtacatgtttttcttaaacatgcgtgtctgatcatatttcttgggggcaattttttttgcaagtgaatatacgtacgttaacgtcttgcttgtgctaatgaagggcgttgtggtgcttggaatcgcctggtatctcatgatctggtgcataaacaaaggagggcctcacttcgtttccgtcttccagccactgcaaaccgtcatggtcgccatcatggccgccatcttccttggcgacacactctacattggagggtaagaaacacacaccacaccatcaagttagtttgtgactcattaaatttttgaacttttttttgttgaatgatttatagagtcataggtgcggtgatcatagtcgcgggtctgtactgtgtactgtgggcgaagagcaaggagaccaaaagcagcggcgatctcctagtccttcctgaaagaagccccgcgcagcagaatctcctccagcgtgaagattgaagcgagaccactcactgtactgtacggttctcggccggctgtagctgccccaacaagaaatatgggggtgtttggtttgagaaatcacttcatccaaaatgtggtggtgcatcatgagtccattactcaaatttggtgggatgaccttatgcctcatattagtactaactaaataactataagaaatggggtgatgatggatcaactcaatccattccacaaaccaaacaaaaaagtgaggagtgagaagacgatggactagatcattcctcaaaccaaacagcttatatattccttgtatcgtcagttggacaggccaatagatgatgtcgcctgtgcaaccttgttggccgagggccactttcgattttgtctattggttcttttagagcaaccatcccgatgcgatgacactgtagctctcttaggatgtgtttggttgcaatgacagaacgggacgggataggacgatctctcgaataaggttgtttggttcagagccaaaggttaggacataactatccgaatgttgtccccagttgtccctcaattttggagggacgggagaggacgccaggggacgtctctgtcctagcttgatgcaaataagaaattttaaaatttc

SEQ ID NO: 61259 - DNA, 2744 bp, Zea Mays
gtcgctatccctctctctccccttgatttttccagctcgccggtgcttcttccctgcgcccagcgtcgcggctcttccccagctccctctgcctggcgcgctctccctggtacacgcgcgcagctcctccctgcagttcgttcatggccgtcgcgccctcacctgcaggcagtcgagctcctccctcgcccccatggccggcgctccttcaagctcggtcctcctctctgcgcgtaggagcttctcccatggcagctcttcctgctcgacgacgccctccctaccctagctctttcagtcgtcctccccacctctctcccatggtcgaagcaccagccccgtcattggtcaagctcgcccagctcgccttctgtccccaaccatggatgtcggccgccccttgctcccatccatggctgcctccctggttcgctggtctgcgtgccccctcccttcattgccctcgtcttctccctctgctcgctcagtctccagctccctcctctcccccgagttccctggtcgccacgcgccctgcttggcttttcaagctcgccggcgctcctctacaggtcgtgtccaccgcttccagttgccgctgatctctggtgctcgcccctggctcggatccggtgctcggtgcccagcctgctcgccgcggatgcgggccgccgcgctgccaggctgctctctctgctcggcctcgatctctcgcgcgcgtccctgctcgatgcccagcgctccttcctgctccgcgccatggcgtctcccagtcccaggtcgccccttcggccgagctccacatggtgcccggatctccctgctcccctgcgcgcgctctgctccctgcgcgcagctgcgagctccgctcggtcgctcctccctgctcgcccctgcgctcatccaactccactacgccgtgtctctctgtcgagtcgcatccgcagttcgccgccagcgtccgtccgccggtggtgctcgttcccttgacgtcgaactgcgccccatgtcggcttctccagtccgccctggcttggcatttggacaccgggtctgccctgctcgcgttccgggttggaccggacatcgctgtttgcctggtcacatgtgttcatcgcgcctgacctacttgtgctcaggtcttcaccatcgatgttttggagtttgccgtgacgccgtaccagcgttctgtgtgcagtgggaaaactttgtaagttcgcgttgtcatcaatgccacgcgaggtcggctctttgctctgcccagcttgtcgagtctcaggaatctgcacgtacgtcgtaatcggtgcccaacatcttcgtgtcacccttcgtgtgctgtgacacccccttgctcctcgtcgtcaatccacactgtatccgcgacatgctcgtcgaccctgatgatctatccttcaattacacgttacttgcgttgggatccgaagctctctgtaatgctcgatcttacaagtctccaactcatcgacatcccttgcgtcgtcgaaaaatcccgagagtttgaaaaaagcaacaaatcccatgtggtgcaatatttgccaggagctcgaccgaatgtctaaacgaggaatcgttgtcgccctcgtggttatcgggtcgattcgatcagggtaagcttatctattattcctgctagttaaattattgaatgcgatgatttttcttaatttagcatacgtgtgttgaaatcaagaaattagatgcgattcatataaagggtaagggtagacatatctaaatcatgtgaccgaattaataatataaattataggactagtgtttagtaggtctggcagatagatattgattaaattgttttggatatatttcaccgatgcttgaagttgatcttaagtaaaatccgagaatatcataatggctagtgtacataagtactcttgatatttaagttgttgagaatgtagttttaccaaatgctatgttatttgatagtgttttatccgttagagcgaatagtgtaatattctatttaattagtatgtaattcaaattaatctagaaacccgattcaaaaggttagttaaattgttcctgcatgtactataactcagggtgtccaataatagaagtttgaatattattagtctttcggtgttatgcgctagctaaggaaaatagaagactcgtacaaggtttaaggtttcttatgagctacgttcgaataggctagaaaggcgtaattattataattagtcatatatcgctagctagtacttgcttgtgattgattataatgctttgttataagtgtttcatcatcttcagcgtagattatttgtcttaagctattcctctgtatattcatacatgtgcattgtgcatcccatgaggtacgttaattaatcgcgtgatgcggaagacgaaccaagtcgaccccaagctcgggctactccgcatggtgatgctgatggacaaacttaaagatggataattgaacgagtaccaagacaaaggatggtcgccaagtggtcatcgtctaacaaaaactaacctagtgtttatttcaggcaagccctggtgtatttgccacctccttgctgtcttaaaatcttttatcaccttgtttgatacattaggtgataggagttgtgtgccaaacaattgctgcatttccttccttgaaaaattgattacccttccttgatacccttttatgaaaatgatttttatgatgcttagtcttgctttataaaaacaaaatgttt

SEQ ID NO: 61260 - DNA, 2092 bp, Zea Mays
cgacaacaaacaacagagcaggacaggatagaccccttgcccttggcaccgcccacccgtctgactgtctgagccgcctgtctcctcctcgttctctcagcccgttcggcgcaatgccaccgccggcgccgctcttcctctcgctcgcctccacgccaccgcctgcgcttatgcccgtacaccaccccagggccccgcaatccctaaccctagtccctccggttgcctcctccagaaaggccgccgccgttcccgcgtgccccgtcgcctccccgcgtcactccgactacttcgatccgcgggctccgccgccgccgcgcggggacggagggtacgggcgccctcccaacggcgcgcaggacgggagggtcttcacgagctacagcatctacaagggcaaggccgcgctgtcattcgatcctaggccgccgctcttcgtgccgctcgattctggggcgtacaaggtggccaaggagggcttcgtgctgctgcagttcgcgcccgccgtggccacacgacagtacgactggacgcgcaagcaggtgttctcgttatctgtgtgggagataggaaccctgcttactcttggtccaacagattcatgcgagttctttcatgaccctttcaaggggcggaggttggtatcatttaatgtacctgattacctgagttctagtgagtctcccccttgttgtttagttctcaggtttccagaaaagatgctacaaatgcagatcatcatgttatgcatcttgttattctcctaggctgttgaagcataattttttttgttgtctgtccagtggtgtaggaatgcagtgaatcgtcatcaaacttctttcatactgcttgtgccaatctggtttaaggacctgtcattgttgcttatcaactttatttgcttggtgattgaggaatgtattcttgcctctccttttgttgcagttagcaaaagaggggatttgtttcaactgtgttttttatttcaaaacaaaatcttgccagctaatgcaatcttgatttcatccaacatctctaatcaagatttctcgatgagggttccatcacccttcagtcacattatcatagcatcatatatctagactttaagcattttttacatccttgtgttcatcgtgttttatattttcttccatgatttattgtttcatgtgcatccagccttggcactgtgcatcaagaaaatatttaccacattatttcatcttttgatataaacagcgaagaaggtaaagtgcgtaaggttctaaaaattgagccaacaccagatggcaatggtcgctttttcaacctcaaatcggcttatcaacgttgatgagagcatttacatccctataaccaagggagagtttgctgtcattgtatcaactttcaattacatcataccgcacctcatgggctggagcacatttgtaagttcaatcaaacccgaggagtcacggccatacagcaggccgcagtccacgtctgagtacgaatggcgaaggtgatgtgttgatgaactacagcaaaatggctgagacccacactgaagggatgagattattggtattgtttggctgggtaatctcagatgtggttagttgatggatgcctttttggggtactccttttgtttcctttctagttcagcaggcaggtagcactacttgtatccagagtttcacggggcggttggggagggggcatattttgggcagcaaacctcagttctgacatggaatgacgcagtcacgcagcaggggcggttgtgaatctgctccgtaaggccgtgactccagtgatagcgggacgcagctgacagatgtttgggttgctggggaagggttggcctgaaattgttgcttgcatacacgagattattgtgtacatgtagtctgcgactctgcgttacccccttgatgaatgtccgccctgtggaactgtggtgtttttgctgatgattttgctgaattcaaaagcttaaaccattagaattagaaagagagatactcactcacgtgcaacccctagtacttgaactcaagacgacattgataccgtattacaaggtttcatgcagagaccaggt

SEQ ID NO: 61261 - DNA, 1934 bp, Zea Mays
cgacaacaaacaacagagcaggacaggatagaccccttgcccttggcaccgcccacccgtctgactgtctgagccgcctgtctcctcctcgttctctcagcccgttcggcgcaatgccaccgccggcgccgctcttcctctcgctcgcctccacgccaccgcctgcgcttatgcccgtacaccaccccagggccccgcaatccctaaccctagtccctccggttgcctcctccagaaaggccgccgccgttcccgcgtgccccgtcgcctccccgcgtcactccgactacttcgatccgcgggctccgccgccgccgcgcggggacggagggtacgggcgccctcccaacggcgcgcaggacgggagggtcttcacgagctacagcatctacaagggcaaggccgcgctgtcattcgatcctaggccgccgctcttcgtgccgctcgattctggggcgtacaaggtggccaaggagggcttcgtgctgctgcagttcgcgcccgccgtggccacacgacagtacgactggacgcgcaagcaggtgttctcgttatctgtgtgggagataggaaccctgcttactcttggtccaacagattcatgcgagttctttcatgaccctttcaaggggcggagtggtgtaggaatgcagtgaatcgtcatcaaacttctttcatactgcttgtgccaatctggtttaaggacctgtcattgttgcttatcaactttatttgcttggtgattgaggaatgtattcttgcctctccttttgttgcagttagcaaaagaggggatttgtttcaactgtgttttttatttcaaaacaaaatcttgccagctaatgcaatcttgatttcatccaacatctctaatcaagatttctcgatgagggttccatcacccttcagtcacattatcatagcatcatatatctagactttaagcattttttacatccttgtgttcatcgtgttttatattttcttccatgatttattgtttcatgtgcatccagccttggcactgtgcatcaagaaaatatttaccacattatttcatcttttgatataaacagcgaagaaggtaaagtgcgtaaggttctaaaaattgagccaacaccagatggcaatggtcgctttttcaacctcagtgtccagaatcggcttatcaacgttgatgagagcatttacatccctataaccaagggagagtttgctgtcattgtatcaactttcaattacatcataccgcacctcatgggctggagcacatttgtaagttcaatcaaacccgaggagtcacggccatacagcaggccgcagtccacgtctgagtacgaatggcgaaggtgatgtgttgatgaactacagcaaaatggctgagacccacactgaagggatgagattattggtattgtttggctgggtaatctcagatgtggttagttgatggatgcctttttggggtactccttttgtttcctttctagttcagcaggcaggtagcactacttgtatccagagtttcacggggcggttggggagggggcatattttgggcagcaaacctcagttctgacatggaatgacgcagtcacgcagcaggggcggttgtgaatctgctccgtaaggccgtgactccagtgatagcgggacgcagctgacagatgtttgggttgctggggaagggttggcctgaaattgttgcttgcatacacgagattattgtgtacatgtagtctgcgactctgcgttacccccttgatgaatgtccgccctgtggaactgtggtgtttttgctgatgattttgctgaattcaaaagcttaaaccattagaattagaaagagagatactcactcacgtgcaacccctagtacttgaactcaagacgacattgataccgtattacaaggtttcatgcagagaccaggt

SEQ ID NO: 61262 - DNA, 2388 bp, Zea Mays
aatatatattttaatttagctaaagctaaacatgtttgatttgtgagaagtcgagtgtgacacgtgagacgtgtagtaggcaagagatagagataaaatcgccgccgcacccagctccgcaacgcgcacctccctttccccaactcgatctcgcacctagggtttcgtctcgtcgctctcgtcctccgcgaagatgccgaagaacaagggtaagggaggcaagaaccggaagcgaggaaagaacgaggctgacgacgacaagcgcgagctcgtcttcaaggaagacgggcaggagtacgcgcaggtgacccggatgctcggcaacgggcggtgcgaggccatctgcgtcgatggcacgcgccgcctctgccatatccggggtaagatgcacaagaaggtctggatcgcggctggggacatcgtcctcgtcggcctccgcgactaccaggacgacaaggccgacgttatcctcaagtacatgaacgacgaggcgcgcctgctcaaggcctacggggagcttcctgacacgctcaggctcaacgagggcgtcgacgtcgatgggcccgaggaaggcgaggagggcagcgactacatccagttcgaggacgaggacatcgacaagatctaagaaatctgttcctgcttacggctacctgtattgttacgtgacgtgttcttctgcttctgcttgcggctacctttattgttacgtgacgtgtactggtatgttgtggtatggtttagcctgggttatcttgtaaaaggatctgaagtggttaaataatcgtgggtaatttcgtttttaatctggtacatgctgttacaaggtgttctgtactaagctattattgttctgaattgtgttctcctgtcttgattgatttgccaattagacccagtttttattgagtctaatattttcgaaacgtagtgaattactgaggtaatcagaatctaaaatccaatcaatcatactatttgattcatgaattcatacaagaggatttgtttaccttttttatgatacgcagattacagggttcatcaaattagtcgttggtggctgctgtttgtggtgtgaggccagcttttgcttgttcatctgaacaagaactctgtattttgtacactgtggatcaggaatcgccgtccttgtttgtgtagaaatcttttcggtccagcttgtgttctcatgtccttttgtgtgtcttgtattttattgtggtaggattcaatgacgtttgaatcggtgttggactggctattctttaatctgcctggcaatgaactccccctcaagtaatccaacgctggcaccagcaccacttcctctcttgcagagcaaagtttacatcattgatcctttgcctgcattctgtgatttacttgtttatatgtgacgtggctgtcacacccaaggccactggtgagatcaacctgactatgtgagcaatcacatggataatcggagaagtggatctcgatagggagcaggaaggagctgaaggttctgttgttgtatcgtccatagtcaaggacaattgggtgtcacagagttgtgaaccttaggaggtgaaggtgtgcactgagttgttggaagttagaatcggtggccggagagaagagaatgtgtcaccggatgatgggctgttgtcgcaagttgcatggattggtcaatacagggaacagcaagagagggatactggtaaaatgctgaaagctgttctacgaaaaagttgtcaaaaacttggttggagagcaccacaaaatatccgagagagatggcaaatttgtatattctctgttaatgtgttatggggaggtactggctgtgggtgaaagtaggaaggctggagaatccagttacctgaactggatgaagaatatggatatgttcaggaagcacaaagtcgggttgcggcttttgctctatatcagtaatcagttcattgctgaccttccactacggcaactgctaactgagccatactcatcacttattttaatatggcaagacggttggagctacagactgcatcataatgggtctggtcttcgagctacaaattgcatatttttatgaaacaggcgaattgtcgtcagcatcaagggtgctgggtaccgaggatcaggctttgtagatatattatttaatacagctgcagacacaattccttcatctgaaatagaagtggtggcaagtctgtagattctgagaatactggaggcagcaaatcttggaaggttgtccactcatgacagacattacttcctcggcagtgggcgtcagtaagggaatcaaaccggatcgttgccatccttgggtttttttttgtgctacagtgtgtgcatgtatgcatcagatataaataaggtaatgtcttgatc

SEQ ID NO: 61263 - DNA, 3094 bp, Zea Mays
aatatatattttaatttagctaaagctaaacatgtttgatttgtgagaagtcgagtgtgacacgtgagacgtgtagtaggcaagagatagagataaaatcgccgccgcacccagctccgcaacgcgcacctccctttccccaactcgatctcgcacctagggtttcgtctcgtcgctctcgtcctccgcgaagatgccgaagaacaagggtaagggaggcaagaaccggaagcgaggaaagaacgaggctgacgacgacaagcgcgagctcgtcttcaaggaagacgggcaggagtacgcgcaggtgacccggatgctcggcaacgggcggtgcgaggccatctgcgtcgatggcacgcgccgcctctgccatatccggggtaagatgcacaagaaggtctggatcgcggctggggacatcgtcctcgtcggcctccgcgactaccaggacgacaaggccgacgttatcctcaagtacatgaacgacgaggcgcgcctgctcaaggcctacggggagcttcctgacacgctcaggctcaacgagggcgtcgacgtcgatgggcccgaggaaggcgaggagggcagcgactacatccagttcgaggacgaggacatcgacaagatctaagaaatctgttcctgcttacggctacctgtattgttacgtgacgtgttcttctgcttctgcttgcggctacctttattgttacgtgacgtgtactggtatgttgtggtatggtttagcctgggttatcttgtaaaaggatctgaagtggttaaataatcgtgggtaatttcgtttttaatctggtacatgctgttacaaggtgttctgtactaagctattattgttctgaattgtgttctcctgtcttgattgatttgccaattagacccagtttttattgagtctaatattttcgaaacgtagtgaattactgaggtaatcagaatctaaaatccaatcaatcatactatttgattcatgaattcatacaagaggatttgtttaccttttttatgatacgcagattacagggttcatcaaattagtcgttggtggctgctgtttgtggtgtgaggccagcttttgcttgttcatctgaacaagaactctgtattttgtacactgtggatcaggaatcgccgtccttgtttgtgtagaaatcttttcggtccagcttgtgttctcatgtccttttgtgtgtcttgtattttattgtggtaggattcaatgacgtttgaatcggtgttggactggctattctttaatctgcctggcaatgaactccccctcaagtaatccaacgctggcaccagcaccacttcctctcttgcagagcaaagtttacatcattgatcctttgcctgcattctgtgatttacttgtttatatgtgacgtggctgtcacacccaaggccactggtgagatcaacctgactatgtgagcaatcacatggataatcggagaagtggatctcgatagggagcaggaaggtttgcttcctttcctttgtttgtcttatatatttctcttctgtttgatgcttctttccctgatgtggatccattatgtagcctagaccttaggcttcctcttcagatgttatttcggccaatactattgatgattcatgaacttgctggtttgtctcttcttttccaatattgtataaatgttgaagtgttgagtttgtctcttcttttccacttatacaggtgctgattggttgattaatcaggtgttgctttttttatgttagaatcatgtgatgattacattgttggtatgtgatgcaggagctgaaggttctgttgttgtatcgtccatagtcaaggacaattgggtgtcacagagttgtgaaccttaggaggtgaaggtgtgcactgagttgttggaagttagaatcggtggccggagagaagagaatgtgtcaccggatgatgggctgttgtcgcaagttgcatggattggtcaatacagggaacagcaagagagggatactggtaaaatgctgaaagctgttctacgaaaaagttgtcaaaaacttggttggagagcaccacaaaatatccgagagagatggcaaatttgtatattctctgttaatgtgttatggggaggtactggctgtgggtgaaagtaggaaggctggagaatccagttacctgaactggatgaagaatatggatatgttcaggaagcacaaagtcgggttgcggcttttgctctatatcagtaatcagttcattgctgaccttccactacggcaactgctaactgagccatactcatcacttattttaatatggcaagacggttggagctacagactgcatcataatgggtctggtcttcgagctacaaattgcatatttttatgaaacaggcgaattgtcgtcagcatcaagggtgctgggtaccgaggatcaggctttgtagatatattatttaatacagctgcagacacaattccttcatctgaaatagaagtggtggcaagtctgtagattctgagaatactggaggcagcaaatcttggaaggttgtccactcatgacagacattacttcctcggcagtgggcgtcagtaagggaatcaaaccggatcgttgccatccttgggtttttttttgtgctacagtgtgtgcatgtatgcatcagatataaataaggtgatgactatccctggccccctattagtatcatcgatcctgctaatcaagtgcttttgtatccaccagtagcttgaccaacttgactgtccagtcatgctagattggaatcagtagaggtattatattgtctttgggacattattgaccgttctagaacaccatgtatcttcttgtaagagcaaaaccctaattcgcatatttggagactcctccagctctggccagtactctgcaaaaccggcacatgaaactttatttcagggtgcccgtttcaatcctatgaatatatatacatgtttatgtgtccacttgtgcacaaccgatgctgtggatcgcagactcgcagttcctttgccgcctgattggttcacgcggatggctgcagctgcaattcatagagataaaacattgtag

SEQ ID NO: 61264 - DNA, 2791 bp, Zea Mays
aatatatattttaatttagctaaagctaaacatgtttgatttgtgagaagtcgagtgtgacacgtgagacgtgtagtaggcaagagatagagataaaatcgccgccgcacccagctccgcaacgcgcacctccctttccccaactcgatctcgcacctagggtttcgtctcgtcgctctcgtcctccgcgaagatgccgaagaacaagggtaagggaggcaagaaccggaagcgaggaaagaacgaggctgacgacgacaagcgcgagctcgtcttcaaggaagacgggcaggagtacgcgcaggtgacccggatgctcggcaacgggcggtgcgaggccatctgcgtcgatggcacgcgccgcctctgccatatccggggtaagatgcacaagaaggtctggatcgcggctggggacatcgtcctcgtcggcctccgcgactaccaggacgacaaggccgacgttatcctcaagtacatgaacgacgaggcgcgcctgctcaaggcctacggggagcttcctgacacgctcaggctcaacgagggcgtcgacgtcgatgggcccgaggaaggcgaggagggcagcgactacatccagttcgaggacgaggacatcgacaagatctaagaaatctgttcctgcttacggctacctgtattgttacgtgacgtgttcttctgcttctgcttgcggctacctttattgttacgtgacgtgtactggtatgttgtggtatggtttagcctgggttatcttgtaaaaggatctgaagtggttaaataatcgtgggtaatttcgtttttaatctggtacatgctgttacaaggtgttctgtactaagctattattgttctgaattgtgttctcctgtcttgattgatttgccaattagacccagtttttattgagtctaatattttcgaaacgtagtgaattactgaggtaatcagaatctaaaatccaatcaatcatactatttgattcatgaattcatacaagaggatttgtttaccttttttatgatacgcagattacagggttcatcaaattagtcgttggtggctgctgtttgtggtgtgaggccagcttttgcttgttcatctgaacaagaactctgtattttgtacactgtggatcaggaatcgccgtccttgtttgtgtagaaatcttttcggtccagcttgtgttctcatgtccttttgtgtgtcttgtattttattgtggtaggattcaatgacgtttgaatcggtgttggactggctattctttaatctgcctggcaatgaactccccctcaagtaatccaacgctggcaccagcaccacttcctctcttgcagagcaaagtttacatcattgatcctttgcctgcattctgtgatttacttgtttatatgtgacgtggctgtcacacccaaggccactggtgagatcaacctgactatgtgagcaatcacatggataatcggagaagtggatctcgatagggagcaggaaggagctgaaggttctgttgttgtatcgtccatagtcaaggacaattgggtgtcacagagttgtgaaccttaggaggtgaaggtgtgcactgagttgttggaagttagaatcggtggccggagagaagagaatgtgtcaccggatgatgggctgttgtcgcaagttgcatggattggtcaatacagggaacagcaagagagggatactggtaaaatgctgaaagctgttctacgaaaaagttgtcaaaaacttggttggagagcaccacaaaatatccgagagagatggcaaatttgtatattctctgttaatgtgttatggggaggtactggctgtgggtgaaagtaggaaggctggagaatccagttacctgaactggatgaagaatatggatatgttcaggaagcacaaagtcgggttgcggcttttgctctatatcagtaatcagttcattgctgaccttccactacggcaactgctaactgagccatactcatcacttattttaatatggcaagacggttggagctacagactgcatcataatgggtctggtcttcgagctacaaattgcatatttttatgaaacaggcgaattgtcgtcagcatcaagggtgctgggtaccgaggatcaggctttgtagatatattatttaatacagctgcagacacaattccttcatctgaaatagaagtggtggcaagtctgtagattctgagaatactggaggcagcaaatcttggaaggttgtccactcatgacagacattacttcctcggcagtgggcgtcagtaagggaatcaaaccggatcgttgccatccttgggtttttttttgtgctacagtgtgtgcatgtatgcatcagatataaataaggtgatgactatccctggccccctattagtatcatcgatcctgctaatcaagtgcttttgtatccaccagtagcttgaccaacttgactgtccagtcatgctagattggaatcagtagaggtattatattgtctttgggacattattgaccgttctagaacaccatgtatcttcttgtaagagcaaaaccctaattcgcatatttggagactcctccagctctggccagtactctgcaaaaccggcacatgaaactttatttcagggtgcccgtttcaatcctatgaatatatatacatgtttatgtgtccacttgtgcacaaccgatgctgtggatcgcagactcgcagttcctttgccgcctgattggttcacgcggatggctgcagctgcaattcatagagataaaacattgtag

SEQ ID NO: 61265 - DNA, 528 bp, Zea Mays
aatatatattttaatttagctaaagctaaacatgtttgatttgtgagaagtcgagtgtgacacgtgagacgtgtagtaggcaagagatagagataaaatcgccgccgcacccagctccgcaacgcgcacctccctttccccaactcgatctcgcacctagggtttcgtctcgtcgctctcgtcctccgcgaggagggcagcgactacatccagttcgaggacgaggacatcgacaagatctaagaaatctgttcctgcttacggctacctgtattgttacgtgacgtgttcttctgcttctgcttgcggctacctttattgttacgtgacgtgtactggtatgttgtggtatggtttagcctgggttatcttgtaaaaggatctgaagtggttaaataatcgtgggtaatttcgtttttaatctggtacatgctgttacaaggtgttctgtactaagctattattgttctgaattgtgttctcctgtcttgattgatttgccaattagacccagtttttattgagtct

SEQ ID NO: 61266 - DNA, 2417 bp, Zea Mays
ggttgcccacaagcggagcggagcagaggatggtgattggttatgacgagggggccattatgataaaaatgggccgtgaagtacctatagcaagtatggataccggtgggaaaatcatttgggcgaaacataatgaaatacaaactgtaaatattaagacagtcggtgcaggctttgaggtcacagacggagagagattaccgttggctgtaaaagagttaggaagctgtgatttgtacccacagagcttgaagcataatcctaatggacggttcgttgttgtatgtggagatggtgagtacataatttatactgccctggcctggaggaataggtcatttggatctgcactggaatttgtttggtcatcagaaggagaatatgcaattagggaaagtacatcaagaataaagattttcagtaaatcatttcaggagaagaaaactatccgcccttcattttcagcagagcgtatttttggtggggtattgttggcaatgtgttctagtgatttcatctgcttttatgactgggttgattgtagactaatacgccgaatcgatgtgaatgttaagaacgtttactgggctgatagtggtgacctagttgcaatagcaagtgatacatcattctacatcctcaagtacaatgtggaaagcctgtggatgaaggtgtcgaagatgcttttgagctgcttcacgaggtcaatgagcgagtgagaactggaatttgggttggagactgctttatctataacaactcgttgtggcgcctaaattattgtgttggtggtgaggtcactacaatgtatcatttggatcgccctatgtacctattgggatatcttgcgaaccaaagtcgagtttatcttattgacaaggagtttaatatcattgggtacacattacttctgagtttgattgagtacaagacccttgtgatgcgtggggatttggaacatgcaaatgaaattttatcatccataccaaaggcacaatacaatagtgttgctcattttttggaatctagaggtatgttggaagaggctcttgagatagccacggatgctgactacaagtttgacctagctgtgcagcttggaaaattagatgttgcaaaggctatcgtcatagaagcacagagtgaatctaaatggaagcagttgggtgaactcgccatgtccacaggcaagctagagatggcggaggaatgccttcttcaagcgaaggatttaagtggcttgttgctattgtactcatctcttggagatgctgaaggaattgaaaagcttgcttctttggcaaaagaacatggaaaaaacaatgttgctttcctctgccttttcatgcttggtaaagtggaagattgcatacagttgcttgtagacagtagccgtatacctgaagctgcactaatggcgcgatcgtatcttcctagcaaagtaccagaaatagtagcaatttggagaaacgacctcagtaaaattaatccaaaagctgcagagtctctggcagatccttctgaatatccaaatttatttgaagactggcaggttgctctaactgtagaaaaaagcgttgcttctcagagggatcattatcctcctgctgaccaatacttgaatcatgctgagaagtcaggcatgattcttgtggaagctttcaaaaggatgcaggtcattgagcatgaggaacctgaagatgcagctgaggaaaatggagaacctgatcaacagtgctaactgaacatgaataggggccgagggaagcacaacgcattggctgcaaatgttattttttcccgagggtaacaaatgtggcccccagttttaccctgaagcaccggaaactggtgatgcttgtggccattggaggccacctgatgcttgtccgatctttctgagtgaaccccaagcttgacatattgatgcttgctacacttttggtgtcgatatgcttcttctgccaacaacataggcaattctttcttctcggatcatctgcggacccgatttctatgcgctcgaaccaatgaactgggtggggactgtggagccattttgtgatgaatagttcgaataatcagtatagaggtacgttgtaagatatgccagattaccatagccatcgaattctcctaggagatgacagtttttgttagccattcattgtaatgatgttacttgataaggaaggttacgtgtagtatatgattgcggttgcgggccgagggttttgcccatgttatacttatatatagtggtatcaatccatcggatcggaggctctcgtctactgatgcctaatcaatgccgatgactgcgagaattcaatgcctagatatgcagtgtaacagtgtctcgctgcacacctattcatcgtttcaaaccatggtccatggaatttattttgatgctg

SEQ ID NO: 61267 - DNA, 2663 bp, Zea Mays
cacgctttagcgtaaaacagagccctagcgcgccgccaaggctatatgtgtccaattaaacttggggcgagccgacagactcctggatggtgaagaaaacaagagaagggacaggccttgcctcatgcacacgaatggaagaaccagacatggttgcccacaagcggagcggagcagaggatggtgattggttatgacgagggggccattatgataaaaatgggccgtgaagtacctatagcaagtatggataccggtgggaaaatcatttgggcgaaacataatgaaatacaaactgtaaatattaagacagtcggtgcaggctttgaggtcacagacggagagagattaccgttggctgtaaaagagttaggaagctgtgatttgtacccacagagcttgaagcataatcctaatggacggttcgttgttgtatgtggagatggtgagtacataatttatactgccctggcctggaggaataggtcatttggatctgcactggaatttgtttggtcatcagaaggagaatatgcaattagggaaagtacatcaagaataaagattttcagtaaatcatttcaggagaagaaaactatccgcccttcattttcagcagagcgtatttttggtggggtattgttggcaatgtgttctagtgatttcatctgcttttatgactgggttgattgtagactaatacgccgaatcgatgtgaatgttaagaacgtttactgggctgatagtggtgacctagttgcaatagcaagtgatacatcattctacatcctcaagtacaatcctgtggatgaaggtgtcgaagatgcttttgagctgcttcacgaggtcaatgagcgagtgagaactggaatttgggttggagactgctttatctataacaactcgttgtggcgcctaaattattgtgttggtggtgaggtcactacaatgtatcatttggatcgccctatgtacctattgggatatcttgcgaaccaaagtcgagtttatcttattgacaaggagtttaatatcattgggtacacattacttctgagtttgattgagtacaagacccttgtgatgcgtggggatttggaacatgcaaatgaaattttatcatccataccaaaggcacaatacaatagtgttgctcattttttggaatctagaggtatgttggaagaggctcttgagatagccacggatgctgactacaagtttgacctagctgtgcagcttggaaaattagatgttgcaaaggctatcgtcatagaagcacagagtgaatctaaatggaagcagttgggtgaactcgccatgtccacaggcaagctagagatggcggaggaatgccttcttcaagcgaaggatttaagtggcttgttgctattgtactcatctcttggagatgctgaaggaattgaaaagcttgcttctttggcaaaagaacatggaaaaaacaatgttgctttcctctgccttttcatgcttggtaaagtggaagattgcatacagttgcttgtagacagtagccgtatacctgaagctgcactaatggcgcgatcgtatcttcctagcaaagtaccagaaatagtagcaatttggagaaacgacctcagtaaaattaatccaaaagctgcagagtctctggcagatccttctgaatatccaaatttatttgaagactggcaggttgctctaactgtagaaaaaagcgttgcttctcagagggatcattatcctcctgctgaccaatacttgaatcatgctgagaagtcaggcatgattcttgtggaagctttcaaaaggatgcaggtcattgagcatgaggaacctgaagatgcagctgaggaaaatggagaacctgatcaacaggtatctcatgcatcggaagagaaggaaatgcataacacagatgatgctgatgaacatgaagagacagtttcagtaaatgggaacgagggtgaggaacagcaggtgctaactgaacatgaataggggccgagggaagcacaacgcattggctgcaaatgttattttttcccgagggtaacaaatgtggcccccagttttaccctgaagcaccggaaactggtgatgcttgtggccattggaggccacctgatgcttgtccgatctttctgagtgaaccccaagcttgacatattgatgcttgctacacttttggtgtcgatatgcttcttctgccaacaacataggcaattctttcttctcggatcatctgcggacccgatttctatgcgctcgaaccaatgaactgggtggggactgtggagccattttgtgatgaatagttcgaataatcagtatagaggtacgttgtaagatatgccagattaccatagccatcgaattctcctaggagatgacagtttttgttagccattcattgtaatgatgttacttgataaggaaggttacgtgtagtatatgattgcggttgcgggccgagggttttgcccatgttatacttatatatagtggtatcaatccatcggatcggaggctctcgtctactgatgcctaatcaatgccgatgactgcgagaattcaatgcctagatatgcagtgtaacagtgtctcgctgcacacctattcatcgtttcaaaccatggtccatggaatttattttgatgctg

SEQ ID NO: 61268 - DNA, 2596 bp, Zea Mays
cacgctttagcgtaaaacagagccctagcgcgccgccaaggctatatgtgtccaattaaacttggggcgagccgacagactcctggatggtgaagaaaacaagagaagggacaggccttgcctcatgcacacgaatggaagaaccagacatggttgcccacaagcggagcggagcagaggatggtgattggttatgacgagggggccattatgataaaaatgggccgtgaagtacctatagcaagtatggataccggtgggaaaatcatttgggcgaaacataatgaaatacaaactgtaaatattaagacagtcggtgcaggctttgaggtcacagacggagagagattaccgttggctgtaaaagagttaggaagctgtgatttgtacccacagagcttgaagcataatcctaatggacggttcgttgttgtatgtggagatggtgagtacataatttatactgccctggcctggaggaataggtcatttggatctgcactggaatttgtttggtcatcagaaggagaatatgcaattagggaaagtacatcaagaataaagattttcagtaaatcatttcaggagaagaaaactatccgcccttcattttcagcagagcgtatttttggtggggtattgttggcaatgtgttctagtgatttcatctgcttttatgactgggttgattgtagactaatacgccgaatcgatgtgaatgttaagaacgtttactgggctgatagtggtgacctagttgcaatagcaagtgatacatcattctacatcctcaagtacaatagagatgttgttgcttcttatctagaaggtggaaagcctgtggatgaaggtgtcgaagatgcttttgagctgcttcacgaggtcaatgagcgagtgagaactggaatttgggttggagactgctttatctataacaactcgttgtggcgcctaaattattgtgttggtggtgaggtcactacaatgtatcatttggatcgccctatgtacctattgggatatcttgcgaaccaaagtcgagtttatcttattgacaaggagtttaatatcattgggtacacattacttctgagtttgattgagtacaagacccttgtgatgcgtggggatttggaacatgcaaatgaaattttatcatccataccaaaggcacaatacaatagtgttgctcattttttggaatctagaggtatgttggaagaggctcttgagatagccacggatgctgactacaagtttgacctagctgtgcagcttggaaaattagatgttgcaaaggctatcgtcatagaagcacagagtgaatctaaatggaagcagttgggtgaactcgccatgtccacaggcaagctagagatggcggaggaatgccttcttcaagcgaaggatttaagtggcttgttgctattgtactcatctcttggagatgctgaaggaattgaaaagcttgcttctttggcaaaagaacatggaaaaaacaatgttgctttcctctgccttttcatgcttggtaaagtggaagattgcatacagttgcttgtagacagtagccgtatacctgaagctgcactaatggcgcgatcgtatcttcctagcaaagtaccagaaatagtagcaatttggagaaacgacctcagtaaaattaatccaaaagctgcagagtctctggcagatccttctgaatatccaaatttatttgaagactggcaggttgctctaactgtagaaaaaagcgttgcttctcagagggatcattatcctcctgctgaccaatacttgaatcatgctgagaagtcaggcatgattcttgtggaagctttcaaaaggatgcaggtcattgagcatgaggaacctgaagatgcagctgaggaaaatggagaacctgatcaacagtgctaactgaacatgaataggggccgagggaagcacaacgcattggctgcaaatgttattttttcccgagggtaacaaatgtggcccccagttttaccctgaagcaccggaaactggtgatgcttgtggccattggaggccacctgatgcttgtccgatctttctgagtgaaccccaagcttgacatattgatgcttgctacacttttggtgtcgatatgcttcttctgccaacaacataggcaattctttcttctcggatcatctgcggacccgatttctatgcgctcgaaccaatgaactgggtggggactgtggagccattttgtgatgaatagttcgaataatcagtatagaggtacgttgtaagatatgccagattaccatagccatcgaattctcctaggagatgacagtttttgttagccattcattgtaatgatgttacttgataaggaaggttacgtgtagtatatgattgcggttgcgggccgagggttttgcccatgttatacttatatatagtggtatcaatccatcggatcggaggctctcgtctactgatgcctaatcaatgccgatgactgcgagaattcaatgcctagatatgcagtgtaacagtgtctcgctgcacacctattcatcgtttcaaaccatggtccatggaatttattttgatgctg

SEQ ID NO: 61269 - DNA, 2547 bp, Zea Mays
gaaaattcaactagagatgttgagcctgaaatcgtgcagggtgtgaaacaaaatgacagcgacttgagaacacactaaactatggccttgagagagtctgggctgttggatacatgaagggatcaagaaggatggtgattggttatgacgagggggccattatgataaaaatgggccgtgaagtacctatagcaagtatggataccggtgggaaaatcatttgggcgaaacataatgaaatacaaactgtaaatattaagacagtcggtgcaggctttgaggtcacagacggagagagattaccgttggctgtaaaagagttaggaagctgtgatttgtacccacagagcttgaagcataatcctaatggacggttcgttgttgtatgtggagatggtgagtacataatttatactgccctggcctggaggaataggtcatttggatctgcactggaatttgtttggtcatcagaaggagaatatgcaattagggaaagtacatcaagaataaagattttcagtaaatcatttcaggagaagaaaactatccgcccttcattttcagcagagcgtatttttggtggggtattgttggcaatgtgttctagtgatttcatctgcttttatgactgggttgattgtagactaatacgccgaatcgatgtgaatgttaagaacgtttactgggctgatagtggtgacctagttgcaatagcaagtgatacatcattctacatcctcaagtacaatagagatgttgttgcttcttatctagaaggtggaaagcctgtggatgaaggtgtcgaagatgcttttgagctgcttcacgaggtcaatgagcgagtgagaactggaatttgggttggagactgctttatctataacaactcgttgtggcgcctaaattattgtgttggtggtgaggtcactacaatgtatcatttggatcgccctatgtacctattgggatatcttgcgaaccaaagtcgagtttatcttattgacaaggagtttaatatcattgggtacacattacttctgagtttgattgagtacaagacccttgtgatgcgtggggatttggaacatgcaaatgaaattttatcatccataccaaaggcacaatacaatagtgttgctcattttttggaatctagaggtatgttggaagaggctcttgagatagccacggatgctgactacaagtttgacctagctgtgcagcttggaaaattagatgttgcaaaggctatcgtcatagaagcacagagtgaatctaaatggaagcagttgggtgaactcgccatgtccacaggcaagctagagatggcggaggaatgccttcttcaagcgaaggatttaagtggcttgttgctattgtactcatctcttggagatgctgaaggaattgaaaagcttgcttctttggcaaaagaacatggaaaaaacaatgttgctttcctctgccttttcatgcttggtaaagtggaagattgcatacagttgcttgtagacagtagccgtatacctgaagctgcactaatggcgcgatcgtatcttcctagcaaagtaccagaaatagtagcaatttggagaaacgacctcagtaaaattaatccaaaagctgcagagtctctggcagatccttctgaatatccaaatttatttgaagactggcaggttgctctaactgtagaaaaaagcgttgcttctcagagggatcattatcctcctgctgaccaatacttgaatcatgctgagaagtcaggcatgattcttgtggaagctttcaaaaggatgcaggtcattgagcatgaggaacctgaagatgcagctgaggaaaatggagaacctgatcaacagtgctaactgaacatgaataggggccgagggaagcacaacgcattggctgcaaatgttattttttcccgagggtaacaaatgtggcccccagttttaccctgaagcaccggaaactggtgatgcttgtggccattggaggccacctgatgcttgtccgatctttctgagtgaaccccaagcttgacatattgatgcttgctacacttttggtgtcgatatgcttcttctgccaacaacataggcaattctttcttctcggatcatctgcggacccgatttctatgcgctcgaaccaatgaactgggtggggactgtggagccattttgtgatgaatagttcgaataatcagtatagaggtacgttgtaagatatgccagattaccatagccatcgaattctcctaggagatgacagtttttgttagccattcattgtaatgatgttacttgataaggaaggttacgtgtagtatatgattgcggttgcgggccgagggttttgcccatgttatacttatatatagtggtatcaatccatcggatcggaggctctcgtctactgatgcctaatcaatgccgatgactgcgagaattcaatgcctagatatgcagtgtaacagtgtctcgctgcacacctattcatcgtttcaaaccatggtccatggaatttattttgatgctg

SEQ ID NO: 61270 - DNA, 3254 bp, Zea Mays
cttgagtacaaaacgggggatttaccttaggcaatggtgaaatcatttgaagtttcagaactgccagtgaggtcggcaaaatttatttcaaggaaacaatgggttgtagctggtgcagacgacatgttcattcgtgtctacaactacaataccatggacaaagtcaaagtttttgaggctcatactgattacattagatgtgttgcagtccatccaactctaccatatgtgctgtcatcatctgatgacatgttaataaaactgtgggactgggataaagggtggatgtgcactcaaatttttgagggacattcacactatgtgatgcaggttactttcaacccaaaggatattaacacttttgcaagtgcatctcttgatcgcactacaaagatatggagtttaggttctccagatccaaacttcacacttgatggacatcaaaagggtgtcaattgtgttgactacttcactggtggtgacaggccctatttgattactggttctgatgactccactgcaaaggtctgggattaccagacgaaaagctgtgttcagacacttgaagggcatacacataacatttctgctgtttgtttccatcctgagctccctataatcattactggatccgaagatggtacagttcgtatatggcattcaacaacttacagacttgagaacacactaaactatggccttgagagagtctgggctgttggatacatgaagggatcaagaaggatggtgattggttatgacgagggggccattatgataaaaatgggccgtgaagtacctatagcaagtatggataccggtgggaaaatcatttgggcgaaacataatgaaatacaaactgtaaatattaagacagtcggtgcaggctttgaggtcacagacggagagagattaccgttggctgtaaaagagttaggaagctgtgatttgtacccacagagcttgaagcataatcctaatggacggttcgttgttgtatgtggagatggtgagtacataatttatactgccctggcctggaggaataggtcatttggatctgcactggaatttgtttggtcatcagaaggagaatatgcaattagggaaagtacatcaagaataaagattttcagtaaatcatttcaggagaagaaaactatccgcccttcattttcagcagagcgtatttttggtggggtattgttggcaatgtgttctagtgatttcatctgcttttatgactgggttgattgtagactaatacgccgaatcgatgtgaatgttaagaacgtttactgggctgatagtggtgacctagttgcaatagcaagtgatacatcattctacatcctcaagtacaatagagatgttgttgcttcttatctagaaggtggaaagcctgtggatgaaggtgtcgaagatgcttttgagctgcttcacgaggtcaatgagcgagtgagaactggaatttgggttggagactgctttatctataacaactcgttgtggcgcctaaattattgtgttggtggtgaggtcactacaatgtatcatttggatcgccctatgtacctattgggatatcttgcgaaccaaagtcgagtttatcttattgacaaggagtttaatatcattgggtacacattacttctgagtttgattgagtacaagacccttgtgatgcgtggggatttggaacatgcaaatgaaattttatcatccataccaaaggcacaatacaatagtgttgctcattttttggaatctagaggtatgttggaagaggctcttgagatagccacggatgctgactacaagtttgacctagctgtgcagcttggaaaattagatgttgcaaaggctatcgtcatagaagcacagagtgaatctaaatggaagcagttgggtgaactcgccatgtccacaggcaagctagagatggcggaggaatgccttcttcaagcgaaggatttaagtggcttgttgctattgtactcatctcttggagatgctgaaggaattgaaaagcttgcttctttggcaaaagaacatggaaaaaacaatgttgctttcctctgccttttcatgcttggtaaagtggaagattgcatacagttgcttgtagacagtagccgtatacctgaagctgcactaatggcgcgatcgtatcttcctagcaaagtaccagaaatagtagcaatttggagaaacgacctcagtaaaattaatccaaaagctgcagagtctctggcagatccttctgaatatccaaatttatttgaagactggcaggttgctctaactgtagaaaaaagcgttgcttctcagagggatcattatcctcctgctgaccaatacttgaatcatgctgagaagtcaggcatgattcttgtggaagctttcaaaaggatgcaggtcattgagcatgaggaacctgaagatgcagctgaggaaaatggagaacctgatcaacaggcatcggaagagaaggaaatgcataacacagatgatgctgatgaacatgaagagacagtttcagtaaatgggaacgagggtgaggaacagcaggtgctaactgaacatgaataggggccgagggaagcacaacgcattggctgcaaatgttattttttcccgagggtaacaaatgtggcccccagttttaccctgaagcaccggaaactggtgatgcttgtggccattggaggccacctgatgcttgtccgatctttctgagtgaaccccaagcttgacatattgatgcttgctacacttttggtgtcgatatgcttcttctgccaacaacataggcaattctttcttctcggatcatctgcggacccgatttctatgcgctcgaaccaatgaactgggtggggactgtggagccattttgtgatgaatagttcgaataatcagtatagaggtacgttgtaagatatgccagattaccatagccatcgaattctcctaggagatgacagtttttgttagccattcattgtaatgatgttacttgataaggaaggttacgtgtagtatatgattgcggttgcgggccgagggttttgcccatgttatacttatatatagtggtatcaatccatcggatcggaggctctcgtctactgatgcctaatcaatgccgatgactgcgagaattcaatgcctagatatgcagtgtaacagtgtctcgctgcacacctattcatcgtttcaaaccatggtccatggaatttattttgatgctg

SEQ ID NO: 61271 - DNA, 3811 bp, Zea Mays
aacgccatgtgcatgagttcataccaatgttagtaaataagatatgaaccaaacataacattagggtttactcccttaatgctggatcctttactccagatcatctttgctgttgctatgatctatggtgttgcctatataaggtgctgacatgctgtagaactttgcacatctaagtttcagttatgagctttaataactttatggccacctttcttatttctttcactatatgttgttcaagtatatatagcattatggctacaaacagcacttgatctttcggacacattattacacatctacaatctacattgaatttttgatcctgggttaccgttgatagttcattttcgtttaccactgcgtgacacttaatgattatgttctcccttttttagccactctgcatttctgtgagctaaggtgttaacctaatgaccttttaaattgttgtataatatgacccatttctgtttcgtttctgtcactaatcttcatgttcatggttgtgggctgaaccaatatgtgtctgagctgcattgtcgagctattacatatcacatatgcacctgcagttctgcaagatctgtatgcttgagtacaaaacgggggatttaccttaggcaatggtgaaatcatttgaagtttcagaactgccagtgaggtcggcaaaatttatttcaaggaaacaatgggttgtagctggtgcagacgacatgttcattcgtgtctacaactacaataccatggacaaagtcaaagtttttgaggctcatactgattacattagatgtgttgcagtccatccaactctaccatatgtgctgtcatcatctgatgacatgttaataaaactgtgggactgggataaagggtggatgtgcactcaaatttttgagggacattcacactatgtgatgcaggttactttcaacccaaaggatattaacacttttgcaagtgcatctcttgatcgcactacaaagatatggagtttaggttctccagatccaaacttcacacttgatggacatcaaaagggtgtcaattgtgttgactacttcactggtggtgacaggccctatttgattactggttctgatgactccactgcaaaggtctgggattaccagacgaaaagctgtgttcagacacttgaagggcatacacataacatttctgctgtttgtttccatcctgagctccctataatcattactggatccgaagatggtacagttcgtatatggcattcaacaacttacagacttgagaacacactaaactatggccttgagagagtctgggctgttggatacatgaagggatcaagaaggatggtgattggttatgacgagggggccattatgataaaaatgggccgtgaagtacctatagcaagtatggataccggtgggaaaatcatttgggcgaaacataatgaaatacaaactgtaaatattaagacagtcggtgcaggctttgaggtcacagacggagagagattaccgttggctgtaaaagagttaggaagctgtgatttgtacccacagagcttgaagcataatcctaatggacggttcgttgttgtatgtggagatggtgagtacataatttatactgccctggcctggaggaataggtcatttggatctgcactggaatttgtttggtcatcagaaggagaatatgcaattagggaaagtacatcaagaataaagattttcagtaaatcatttcaggagaagaaaactatccgcccttcattttcagcagagcgtatttttggtggggtattgttggcaatgtgttctagtgatttcatctgcttttatgactgggttgattgtagactaatacgccgaatcgatgtgaatgttaagaacgtttactgggctgatagtggtgacctagttgcaatagcaagtgatacatcattctacatcctcaagtacaatgtggaaagcctgtggatgaaggtgtcgaagatgcttttgagctgcttcacgaggtcaatgagcgagtgagaactggaatttgggttggagactgctttatctataacaactcgttgtggcgcctaaattattgtgttggtggtgaggtcactacaatgtatcatttggatcgccctatgtacctattgggatatcttgcgaaccaaagtcgagtttatcttattgacaaggagtttaagtgcgctttctctaaaacaatgtttcctttcttttgtaacatctgctgttaatttctgtgactaacatataagcttgatacagtatcattgggtacacattacttctgagtttgattgagtacaagacccttgtgatgcgtggggatttggaacatgcaaatgaaattttatcatccataccaaaggcacaatacaatagtgttgctcattttttggaatctagaggtatgttggaagaggctcttgagatagccacggatgctgactacaagtttgacctagctgtgcagcttggaaaattagatgttgcaaaggctatcgtcatagaagcacagagtgaatctaaatggaagcagttgggtgaactcgccatgtccacaggcaagctagagatggcggaggaatgccttcttcaagcgaaggatttaagtggcttgttgctattgtactcatctcttggagatgctgaaggaattgaaaagcttgcttctttggcaaaagaacatggaaaaaacaatgttgctttcctctgccttttcatgcttggtaaagtggaagattgcatacagttgcttgtagacagtagccgtatacctgaagctgcactaatggcgcgatcgtatcttcctagcaaagtaccagaaatagtagcaatttggagaaacgacctcagtaaaattaatccaaaagctgcagagtctctggcagatccttctgaatatccaaatttatttgaagactggcaggttgctctaactgtagaaaaaagcgttgcttctcagagggatcattatcctcctgctgaccaatacttgaatcatgctgagaagtcaggcatgattcttgtggaagctttcaaaaggatgcaggtcattgagcatgaggaacctgaagatgcagctgaggaaaatggagaacctgatcaacagtgctaactgaacatgaataggggccgagggaagcacaacgcattggctgcaaatgttattttttcccgagggtaacaaatgtggcccccagttttaccctgaagcaccggaaactggtgatgcttgtggccattggaggccacctgatgcttgtccgatctttctgagtgaaccccaagcttgacatattgatgcttgctacacttttggtgtcgatatgcttcttctgccaacaacataggcaattctttcttctcggatcatctgcggacccgatttctatgcgctcgaaccaatgaactgggtggggactgtggagccattttgtgatgaatagttcgaataatcagtatagaggtacgttgtaagatatgccagattaccatagccatcgaattctcctaggagatgacagtttttgttagccattcattgtaatgatgttacttgataaggaaggttacgtgtagtatatgattgcggttgcgggccgagggttttgcccatgttatacttatatatagtggtatcaatccatcggatcggaggctctcgtctactgatgcctaatcaatgccgatgactgcgagaattcaatgcctagatatgcagtgtaacagtgtctcgctgcacacctattcatcgtttcaaaccatggtccatggaatttattttgatgctg

SEQ ID NO: 61272 - DNA, 3765 bp, Zea Mays
gtttttggaaacgccatgtgcatgagttcataccaatgttagtaaataagatatgaaccaaacataacattagggtttactcccttaatgctggatcctttactccagatcatctttgctgttgctatgatctatggtgttgcctatataaggtgctgacatgctgtagaactttgcacatctaagtttcagttatgagctttaataactttatggccacctttcttatttctttcactatatgttgttcaagtatatatagcattatggctacaaacagcacttgatctttcggacacattattacacatctacaatctacattgaatttttgatcctgggttaccgttgatagttcattttcgtttaccactgcgtgacacttaatgattatgttctcccttttttagccactctgcatttctgtgagctaaggtgttaacctaatgaccttttaaattgttgtataatatgacccatttctgtttcgtttctgtcactaatcttcatgttcatggttgtgggctgaaccaatatgtgtctgagctgcattgtcgagctattacatatcacatatgcacctgcagttctgcaagatctgtatgcttgagtacaaaacgggggatttaccttaggcaatggtgaaatcatttgaagtttcagaactgccagtgaggtcggcaaaatttatttcaaggaaacaatgggttgtagctggtgcagacgacatgttcattcgtgtctacaactacaataccatggacaaagtcaaagtttttgaggctcatactgattacattagatgtgttgcagtccatccaactctaccatatgtgctgtcatcatctgatgacatgttaataaaactgtgggactgggataaagggtggatgtgcactcaaatttttgagggacattcacactatgtgatgcaggttactttcaacccaaaggatattaacacttttgcaagtgcatctcttgatcgcactacaaagatatggagtttaggttctccagatccaaacttcacacttgatggacatcaaaagggtgtcaattgtgttgactacttcactggtggtgacaggccctatttgattactggttctgatgactccactgcaaaggtctgggattaccagacgaaaagctgtgttcagacacttgaagggcatacacataacatttctgctgtttgtttccatcctgagctccctataatcattactggatccgaagatggtacagttcgtatatggcattcaacaacttacagacttgagaacacactaaactatggccttgagagagtctgggctgttggatacatgaagggatcaagaaggatggtgattggttatgacgagggggccattatgataaaaatgggccgtgaagtacctatagcaagtatggataccggtgggaaaatcatttgggcgaaacataatgaaatacaaactgtaaatattaagacagtcggtgcaggctttgaggtcacagacggagagagattaccgttggctgtaaaagagttaggaagctgtgatttgtacccacagagcttgaagcataatcctaatggacggttcgttgttgtatgtggagatggtgagtacataatttatactgccctggcctggaggaataggtcatttggatctgcactggaatttgtttggtcatcagaaggagaatatgcaattagggaaagtacatcaagaataaagattttcagtaaatcatttcaggagaagaaaactatccgcccttcattttcagcagagcgtatttttggtggggtattgttggcaatgtgttctagtgatttcatctgcttttatgactgggttgattgtagactaatacgccgaatcgatgtgaatgttaagaacgtttactgggctgatagtggtgacctagttgcaatagcaagtgatacatcattctacatcctcaagtacaatagagatgttgttgcttcttatctagaaggtggaaagcctgtggatgaaggtgtcgaagatgcttttgagctgcttcacgaggtcaatgagcgagtgagaactggaatttgggttggagactgctttatctataacaactcgttgtggcgcctaaattattgtgttggtggtgaggtcactacaatgtatcatttggatcgccctatgtacctattgggatatcttgcgaaccaaagtcgagtttatcttattgacaaggagtttaatatcattgggtacacattacttctgagtttgattgagtacaagacccttgtgatgcgtggggatttggaacatgcaaatgaaattttatcatccataccaaaggcacaatacaatagtgttgctcattttttggaatctagaggtatgttggaagaggctcttgagatagccacggatgctgactacaagtttgacctagctgtgcagcttggaaaattagatgttgcaaaggctatcgtcatagaagcacagagtgaatctaaatggaagcagttgggtgaactcgccatgtccacaggcaagctagagatggcggaggaatgccttcttcaagcgaaggatttaagtggcttgttgctattgtactcatctcttggagatgctgaaggaattgaaaagcttgcttctttggcaaaagaacatggaaaaaacaatgttgctttcctctgccttttcatgcttggtaaagtggaagattgcatacagttgcttgtagacagtagccgtatacctgaagctgcactaatggcgcgatcgtatcttcctagcaaagtaccagaaatagtagcaatttggagaaacgacctcagtaaaattaatccaaaagctgcagagtctctggcagatccttctgaatatccaaatttatttgaagactggcaggttgctctaactgtagaaaaaagcgttgcttctcagagggatcattatcctcctgctgaccaatacttgaatcatgctgagaagtcaggcatgattcttgtggaagctttcaaaaggatgcaggtcattgagcatgaggaacctgaagatgcagctgaggaaaatggagaacctgatcaacagtgctaactgaacatgaataggggccgagggaagcacaacgcattggctgcaaatgttattttttcccgagggtaacaaatgtggcccccagttttaccctgaagcaccggaaactggtgatgcttgtggccattggaggccacctgatgcttgtccgatctttctgagtgaaccccaagcttgacatattgatgcttgctacacttttggtgtcgatatgcttcttctgccaacaacataggcaattctttcttctcggatcatctgcggacccgatttctatgcgctcgaaccaatgaactgggtggggactgtggagccattttgtgatgaatagttcgaataatcagtatagaggtacgttgtaagatatgccagattaccatagccatcgaattctcctaggagatgacagtttttgttagccattcattgtaatgatgttacttgataaggaaggttacgtgtagtatatgattgcggttgcgggccgagggttttgcccatgttatacttatatatagtggtatcaatccatcggatcggaggctctcgtctactgatgcctaatcaatgccgatgactgcgagaattcaatgcctagatatgcagtgtaacagtgtctcgctgcacacctattcatcgtttcaaaccatggtccatggaatttattttgatgctg

SEQ ID NO: 61273 - DNA, 3675 bp, Zea Mays
ccttttccgttttctccctcactgtcgctcgccggtcctggctccgcgcctgcgccaccgggttcgcgtcggattcgctccctcttcgccgcgccccaccactccatcgtcgctgggggatctctagggtttagcgcagtcgccggctccacctcgcgccgtcctcgccgccgccaccaccaccaccaccatggtacgtggatctgaacccgctcgctcccgaatttccaacccattggccggtttttctcgagcccggttcatgacgtttgctcagagatctgaccgatgttgttctccgctcgtgttccctgcagccgctcaggttggagatcaagcggaagttcgctcaacggtcggagagggtcaagtcggtggatttgcaccccacggagccatggatcctgtcgagtctgtactcggggagtgtctgcatctgggattatcaagcacaggcaatggtgaaatcatttgaagtttcagaactgccagtgaggtcggcaaaatttatttcaaggaaacaatgggttgtagctggtgcagacgacatgttcattcgtgtctacaactacaataccatggacaaagtcaaagtttttgaggctcatactgattacattagatgtgttgcagtccatccaactctaccatatgtgctgtcatcatctgatgacatgttaataaaactgtgggactgggataaagggtggatgtgcactcaaatttttgagggacattcacactatgtgatgcaggttactttcaacccaaaggatattaacacttttgcaagtgcatctcttgatcgcactacaaagatatggagtttaggttctccagatccaaacttcacacttgatggacatcaaaagggtgtcaattgtgttgactacttcactggtggtgacaggccctatttgattactggttctgatgactccactgcaaaggtctgggattaccagacgaaaagctgtgttcagacacttgaagggcatacacataacatttctgctgtttgtttccatcctgagctccctataatcattactggatccgaagatggtacagttcgtatatggcattcaacaacttacagacttgagaacacactaaactatggccttgagagagtctgggctgttggatacatgaagggatcaagaaggatggtgattggttatgacgagggggccattatgataaaaatgggccgtgaagtacctatagcaagtatggataccggtgggaaaatcatttgggcgaaacataatgaaatacaaactgtaaatattaagacagtcggtgcaggctttgaggtcacagacggagagagattaccgttggctgtaaaagagttaggaagctgtgatttgtacccacagagcttgaagcataatcctaatggacggttcgttgttgtatgtggagatggtgagtacataatttatactgccctggcctggaggaataggtcatttggatctgcactggaatttgtttggtcatcagaaggagaatatgcaattagggaaagtacatcaagaataaagattttcagtaaatcatttcaggagaagaaaactatccgcccttcattttcagcagagcgtatttttggtggggtattgttggcaatgtgttctagtgatttcatctgcttttatgactgggttgattgtagactaatacgccgaatcgatgtgaatgttaagaacgtttactgggctgatagtggtgacctagttgcaatagcaagtgatacatcattctacatcctcaagtacaatagagatgttgttgcttcttatctagaaggtggaaagcctgtggatgaaggtgtcgaagatgcttttgagctgcttcacgaggtcaatgagcgagtgagaactggaatttgggttggagactgctttatctataacaactcgttgtggcgcctaaattattgtgttggtggtgaggtcactacaatgtatcatttggatcgccctatgtacctattgggatatcttgcgaaccaaagtcgagtttatcttattgacaaggagtttaatatcattgggtacacattacttctgagtttgattgagtacaagacccttgtgatgcgtggggatttggaacatgcaaatgaaattttatcatccataccaaaggcacaatacaatagtgttgctcattttttggaatctagaggtatgttggaagaggctcttgagatagccacggatgctgactacaagtttgacctagctgtgcagcttggaaaattagatgttgcaaaggctatcgtcatagaagcacagagtgaatctaaatggaagcagttgggtgaactcgccatgtccacaggcaagagatggcggaggaatgccttcttcaagcgaaggatttaagtggcttgttgctattgtactcatctcttggagatgctgaaggaattgaaaagcttgcttctttggcaaaagaacatggaaaaaacaatgttgctttcctctgccttttcatgcttggtaaagtggaagattgcatacagttgcttgtagacagtagccgtatacctgaagctgcactaatggcgcgatcgtatcttcctagcaaagtaccagaaatagtagcaatttggagaaacgacctcagtaaaattaatccaaaagctgcagagtctctggcagatccttctgaatatccaaatttatttgaagactggcaggttgctctaactgtagaaaaaagcgttgcttctcagagggatcattatcctcctgctgaccaatacttgaatcatgctgagaagtcaggcatgattcttgtggaagctttcaaaaggatgcaggtcattgagcatgaggaacctgaagatgcagctgaggaaaatggagaacctgatcaacaggcatcggaagagaaggaaatgcataacacagatgatgctgatgaacatgaagagacagtttcagtaaatgggaacgagggtgaggaacagcaggtgctaactgaacatgaataggggccgagggaagcacaacgcattggctgcaaatgttattttttcccgagggtaacaaatgtggcccccagttttaccctgaagcaccggaaactggtgatgcttgtggccattggaggccacctgatgcttgtccgatctttctgagtgaaccccaagcttgacatattgatgcttgctacacttttggtgtcgatatgcttcttctgccaacaacataggcaattctttcttctcggatcatctgcggacccgatttctatgcgctcgaaccaatgaactgggtggggactgtggagccattttgtgatgaatagttcgaataatcagtatagaggtacgttgtaagatatgccagattaccatagccatcgaattctcctaggagatgacagtttttgttagccattcattgtaatgatgttacttgataaggaaggttacgtgtagtatatgattgcggttgcgggccgagggttttgcccatgttatacttatatatagtggtatcaatccatcggatcggaggctctcgtctactgatgcctaatcaatgccgatgactgcgagaattcaatgcctagatatgcagtgtaacagtgtctcgctgcacacctattcatcgtttcaaaccatggtccatggaatttattttgatgctg

SEQ ID NO: 61274 - DNA, 3596 bp, Zea Mays
aaaaaaagcaattaagttagacacaaaacctcccttttccgttttctccctcactgtcgctcgccggtcctggctccgcgcctgcgccaccgggttcgcgtcggattcgctccctcttcgccgcgccccaccactccatcgtcgctgggggatctctagggtttagcgcagtcgccggctccacctcgcgccgtcctcgccgccgccaccaccaccaccaccatgccgctcaggttggagatcaagcggaagttcgctcaacggtcggagagggtcaagtcggtggatttgcaccccacggagccatggatcctgtcgagtctgtactcggggagtgtctgcatctgggattatcaagcacaggcaatggtgaaatcatttgaagtttcagaactgccagtgaggtcggcaaaatttatttcaaggaaacaatgggttgtagctggtgcagacgacatgttcattcgtgtctacaactacaataccatggacaaagtcaaagtttttgaggctcatactgattacattagatgtgttgcagtccatccaactctaccatatgtgctgtcatcatctgatgacatgttaataaaactgtgggactgggataaagggtggatgtgcactcaaatttttgagggacattcacactatgtgatgcaggttactttcaacccaaaggatattaacacttttgcaagtgcatctcttgatcgcactacaaagatatggagtttaggttctccagatccaaacttcacacttgatggacatcaaaagggtgtcaattgtgttgactacttcactggtggtgacaggccctatttgattactggttctgatgactccactgcaaaggtctgggattaccagacgaaaagctgtgttcagacacttgaagggcatacacataacatttctgctgtttgtttccatcctgagctccctataatcattactggatccgaagatggtacagttcgtatatggcattcaacaacttacagacttgagaacacactaaactatggccttgagagagtctgggctgttggatacatgaagggatcaagaaggatggtgattggttatgacgagggggccattatgataaaaatgggccgtgaagtacctatagcaagtatggataccggtgggaaaatcatttgggcgaaacataatgaaatacaaactgtaaatattaagacagtcggtgcaggctttgaggtcacagacggagagagattaccgttggctgtaaaagagttaggaagctgtgatttgtacccacagagcttgaagcataatcctaatggacggttcgttgttgtatgtggagatggtgagtacataatttatactgccctggcctggaggaataggtcatttggatctgcactggaatttgtttggtcatcagaaggagaatatgcaattagggaaagtacatcaagaataaagattttcagtaaatcatttcaggagaagaaaactatccgcccttcattttcagcagagcgtatttttggtggggtattgttggcaatgtgttctagtgatttcatctgcttttatgactgggttgattgtagactaatacgccgaatcgatgtgaatgttaagaacgtttactgggctgatagtggtgacctagttgcaatagcaagtgatacatcattctacatcctcaagtacaatagagatgttgttgcttcttatctagaaggtggaaagcctgtggatgaaggtgtcgaagatgcttttgagctgcttcacgaggtcaatgagcgagtgagaactggaatttgggttggagactgctttatctataacaactcgttgtggcgcctaaattattgtgttggtggtgaggtcactacaatgtatcatttggatcgccctatgtacctattgggatatcttgcgaaccaaagtcgagtttatcttattgacaaggagtttaatatcattgggtacacattacttctgagtttgattgagtacaagacccttgtgatgcgtggggatttggaacatgcaaatgaaattttatcatccataccaaaggcacaatacaatagtgttgctcattttttggaatctagaggtatgttggaagaggctcttgagatagccacggatgctgactacaagtttgacctagctgtgcagcttggaaaattagatgttgcaaaggctatcgtcatagaagcacagagtgaatctaaatggaagcagttgggtgaactcgccatgtccacaggcaagctagagatggcggaggaatgccttcttcaagcgaaggatttaagtggcttgttgctattgtactcatctcttggagatgctgaaggaattgaaaagcttgcttctttggcaaaagaacatggaaaaaacaatgttgctttcctctgccttttcatgcttggtaaagtggaagattgcatacagttgcttgtagacagtagccgtatacctgaagctgcactaatggcgcgatcgtatcttcctagcaaagtaccagaaatagtagcaatttggagaaacgacctcagtaaaattaatccaaaagctgcagagtctctggcagatccttctgaatatccaaatttatttgaagactggcaggttgctctaactgtagaaaaaagcgttgcttctcagagggatcattatcctcctgctgaccaatacttgaatcatgctgagaagtcaggcatgattcttgtggaagctttcaaaaggatgcaggtcattgagcatgaggaacctgaagatgcagctgaggaaaatggagaacctgatcaacaggtatctcatgcatcggaagagaaggaaatgcataacacagatgatgctgatgaacatgaagagacagtttcagtaaatgggaacgagggtgaggaacagcaggtgctaactgaacatgaataggggccgagggaagcacaacgcattggctgcaaatgttattttttcccgagggtaacaaatgtggcccccagttttaccctgaagcaccggaaactggtgatgcttgtggccattggaggccacctgatgcttgtccgatctttctgagtgaaccccaagcttgacatattgatgcttgctacacttttggtgtcgatatgcttcttctgccaacaacataggcaattctttcttctcggatcatctgcggacccgatttctatgcgctcgaaccaatgaactgggtggggactgtggagccattttgtgatgaatagttcgaataatcagtatagaggtacgttgtaagatatgccagattaccatagccatcgaattctcctaggagatgacagtttttgttagccattcattgtaatgatgttacttgataaggaaggttacgtgtagtatatgattgcggttgcgggccgagggttttgcccatgttatacttatatatagtggtatcaatccatcggatcggaggctctcgtctactgatgcctaatcaatgccgatgactgcgagaattcaatgcctagatatgcagtgtaacagtgtctcgctgcacacctattcatcgtttcaaaccatggtccatggaatttattttgatgctg

SEQ ID NO: 61275 - DNA, 929 bp, Zea Mays
tggtcgcctgaccacgccccatgcgtgttagcaccttacaaggagatttgagggcgccacgtgtgatgcccgctgtgccgtcgccaacatctcactgcaggggaagtatctcgacggcacgctccacctgccctcccatggatccgcccctggccggccactacctcaactacaacacgctctagcggcatccagcaggagctggctgcggatcccgcaaacggtgccaagaccgtgcgcaagccggtcttcaccaccgtcaaccagttgcgcccccagatgcatggccacactcttgtcgtctgcgtcgtctccgcccacaccatcatcgacaaatcttccatgcacattggtcgcacctgcatcgccaagtgcctcgtcggatacaacaccgacaccgtcctcatcacacccgcaacaattaggcaaatttgtcatagatacactcacggtgtgctggtgtgtatgtgtggaggaagagcctgacggaggctaagggagaggaatcagtagagcaaatcagcaagatgagacagatgtgtagctgctggtgtttctccactatcgcgacctcactgctcaagcatggcctatatagagtgacgagaacaccatggaacggagttgtgctgttgtggtgcggagtaggagcgtctaagcgaggagagaatcacaggcgatttctctcattgttgttttggcgtcgtttctaattctatgttgaaacaaagtgtttgtctcattagggcgtgtctcctcgctttttctcgcataagaatccagtaaaaaggttctccaaataggctctttgactactacagttcatcgattcgattctcccatctatatcctttgtggttgcccatccggctatcccattatttacttttggttgatgttgttttagttttgttgcatttcctatcgat

SEQ ID NO: 61276 - DNA, 985 bp, Zea Mays
ctcgtggccaggtgtcaagtgaggcccgcacggcggacgaagacaaggtgcgtgtgcttctggcgctacggggccgtgcgctggaacggacggccgccagcacccatcgtggtcgcctgaccacgccccatgcgtgttagcaccttacaaggagatttgagggcgccacgtgtgatgcccgctgtgccgtcgccaacatctcactgcaggggaagtatctcgacggcacgctccacctgccctcccatggatccgcccctggccggccactacctcaactacaacacgctctagcggcatccagcaggagctggctgcggatcccgcaaacggtgccaagaccgtgcgcaagccggtcttcaccaccgtcaaccagttgcgcccccagatgcatggccacactcttgtcgtctgcgtcgtctccgcccacaccatcatcgacaaatcttccatgcacattggtcgcacctgcatcgccaagtgcctcgtcggatacaacaccgacaccgtcctcatcacacccgcaacaattaggagcctgacggaggctaagggagaggaatcagtagagcaaatcagcaagatgagacagatgtgtagctgctggtgtttctccactatcgcgacctcactgctcaagcatggcctatatagagtgacgagaacaccatggaacggagttgtgctgttgtggtgcggagtaggagcgtctaagcgaggagagaatcacaggcgatttctctcattgttgttttggcgtcgtttctaattctatgttgaaacaaagtgtttgtctcattagggcgtgtctcctcgctttttctcgcataagaatccagtaaaaaggttctccaaataggctctttgactactacagttcatcgattcgattctcccatctatatcctttgtggttgcccatccggctatcccattatttacttttggttgatgttgttttagttttgttgcatttcctatcgat

SEQ ID NO: 61277 - DNA, 805 bp, Zea Mays
tgccttccatccttaccctatcccctctcattcttatcttggcggcggcgcaggcgcaggcgagcggccgtccagtcgcgcgggcagcagggggcggccgtccgtccaggcgcaggcgagcggccgtccgtccagcgcaggctagcggccatccgtccaggcgaactgcgagcaggcgtccgtccaaacgaactgcgagcgtccgtccaggcttccgtccagcgagcggcacaacttttctacgcacaacacattccaagaaccaaaaatgtatggctgaaacagagattgatgagggagatggtaatgctgttcctagtcctatagatgatattggggcttcatcctcagctcctagacctaggaagaaggcaagggttactggtaaagaagaggcagggctgtttggagcattcaaagatggtgctgaaaggcttgcaatggctattgagaaggctggttcagatgacctaccacctgacttgcttcaaacattgcaaagtattccaggttttgatgacacacacaaggccttttactttgcatatctagtgaaaaatcctagattggcaaggcagttccctactctcccattgacatatcagataagtttgcttgctcgcttcgttagtgagaactttccttagattatgaggaccgggaattaggactatgttggaggttaagtggaaattagaactatgttgttcttttgttatgtaataatggctttgctatgtcgaaatactgggtttgttatgaaatattgggtttgttatgaccaacacggatgctcggtttgttt

SEQ ID NO: 61278 - DNA, 1147 bp, Zea Mays
caaaaacgagcggacggatccgcccccgcccctctcgcgaccgcgcaggcgagcggccgtccagtcgcgcgggcagcagggggcggccgtccgtccaggcgcaggcgagcggccgtccgtccagcgcaggctagcggccatccgtccaggcgaactgcgagcaggcgtccgtccaaacgaactgcgagcgtccgtccaggcttccgtccagcgagcggcacaacttttctacgcacaacacattccaagaaccaaaaatggagagtgaaggagctggtgagcactttgtggaacaagctgatggtagtggccatgttgtgtggacttctgcaatgtccgcttacatgctcagtaacctagcaagccttgtggttgaagggatcaggacatcaacaggcttcaagaaagttcaccttaacatgtgtgctaaggctctaaatgactatttcaagatgaagctcactggagaacaagatcacaaatctgatgctgagtttttaaacaagcctttggagaactataaggaaatgttcattgtctttggaaacaatatggctataggaaagtatgcaaaaggatcaagtgaagctctaggtactgaagatagaaaatgtatggctgaaacagagattgatgagggagatggtaatgctgttcctagtcctatagatgatattggggcttcatcctcagctcctagacctaggaagaaggcaagggttactggtaaagaagaggcagggctgtttggagcattcaaagatggtgctgaaaggcttgcaatggctattgagaaggctggttcagatgacctaccacctgacttgcttcaaacattgcaaagtattccaggttttgatgacacacacaaggccttttactttgcatatctagtgaaaaatcctagattggcaaggcagttccctactctcccattgacatatcagataagtttgcttgctcgcttcgttagtgagaactttccttagattatgaggaccgggaattaggactatgttggaggttaagtggaaattagaactatgttgttcttttgttatgtaataatggctttgctatgtcgaaatactgggtttgttatgaaatattgggtttgttatgaccaacacggatgctcggtttgttt

SEQ ID NO: 61279 - DNA, 1908 bp, Zea Mays
ccccaaaccatttttcggtggcagcgctgtccagcaaaaacgagcggacggatccgcccccgcccctctcgcgaccgtaaaaaatcgtcttgccttccatccttaccctatcccctctcattcttatcttggcggcggcgcaggcgcaggcgagcggccgtccagtcgcgcgggcagcagggggcggccgtccgtccaggcgcaggcgagcggccgtccgtccagcgcaggctagcggccatccgtccaggcgaactgcgagcaggcgtccgtccaaacgaactgcgagcgtccgtccaggcttccgtccagcgagcggcacaacttttctacgcacaacacattccaagaaccagggggaaaatgtcgttctagctactacactatcatcgtcaggcactcaggccacacgatgcttgctttagcgtctggttctggttcatcgtcttcatcatcccgcaacatttaccacgcactgctgcatttgcactgcaccacagcccgagaactgaacgtactggttctggttctgcctttgcccaacaccagcgacgacagccactgtctgttcgagatctgccgagtcctgtctctggtgaaaatggagagtgaaggagctggtgagcactttgtggaacaagctgatggtagtggccatgttgtgtggacttctgcaatgtccgcttacatgctcagtaacctagcaagccttgtggttgaagggatcaggacatcaacaggcttcaagaaagttcaccttaacatgtgtgctaaggctctaaatgactatttcaagatgaagctcactggagaacaagtgaagaaccatttgagcatattgttactatatttcagcatattacttttacatgtactgttaatatattttagcatattacttttacatgtattattactatatttcagcatattacttttacatgtaccattatttgtattgttaccattattttttcgttcttttttatgaatccgtcagatctttctggtaataacagcctgcaggctgtgcttcatttattcttggaatgcatgatacaaacatttagtgggttttagatgtaaattaatttgtagtgtgaaatccaaaattgcctcaattaactcatttctattatcttcttacgttctgtccaggacacagggttttcaacatatgcaactgatagtgctggtcgttttgcccttaccaagctgttacttttacatgcaggatcacaaatctgatgctgagtttttaaacaagcctttggagaactataaggaaatgttcattgtctttggaaacaatatggctataggaaagtatgcaaaaggatcaagtgaagctctaggtactgaagatagaaaatgtatggctgaaacagagattgatgagggagatggtaatgctgttcctagtcctatagatgatattggggcttcatcctcagctcctagacctaggaagaaggcaagggttactggtaaagaagaggcagggctgtttggagcattcaaagatggtgctgaaaggcttgcaatggctattgagaaggctggttcagatgacctaccacctgacttgcttcaaacattgcaaagtattccaggttttgatgacacacacaaggccttttactttgcatatctagtgaaaaatcctagattggcaaggcagttccctactctcccattgacatatcagataagtttgcttgctcgcttcgttagtgagaactttccttagattatgaggaccgggaattaggactatgttggaggttaagtggaaattagaactatgttgttcttttgttatgtaataatggctttgctatgtcgaaatactgggtttgttatgaaatattgggtttgttatgaccaacacggatgctcggtttgttt

SEQ ID NO: 61280 - DNA, 1869 bp, Zea Mays
ccccaaaccatttttcggtggcagcgctgtccagcaaaaacgagcggacggatccgcccccgcccctctcgcgaccgtaaaaaatcgtcttgccttccatccttaccctatcccctctcattcttatcttggcggcggcgcaggcgcaggcgagcggccgtccagtcgcgcgggcagcagggggcggccgtccgtccaggcgcaggcgagcggccgtccgtccagcgcaggctagcggccatccgtccaggcgaactgcgagcaggcgtccgtccaaacgaactgcgagcgtccgtccaggcttccgtccagcgagcggcacaacttttctacgcacaacacattccaagaaccagtacttttctatgctctttttcgttgtgctactagatcaggggaaaatgcgatggttcacgttacaacataatttacatctcatatgccatctgttctaaatccgtattcaaggggggaaaatgtcgttctagctactacactatcatcgtcaggcactcaggccacacgatgcttgctttagcgtctggttctggttcatcgtcttcatcatcccgcaacatttaccacgcactgctgcatttgcactgcaccacagcccgagaactgaacgtactggttctggttctgcctttgcccaacaccagcgacgacagccactgtctgttcgagatctgccgagtcctgtctctggtggggctttagagaccggggtttacttgaagatacaatacacatgtgtgttgaggaacaagtggccatgtttttgaacacagtgggacataaccttaggaataggttggtgggaacaaattatggtagatctggtgagactgttagtcgctacttcaacaaagtgcttcgtgctattggagagctacgagctgaacttattaggccaccatcattagagactccatccaaaatagcaggaaatccaagatgggatccctactttaagaaaatggagagtgaaggagctggtgagcactttgtggaacaagctgatggtagtggccatgttgtgtggacttctgcaatgtccgcttacatgctcagtaacctagcaagccttgtggttgaagggatcaggacatcaacaggcttcaagaaagttcaccttaacatgtgtgctaaggctctaaatgactatttcaagatgaagctcactggagaacaagatcacaaatctgatgctgagtttttaaacaagcctttggagaactataaggaaatgttcattgtctttggaaacaatatggctataggaaagtatgcaaaaggatcaagtgaagctctaggtactgaagatagaaaatgtatggctgaaacagagattgatgagggagatggtaatgctgttcctagtcctatagatgatattggggcttcatcctcagctcctagacctaggaagaaggcaagggttactggtaaagaagaggcagggctgtttggagcattcaaagatggtgctgaaaggcttgcaatggctattgagaaggctggttcagatgacctaccacctgacttgcttcaaacattgcaaagtattccaggttttgatgacacacacaaggccttttactttgcatatctagtgaaaaatcctagattggcaaggcagttccctactctcccattgacatatcagataagtttgcttgctcgcttcgttagtgagaactttccttagattatgaggaccgggaattaggactatgttggaggttaagtggaaattagaactatgttgttcttttgttatgtaataatggctttgctatgtcgaaatactgggtttgttatgaaatattgggtttgttatgaccaacacggatgctcggtttgttt

SEQ ID NO: 61281 - DNA, 1567 bp, Zea Mays
ccccaaaccatttttcggtggcagcgctgtccagcaaaaacgagcggacggatccgcccccgcccctctcgcgaccgtaaaaaatcgtcttgccttccatccttaccctatcccctctcattcttatcttggcggcggcgcaggcgcaggcgagcggccgtccagtcgcgcgggcagcagggggcggccgtccgtccaggcgcaggcgagcggccgtccgtccagcgcaggctagcggccatccgtccaggcgaactgcgagcaggcgtccgtccaaacgaactgcgagcgtccgtccaggcttccgtccagcgagcggcacaacttttctacgcacaacacattccaagaaccagggctttagagaccggggtttacttgaagatacaatacacatgtgtgttgaggaacaagtggccatgtttttgaacacagtgggacataaccttaggaataggttggtgggaacaaattatggtagatctggtgagactgttagtcgctacttcaacaaagtgcttcgtgctattggagagctacgagctgaacttattaggccaccatcattagagactccatccaaaatagcaggaaatccaagatgggatccctactttaagaaaatggagagtgaaggagctggtgagcactttgtggaacaagctgatggtagtggccatgttgtgtggacttctgcaatgtccgcttacatgctcagtaacctagcaagccttgtggttgaagggatcaggacatcaacaggcttcaagaaagttcaccttaacatgtgtgctaaggctctaaatgactatttcaagatgaagctcactggagaacaagtgaagaaccatttgagcatattgttactatatttcagcatattacttttacatgatcacaaatctgatgctgagtttttaaacaagcctttggagaactataaggaaatgttcattgtctttggaaacaatatggctataggaaagtatgcaaaaggatcaagtgaagctctaggtactgaagatagaaaatgtatggctgaaacagagattgatgagggagatggtaatgctgttcctagtcctatagatgatattggggcttcatcctcagctcctagacctaggaagaaggcaagggttactggtaaagaagaggcagggctgtttggagcattcaaagatggtgctgaaaggcttgcaatggctattgagaaggctggttcagatgacctaccacctgacttgcttcaaacattgcaaagtattccaggttttgatgacacacacaaggccttttactttgcatatctagtgaaaaatcctagattggcaaggcagttccctactctcccattgacatatcagataagtttgcttgctcgcttcgttagtgagaactttccttagattatgaggaccgggaattaggactatgttggaggttaagtggaaattagaactatgttgttcttttgttatgtaataatggctttgctatgtcgaaatactgggtttgttatgaaatattgggtttgttatgaccaacacggatgctcggtttgttt

SEQ ID NO: 61282 - DNA, 1941 bp, Zea Mays
ggcgaggtgaaccccaaaccatttttcggtggcagcgctgtccagcaaaaacgagcggacggatccgcccccgcccctctcgcgaccgtaaaaaatcgtcttgccttccatccttaccctatcccctctcattcttatcttggcggcggcgcaggcgcaggcgagcggccgtccagtcgcgcgggcagcagggggcggccgtccgtccaggcgcaggcgagcggccgtccgtccagcgcaggctagcggccatccgtccaggcgaactgcgagcaggcgtccgtccaaacgaactgcgagcgtccgtccaggcttccgtccagcgagcggcacaacttttctacgcacaacacattccaagaaccagggctttagagaccggggtttacttgaagatacaatacacatgtgtgttgaggaacaagtggccatgtttttgaacacagtgggacataaccttaggaataggttggtgggaacaaattatggtagatctggtgagactgttagtcgctacttcaacaaagtgcttcgtgctattggagagctacgagctgaacttattaggccaccatcattagagactccatccaaaatagcaggaaatccaagatgggatccctactttaagaaaatggagagtgaaggagctggtgagcactttgtggaacaagctgatggtagtggccatgttgtgtggacttctgcaatgtccgcttacatgctcagtaacctagcaagccttgtggttgaagggatcaggacatcaacaggcttcaagaaagttcaccttaacatgtgtgctaaggctctaaatgactatttcaagatgaagctcactggagaacaagtgaagaaccatttgagcatattgttactatatttcagcatattacttttacatgtactgttaatatattttagcatattacttttacatgtattattactatatttcagcatattacttttacatgtaccattatttgtattgttaccattattttttcgttcttttttatgaatccgtcagatctttctggtaataacagcctgcaggctgtgcttcatttattcttggaatgcatgatacaaacatttagtgggttttagatgtaaattaatttgtagtgtgaaatccaaaattgcctcaattaactcatttctattatcttcttacgttctgtccaggacacagggttttcaacatatgcaactgatagtgctggtcgttttgcccttaccaagctgttacttttacatgcaggatcacaaatctgatgctgagtttttaaacaagcctttggagaactataaggaaatgttcattgtctttggaaacaatatggctataggaaagtatgcaaaaggatcaagtgaagctctaggtactgaagatagaaaatgtatggctgaaacagagattgatgagggagatggtaatgctgttcctagtcctatagatgatattggggcttcatcctcagctcctagacctaggaagaaggcaagggttactggtaaagaagaggcagggctgtttggagcattcaaagatggtgctgaaaggcttgcaatggctattgagaaggctggttcagatgacctaccacctgacttgcttcaaacattgcaaagtattccaggttttgatgacacacacaaggccttttactttgcatatctagtgaaaaatcctagattggcaaggcagttccctactctcccattgacatatcagataagtttgcttgctcgcttcgttagtgagaactttccttagattatgaggaccgggaattaggactatgttggaggttaagtggaaattagaactatgttgttcttttgttatgtaataatggctttgctatgtcgaaatactgggtttgttatgaaatattgggtttgttatgaccaacacggatgctcggtttgttt

SEQ ID NO: 61283 - DNA, 1705 bp, Zea Mays
ggcgaggtgaaccccaaaccatttttcggtggcagcgctgtccagcaaaaacgagcggacggatccgcccccgcccctctcgcgaccgtaaaaaatcgtcttgccttccatccttaccctatcccctctcattcttatcttggcggcggcgcaggcgcaggcgagcggccgtccagtcgcgcgggcagcagggggcggccgtccgtccaggcgcaggcgagcggccgtccgtccagcgcaggctagcggccatccgtccaggcgaactgcgagcaggcgtccgtccaaacgaactgcgagcgtccgtccaggcttccgtccagcgagcggcacaacttttctacgcacaacacattccaagaaccagtacttttctatgctctttttcgttgtgctactagatcaggggaaaatgcgatggttcacgttacaacataatttacatctcatatgccatctgttctaaatccgtattcaaggggggaaaatgtcgttctagctactacactatcatcgtcaggcactcaggccacacgatgcttgctttagcgtctggttctggttcatcgtcttcatcatcccgcaacatttaccacgcactgctgcatttgcactgcaccacagcccgagaactgaacgtactggttctggttctgcctttgcccaacaccagcgacgacagccactgtctgttcgagatctgccgagtcctgtctctggtgaaaatggagagtgaaggagctggtgagcactttgtggaacaagctgatggtagtggccatgttgtgtggacttctgcaatgtccgcttacatgctcagtaacctagcaagccttgtggttgaagggatcaggacatcaacaggcttcaagaaagttcaccttaacatgtgtgctaaggctctaaatgactatttcaagatgaagctcactggagaacaagtgaagaaccatttgagcatattgttactatatttcagcatattacttttacatgtactgttaatatattttagcatattacttttacatgatcacaaatctgatgctgagtttttaaacaagcctttggagaactataaggaaatgttcattgtctttggaaacaatatggctataggaaagtatgcaaaaggatcaagtgaagctctaggtactgaagatagaaaatgtatggctgaaacagagattgatgagggagatggtaatgctgttcctagtcctatagatgatattggggcttcatcctcagctcctagacctaggaagaaggcaagggttactggtaaagaagaggcagggctgtttggagcattcaaagatggtgctgaaaggcttgcaatggctattgagaaggctggttcagatgacctaccacctgacttgcttcaaacattgcaaagtattccaggttttgatgacacacacaaggccttttactttgcatatctagtgaaaaatcctagattggcaaggcagttccctactctcccattgacatatcagataagtttgcttgctcgcttcgttagtgagaactttccttagattatgaggaccgggaattaggactatgttggaggttaagtggaaattagaactatgttgttcttttgttatgtaataatggctttgctatgtcgaaatactgggtttgttatgaaatattgggtttgttatgaccaacacggatgctcggtttgttt

SEQ ID NO: 61284 - DNA, 1457 bp, Zea Mays
ggcgaggtgaaccccaaaccatttttcggtggcagcgctgtccagcaaaaacgagcggacggatccgcccccgcccctctcgcgaccgcgcaggcgagcggccgtccagtcgcgcgggcagcagggggcggccgtccgtccaggcgcaggcgagcggccgtccgtccagcgcaggctagcggccatccgtccaggcgaactgcgagcaggcgtccgtccaaacgaactgcgagcgtccgtccaggcttccgtccagcgagcggcacaacttttctacgcacaacacattccaagaaccagggctttagagaccggggtttacttgaagatacaatacacatgtgtgttgaggaacaagtggccatgtttttgaacacagtgggacataaccttaggaataggttggtgggaacaaattatggtagatctggtgagactgttagtcgctacttcaacaaagtgcttcgtgctattggagagctacgagctgaacttattaggccaccatcattagagactccatccaaaatagcaggaaatccaagatgggatccctactttaagaaaatggagagtgaaggagctggtgagcactttgtggaacaagctgatggtagtggccatgttgtgtggacttctgcaatgtccgcttacatgctcagtaacctagcaagccttgtggttgaagggatcaggacatcaacaggcttcaagaaagttcaccttaacatgtgtgctaaggctctaaatgactatttcaagatgaagctcactggagaacaagatcacaaatctgatgctgagtttttaaacaagcctttggagaactataaggaaatgttcattgtctttggaaacaatatggctataggaaagtatgcaaaaggatcaagtgaagctctaggtactgaagatagaaaatgtatggctgaaacagagattgatgagggagatggtaatgctgttcctagtcctatagatgatattggggcttcatcctcagctcctagacctaggaagaaggcaagggttactggtaaagaagaggcagggctgtttggagcattcaaagatggtgctgaaaggcttgcaatggctattgagaaggctggttcagatgacctaccacctgacttgcttcaaacattgcaaagtattccaggttttgatgacacacacaaggccttttactttgcatatctagtgaaaaatcctagattggcaaggcagttccctactctcccattgacatatcagataagtttgcttgctcgcttcgttagtgagaactttccttagattatgaggaccgggaattaggactatgttggaggttaagtggaaattagaactatgttgttcttttgttatgtaataatggctttgctatgtcgaaatactgggtttgttatgaaatattgggtttgttatgaccaacacggatgctcggtttgttt

SEQ ID NO: 61285 - DNA, 847 bp, Zea Mays
agcctgcagtgggttttagatgtaaattaatttgtagtgtgaaatccaaaattgcctcaattaactcatttctattatcttcttacgttctgtccaggacacagggttttcaacatatgcaactgatagtgctggtcgttttgcccttaccaagctgttacttttacatgcaggatcacaaatctgatgctgagtttttaaacaagcctttggagaactataaggaaatgttcattgtctttggaaacaatatggctataggaaagtatgcaaaaggatcaagtgaagctctaggtactgaagatagaaaatgtatggctgaaacagagattgatgagggagatggtaatgctgttcctagtcctatagatgatattggggcttcatcctcagctcctagacctaggaagaaggcaagggttactggtaaagaagaggcagggctgtttggagcattcaaagatggtgctgaaaggcttgcaatggctattgagaaggctggttcagatgacctaccacctgacttgcttcaaacattgcaaagtattccaggttttgatgacacacacaaggccttttactttgcatatctagtgaaaaatcctagattggcaaggcagttccctactctcccattgacatatcagataagtttgcttgctcgcttcgttagtgagaactttccttagattatgaggaccgggaattaggactatgttggaggttaagtggaaattagaactatgttgttcttttgttatgtaataatggctttgctatgtcgaaatactgggtttgttatgaaatattgggtttgttatgaccaacacggatgctcggtttgttt

SEQ ID NO: 61286 - DNA, 504 bp, Zea Mays
ctaccacattttttacactatttggatgagggtcatatggaggcgaggtgaaccccaaaccatttttcggtggcagcgctgtccagcaaaaacgagcggacggatccgcccccgcccctctcgcgaccgtaaaaaatcgtcttgccttccatccttaccctatcccctctcattcttatcttggcggcggcgcaggcgcaggcgagcggccgtccagtcgcgcgggcagcagggggcggccgtccgtccaggcgcaggcgagcggccgtccgtccagcgcaggctagcggccatccgtccaggcgaactgcgagcaggcgtccgtccaaacgaactgcgagcgtccgtccaggcttccgtccagcgagcggcacaacttttctacgcacaacacattccaagaaccaccgttgattttgatcttcgattcacatatgtcttggctggttgggagggttcaacacatgatgctttagtactaagagatgctttagagcgagagaa

SEQ ID NO: 61287 - DNA, 959 bp, Zea Mays
ggcgaggtgaaccccaaaccatttttcggtggcagcgctgtccagcaaaaacgagcggacggatccgcccccgcccctctcgcgaccgtaaaaaatcgtcttgccttccatccttaccctatcccctctcattcttatcttggcggcggcgcaggcgcaggcgagcggccgtccagtcgcgcgggcagcagggggcggccgtccgtccaggcgcaggcgagcggccgtccgtccagcgcaggctagcggccatccgtccaggcgaactgcgagcaggcgtccgtccaaacgaactgcgagcgtccgtccaggcttccgtccagcgagcggcacaacttttctacgcacaacacattccaagaaccagggggaaaatgtcgttctagctactacactatcatcgtcaggcactcaggccacacgatgcttgctttagcgtctggttctggttcatcgtcttcatcatcccgcaacatttaccacgcactgctgcatttgcactgcaccacagcccgagaactgaacgtactggttctggttctgcctttgcccaacaccagcgacgacagccactgtctgttcgagatctgccgagtcctgtctctggtggtgagtaatcttatgagaggtcaactatattcgtgtgttgtactatgggaaatctattcgtgtgttgtattgaaaaaaaattatttaaaacaaaaatccgccaagaatacaattcttttatacacaatttgcttcttatgagaggtcagccttattgcactatgggaaatttggaaaactatatgatctttgctgtcagtttataattgccttgcttggtttcggtatttttataccatagatttagggtggtctggcagctttggtgggtctgtctctggtggtgagtaatctttcatctcttcttccttgttatttcattgtagatggacaaggcgaccaagcttttg

SEQ ID NO: 61288 - DNA, 2307 bp, Zea Mays
cgggaactagcaacgcggctgaaaaacaactgtttggaagaaggaacggcccatatgcctcaggccctcagcacaaggcccgtgttcgtgtccgcaccctcggccgaacagttccccgagtccccgactgctctctgtctctctattggcgacgactgggctaccgccgccacaggcgccctacgccaggtgtccaggtctcgggcccttctccggcaccgagcacccaccagcggaatataccatggaggtcaggcccatggtagctctgcgtgccgccctagttggtggggtagcggcatttgcgaagatcggtggggcgatgaaagccgcaggcggtgtcaagattggtgcagccgctgcagccgtcacggctgcaacatcagctgccatatcgggaaaagacgcaaaagaagacacttcaaagccggaaacgaaatgatatgacccatggattggtcgacaagtatgaaatcgcctctccagaggtttagaagagagagggtgccatagtcaataagttacaggagtaaattttgatgctccgtgtgttttttatctcgggaataagaatgacagtacagttttccccagaagtatgattttgtgttgtgcaacagtttcggctgttgaatgcttttagtcacactgtctgaatggcttgatttctgctgtgccacattctggggcgcgatgcatctgtgatctgttgccatattctgtttgcacagggagatcctgaaggccttgtgcagtctcatgcgtaaggcagtgcatctaagatctgcttgccaaattctgtttgcacaggaagatcctgaaggccttgtgctgtttcatgcgtaagatcctagtgatctacatcggcatctgtatatttgaagtatctcaaactgtagaacgctatggaagacattcttatgatatgttgtatgctgttgcgaaaaccatcgtgctatcccctaactaccagtgtcttttccttttaccatattataaggaagagggagaaatagtatctcgtatgggaaccattgctgcggagttaataaaccatccttcctatcatgtccttcctagtgacgattcaaacccaccaaggttgcttttatggcatcttgatccatcaattattaggcttgatctctcagtgatgctcaaggaggtaattaaaaggcccttgctttgcctgagaaaggaattatataataggatggaatggcgtatcatcataatttgcccggtttgctccccaactgtatttatggagatgagatcactattacacttctggtttcaaggaacgggtttgagttgtgtgctagaacttcacaatgcattggtatcatcggcactagacattcttctcaagcctatgccatgaggaatatccatagatttggggcagagatttcccttttcacatgcttacttcctaagccatcaaagaaacttgcttgcaatactaactggacccttatcttgtacatgattattagttttcctgtttggttcagttttgcaactgctttacttttctacagagaaggctcacacgattctttatcagaaacattatccaaagagccaactgctgaatcaataagtgacgtcagtcttgttcagagggcagccttttacctttcttgggtgctatgcccttctaatgatgatcaatgcgagatgctatcaaacaatatattggaaatatcacattcttgggctaggaacaacaaaaagtgcctgagctaccaaattactatgaaccataggaggaaactgcaaatacccacagctgcgaagtcagagaaatttcatgtgccaataaacactgcagctgcattgatagctgagagatgggctttgattggagcatatctcatctttatctggcttgacgtagttgaggatatgtcctcattgatatttggttgcgaagatagatgtcatcgttctgtcagccaactcagaaacaagactgccccataccctgctcaaggttctaggtttgcacggctggctcctaatccagacacccaagaccaccagctgcgcatatatcaagcgaatggactgccgtcttctctgaacacactgctagtgctagtgctagtttcttctcgatacatggttctgggaaatgaagaaagaatagtctactctgaacgctgcacgttcccactgctagtgctagttgagacgccggagcacaaatggactgccgtctgcaggacatcagcattaatttcagcagctgaatttgatatatacctgtactctgttgccgctttgtccctttctgtatga

SEQ ID NO: 61289 - DNA, 2369 bp, Zea Mays
aaaaactaaaaaccccatatgtctcccggagaagaatgggaggcggttcgggaaagaggcgcgtgttttttcgtttcagaccttggattcgggaactagcaacgcggctgaaaaacaactgtttggaagaaggaacggcccatatgcctcaggccctcagcacaaggcccgtgttcgtgtccgcaccctcggccgaacagttccccgagtccccgactgctctctgtctctctattggcgacgactgggctaccgccgccacaggcgccctacgccaggtgtccaggtctcgggcccttctccggcaccgagcacccaccagcggaatataccatggaggtcaggcccatggtagctctgcgtgccgccctagttggtggggtagcggcatttgcgaagatcggtggggcgatgaaagccgcaggcggtgtcaagattggtgcagccgctgcagccgtcacggctgcaacatcagctgccatatcgggaaaagacgcaaaagaagacacttcaaagccggaaacgaaatgatatgacccatggattggtcgacaagtatgaaatcgcctctccagaggtttagaagagagagggtgccatagtcaataagttacaggagtaaattttgatgctccgtgtgttttttatctcgggaataagaatgacagtacagttttccccagaagtatgattttgtgttgtgcaacagtttcggctgttgaatgcttttagtcacactgtctgaatggcttgatttctgctgtgccacattctggggcgcgatgcatctgtgatctgttgccatattctgtttgcacagggagatcctgaaggccttgtgcagtctcatgcgtaaggcagtgcatctaagatctgcttgccaaattctgtttgcacaggaagatcctgaaggccttgtgctgtttcatgcgtaagatcctagtgatctacatcggcatctgtatatttgaagtatctcaaactgtagaacgctatggaagacattcttatgatatgttgtatgctgttgcgaaaaccatcgtgctatcccctaactaccagtgtcttttccttttaccatattataaggaagagggagaaatagtatctcgtatgggaaccattgctgcggagttaataaaccatccttcctatcatgtccttcctagtgacgattcaaacccaccaaggttgcttttatggcatcttgatccatcaattattaggcttgatctctcagtgatgctcaaggaggggtttgagttgtgtgctagaacttcacaatgcattggtatcatcggcactagacattcttctcaagcctatgccatgaggaatatccatagatttggggcagagatttcccttttcacatgcttacttcctaagccatcaaagaaacttgcttgcaatactaactggacccttatcttgtaaagcttttttggacctaatttcttatatcagtgccttgattgatttggataacacaagaactagatgctcttcacaaaaaaacttacaactacaaccattgaagggattggtacatgattattagttttcctgtttggttcagttttgcaactgctttacttttctacagagaaggctcacacgattctttatcagaaacattatccaaagagccaactgctgaatcaataagtgacgtcagtcttgttcagagggcagccttttacctttcttgggtgctatgcccttctaatgatgatcaatgcgagatgctatcaaacaatatattggaaatatcacattcttgggctaggaacaacaaaaagtgcctgagctaccaaattactatgaaccataggaggaaactgcaaatacccacagctgcgaagtcagagaaatttcatgtgccaataaacactgcagctgcattgatagctgagagatgggctttgattggagcatatctcatctttatctggcttgacgtagttgaggatatgtcctcattgatatttggttgcgaagatagatgtcatcgttctgtcagccaactcagaaacaagactgccccataccctgctcaaggttctaggtttgcacggctggctcctaatccagacacccaagaccaccagctgcgcatatatcaagcgaatggactgccgtcttctctgaacacactgctagtgctagtgctagtttcttctcgatacatggttctgggaaatgaagaaagaatagtctactctgaacgctgcacgttcccactgctagtgctagttgagacgccggagcacaaatggactgccgtctgcaggacatcagcattaatttcagcagctgaatttgatatatacctgtactctgttgccgctttgtccctttctgtatga

SEQ ID NO: 61290 - DNA, 1830 bp, Zea Mays
ctaatcgatccgttttggggattgaggaaagaataatcctcacgtgccaagccaatcagcgttctccagtctgagtgtttgattattctgtttcttagtgctctgcaatctgcataggcagatcaaaaacagggaagactgtggaatggacgtctaaagacctacttaatggattggaagaatttgtaccaatatatgagacgcgccccattaagaataacgtatatggaatgggctttgaccacagttttgggctttggtttatggctcgctggattaaaccggatttgatgattgagagtggtgctttcaaggggcactctacttgggttttgcggaaggccatgccaaatactaggattatatcactctctcctaggcaccctgagaaatatcttaagaaaggacctgcatatgttgatggaaactgcacttacctcgctgggaaggattttgttgattttggaagcattgattggggaaagctattgagaaatcatggcatttctgatcctgataaggtgcttgttttctttgatgaccaccaaagcgagttgaaaaggttaaagcaagcactaaaggctggattcaggcatctcatatttgaggacaactatgatactggtacaggtgaccattattccttgaggcagatctgtgatcaatcatacatcagaggtttgtggcttgtcaccttagactctaaatgtccatggtacaactgatcccctgtgcaacagatctgtgatcagccatacatcagatcttcatcttctttcaattgatgacaaggaatgtatttgtcaacattgtacatagagtaacatacttgtttcccctttgctcaccttatctaagattcacagattacctgttatggagcaaagggtttttattgatctgtaatatttgtttgcctgaagattccttgtgataaaagtatagtattatactaaaagaacatagtgacggtgcaccataattgcaaaaaatgtaatcaccatattctattgcatccaggtggtggacatagctgcttttgggagagtgatgaggcaagactaagattcgaacggaagaagttctgggagaaggctgtggggatagctgatctatgcggaaaggatgatgcatggtggggtgttaaaggttacatgagggacaatttcaaccatagcaatatggccatctcgtacaaagagcattttcagaacagcaggctcgtggaatctgtgttggatatgtattgggagcttcctcctgttgccggcccatccttaacacaccaaacaaggtatgacccagcacgtacagttgacccaatcatcgaagatggtcgctacggcttgttccgaaagaccggtctagcgaggttggatgcctcggtgttcaatggttacactcagatggcatatgtgcagatatcaggttcaatgttgagcacggacgatgtttaaagattttttgtgggtgagcttgtttcgtttttggccaactgttgataggctttttgtacaacactgatgcgcttctatgcttacttagtttcttttaaccttccagaaattaatatttaccagaccaccttccaaatatttatgagggttgtgtttcttgggtaaggtcacttttctgtgaaatttggttctgaataatcacatgtacttctagggcctgcgctacatgcctacattacattagccaaccaatggcttgtgtgctcttgtacggatgtgtgtattatattcagaagtcactagtaccaaccttgtacaatatctacataaccactttgcttttgataatagcaatctaaaaaataaagagaag

SEQ ID NO: 61291 - DNA, 1461 bp, Zea Mays
cttcattcctttcgggagggagggttgcttcgtttcgagaactctgtttttttctccgtgctatgccaacctaatcgatccgttttggggattgaggaaagaataatcctcacgtgccaagccaatcagcgttctccagtctgagtgtttgattattctgtttcttagtgctctgcaatctgcatagatcaaaaacagggaagactgtggaatggacgtctaaagacctacttaatggattggaagaatttgtaccaatatatgagacgcgccccattaagaataacgtatatggaatgggctttgaccacagttttgggctttggtttatggctcgctggattaaaccggatttgatgattgagagtggtgctttcaaggggcactctacttgggttttgcggaaggccatgccaaatactaggattatatcactctctcctaggcaccctgagaaatatcttaagaaaggacctgcatatgttgatggaaactgcacttacctcgctgggaaggattttgttgattttggaagcattgattggggaaagctattgagaaatcatggcatttctgatcctgataaggtgcttgttttctttgatgaccaccaaagcgagttgaaaaggttaaagcaagcactaaaggctggattcaggcatctcatatttgaggacaactatgatactggtacaggtgaccattattccttgaggcagatctgtgatcaatcatacatcagaggtggtggacatagctgcttttgggagagtgatgaggcaagactaagattcgaacggaagaagttctgggagaaggctgtggggatagctgatctatgcggaaaggatgatgcatggtggggtgttaaaggttacatgagggacaatttcaaccatagcaatatggccatctcgtacaaagagcattttcagaacagcaggctcgtggaatctgtgttggatatgtattgggagcttcctcctgttgccggcccatccttaacacaccaaacaaggtatgacccagcacgtacagttgacccaatcatcgaagatggtcgctacggcttgttccgaaagaccggtctagcgaggttggatgcctcggtgttcaatggttacactcagatggcatatgtgcagatatcaggttcaatgttgagcacggacgatgtttaaagattttttgtggaaattaatatttaccagaccaccttccaaatatttatgagggttgtgtttcttgggtaaggtcacttttctgtgaaatttggttctgaataatcacatgtacttctagggcctgcgctacatgcctacattacattagccaaccaatggcttgtgtgctcttgtacggatgtgtgtattatattcagaagtcactagtaccaaccttgtacaatatctacataaccactttgcttttgataatagcaatctaaaaaataaagagaag

SEQ ID NO: 61292 - DNA, 1573 bp, Zea Mays
cgccgctgttgcttccttcattcctttcgggagggagggttgcttcgtttcgagaactctgtttttttctccgtgctatgccaacctaatcgatccgttttggggattgaggaaagaataatcctcacgtgccaagccaatcagcgttctccagtctgagtgtttgattattctgtttcttagtgctctgcaatctgcataggcagatcaaaaacagggaagactgtggaatggacgtctaaagacctacttaatggattggaagaatttgtaccaatatatgagacgcgccccattaagaataacgtatatggaatgggctttgaccacagttttgggctttggtttatggctcgctggattaaaccggatttgatgattgagagtggtgctttcaaggggcactctacttgggttttgcggaaggccatgccaaatactaggattatatcactctctcctaggcaccctgagaaatatcttaagaaaggacctgcatatgttgatggaaactgcacttacctcgctgggaaggattttgttgattttggaagcattgattggggaaagctattgagaaatcatggcatttctgatcctgataaggtgcttgttttctttgatgaccaccaaagcgagttgaaaaggttaaagcaagcactaaaggctggattcaggcatctcatatttgaggacaactatgatactggtacaggtgaccattattccttgaggcagatctgtgatcaatcatacatcagaggtggtggacatagctgcttttgggagagtgatgaggcaagactaagattcgaacggaagaagttctgggagaaggctgtggggatagctgatctatgcggaaaggatgatgcatggtggggtgttaaaggttacatgagggacaatttcaaccatagcaatatggccatctcgtacaaagagcattttcagaacagcaggctcgtggaatctgtgttggatatgtattgggagcttcctcctgttgccggcccatccttaacacaccaaacaaggtatgacccagcacgtacagttgacccaatcatcgaagatggtcgctacggcttgttccgaaagaccggtctagcgaggttggatgcctcggtgttcaatggttacactcagatggcatatgtgcagatatcaggttcaatgttgagcacggacgatgtttaaagattttttgtgggtgagcttgtttcgtttttggccaactgttgataggctttttgtacaacactgatgcgcttctatgcttacttagtttcttttaaccttccagaaattaatatttaccagaccaccttccaaatatttatgagggttgtgtttcttgggtaaggtcacttttctgtgaaatttggttctgaataatcacatgtacttctagggcctgcgctacatgcctacattacattagccaaccaatggcttgtgtgctcttgtacggatgtgtgtattatattcagaagtcactagtaccaaccttgtacaatatctacataaccactttgcttttgataatagcaatctaaaaaataaagagaag

SEQ ID NO: 61293 - DNA, 1774 bp, Zea Mays
tctgtccacctcgacagacacctggccaacatcccctcctgttctcgggcgaatcccactcccactcgcgcacaattccgtcggcatgcacgacattggcctctccgcccgcgcggccggcgcgacgtcttgctcctccgccgccgccgccgccggggacggcggcgacgagtccaagacccggaaggcgcaccctagcttcgtcgtctccgcctacacccgcctgcactcctcccaccgcaccgtcgcctccctgctgctctttctcaccgtcgccgtcgctgccttccttgcgggccgcgcccgccctagcgtcgactgcgcgccgccgcgcctcgatgcgcgcttcctcgccctccccgacgccgccgccgcctccgactttggctccctcggcgtcccctggtatcaaaaacagggaagactgtggaatggacgtctaaagacctacttaatggattggaagaatttgtaccaatatatgagacgcgccccattaagaataacgtatatggaatgggctttgaccacagttttgggctttggtttatggctcgctggattaaaccggatttgatgattgagagtggtgctttcaaggggcactctacttgggttttgcggaaggccatgccaaatactaggattatatcactctctcctaggcaccctgagaaatatcttaagaaaggacctgcatatgttgatggaaactgcacttacctcgctgggaaggattttgttgattttggaagcattgattggggaaagctattgagaaatcatggcatttctgatcctgataaggtgcttgttttctttgatgaccaccaaagcgagttgaaaaggttaaagcaagcactaaaggctggattcaggcatctcatatttgaggacaactatgatactggtacaggtgaccattattccttgaggcagatctgtgatcaatcatacatcagaggtggtggacatagctgcttttgggagagtgatgaggcaagactaagattcgaacggaagaagttctgggagaaggctgtggggatagctgatctatgcggaaaggatgatgcatggtggggtgttaaaggttacatgagggacaatttcaaccatagcaatatggccatctcgtacaaagagcattttcagaacagcaggctcgtggaatctgtgttggatatgtattgggagcttcctcctgttgccggcccatccttaacacaccaaacaaggtatgacccagcacgtacagttgacccaatcatcgaagatggtcgctacggcttgttccgaaagaccggtctagcgaggttggatgcctcggtgttcaatggttacactcagatggcatatgtgcagatatcaggttcaatgttgagcacggacgatgtttaaagattttttgtgggtgagcttgtttcgtttttggccaactgttgataggctttttgtacaacactgatgcgcttctatgcttacttagtttcttttaaccttccagaaattaatatttaccagaccaccttccaaatatttatgagggttgtgtttcttgggtaaggtcacttttctgtgaaatttggttctgaataatcacatgtacttctagggcctgcgctacatgcctacattacattagccaaccaatggcttgtgtgctcttgtacggatgtgtgtattatattcagaagtcactagtaccaaccttgtacaatatctacataaccactttgcttttgataatagcaatctaaaaaataaagagaag

SEQ ID NO: 61294 - DNA, 2079 bp, Zea Mays
tctgtccacctcgacagacacctggccaacatcccctcctgttctcgggcggtgggcaaagctacagccacgtgcaaggcacgccgcgtaggggttcttcttcctcggctcctcgcgccgcactacgccgcatcgcgtcctcgcttggtagatatagggaagggattcggcgggtggtggtggcggcggcggcgagtgcgaaccagtggaggaggcacaagaccctcacgggttttctagtagtagatactagatagtgataaccgattttctcctctagaatcccactcccactcgcgcacaattacgcactcaaagcccggcctcccccaccactagtccaccaccgggaaactttcccccgatctgtcttctcgccgttccgtcggcatgcacgacattggcctctccgcccgcgcggccggcgcgacgtcttgctcctccgccgccgccgccgccggggacggcggcgacgagtccaagacccggaaggcgcaccctagcttcgtcgtctccgcctacacccgcctgcactcctcccaccgcaccgtcgcctccctgctgctctttctcaccgtcgccgtcgctgccttccttgcgggccgcgcccgccctagcgtcgactgcgcgccgccgcgcctcgatgcgcgcttcctcgccctccccgacgccgccgccgcctccgactttggctccctcggcgtcccctggtatcaaaaacagggaagactgtggaatggacgtctaaagacctacttaatggattggaagaatttgtaccaatatatgagacgcgccccattaagaataacgtatatggaatgggctttgaccacagttttgggctttggtttatggctcgctggattaaaccggatttgatgattgagagtggtgctttcaaggggcactctacttgggttttgcggaaggccatgccaaatactaggattatatcactctctcctaggcaccctgagaaatatcttaagaaaggacctgcatatgttgatggaaactgcacttacctcgctgggaaggattttgttgattttggaagcattgattggggaaagctattgagaaatcatggcatttctgatcctgataaggtgcttgttttctttgatgaccaccaaagcgagttgaaaaggttaaagcaagcactaaaggctggattcaggcatctcatatttgaggacaactatgatactggtacaggtgaccattattccttgaggcagatctgtgatcaatcatacatcagaggtggtggacatagctgcttttgggagagtgatgaggcaagactaagattcgaacggaagaagttctgggagaaggctgtggggatagctgatctatgcggaaaggatgatgcatggtggggtgttaaaggttacatgagggacaatttcaaccatagcaatatggccatctcgtacaaagagcattttcagaacagcaggctcgtggaatctgtgttggatatgtattgggagcttcctcctgttgccggcccatccttaacacaccaaacaaggtatgacccagcacgtacagttgacccaatcatcgaagatggtcgctacggcttgttccgaaagaccggtctagcgaggttggatgcctcggtgttcaatggttacactcagatggcatatgtgcagatatcaggttcaatgttgagcacggacgatgtttaaagattttttgtgggtgagcttgtttcgtttttggccaactgttgataggctttttgtacaacactgatgcgcttctatgcttacttagtttcttttaaccttccagaaattaatatttaccagaccaccttccaaatatttatgagggttgtgtttcttgggtaaggtcacttttctgtgaaatttggttctgaataatcacatgtacttctagggcctgcgctacatgcctacattacattagccaaccaatggcttgtgtgctcttgtacggatgtgtgtattatattcagaagtcactagtaccaaccttgtacaatatctacataaccactttgcttttgataatagcaatctaaaaaataaagagaag

SEQ ID NO: 61295 - DNA, 1701 bp, Zea Mays
caagcctttcccttaatctgtccacctcgacagacacctggccaacatcccctcctgttctcgggcgaatcccactcccactcgcgcacaattccgtcggcatgcacgacattggcctctccgcccgcgcggccggcgcgacgtcttgctcctccgccgccgccgccgccggggacggcggcgacgagtccaagacccggaaggcgcaccctagcttcgtcgtctccgcctacacccgcctgcactcctcccaccgcaccgtcgcctccctgctgctctttctcaccgtcgccgtcgctgccttccttgcgggccgcgcccgccctagcgtcgactgcgcgccgccgcgcctcgatgcgcgcttcctcgccctccccgacgccgccgccgcctccgactttggctccctcggcgtcccctggtgcagatcaaaaacagggaagactgtggaatggacgtctaaagacctacttaatggattggaagaatttgtaccaatatatgagacgcgccccattaagaataacgtatatggaatgggctttgaccacagttttgggctttggtttatggctcgctggattaaaccggatttgatgattgagagtggtgctttcaaggggcactctacttgggttttgcggaaggccatgccaaatactaggattatatcactctctcctaggcaccctgagaaatatcttaagaaaggacctgcatatgttgatggaaactgcacttacctcgctgggaaggattttgttgattttggaagcattgattggggaaagctattgagaaatcatggcatttctgatcctgataaggtgcttgttttctttgatgaccaccaaagcgagttgaaaaggttaaagcaagcactaaaggctggattcaggcatctcatatttgaggacaactatgatactggtacaggtgaccattattccttgaggcagatctgtgatcaatcatacatcagaggtggtggacatagctgcttttgggagagtgatgaggcaagactaagattcgaacggaagaagttctgggagaaggctgtggggatagctgatctatgcggaaaggatgatgcatggtggggtgttaaaggttacatgagggacaatttcaaccatagcaatatggccatctcgtacaaagagcattttcagaacagcaggctcgtggaatctgtgttggatatgtattgggagcttcctcctgttgccggcccatccttaacacaccaaacaaggtatgacccagcacgtacagttgacccaatcatcgaagatggtcgctacggcttgttccgaaagaccggtctagcgaggttggatgcctcggtgttcaatggttacactcagatggcatatgtgcagatatcaggttcaatgttgagcacggacgatgtttaaagattttttgtggaaattaatatttaccagaccaccttccaaatatttatgagggttgtgtttcttgggtaaggtcacttttctgtgaaatttggttctgaataatcacatgtacttctagggcctgcgctacatgcctacattacattagccaaccaatggcttgtgtgctcttgtacggatgtgtgtattatattcagaagtcactagtaccaaccttgtacaatatctacataaccactttgcttttgataatagcaatctaaaaaataaagagaag

SEQ ID NO: 61296 - DNA, 1561 bp, Zea Mays
ccactccgcccacctcccgagtcgctttccagtccggcgctgctttcccttcttctcggttccctcgccgccaggcttccacgctcgccccctgctctccattcttcctccaaaaccccggccaaaacccttcgaaagtcgaaaccccgttcgtcttccatgcccccctcgcacgccgcgatgctccgctcgccttcctccctccgcttgcttctccacctctcccgccgcctcctctccaggaaccctctcctccccagctccgcgctctccgcccgccctcgcttcctctcttcgtcctcctcgtccacccccggcggcgcaggatgggccacctacgacccgctcagcgacagcctcagcgcctccgctgcgctctcttccgcctccatctccgattccgagcctcccgctgtgtcggatgcctggggcgtttacgaccccgtcttgggccgcatcgtcaagcaggggtccccacctccttcgtcgtccatcaccgtggaggaggacgacgaggagggggaagaggcgggaaagctcgaggaggagaaggcgggcgtaaaggagaaggggaagaggcgggtgacagcggtcggcgtgaatgaccatgtcaggtggtcgtcggtggcggcggcgcggaggcccgctggtgggggagtttcgggatggagatatctcgagtgcttggtggtggtattgttcctggctccttgattttagtcggtggggatccaggtgttggcaaaagttcattgatgttacagcttgcttcgaatatattggagggtttcaaggccaaggagtcttctcctgttgtatatgtgtctggtgaggagagtattgagcaaattggaaacagggctgaccggatgagtatcacgtccagcaacttgtacctctactctggtacggatattgaggatatcttggacaaaattcaacccctctctccaagggctcttattatcgattcgattcaaacagtttatgtcagatcatttgctggaagtgctggtaatttgtcacaggtcaaagaatgtacctctgccttgttacgatttgcaaagctgactaatatcccagttttcttgattggacatgttacgaaaactggcgatattgctggtcctcgcctcttggagcacatagtggatgttgttctgtatatggagggagagaggtgctcatcccatcgattgttgcggtcagtgaagaaccgttttggttcagctgatgagcttggtgtatttgagatggctgaatttggtctgcaagctgttctgaatccaagccagatgttcttaactgagcatgactctgattctgaaattatggctggtcttgctgtagctgttattttagatggatctaggacctttgctcttgaagttcaggcattgtgtgtttctggttatcatcgttctggacaagtagttggtataccacaaagcagggctgatgtcataatctctgcataaattcatgacctcaaggagcagaagtacatacttttctctaagacatgctcacaccaagttgcacaaccaaaatttgatccctg

SEQ ID NO: 61297 - DNA, 1155 bp, Zea Mays
gtaccaactgctgatacatagggatcttaaataggaaaaaacaattacacatggtttcttaggcatgtcatcaagttataaacttttccccaaaaaatgtttatgtacattactttgcaattgctaacctgttgtgcatttgattttgcaatcgtaaccatcgcgctatccaaatatacctccaatcaacaggatcgagctacgcaaattgctcctacattctcacatacacttaggggtgacaatgggctctaaattttaaactataatatttaaggttctgatcggattaggatcaggctctatttctattcatttttgaactagatttttatttagggagctaagaaattatgaagaaacatttggatcgcgatccattaccacccctttatacactccattgtaagcatacctgtccatgccttatttacattacttgtttacgcacagcagttagttttctattatttgcacccctcctcagcctacatgccacaaatctcatttgtttcttactgttttcgcatggtcacttactaacaagctgatttgcacaacatataacttctatctggaacagatatgtgaacaccaaaaggggatgcaactgcgaactgtgagaaattttccacatactacgctcacattgtctggggcaatgggatatcatactcatacagtaatactgctgcctgtcgatcttaacaaatttcattcaagaactagggcatgctaatgttcaaaagagttgtcagcgattcatgacacctggtagcactacaaccagcaatgtatggatgaattgaaggaagtaaagaaggcagacaatcttacagaaactttacagaaactctgcatcttgaaactgccatgattgacaaagaagctggatgcatcatgtgcattggtgtcttcttatcaccatgcattaatgtgaagcaagttcatttgttgactaagaatggatgaacacaaatcagtggagttcgttgcactagagatggaggttggagaggtgtggtaggtgtcaatatggctttgatacaattttgccctacaatctttgtacggaacaagaaaaatgacattgtacgtggatactatattgtaattcaataattttttctaaataataaatatatttgtttatag

SEQ ID NO: 61298 - DNA, 1198 bp, Zea Mays
tggcagcacatattgtttcagttactaaagtaccaactgctgatacatagggatcttaaataggaaaaaacaattacacatggtttcttaggcatgtcatcaagttataaacttttccccaaaaaatgtttatgtacattactttgcaattgctaacctgttgtgcatttgattttgcaatcgtaaccatcgcgctatccaaatatacctccaatcaacaggatcgagctacgcaaattgctcctacattctcacatacacttaggggtgacaatgggctctaaattttaaactataatatttaaggttctgatcggattaggatcaggctctatttctattcatttttgaactagatttttatttagggagctaagaaattatgaagaaacatttggatcgcgatccattaccacccctttatacactccattgtaagcatacctgtccatgccttatttacattacttgtttacgcacagcagttagttttctattatttgcacccctcctcagcctacatgccacaaatctcatttgtttcttactgttttcgcatggtcacttactaacaagctgatttgcacaacatataacttctatctggaacaggtatgctttctccgatatgtgaacaccaaaaggggatgcaactgcgaactgtgagaaattttccacatactacgctcacattgtctggggcaatgggatatcatactcatacagtaatactgctgcctgtcgatcttaacaaatttcattcaagaactagggcatgctaatgttcaaaagagttgtcagcgattcatgacacctggtagcactacaaccagcaatgtatggatgaattgaaggaagtaaagaaggcagacaatcttacagaaactttacagaaactctgcatcttgaaactgccatgattgacaaagaagctggatgcatcatgtgcattggtgtcttcttatcaccatgcattaatgtgaagcaagttcatttgttgactaagaatggatgaacacaaatcagtggagttcgttgcactagagatggaggttggagaggtgtggtaggtgtcaatatggctttgatacaattttgccctacaatctttgtacggaacaagaaaaatgacattgtacgtggatactatattgtaattcaataattttttctaaataataaatatatttgtttatag

SEQ ID NO: 61299 - DNA, 1163 bp, Zea Mays
cacaattatggcagcacatattgtttcagttactaaagtaccaactgctgatacatagggatcttaaataggaaaaaacaattacacatggtttcttaggcatgtcatcaagttataaacttttccccaaaaaatgtttatgtacattactttgcaattgctaacctgttgtgcatttgattttgcaatcgtaaccatcgcgctatccaaatatacctccaatcaacaggatcgagctacgcaaattgctcctacattctcacatacacttaggggtgacaatgggctctaaattttaaactataatatttaaggttctgatcggattaggatcaggctctatttctattcatttttgaactagatttttatttagggagctaagaaattatgaagaaacatttggatcgcgatccattaccacccctttatacactccattctgatttgcacaacatataacttctatctggaacaggtatgctttctccggtaagcaaaatataacatgccttttccatattcacaacaaaaatacacaggttcattttttttccatcgtgtcccctaactgggaaaaaataagaaaagatatgtgaacaccaaaaggggatgcaactgcgaactgtgagaaattttccacatactacgctcacattgtctggggcaatgggatatcatactcatacagtaatactgctgcctgtcgatcttaacaaatttcattcaagaactagggcatgctaatgttcaaaagagttgtcagcgattcatgacacctggtagcactacaaccagcaatgtatggatgaattgaaggaagtaaagaaggcagacaatcttacagaaactttacagaaactctgcatcttgaaactgccatgattgacaaagaagctggatgcatcatgtgcattggtgtcttcttatcaccatgcattaatgtgaagcaagttcatttgttgactaagaatggatgaacacaaatcagtggagttcgttgcactagagatggaggttggagaggtgtggtaggtgtcaatatggctttgatacaattttgccctacaatctttgtacggaacaagaaaaatgacattgtacgtggatactatattgtaattcaataattttttctaaataataaatatatttgtttatag

SEQ ID NO: 61300 - DNA, 736 bp, Zea Mays
ctccgattgccatagctgatttgcacaacatataacttctatctggaacaggtatgctttctccggtaagcaaaatataacatgccttttccatattcacaacaaaaatacacaggttcattttttttccatcgtgtcccctaactgggaaaaaataagaaaagatatgtgaacaccaaaaggggatgcaactgcgaactgtgagaaattttccacatactacgctcacattgtctggggcaatgggatatcatactcatacagtaatactgctgcctgtcgatcttaacaaatttcattcaagaactagggcatgctaatgttcaaaagagttgtcagcgattcatgacacctggtagcactacaaccagcaatgtatggatgaattgaaggaagtaaagaaggcagacaatcttacagaaactttacagaaactctgcatcttgaaactgccatgattgacaaagaagctggatgcatcatgtgcattggtgtcttcttatcaccatgcattaatgtgaagcaagttcatttgttgactaagaatggatgaacacaaatcagtggagttcgttgcactagagatggaggttggagaggtgtggtaggtgtcaatatggctttgatacaattttgccctacaatctttgtacggaacaagaaaaatgacattgtacgtggatactatattgtaattcaataattttttctaaataataaatatatttgtttatag

SEQ ID NO: 61301 - DNA, 605 bp, Zea Mays
tttgctttgtcgtcgtctctccgattgccatagatatgtgaacaccaaaaggggatgcaactgcgaactgtgagaaattttccacatactacgctcacattgtctggggcaatgggatatcatactcatacagtaatactgctgcctgtcgatcttaacaaatttcattcaagaactagggcatgctaatgttcaaaagagttgtcagcgattcatgacacctggtagcactacaaccagcaatgtatggatgaattgaaggaagtaaagaaggcagacaatcttacagaaactttacagaaactctgcatcttgaaactgccatgattgacaaagaagctggatgcatcatgtgcattggtgtcttcttatcaccatgcattaatgtgaagcaagttcatttgttgactaagaatggatgaacacaaatcagtggagttcgttgcactagagatggaggttggagaggtgtggtaggtgtcaatatggctttgatacaattttgccctacaatctttgtacggaacaagaaaaatgacattgtacgtggatactatattgtaattcaataattttttctaaataataaatatatttgtttatag

SEQ ID NO: 61302 - DNA, 936 bp, Zea Mays
cccgtttgctttgtcgtcgtctctccgattgccatagggagctaagaaattatgaagaaacatttggatcgcgatccattaccacccctttatacactccattctgatttgcacaacatataacttctatctggaacaggtatgctttctccggtaagcaaaatataacatgccttttccatattcacaacaaaaatacacaggttcattttttttccatcgtgtcccctaactgggaaaaaataagaaaaggtacaagccatcgcccatgttttattgaacaccatgtatatgtccacgcatatatgaccatgttctacaggttggtttacattgtatatgaccatgttatgttgcatggcagatatgtgaacaccaaaaggggatgcaactgcgaactgtgagaaattttccacatactacgctcacattgtctggggcaatgggatatcatactcatacagtaatactgctgcctgtcgatcttaacaaatttcattcaagaactagggcatgctaatgttcaaaagagttgtcagcgattcatgacacctggtagcactacaaccagcaatgtatggatgaattgaaggaagtaaagaaggcagacaatcttacagaaactttacagaaactctgcatcttgaaactgccatgattgacaaagaagctggatgcatcatgtgcattggtgtcttcttatcaccatgcattaatgtgaagcaagttcatttgttgactaagaatggatgaacacaaatcagtggagttcgttgcactagagatggaggttggagaggtgtggtaggtgtcaatatggctttgatacaattttgccctacaatctttgtacggaacaagaaaaatgacattgtacgtggatactatattgtaattcaataattttttctaaataataaatatatttgtttatag

SEQ ID NO: 61303 - DNA, 611 bp, Zea Mays
acctcccccgtttgctttgtcgtcgtctctccgattgccatagatatgtgaacaccaaaaggggatgcaactgcgaactgtgagaaattttccacatactacgctcacattgtctggggcaatgggatatcatactcatacagtaatactgctgcctgtcgatcttaacaaatttcattcaagaactagggcatgctaatgttcaaaagagttgtcagcgattcatgacacctgcactacaaccagcaatgtatggatgaattgaaggaagtaaagaaggcagacaatcttacagaaactttacagaaactctgcatcttgaaactgccatgattgacaaagaagctggatgcatcatgtgcattggtgtcttcttatcaccatgcattaatgtgaagcaagttcatttgttgactaagaatggatgaacacaaatcagtggagttcgttgcactagagatggaggttggagaggtgtggtaggtgtcaatatggctttgatacaattttgccctacaatctttgtacggaacaagaaaaatgacattgtacgtggatactatattgtaattcaataattttttctaaataataaatatatttgtttatag

SEQ ID NO: 61304 - DNA, 1251 bp, Zea Mays
atggcgaataggaaatcgacaaccgatgaaaccgatagccgaacaggaattgcacagatcgccgatgcgaggcccgatctagtgagcacgacgcaaaggagggcgttgctgccgctgctccgacacgaagtacttgctgccgaggcagacaagcacgatggaggccggggtctgggcatcaagccaacgcatcacgcggtttggaaactacaccacccacacgaagcgcttgccgcagagcaccagaccacgcgccattcgcgcagagctccaaaatcgcgcgccgaactgggagccgacgcgagtgcggcaagtgagataagggggcgcgtcagaacactcaacggcggtgatctgggcgagcgcgacacaggagaccagagagagaggcgcgctgacgaggaagcaggaagtcgtgtcgccggaggagcaggggagatgggtgtcgtacaggggcaggacgagcgcgccagggagctgcgcacgcggcaagcagagagggaggaagatgggcgcatggccatggaagcagggcgcgagctaggagacggacgccgagtagggagcttggctgggacgcgactcccatgggcgggctggccgagcaccgggagatggggcgcgcgcaccagggggagcaaggcgcaggaacgctcggccggacgcggcaagcagagagaaaacgggaggaaggaagaggagcagggcgcgcggcgcaggcagccatgggaggagcgagctgagggagctcggcgcacagaacttgaaccaggacgatgatgcatgggagctccagggcgcagcgagctggggccctgagcaccgagctggaacaggcgcgcgtcagagagagatcagagggagcaggtgagaggcaccgagttgcaggagggagtagcggcagtcgcgcagggagctcgggtgagccaggaccggacgccgagcaggggaaaacgccatgggcgaacgcagcatggggtcaggccaaggaactccggccggacgccatgggaggggcagagttcagggaggagctggagggaaagctctgcggccctggcgagcaaaagcgcgcggctagagaagggaggagcagaggagcacaccgctgcagggaaggagaagatgaccagggataagaagcctgcgcgcgtggaaaaatcaaggaatcggcggcgcgatttttcttccacgagcggcggccggatgaagacgagggaacgacggccaggagataagcaaggcactaag

SEQ ID NO: 61305 - DNA, 5684 bp, Zea Mays
ggcggccatgggagaagtgacggcggctgcgcgcttggaatagggtttgtttgtttgtttagtaggcctttagatgggctttggtgagtaaataagaaacataaaaatcacatacccctataacgacccaccatcggttacacacttacctctatagcgaccgaccataagtcgttaaatttctagacttttagcgacccatagaccgtcgctataaacgcatttagcgaccaaccgtcggttcataacttttagcgaccaaccgtcggtcccaaataagggtcgctaaagatcaaccgtcgtgtagtgacctttggtgagatcatgcatattattccccacaacttgttgagcgacgaatgtatgtgagctcatccttgttgtactcatagtccccccaggtcaagaacaggtaccgcaggatgagacacatgaaggatgatgtggtgagttcgttagtggtctaggccgtcgtctcccagccaacttcgggttgctggatcgttgtctttgtatgatagaattatttaactattttgtatagaactccgttatatattaaagatgtgacattcgtttctgtaccatgagtcatcatatgtgcaacacttaatcccagcacacttggtgaagttttgcgccagggtttgggactccctaaatccgggtgtgacacttttgctcattagataatgttgatcttccttggtatttgctatttggtggttatagatgcattcaaattgataccatggagttgtttattgattaactagattgtgaggtgcctagtagtgatccatcatgtgtatttctttttattagtaatctttcaactggtaggcgtggtagtgctttccaattggcatcctttagtggttactagagtaggagtttcttttgtgccattatgctataatttgctctaagtttggtgtcttagcaacaagtaaagatcaagatcaaggataaggcacaagtgtggagaagctccatgaaaaggaacctttcaatggatgaaaagggaaccttcagtcaaaaaagggcaccatcacttggtaaacgacacaatggtacaaaaagaggtattttcactcttattttgagtatttgtaccttgatcctttctgatgattatattgcatatgtttaagttgtaaggggagtaatgttagtgtgttgcatttccttgcttcattccctattgtcccttgacatcatactatgttcttggttgagataaggttttggtgtttgatgtcaagggggagaagtatacattaaagattacctcgacctaggaggaaagcttgtcttaagggtgaaggtgttttgtgcactaaagagttcaaagctcagccttgtgatgaggatgagctcaccttgttaaaggtgggaagtctccttgagtttcttttgatcttaaggtggagaacgcattagtaatgttgatagtgcttatcatgatcttattttttattctttggtgttaaagaattagttgtgttaatgatgctggtactatgtagttgttgatgcttgtgctttaattagtatcatcggtgtatagcatcatatttagctaatatgaatttaagattaattggtgtctatgtgtgatttcatatctatggtgcttatggattatcttgatgatagatattcatgtgttgatatgtattgttcatatggtgtttaattggtatctttatcatctatcttgattggttgattctggtgtaatatcattttaattggtgtctataagacgactgtatggtgcaaaatgttgattgtgtgcatttgggtgtcataatcatcacaatttgatatttaacacaatgcacctcatggatgttgagatgtagtaatgctttgcacttaacctaagtatgtgtaatttggcatttgaggccaaagttgagatttccatgtaagcatataattagggagcattctatagcttaggattcaaaatcatgatttaaatttctatcatttgtaagctttaaatgtattgccataaatcaccaaaaagggggagattgaaagctcccttgtggtttttggtggtttggatgaaaacctaattaaaggactgacatgtgttgctaagtgttgaacatatgcttagtgcaaagctcataaggttcaacatagaagattaagtgtgatggtccaaaggctgagatgactatggataatggacatcacaagctaagtgaaggatggacattgattatgtgagaatcaatgtgcatgacttggagtcaactgagtgaaaccaagaacagaggcacgtagatcttcgaggtactagagcaagggagaaggtcaaggtgactttggtacctaaacccaaagtgaagaataggctttgtagaagtcaaggttcatcagctgaggaaggtcatgacacattgagcattgctacataaggaacccttgaggtaattcttatggtttatggtttaaatcacaaggctcaatatcatagctcaaggagtaggacatggtcaaaagaaagagaattatcaaatccagaacctagaagggacccaacggacctaagttcactttgacatttagtttgggtcattcttgtgtttggaaatgttatatgtgaccattgcagggtgttggagctcatggtcaacaatcaagatcaagttatgtcaatttaatgatttggagttcaatcccaagctcaaacatgtcaaaaggagaaaaatgatgaaaaaggctaagtatgtaaggtttgagtgtttcactatgttgcatacaccttttactatgcatataccactttggttttccctttaaatcgatttgtagagaaagtgtcatccaggtctctatttgaggagaactagaaaatctagggagagattgaaaaaagggtaactttctgggacttagtcaaaaggattatactttaatcatatgtgtctaagtcataggaaagtctcccaaagagttgaagtcaaaaggacaaaggttcgagaagaaaccctcactacatccactacaaaacaaccatccctttagcaatgcatatatgtgttgcgaaaagatcatatatgtgttgctaaggtctatactaatgtataattatgtgttgcatgtactgccgttgtggcagaacctcccaagttattgggcctacatgcacctgtccttgtctcaaagacctcacatggctgtgcatgtgcaccaaataacttaacaggatccgttcgagtgtcccaaggaccccggataaaccacttataaccaggattacaagattaagtaacacaaatcacacacaccaacatttttgcagcggaaatcttattaccaaattttacaagttacaaaaattttactttatacatgatcggagtgattacaaaagtgattcaacgaaggaactttgaacagttataaattatttgtagttttgaaatatatgctagctcaagtgaccatcctcaataagaagtatagaagaagtacttatacttataagaaggtcgtgcccaccggcgcttaacaccaatcacaaccaaagtgactcgcgacctgcagcaacaatgggtaaaaccctaagtacacaagtactcagcaagacttacccgactaaagaaaagactctcaagggtatgctggttacaaaagggttcaaggtatggcttatcaagaatcaaggactctgtttgccgaaaagcttactatgagtggatccttaaaaatccatttttacttgtcaggttaagtaaagttatctgcatctagagttctttctaccctagttcaagcacttggcctatactagccgtctttttatcaacccttcagttcactggattgctacgtgtagggcagtgaccaagtgttcatgtccaagaagtaacggcgatctgaatcgattaatatccagctggggatctccaatcacacgacatatgtagcacttaacccttgcatatgtcaactcgccaccgggtttcttaagatcagatcaggttcacgccaaccgagagcacagatacaccaccgtccagcctcttgccaccgagggtacacgctactctcgccatctctccactcccattatgtgttatcttattctggtattagtctgcccgaggcaaagtttacccatgatgaggcatgtgaccagttaaaaggtcctcgatcagcaagcctacatcgagacggtccttgatcgactcagacggagacactacaccgagactcccttctcgtgcaagtcaaccgtccggtctcagctttattattttcaacccaaagtttggtacctgacagaggtacatcttttccgatgttgaacccatcatggccctgatggatccaccatcacaagtttttctttttgaaaacattcccacccattgaagcatcacttttgttttaaaataaaatagttttgtttgctaaagcaaggctaagcatcataaaattcttttcaaaaagggtatcaaggaagggaaatcaatgttccaaggaaggaaatgcatcaacggtttagcacacaactcctatcacctaatgcatcatataaggtgataaagattttaaaacagcaaggaggtggcaaatgcaccggggcttgcctgagtaacactaggttagtgttgttaggcgacgtccacttgatgatcatccttgtcctagcacttgatcaggcaggttcgtccatcagtatcaccatgcggagtagcccacacttgaggtcgacttggctcgtcttccgcatcacgcgattatttatcgtacctcatgagatgcacgatgcacatgtatgagcataaagtaaccggatgatgtagaaaagagaatcaaatacttagcggcaagacatcgacacaatcctacgtaagcactagacacctataactcactaaacacaacaatcacaattttctagttttaccaaatttaactcaaacatcaaggaacaataaattatacgcacgtctactttccttagctaaggcccaacaacagaagactatcaaacctagattcatttattaggaaaacaatagaccatatgagttccacctttctatttgactaaagcgtaatactagaagactaattacttagactcattattttggaacacgaaactcgaagtatggaccgaaataacttaactaactatttaaaccactcttttgaattaatccttaaaatatcctaactaataaaacatcacactatacttaatctatcaagtagagcatcgtcacaccacatatattttaccaatacactgatcacataaacccgaaattcaactttaacctccacatcaaataatagacaagagaatcatcgcaatagatgcatctatttaatccaaccatttatttagttgacgggaataacagatcaactcaccataattaactcgagctgaagttgcgaggtcaacgacgatcctacggacgaggactcggatttgaagagcggcgcggcaaaattattggaacggcggagtcgtggatgtggttgttgtcgaggcgattgacgttggcaatccacgataagaatgatgatgacacgggccagcacaagagcgtcttcacggcttgggacttggtgtagatgaggatggcgatcgacgacctcgacgtgccagcgcgacgatttccattcgacgaagaggatgg

SEQ ID NO: 61306 - DNA, 288 bp, Zea Mays
catagtagccttagagaaacaacatgttaggtagaatattcaggagaccgtgtgcagctgaagaggaggaatccttgcagaagtcagctaagctttgggcgggggctgcactagccaccgaccttgaagtcctcaagctgctggacagtggtggcactactggctccttctctcgcacgaggagcagcaccaacaagccaaatgcgtcttctgtgtaaccagcaaggctgacgaagaggcaggaagcgcatggagcttcagcagcgtctaaggcaggaagcgtcaaat

SEQ ID NO: 61307 - DNA, 1497 bp, Zea Mays
agcgcatcttacgcttcgtccaggggactctctcctcgggtcttcacattggcaccgggtctatcaccaagctgactgcctactctgacgccgactgggcaggccgcccagactctcgacgatccacgacggccaaccccgtccaccacaagaagatatatggcctgattggttgcccgcatatagtcgaaccaggctcacggtgagcctgattctcgtggtggcagaaaaggcctcaggctaggatctagagatgcgaccaaaatcaatgtatcttcagagccaggcccaggctgtcgcggtgtacagctgggctctcgctagcctggttagcacgaccaggttgcccagctgatatagggcatttacccttttgtgactatggcactagcggctatctataaccttttcatcattaacaaatcaggcggccttatatactacaaggactatggttcagcagggaggatggataccaatgacagtctaagattagcaagtctgtggcattcgatgcatgctatctcccagcaactctcccctacccctggctgtactggcattgatctcttacaagctcataactttgatctccattgctttcaatccctcacagggacaaaatttttcgttgtatgcgaaactggagctccaaacatggaaatgctgctgaaagtgatttatgagctgtacacggacttcgttttgaagaatccgttctatgagatggagatgccgatccggtgtgagctgtttgatcacaacctggctcagatgatccagaaggaccgtgttgcgcttctgggtcggtgaatcttgaaaactcatggtctcagcccttgaaaaccctacttttccgttttcgacgcttggacttgctctgctggaaccctaaattctaccttgcggcactgctgtgctgtgcataaccgataacttgaatagtgtgttgctcgcttgtaatcttcttgcggtgtgatgaaatgtagagctttgcgggcataaatgccgctgcaaatagtaacaacatggaagcagcttttgttcttgcatgttttccctgcaatgagcttgagcagctagatgagggctggtttggtggaagtggaattgaaggggatccatagagaggaatttccttgctatttttgaatagcaagtgaatttctcccatagatcccttcaattccattttaccaaattggttatcagtgatttttcaatgcccttttaccaaattggttatcagtgatttggtgttcctcgttgttggggatcattgttcgggtgacagatggtcaatgttctgtcgactgttgtaggaccaccggtgccatggcaccagccttcgggcctgattggttcagcttttttctgaccagcttttctgaaaatctggttgtggggagaatctgagtatcattacgattacatgtggaggaagataaagttgtttatagggctaaggatctagaaagtgacagattcctactatta

SEQ ID NO: 61308 - DNA, 1181 bp, Zea Mays
atgcaagaaaaagctaactgcagcaaatgaaagatctgatatagggcatttacccttttgtgactatggcactagcggctatctataaccttttcatcattaacaaatcaggcggccttatatactacaaggactatggttcagcagggaggatggataccaatgacagtctaagattagcaagtctgtggcattcgatgcatgctatctcccagcaactctcccctacccctggctgtactggcattgatctcttacaagctcataactttgatctccattgctttcaatccctcacagggacaaaatttttcgttgtatgcgaaactggagctccaaacatggaaatgctgctgaaagtgatttatgagctgtacacggacttcgttttgaagaatccgttctatgagatggagatgccgatccggtgtgagctgtttgatcacaacctggctcagatgatccagaaggaccgtgttgcgcttctgggtcggtgaatcttgaaaactcatggtctcagcccttgaaaaccctacttttccgttttcgacgcttggacttgctctgctggaaccctaaattctaccttgcggcactgctgtgctgtgcataaccgataacttgaatagtgtgttgctcgcttgtaatcttcttgcggtgtgatgaaatgtagagctttgcgggcataaatgccgctgcaaatagtaacaacatggaagcagcttttgttcttgcatgttttccctgcaatgagcttgagcagctagatgagggctggtttggtggaagtggaattgaaggggatccatagagaggaatttccttgctatttttgaatagcaagtgaatttctcccatagatcccttcaattccattttaccaaattggttatcagtgatttttcaatgcccttttaccaaattggttatcagtgatttggtgttcctcgttgttggggatcattgttcgggtgacagatggtcaatgttctgtcgactgttgtaggaccaccggtgccatggcaccagccttcgggcctgattggttcagcttttttctgaccagcttttctgaaaatctggttgtggggagaatctgagtatcattacgattacatgtggaggaagataaagttgtttatagggctaaggatctagaaagtgacagattcctactatta

SEQ ID NO: 61309 - DNA, 1317 bp, Zea Mays
ctctgttctctcccttgtccccatgcatacagcatacttcagcctctctctcggttctcccgggcccctcgcgtgcgctctgtctctgtcgccgtcgccgtcgccgccgccgccaacctacgccaagtgcccagatctccaccctcgggaccttcgccggcagcgaacacccaccaccagggcatttacccttttgtgactatggcactagcggctatctataaccttttcatcattaacaaatcaggcggccttatatactacaaggactatggttcagcagggaggatggataccaatgacagtctaagattagcaagtctgtggcattcgatgcatgctatctcccagcaactctcccctacccctggctgtactggcattgatctcttacaagctcataactttgatctccattgctttcaatccctcacagggacaaaatttttcgttgtatgcgaaactggagctccaaacatggaaatgctgctgaaagtgatttatgagctgtacacggacttcgttttgaagaatccgttctatgagatggagatgccgatccggtgtgagctgtttgatcacaacctggctcagatgatccagaaggaccgtgttgcgcttctgggtcggtgaatcttgaaaactcatggtctcagcccttgaaaaccctacttttccgttttcgacgcttggacttgctctgctggaaccctaaattctaccttgcggcactgctgtgctgtgcataaccgataacttgaatagtgtgttgctcgcttgtaatcttcttgcggtgtgatgaaatgtagagctttgcgggcataaatgccgctgcaaatagtaacaacatggaagcagcttttgttcttgcatgttttccctgcaatgagcttgagcagctagatgagggctggtttggtggaagtggaattgaaggggatccatagagaggaatttccttgctatttttgaatagcaagtgaatttctcccatagatcccttcaattccattttaccaaattggttatcagtgatttttcaatgcccttttaccaaattggttatcagtgatttggtgttcctcgttgttggggatcattgttcgggtgacagatggtcaatgttctgtcgactgttgtaggaccaccggtgccatggcaccagccttcgggcctgattggttcagcttttttctgaccagcttttctgaaaatctggttgtggggagaatctgagtatcattacgattacatgtggaggaagataaagttgtttatagggctaaggatctagaaagtgacagattcctactatta

SEQ ID NO: 61310 - DNA, 1470 bp, Zea Mays
gcggattttcgccccaggcacactctgttttctgtactctgttctctcccttgtccccatgcatacagcatacttcagcctctctctcggttctcccgggcccctcgcgtgcgctctgtctctgtcgccgtcgccgtcgccgccgccgccaacctacgccaagtgcccagatctccaccctcgggaccttcgccggcagcgaacacccaccaccagctgatatagggcatttacccttttgtgactatggcactagcggctatctataaccttttcatcattaacaaatcaggcggccttatatactacaaggactatggttcagcagggaggatggataccaatgacagtctaagattagcaagtctgtggcattcgatgcatgctatctcccagcaactctcccctacccctggctgtactggcattgatctcttacaagctcataactttgatctccattgctttcaatccctcacagcaccaaagaatgtggtttttgtgctgaccactacatgtgtgggaatacttccattatctgctattactttgcccggtgctaagtagcagtgtttttagctcaggaatgggacaaaatttttcgttgtatgcgaaactggagctccaaacatggaaatgctgctgaaagtgatttatgagctgtacacggacttcgttttgaagaatccgttctatgagatggagatgccgatccggtgtgagctgtttgatcacaacctggctcagatgatccagaaggaccgtgttgcgcttctgggtcggtgaatcttgaaaactcatggtctcagcccttgaaaaccctacttttccgttttcgacgcttggacttgctctgctggaaccctaaattctaccttgcggcactgctgtgctgtgcataaccgataacttgaatagtgtgttgctcgcttgtaatcttcttgcggtgtgatgaaatgtagagctttgcgggcataaatgccgctgcaaatagtaacaacatggaagcagcttttgttcttgcatgttttccctgcaatgagcttgagcagctagatgagggctggtttggtggaagtggaattgaaggggatccatagagaggaatttccttgctatttttgaatagcaagtgaatttctcccatagatcccttcaattccattttaccaaattggttatcagtgatttttcaatgcccttttaccaaattggttatcagtgatttggtgttcctcgttgttggggatcattgttcgggtgacagatggtcaatgttctgtcgactgttgtaggaccaccggtgccatggcaccagccttcgggcctgattggttcagcttttttctgaccagcttttctgaaaatctggttgtggggagaatctgagtatcattacgattacatgtggaggaagataaagttgtttatagggctaaggatctagaaagtgacagattcctactatta

SEQ ID NO: 61311 - DNA, 1461 bp, Zea Mays
aatacatcatttttttctatgtttttttgaaaataaactgactgatataaaaatccgtacattagtgggccgtaacctccagcagctaccctgcgacgtgcggattttcgccccaggcacactctgttttctgtactctgttctctcccttgtccccatgcatacagcatacttcagcctctctctcggttctcccgggcccctcgcgtgcgctctgtctctgtcgccgtcgccgtcgccgccgccgccaacctacgccaagtgcccagatctccaccctcgggaccttcgccggcagcgaacacccaccaccagctgatatagggcatttacccttttgtgactatggcactagcggctatctataaccttttcatcattaacaaatcaggcggccttatatactacaaggactatggttcagcagggaggatggataccaatgacagtctaagattagcaagtctgtggcattcgatgcatgctatctcccagcaactctcccctacccctggctgtactggcattgatctcttacaagctcataactttgatctccattgctttcaatccctcacagggacaaaatttttcgttgtatgcgaaactggagctccaaacatggaaatgctgctgaaagtgatttatgagctgtacacggacttcgttttgaagaatccgttctatgagatggagatgccgatccggtgtgagctgtttgatcacaacctggctcagatgatccagaaggaccgtgttgcgcttctgggtcggtgaatcttgaaaactcatggtctcagcccttgaaaaccctacttttccgttttcgacgcttggacttgctctgctggaaccctaaattctaccttgcggcactgctgtgctgtgcataaccgataacttgaatagtgtgttgctcgcttgtaatcttcttgcggtgtgatgaaatgtagagctttgcgggcataaatgccgctgcaaatagtaacaacatggaagcagcttttgttcttgcatgttttccctgcaatgagcttgagcagctagatgagggctggtttggtggaagtggaattgaaggggatccatagagaggaatttccttgctatttttgaatagcaagtgaatttctcccatagatcccttcaattccattttaccaaattggttatcagtgatttttcaatgcccttttaccaaattggttatcagtgatttggtgttcctcgttgttggggatcattgttcgggtgacagatggtcaatgttctgtcgactgttgtaggaccaccggtgccatggcaccagccttcgggcctgattggttcagcttttttctgaccagcttttctgaaaatctggttgtggggagaatctgagtatcattacgattacatgtggaggaagataaagttgtttatagggctaaggatctagaaagtgacagattcctactatta

SEQ ID NO: 61312 - DNA, 228 bp, Zea Mays
cccaggcacactctgttttctgtactctgttctctcccttgtccccatgcatacagcatacttcagcctctctctcggttctcccgggcccctcgcgtgcgctctgtctctgtcgccgtcgccgtcgccgccgccgccaacctacgccaagtgcccagatctccaccctcgggaccttcgccggcagcgaacacccaccaccagggtgctccatgattcgaatcccac

SEQ ID NO: 61313 - DNA, 1834 bp, Zea Mays
ttaaactacagtgcaaattttactggaatgacacttatgtttaaatgccaatggtgaagatcattccaaatgcatgcatatagaagctttctcttcatttggtcatatattcttcaagtatgattgcttaccattttatgaaggtctgaaatactagaaagttacatagctaagtgtactacaggttacggtacatttaactagagtgaaccccaataggctttacattgcacttgtacaagttttctctttttcaccatcacctaatttaccacaggtggaagaaataggtaatcttcaagatgaaagacaaagatggctacacaatgcacacactagctcaagctcaagcgcatgaggcttctggatacttcttctgcctagaggaccgtgcactactttgtagagactgtgatgttgctatacacacagtgaattcctttgtttcagtacatcagagattcctgctaactggagttcaggtgggtcttgatcctgctgatccagttccacccattgctgaaaagcatgttaatgcttctggtggatcagtaaagcaatcagtgagacatctgcctaggagaagcccgggagttcaattttcagttgaaggcagtgcttctgttccgagcaaaaatgtatcaaatggagattattcaaggcagaattctgttccaacagccagggcagaagtggttgattggactaagaacaatactacaattcagtcagtagaatccccacctaagtacatgtcagaggagagtccaacacttctgcaatctagccagaccacaacagtcttctctaaccaaattaacggcaatagtgatgggacctaccacttgtcattctcaagtggtaatgtgacagacagtctaccagattggcctgtggatgagttcttcagtaactcagaatatgttccaaacttaggcttctccgagcatggttcttctaagggtgataacgctaagctggagagtgctggtggatctctacaatgccgtttagctgaaggctccattgctgaggaactattaggacaggtgcctgggttgatcactgatgattatatgagccgggtacctgagaattcatggacagtacctgaggttccctcgccaccaactgcctcggggctcaattggcatgggaatttgtgtttccctgcatatgacagcacaatgtttgttcctgaaattacatccctccagaactcccaaaatcagttcaccgtaccttcgagtttcaagcgccggagaagagagtattgaggtgacgacaagatcactagatatccactgtccagtttaggccatcttgagaaaggtttcttgctgtaccaaatgacggagaaaggatatccaggactgggttatcattcaaacttcaacagaacaatccaagtagctaggtttgaagtgtgctgcaatgcttcaatgatgttcattttccaaagatctaagcttcgctagtgttggggtcttcttctccgcgaaggccctttaggcaaaaacaccttcagcaagacagtacaaaggcaggtgcaacatgaagatataagccgaagctacaatcaaaagagcttcggtttggtgtcatgctaaagacgaaggacgataccgacttaaagaggaaaatactgtatagcccttggtagtctgtattatgatcataattagttattaatgatataaatgtaattttgttcgggctacggctcgcgcctataaatagatgaacaatatccccgtattgtttacgctgcatggttgttggggacttgttctcaaatgctatgaattaagaacaaggcaacacaaaaaaaaag

SEQ ID NO: 61314 - DNA, 2697 bp, Zea Mays
cggtccacccactccgctgtgcctgcagctgacgcctccgcccgtcccacactccctctcccacgcagcactgcacgcctgcggcctgagctttgaccaccgcttcgtctgtcgtctaattcttctcccccccgatccctaccggaagcccggaagcaaccgccaaccgtaccgcacccccaccaagcgcgcacctactcaaaacgcaacagcgctcgcttcctcgcagctaggtatctcactcctcgccaagcgcgcacgtactcaaaaagctctagctcacagacacgagccgtgcgggggagggagggagggagagagagaaaggggaccccgatccaatcccagtcctctaaaaccctagcggggagccggggatgaggatccagtgcaacgcgtgcggggccgcggaggcgcgggtgctgtgctgcgcggacgaggccgcgctatgcgtcgcctgcgacgaggaggtgcacgccgccaacaagctcgccgggaagcaccagcgggtgcagctcctgacggactccgccaccgccgccgcctcccccgcgccggccgtgcccaagtgcgacatctgtcaggaggcttctggatacttcttctgcctagaggaccgtgcactactttgtagagactgtgatgttgctatacacacagtgaattcctttgtttcagtacatcagagattcctgctaactggagttcaggtgggtcttgatcctgctgatccagttccacccattgctgaaaagcatgttaatgcttctggtggatcagtaaagcaatcagtgagacatctgcctaggagaagcccgggagttcaattttcagttgaaggcagtgcttctgttccgagcaaaaatgtatcaaatggagattattcaaggcagaattctgttccaacagccagggcagaagtggttgattggactaagaacaatactacaattcagtcagtagaatccccacctaagtacatgtcagaggagagtccaacacttctgcaatctagccagaccacaacagtcttctctaaccaaattaacggcaatagtgatgggacctaccacttgtcattctcaagtggtaatgtgacagacagtctaccagattggcctgtggatgagttcttcagtaactcagaatatgttccaaacttaggcttctccgagcatggttcttctaaggcaagttgccacgtatacattttctttttttatctctttttcctccatatcattaatagcctactagcttcaactttaaggtcttttagactgctgataaacataggcatcgtttcttgatatgcatgcgtttatttcttgcatagttcatggttgattggcttcatacacttaaacttatgacctttgatgatgaatattcagattgttgttgcaaacatgtttaagagcctataagagtgacattctttctggcatctacgtagagaaaattaatgcataagatatttaggttgaaaattgttttgggacacatatttgctgatcccttggtgatcagagacatgtcgacatatgtttcgctttagtttgttgcagaactgagttactgaactttgtgatttcgttgcagaagtaatggaattcggtcttaccgttgtggaaaaatttaagttgaaaattaatctatcctctgttaactggctgatggtgcactagagtttcagatttgtgctgttattgtgctaggctttgtggattgtgacatgatgataagcacttcattttagcatagtatctgatttgctcattcacttgaaatactttaaaggcagactattgttctctctctacagggtgataacgctaagctggagagtgctggtggatctctacaatgccgtttagctgaaggctccattgctgaggaactattaggacaggtgcctgggttgatcactgatgattatatgagccgggtacctgagaattcatggacagtacctgaggttccctcgccaccaactgcctcggggctcaattggcatgggaatttgtgtttccctgcatatgacagcacaatgtttgttcctgaaattacatccctccagaactcccaaaatcagttcaccgtaccttcgagtttcaagcgccggagaagagagtattgaggtgacgacaagatcactagatatccactgtccagtttaggccatcttgagaaaggtttcttgctgtaccaaatgacggagaaaggatatccaggactgggttatcattcaaacttcaacagaacaatccaagtagctaggtttgaagtgtgctgcaatgcttcaatgatgttcattttccaaagatctaagcttcgctagtgttggggtcttcttctccgcgaaggccctttaggcaaaaacaccttcagcaagacagtacaaaggcaggtgcaacatgaagatataagccgaagctacaatcaaaagagcttcggtttggtgtcatgctaaagacgaaggacgataccgacttaaagaggaaaatactgtatagcccttggtagtctgtattatgatcataattagttattaatgatataaatgtaattttgttcgggctacggctcgcgcctataaatagatgaacaatatccccgtattgtttacgctgcatggttgttggggacttgttctcaaatgctatgaattaagaacaaggcaacacaaaaaaaaag

SEQ ID NO: 61315 - DNA, 1607 bp, Zea Mays
catagagagagagagagaggagcttcagcctcgaaagcaacccaaaactcgcagcaacgaattgggcatattcgccccacctgcacccccacttttggcactttcccttccggccccctctcctcggcgcgatctaaatccggtccggcgatggacggcggggggcagcccccggacacggagatgacagacgccggcttgggcggcggggggcagccgccgccgccgccgcagcagccggcgggcggggccgggatgatggagaacatccacgcgacgctcagccacggtggccgcttcatccagtacaacatcttcggcaacgtgttcgaggtcacctccaagtacaagccccccatcctccccatcggcaagggcgcctacggcatcgtctgctcggcgctcaactccgagacggcagagcaggtggccatcaagaagatcgccaacgccttcgacaacaagatcgatgccaagcgcacgctccgcgagatcaagctgctccgccacatggaccacgagaatattgttgcaataagagatatcatacctcctccattgagggaggcattcaatgatgtgtatattgcctatgaattgatggatactgatctgcatcaaattattcgttcaaatcaagctttgtcagaggagcactgtcagtattttctttatcaaattcttcgtggcttgaagtatatacattcagcaaatgtccttcaccgtgacttgaagcctagcaatcttcttttgaatgcaaactgtgacctcaagatatgtgattttgggcttgctcgcaccacctcagaaactgattttatgactgaatatgttgtcacaagatggtatagagcaccagagcttttattgaactcctctgaatatactgctgccattgatgtgtggtctgtgggctgtatatttatggaactgatggaccgaaaacccttgtttcctggaagagatcatgtccatcagctacgtctactaatggagttgaaggcgcacttgcacacccttacttggcatcacttcatgacataagtgatgagccagtctgctcaatgcccttcagcttcgacttcgagcagcatgcattatctgaagaacagatgaaggatctgatctaccaagaggctcttgcattcaacccagattaccagtagccaaagttcggttccagccgggtgattgccttcattgacatggagatttttatcccacctgatgtcactgcaaaaagtccccaactccgattgctagctgtaaataattgccttccccgaagaccccccattccttccttgattaaaaaaaagcaggagacggtgccattcaagggtagaaaagagcgagcttgtgaaggtcaaatttctgcgcagctatggattcttgtgcttacaatatgttgtttttaatcaggctttcctttctttttcttcttaagtacttctcggtgttgtctgtaagagaggtagctcatgaacgatggctgcctgaattcagtggctgtcgtcaaagttaacagttctagtcgacttaagaattcttgttttatctacttcattgtttatataaaaggacctgtatctccgacgttgcctgcg

SEQ ID NO: 61316 - DNA, 2383 bp, Zea Mays
ggaataaccatgaaggcgtactaaacaaacgaaactatttctgctacaggatgatgccggttgtgctcttttggataggctaacttctggactgccaagtacccaatgctaagacagacatttgcaaattgacccacacattctgtcgaacaggtgacgcgcacccctgagagaaggtaccagccaactccaatggtcctctactcagatgggtctatcagcatattattaagctactatgcttttggaatagttggtagtttagcatagggctatgaacatagaaacattaatgtgctaccagctccatggaagaaaggatatccataaatttcaacagggttcataaaatcagagaacaacaagcctatatattgtacatgacatggaactcttagaggcttttgcagcggcaacatggatgacacctggaggtaatcttctcaagaccaattgatcttttttgtggccatgtaatgactgaagcaacatctggctaactattagtcacaattaaatctatgctcttagagattttctaatggggaatgtatctggtgcaaaccaatctctctatgcatctatgcaaacttctaatctaaaccatataatgttgatccatgggacgcaggggcgtggataattttacacttaactggccgctgctaatcacactttttcaaatcctcctcccactccttcacatgtccccttggatcaacatcatgtggttcagattagaagtttgcaaggttacacggagggttggtttgtaccagatacgttccctttctaatgacatatggcactcaatgtgcataaaaagctaggaacactgttgtactgatccttatgagtttggttaggaagtttgttcgtgaaagtaagtgtacttgacatgaaatatatgaagcttctcctcacaacggttggtcctgatatcaaataatgtacaataactacgagtatatcaaaagcggttggagaacgatatcaaataatgtgcattgaagctatgctacacagcaaggcatatgtgatcattatggtttttattttttatacctaaatatttcccacaactaccttttatacttttggcataggtaatctagagggcataaaaatagatttcccaaaaattgagcgaatagatggctagactaaccttgattcttatgactatattcaaatggatgatgatgaatctagacatatataaaatacataaaaatcaatcctttcagttacttcagaaaaaggataattgatgtaaaacgccctacaacgaaattggcatattttttgaggtctttttttgagaccatgtccgctaacacatgttttagatttgtcttatcattttgaaaaacttatgtttgcttggtcaaggcaatataatttccattcctctaaaagataataattgaaatggtactgaaaattagaatttgaacgcctaaccaagtttagattcgttgttaaaagcttagaagaagaaatatactgcaaactcttatatgataaataagaacattaagcccacaacttttcatttgtgctgccaaaaaagaacttgttaccattccatcttatcagaaacaagtttcaaatttagaatataacagaggaactatgtgaaatcaagttccaagaacaaactactgccaatctatcaacaacggacatctaaagttatcaattatacacatggaaagaaatccgctcatcaaatcgaggggagaaagaagcaaggataaccaccagactggtcagagcagcatgctttactcaccaaaattggaggtggctccaatggacacatgatagcgggagaagcggtggtcaacccgaccatgatcatctcttggccgcccctcccctgctcccacctctgcaccaggcccagctgttctccttttctaacatgtagcttgcaaattgtgataggatgaatgatgggcacttgaccctgtcatgatcttgtatttcctttgtattatctagttagctgatgagcatgacactaaacaatgctaaaaaccattttagtacataaccagcgcagtgtttggaggcgtgtagtttgcttcaaatgtcccaagtcaaagtgatacttccaggagcaaggatggagtgtttattaacttgaggcgaaattccggtgctaattaatcccctctccgatccaaattataagtggaattagcttttctagatccataggtttactatgtatctagagatagtgtaatatagatgcatagcaaaagctatatccctgaagaagccaaatcaacttacagttaagaacagaggtaaaagcttggataaattctgaaattgaccattaacaaatagaaatgacttgacaaaattttaa

SEQ ID NO: 61317 - DNA, 1887 bp, Zea Mays
cctctctcctgcttcccccccgcttgcggaggagacggcggcctgactgcttcgttgctgcgtggcggggctctccaagctcatcatctggttccagcccaaggggcccgaggccgccgtcgacatggggtggaaggactacttcatgagagtcgtgccaactgctctcgggacggccttggacataaacctgagcaacgcgtctctggtgttcatctcggtgacgtttgctactatgtgtaaatcagcctccccgatattcttgttgctctttgcttttgcatttaggttggagaatcctagcatcaagcttctaggaattatagttgttatttctactggagttctgttgacagtttccaaggagacggagtttgacttctggggcttcatttttgtgacgcttgctgctgttatgtcaggattccggtggtccatgactcagattctgttgcagaaagacaattacggcctgaagaatccgattaccttgatgagccatgttacaccagtgatggccatcgccactatgatactatctctattactggatccttggagtgaatttcaaaagaattcatattttgatagcccttggcatgtcatgcgcagttgcttacttatgcttatcggaggatccttagcttttttcatggtgttaacagagtatatacttatttcagcaacaagtgccataaccgtgacgatagctggggtagtaaaagaagctgtaaccattttggttgcggtattttatttccatgatgaatttacttggttgaaagggtttggtcttttcaccattatggttggtgttagcttgttcaattggtacaagtatgagagattcaaaaggggtcagataaatgaggatgacgtcagctctccatttactggtgacgtcaagtacattattatagacgacttggaatatcagaatgaatttgaggaagatacataattctgtaatacagtgaattctaactgccactggcttgttcatgcctgaacctattgaaatagtagttacttatcgaggttttctccggaaaacatgcacgaagaacacagctaaggctaggtgtgattatactatgcacaccaaaatctgatgtgagctatgtttgtcacgatggatgttcaattctcgtcttggttgaacagccaggctgactacactgtcaagcaaagagctaactccatcggatcagaattcccattttgagaagactagcagtgggttgcatattgatatacatgcttatagcgggaactgctgagaatgctccggcatctgtatatttgttgttctcttcgcgttagtgcgctgggcgcatattcattcttgaacctccacatttttagtgacgaggtgtattcattctctatataggtctgttttgtaaatgtgaccagaggataccatacacgtgctgttttcccttgaaacctagggagcggcatttgattttttctgtagactgtttcggggtaccgaatatgttgtggatatttgattgaagaattaagaacagcagggtagattggctaacttgccttttgaggtgttaatgggctctaagttttagactataaaatctaatgattgaatcatattagaatcaggttttatttctattcatttttaaactagaatttattaatggtccaaacttattatgaagaaacatttagatcgtgatctattaccgccccattcttacctcatttatttatgccgcgaagtaaaggcaacatgttagaataattgccaaaatttttgttcgcaggacaaaaagtcctcagttcacaaaaaaaaaaaaaaaaaattcttgcttgcctcgcttttcttcacaacaccagatttgcctgaatcttcttggctag

SEQ ID NO: 61318 - DNA, 3815 bp, Zea Mays
ctgcctcctgcctgcatcccgccggtggacgcaccccgccccgcatcccgcgaccttcttcctctgctgcctccacgggagccttctcacctccacacgttgttgcgtcagatccgtctgccgctagagaaaaccctacccaatgaccacatgcattcttactggggcgacgccactattggcgcagaggagccgatatggcgcatcgcatgtactccgtcgctgccctcctcgactccgcctctttctccaacgccacaggcaaggagatgcctgcccaccgccccggcaccccccgccctcgccgcgcacacccccaagccccgcggatcacagtcgcctctaccctagcgggagccgcgcccgcacccacattacccgcacgatggcaagaggcagcggcacaaggccacggcgactcctcgagcagaggaacctgaccgagcgcagcaacgcaaatcttcaatctcaaatccctgctgcgagaaaagagagctcccacaagtggtatggctcgatagaggttatttggatctgtgatgcgatagaaattcatgggtttttaggatctgttgtgtatatgcatggtttaaagataggggtgacgagtagccgcgggtggctgagcatttgctgtcttgcatcagggctgaaggcagctgcagggattacgtggctataaagatggatggctcgagtattctgcgacttctttagagtaaagtgctttcggcaaggagaactgcagtgggtttgctcatggaactggtctgcttaagaaggagagaaatggttgaattgctcctgcatggatcgagagcagagtcggtcgtggaggcaatggatgtgctgttggagtacctccggagcttgctcgcagaagaacaagccccaatcgccgttctactgatgtgtttggatgcattggtggagccaaacagaaacagcacgtacagagaagaggcgatcaagaccatcgcacgttctctgagatgctgcctgccagaggacactgccgtgcccagcactcggagagctctgctgctgcttctcaggcgaccttcacgcagaggactggatgctggaacatgccggcttcgtcgaccattcacgggccaccactgccacttctgatgctgttgtacacgacaaggaagcggccgaaaacgatgcgtggctgagacacgtggccgcggcgctactcggcagccgtagcaggatcaggagaccgttcctggaggcgctgtccacgtgcctgggctcccccgacgccgacctggtgggggcgtgcctgacgatggcctggtggaggttatcagtgagaaagttacaaagggtgcagggtattctccacgtcagtgtgtccaataatcctaaacaaggcaatatgtatttgctctttattatcaattcatgtgaaaatctgaaagaacgtggaacctaaaactattgtctggtgggctggtggctgattttcattcaattgggctggtacacctctgttttgactcccatacaccaagaatcgagggcgcctgcatccgtgggagtaagactctccggctttgaaggaggagacaaaggccgaagggcagacacattgccttctgttcatgctgcttgatgttgaaacaccaaccactcaccagtcatttactctctcacttgctcattggatcatgtgcaccaccatagttagaaacctttatgtcatagttagagcaatgcattgggattttttttgctatgcacagaatacttgtatttggatctggcataattacaatcatcctgtcatcatcagtttcactcctctggctgctccttgtgtgtgtgtccactaatgcgttcagcattgcaactgctgctgccaaatgctgagcattcgttgccaacatagatggtcactctgataaatcaaattgtatgctgtcatttccttgaattatactagaataaaatcagaagctcacaatgagatttattggtctaaagtgaatcagaagttagttcacataaaaaactatgaccatgcagttacatgtgttgcatagctccagaaggtggtagcacaaatcccataggcccagtaacccatccataaaagttttttgattgattgcttgattccctattctcacttgtaggttttgagaccgaacctatatgtaccaccaaaacaatatcctaattgcaaggaaggtgaccttcctctcatcatcgcgattgactagcaaccaatggccctgataggtgttatgcaagtgtagggcgacatcactaatgctcggacaacggatgcatttcgatggatgcaaagcagacttggttgtttgcgatggaggcttcggatagtaagatatcatatgagtgcaagagaactactcccaccattaactataacaaattttgtcaccagtgaggattacatgattactgctcttttgggtgactatagttactggccaccctgatatttgatacaattgatctttttttatctcatgctaaagaaatttggtggctggtggatctgcttaagaatcaaaagtcagacaaggtggacatcaccatccaaccggaggagcaggaagccatgaatgatgttctagcagccagattccagggcgattcagcgcatgctgcacgcaccaggtattttaaggggtcacacttgcttgtttcatgtactagcacaagaagagaccgtaccacttcctcgagccaaatcgccagcaatccaccatggctaaaccagaggggccaaccattggcgtgaagctgtttgtggacaaagagaagaaggtgctctttgctgagtccaacaaggagttcgtcgacgtgctcttcagcttcctcaccgtgccgctcggcaccatggtccgcctgctggataagcagtctcagttgggttgtctcgaccagctgtacaagagcgtggaggacctcaacttggagtacttccaaaccaatgcttgcaaggcgatgcttctgaaactgctcaacgcggcttccggccactgctgtcgcctcaagatcaacgtcgatggaagcgttccaagggtggtctatgtctgcaaggacacgcggtgcagcgctctcagcgacaacgcgttcagttcgttccctggcacggtctgcaaatgtggtaaggtcatggagtccattggacagttcccaaaatacgatggtgacactgaaaccgccgccgccacttgttcagaggatggagtttttgtgaaaggttgcttgaagtttatcgtcactgatgatctccaggttgcgccagcatctacctctcttatgatgtctgtcttcgagaaatttggtgtgcttgatccagctgtcctagagcagcaggttctgcagttcagttcagaaaagataacatgcttgctgaagagattgttgacgtctaagtaacctctcactgaccattatttcgaagctcctgttccataagatgatgcaagcctagaagtgcttgttcagaacttacatcctaaacaagaaaacgaggaccaggtcttgtgtaactgaatcttggaacaggttatggagctacagagggctgtcctgctgctgagtcgtaccacactcagctccgtgcttctgcatcctaagaagaccaagaatctgcaccattaccatcgcgtgtattaaagccgtcgttgttgctttactctatgattagccacaataataactatgtatgtctgttttcctgctggatttgtaagtttcattttggccactgatatttggtaactattataacagttcgagcatataataaatataaacatttgattcga

SEQ ID NO: 61319 - DNA, 3130 bp, Zea Mays
ctgcctcctgcctgcatcccgccggtggacgcaccccgccccgcatcccgcgaccttcttcctctgctgcctccacgggagccttctcacctccacacgttgttgcgtcagatccgtctgccgctagagaaaaccctacccaatgaccacatgcattcttactggggcgacgccactattggcgcagaggagccgatatggcgcatcgcatgtactccgtcgctgccctcctcgactccgcctctttctccaacgccacaggcaaggagatgcctgcccaccgccccggcaccccccgccctcgccgcgcacacccccaagccccgcggatcacagtcgcctctaccctagcgggagccgcgcccgcacccacattacccgcacgatggcaagaggcagcggcacaaggccacggcgactcctcgagcagaggaacctgaccgagcgcagcaacgcaaatcttcaatctcaaatccctgctgcgagaaaagagagctcccacaagtggtatggctcgatagaggttatttggatctgtgatgcgatagaaattcatgggtttttaggatctgttgtgtatatgcatggtttaaagataggggtgacgagtagccgcgggtggctgagcatttgctgtcttgcatcagggctgaaggcagctgcagggattacgtggctataaagatggatggctcgagtattctgcgacttctttagagtaaagtgctttcggcaaggagaactgcagtgggtttgctcatggaactggtctgcttaagaaggagagaaatggttgaattgctcctgcatggatcgagagcagagtcggtcgtggaggcaatggatgtgctgttggagtacctccggagcttgctcgcagaagaacaagccccaatcgccgttctactgatgtgtttggatgcattggtggagccaaacagaaacagcacgtacagagaagaggcgatcaagaccatcgcacgttctctgagatgctgcctgccagaggacactgccgtgcccagcactcggagagctctgctgctgcttctcaggcgaccttcacgcagaggactggatgctggaacatgccggcttcgtcgaccattcacgggccaccactgccacttctgatgctgttgtacacgacaaggaagcggccgaaaacgatgcgtggctgagacacgtggccgcggcgctactcggcagccgtagcaggatcaggagaccgttcctggaggcgctgtccacgtgcctgggctcccccgacgccgacctggtgggggcgtgcctgacgatggcctggtggaggttatcagtgagaaagtagatatctggataaaccacctcttcagctatgattttgcactctggttttatgcaaatgttgcctatcatattattgaattgcaattattttttttgtactggttaaatactaatagtgccatgagttaacgttagtgtttgtgattttttacaggctattgggtgtctcttgtatagaatctgcactgaatattaactgttggttatgattatggaaggtcttgttttcagctcatgaatataggtttcaaattttagttgtttttttattaggatggtcgaatataaaagtaactgattttattgtatgtacctgattaatctaaaagcattgaaataattctgctcttggctcgagtatgtatctgaagtatacagagaaatggaacgtgctggatgcgctccagatagaaaggctagagaaatgtttcatataaaaaaatttactaccgtcgcaacgcacaagcacatacctagatgagtctgtctgttactgtgaaaagctacatacaaattataattgagggcacattttcattactaatagtttttttgttttccttctttttttacctgaggttacaaagggtgcagggtattctccacgtcagtgtgtccaataatcctaaacaaggcaatatgtatttgctctttattatcaattcatgtgaaaatctgaaagaacgtggaacctaaaactattgtctggtgggctggtggctgattttcattcaattgggctggtacacctctgttttgactcccatacaccaagaatcgagggcgcctgcatccgtgggagtaagactctccggctttgaaggaggagacaaaggccgaagggcagacacattgccttctgttcatgctgcttgatgttgaaacaccaaccactcaccagtcatttactctctcacttgctcattggatcatgtgcaccaccatagttagaaacctttatgtcatagttagagcaatgcattgggattttttttgctatgcacagaatacttgtatttggatctggcataattacaatcatcctgtcatcatcagtttcactcctctggctgctccttgtgtgtgtgtccactaatgcgttcagcattgcaactgctgctgccaaatgctgagcattcgttgccaacatagatggtcactctgataaatcaaattgtatgctgtcatttccttgaattatactagaataaaatcagaagctcacaatgagatttattggtctaaagtgaatcagaagttagttcacataaaaaactatgaccatgcagttacatgtgttgcatagctccagaaggtggtagcacaaatcccataggcccagtaacccatccataaaagttttttgattgattgcttgattccctattctcacttgtaggttttgagaccgaacctatatgtaccaccaaaacaatatcctaattgcaaggaaggtgaccttcctctcatcatcgcgattgactagcaaccaatggccctgataggtgttatgcaagtgtagggcgacatcactaatgctcggacaacggatgtggcatttcgatggatgcaaagcagacttggttgtttgcgatggaggcttcggatagtaagatatcatatgagtgcaagagaactactcccaccattaactataacaaattttgtcaccaaaatttggtggctggtggatctgcttaagaatcaaaagtcagacaaggtggacatcaccatccaaccggaggagcaggaagccatgaatgatgttctagcagccagaacggtctttcttgtacgtgta

SEQ ID NO: 61320 - DNA, 500 bp, Zea Mays
ggacgacatgcccgttgctcgtgcgctgcgcaagcgtgggcgtgtcgtgcggcggcgaatagaaaaaaaaatgacggggtcccgggttcagcacggcgttccagacgtgctgcgggtccggaggcggcaagtacaactaccagaacagcgcgcggtgcggcatgccgggcgcctccgcgtgctccaacccggcggcgcacctcagctgggacggcatccacctcaccgaggccgcgtacaagcagatcaccgacggctggctcaacgggccctactgccacccggccattctccacagctaaagcgacaggggggcccaattaattattaattattattatttgttgtttacgttgccgggagagaaaaacaaagtgtctcagcaactgcatgcatgtgttcctggtccctcactgctatgacttacagagtattatatattagtactatgtatactggtcctcatttacaaatcaaatggtatagggttttctatttaa

SEQ ID NO: 61321 - DNA, 1531 bp, Zea Mays
tacaactaaccaatttgttcaaccatatcttccggtcaaaacaagatgtcttatgagtggagaagtataatgatacagatcaacaagaacaagggagatattcaaagttgtactaattatcaaagaattaagttgataagccatactatgaagctatgcgaaagggttatcaagcatcatcaaagagaaatcatgagggtctctatgaaccaatttggtttcatgtccaaaaggtcaaccatggaagccattttcttagcaagacaagtgatggggcattatagagagcagaaggacctcaaatgattttcgttgacttgagaaatgcctatgaaaaaataccaaggaatgttatgtagtggtctttgaacaaacatgaagttccaacaaagtactttggactcattaaggacatgcctgtgtgactagtattcgaacaagtgatggagatgcatatgacttcatgattagaataggactaagggttgagcccttacctttttgccttcgtgacgaataaggtcataagagacataaagggggatacccctggtgtatggtttttgcgaacaatgtagtgctagttgatgaaagccgagcaggagtaaacagaaaactggcgttgcggcgggagactctagaatccaaaggttttagactcaaaagaactaaaaccgaatatatgaaatgtaacttttgtactactacatatgaggaaggagatgatagtttttgaaagtcaagtagtgcccaggaaggatagctttcagtatttaggatcaatgctaggtactgatgaaaacattagctatagaaccatgacagggtggatgaagtggcgccaagcatctaacgttctatgtgacaagatagaacactggcattctatgtgacaagagggaaccacgaaagataaaatgcaggttttataggacaaaacctgctatgttatatggtgcagaatgttagcctacaaaaaatgacatattcaacagattcgcgttgcgaaaatggatatgttgcgttggatttatatccatacaagaaaggggtcgagtttggaacgattaggctagaggtagcaccaatagaagaaaagcttgtcgtccaacatcgattgagatggtttggacatgtccaacaaacacctccagagacactagtgtatactgcgtagtgggatcccaagacgcgatagcaatggcaagagaggccagggaaggccaaagttgacatgggacgaggaagatgaagtagaaagacttcaaaggatggaatacatccagcgatttaaccttgaatagaagtgcacagaaaacaactatccatgtgcgtggaccttgacttgaggtttctattatgtgtcacttgggtttgggcatctattagtcatctagtccatgacattggttactccttccgtccgaaaataaaatttgttttacctttatagttgattcatacaataattaatgtatttgttttatatgtgtctagattcatcatcatccatttgaacatagacataaac

SEQ ID NO: 61322 - DNA, 4127 bp, Zea Mays
cgggtgcaagagaccgggccatggcggcaccggccccgagccccatccctggcggcggcgcggcatcaagccccggcgacggcgacgcccggtgcccacgctcacgctccgttgatggaaggctcgctgtgctcccgacctcagctctcctcgctgtgctcccgcactcgtccgcgtgatcccctcccatgtcgcggcgcagatctcctcctcgacgcgcagatccggctgtcctcgccccactctcctctctcgccgcaatccctgctctctcccgcccggatcaccgccatcccatccgcgtccgcgctctccagaatcccatccgcctagatcctagcctccatggaaggggagtcctctcgaccagactccacgtccgcaatcccatccgaatccctctcgatctgcgtccgtgttgtccatggaaggagaatcagacaccccagcctccatggaagggaagtcctctcgatctgcgttggctgccagtgtcgaccgcatcattggcaacatgttacccgaggctccctgtaagagtctagataggcattggagatcgccaagaccgacggtagggtgcttacctaattgttgtgcttctttgactactcctgtcttggtggtgcttttaacagttttggacactcagcttcctgttaaacaagcatttaaaataatgcatgatgagggtcttgctctggttcctctttgggatgaccgccagggaaccataacaggcatgctcacggcatcagattttgttttaatcttgagaaagctacagagaaacattcaagttattagcaatgaagagcccatttttgcttggaaagaagcaaagctacagttctatggtgggcctgatggtgctgccatgcagagaaggccattaatccatgtacttctccatatatttgctaattctttcatttgattcaatgtgtaagcagttgcaagatcagcactttcataatataaatatattacctgtatgaaattctagatatggtctccaatacaacattaagcttaatgtcgtttgtgttaaaaaattacaaatcatcttatgtcttgaaataaggagaaattgtttgggtttctcctccccaactttcagaattacctatttctattgtatgtttgatcattcggacttccactccatccacaattttggtttattcagtgaggaactatgtttttaaccactctatagtttgtacagacaggcaacattgatctcagggccaagaaagaagctcaactcgggatgcttcctatttgaataaacatgtttttaccgttttttgatgggtgacgacacattatatcgtctccaaatactgaagtgctaagaatatgctacttgagaagcatgccttatatatgagcaaaatggaactatgcatagttccagttttcatattcagtagtaggagactccatttcttcaagtgcttgaattgttatctgtatggcatggtcacattgtccttgaggtaattaattgtaatatatatagagagagggtctgttgttgggtcatatgattcggaatgtgtatatatgtttgtgaaaatttgtggagccatgtcatgtatattttgtacctagatattagctatacatgcatgtaggtaggtatatagttgtgttacacgatttttctgcctgtcaatcttcctcttttatgcataggtctatctgaatggggaacaagtaattactgatcatatggcatgacatgaacctttagaacgcaggtgaactgaagaagagaaccatagatatggtaatttttttgaagctacgcatacccccatgttcttggagacatcagagtcgctttttcacaccaaacctaatatatttgtcatgataatatccctttttctagattttatgctctcattgaatagagaaatactcccatctgtttcattctgctttgttctgacaacataaaatgtgaatctatgttaaaacctaaatagtatatactatcccattgtataggtcatggttgaggtctgtcaaaactaattaaggtgacatgcgtacttgccattattctccttcaagagatatttgaaaaattctatgaatatttggttgatggataccaaatacaaaataaaaatttgtacgacagtatgatcttacgatgtgcaatgaaaacaaacagtcaacattgccttctcttattacatcttaacaaatgtatttaactaaaaaactttgaatatataggggatattgtgcattggtgtgctaaaacgttctaggcagcagaaagcaatatcacgggagcaagcagccaaagatctgcaagagttggagaaacggagagaagaacttgaggcattgttacttgctgaacggtcggagttggtctgaaggctgaccaccgtgatctaacaatttctcttctgttgtagataaatgctttctttcttctttttctaatgatagcatactgcttggtcatggccctgagtcattcatccagaagtcacttgattgaagtgtatcttctttagtttctgtgagtatggatcctttgttatgtttataccaagttaacagattctaaattgtctctactctacatattgatgtggctttgcattcgcgagattctaaacttattatctctattctacatgttgatgttgctttgcagtcacttgtgtctcacatttgacgttttgtgttatagtgacattttgcatcggatccacttttcttaattattaccgatacagaatcgcatatgtttctgttgttaacaccatgctttttacggacagagattgcagcttccctcttggtttcagctgaactgtgggcttcttggtttcagagcattgtattgattcatcgtctagggctgtaagattgcagcatgagtttgatgtagcaccctgacctgtgtcgtctaatcctgtcgtgtatgcataaatgcattgctgaataactcacctaatttttgcacttaatgtctcttctgatgtggtaactcagtccttgagccataattatgattatgttttcctgtatactccctctgtccaaaattaaaattcattttagttaattactaggttcatacaatacttaaagtatgtgttttatatatatttatttaggttcatcttcattcatttgaatatggacataaaaaacaagagctaaaatgactactattttgagacagaggaagtatgttttacccaatgattactgggtgctacaattgttcccattttcttttaagaggaacattgctgaaatgaataacatgtcaaaattctttattttcttatagaaggttcttctattggaccatttccaatgctgatgattacatgggttatattgttgtgcatattagtgtggaacaaataaataatccttggattaacattcaattagctagcttccttctggatgccaaaatggcgaaaagctattattagagatttcacacctttagtaaattataaaattgtctatatgtttatccatttttattagctttctcgaagttcatgttattggttacatgttattggttactgtatgtagagaggggaagagctgcttgcgtactggtggagagaggatcattggttgaaagcgatgtttctacatatgaggtctgtaattaaggttgaggaagagttggttggggttcctatgaaaggtggactatatgaggtctgtaattacttttttgttatgctctatcattacttgaatgaatcatgtatgtatcactggtaagaaacttcagctcatacttgatgggtgatggggaaacacttttgggaattctaattttgttctgctttctgtagattagggataccagtgcgcttgtacgtttaaggccaacgtgtgaggatcttcacagctacttaattgccagagtccgcaaacattttgaagtctgcgtgtacaatagctgaaagagaccatctttagaaatgtggagcttgcttgatccaggtttaagattgattaattctgttcaacttcatgatcggatggtgtgcgtaaaatttggtttgtaattcatcttgttttttaacaaagtacaaaagagcataacttaatttgac

SEQ ID NO: 61323 - DNA, 3669 bp, Zea Mays
cgggtgcaagagaccgggccatggcggcaccggccccgagccccatccctggcggcggcgcggcatcaagccccggcgacggcgacgcccggtgcccacgctcacgctccgttgatggaaggctcgctgtgctcccgacctcagctctcctcgctgtgctcccgcactcgtccgcgtgatcccctcccatgtcgcggcgcagatctcctcctcgacgcgcagatccggctgtcctcgccccactctcctctctcgccgcaatccctgctctctcccgcccggatcaccgccatcccatccgcgtccgcgctctccagaatcccatccgcctagatcctagcctccatggaaggggagtcctctcgaccagactccacgtccgcaatcccatccgaatccctctcgatctgcgtccgtgttgtccatggaaggagaatcagacaccccagcctccatggaagggaagtcctctcgatctgcgttggctgccagtgtcgaccgcatcattggcaacatgttacccgaggctccctgtaagagtctagataggcattggagatcgccaagaccgacggtagggtgcttacctaattgttgtgcttctttgactactcctgtcttggtggtgcttttaacagttttggacactcagcttcctgttaaacaagcatttaaaataatgcatgatgagggtcttgctctggttcctctttgggatgaccgccagggaaccataacaggcatgctcacggcatcagattttgttttaatcttgagaaagctacagagaaacattcaagttattagcaatgaagagcccatttttgcttggaaagaagcaaagctacagttctatggtgggcctgatggtgctgccatgcagagaaggccattaatccatgtacttctccatatatttgctaattctttcatttgattcaatgtgtaagcagttgcaagatcagcactttcataatataaatatattacctgtatgaaattctagatatggtctccaatacaacattaagcttaatgtcgtttgtgttaaaaaattacaaatcatcttatgtcttgaaataaggagaaattgtttgggtttctcctccccaactttcagaattacctatttctattgtatgtttgatcattcggacttccactccatccacaattttggtttattcagtgaggaactatgtttttaaccactctatagtttgtacagacaggcaacattgatctcagggccaagaaagaagctcaactcgggatgcttcctatttgaataaacatgtttttaccgttttttgatgggtgacgacacattatatcgtctccaaatactgaagtgctaagaatatgctacttgagaagcatgccttatatatgagcaaaatggaactatgcatagttccagttttcatattcagtagtaggagactccatttcttcaagtgcttgaattgttatctgtatggcatggtcacattgtccttgaggtaattaattgtaatatatatagagagagggtctgttgttgggtcatatgattcggaatgtgtatatatgtttgtgaaaatttgtggagccatgtcatgtatattttgtacctagatattagctatacatgcatgtaggtaggtatatagttgtgttacacgatttttctgcctgtcaatcttcctcttttatgcataggtctatctgaatggggaacaagtaattactgatcatatggcatgacatgaacctttagaacgcaggtgaactgaagaagagaaccatagatatggggatattgtgcattggtgtgctaaaacgttctaggcagcagaaagcaatatcacgggagcaagcagccaaagatctgcaagagttggagaaacggagagaagaacttgaggcattgttacttgctgaacggtcggagttggtctgaaggctgaccaccgtgatctaacaatttctcttctgttgtagataaatgctttctttcttctttttctaatgatagcatactgcttggtcatggccctgagtcattcatccagaagtcacttgattgaagtgtatcttctttagtttctgtgagtatggatcctttgttatgtttataccaagttaacagattctaaattgtctctactctacatattgatgtggctttgcattcgcgagattctaaacttattatctctattctacatgttgatgttgctttgcagtcacttgtgtctcacatttgacgttttgtgttatagtgacattttgcatcggatccacttttcttaattattaccgatacagaatcgcatatgtttctgttgttaacaccatgctttttacggacagagattgcagcttccctcttggtttcagctgaactgtgggcttcttggtttcagagcattgtattgattcatcgtctagggctgtaagattgcagcatgagtttgatgtagcaccctgacctgtgtcgtctaatcctgtcgtgtatgcataaatgcattgctgaataactcacctaatttttgcacttaatgtctcttctgatgtggtaactcagtccttgagccataattatgattatgttttcctgtatactccctctgtccaaaattaaaattcattttagttaattactaggttcatacaatacttaaagtatgtgttttatatatatttatttaggttcatcttcattcatttgaatatggacataaaaaacaagagctaaaatgactactattttgagacagaggaagtatgttttacccaatgattactgggtgctacaattgttcccattttcttttaagaggaacattgctgaaatgaataacatgtcaaaattctttattttcttatagaaggttcttctattggaccatttccaatgctgatgattacatgggttatattgttgtgcatattagtgtggaacaaataaataatccttggattaacattcaattagctagcttccttctggatgccaaaatggcgaaaagctattattagagatttcacacctttagtaaattataaaattgtctatatgtttatccatttttattagctttctcgaagttcatgttattggttacatgttattggttactgtatgtagagaggggaagagctgcttgcgtactggtggagagaggatcattggttgaaagcgatgtttctacatatgaggtctgtaattaaggttgaggaagagttggttggggttcctatgaaaggtggactatatgaggtctgtaattacttttttgttatgctctatcattacttgaatgaatcatgtatgtatcactggtaagaaacttcagctcatacttgatgggtgatggggaaacacttttgggaattctaattttgttctgctttctgtagattagggataccagtgcgcttgtacgtttaaggccaacgtgtgaggatcttcacagctacttaattgccagagtccgcaaacattttgaagtctgcgtgtacaatagctgaaagagaccatctttagaaatgtggagcttgcttgatccaggtttaagattgattaattctgttcaacttcatgatcggatggtgtgcgtaaaatttggtttgtaattcatcttgttttttaacaaagtacaaaagagcataacttaatttgac

SEQ ID NO: 61324 - DNA, 682 bp, Zea Mays
cgggtgcaagagaccgggccatggcggcaccggccccgagccccatccctggcggcggcgcggcatcaagccccggcgacggcgacgcccggtgcccacgctcacgctccgttgatggaaggctcgctgtgctcccgacctcagctctcctcgctgtgctcccgcactcgtccgcgtgatcccctcccatgtcgcggcgcagatctcctcctcgacgcgcagatccggctgtcctcgccccactctcctctctcgccgcaatccctgctctctcccgcccggatcaccgccatcccatccgcgtccgcgctctccagaatcccatccgcctagatcctagcctccatggaaggggagtcctctcgaccagactccacgtccgcaatcccatccgaatccctctcgatctgcgtccgtgttgtccatggaaggagaatcagacaccccagcctccatggaagggaagtcctctcgatctgcgttggctgccagtgtcgaccgcatcattggcaacatgttacccgaggctccctgtaagagtctagataggcattggagatcgccaagaccgacggtagggtgcttacctaattgttgtgcttctttgactactcctgtcttggtggtgcttatgcccccggagccatcatctcagaacccaagcatgcaaatagcagttatc

SEQ ID NO: 61325 - DNA, 1568 bp, Zea Mays
taagatcaaaactagacataattatacgtttaaaaattcgaattagagacaagagtatatatatgtacataaaaggagacgtatggaaaatctaacttttccatttctctatcgtcatttgttttcttcttcttatcctttcgtcactctgttcggtcggctggctgaacatgtgtttctctctcacgccatctctctccctcgcattttctgctccctccacgcaggtgattagctgtccctatctcatcttcatactacttctctattccagacacatgtccaacgcttaaaaaaaatctctcagcccttcctttcccttaagcgaaaaaaaaatctttcacatctctgccatgttcacgttagcttcctgggagtttcacatctgcgccacctctccatatccctgcaccagtgcttggttccttagggtcgagcttccagctccacgccagttcctggctcgatgtcagcgagcacgccagccacccgcccctgaacgagctccctccactactcgttatctgtgcttccaccctgtcgcatccgcccaggccactggacgccggcgtcgcgttcggctggtcgcgctcgtccttgcctctgcatctaccagcgccctacacctgctcatcgctccccatcgcgctcgacatcatccccagcctcacgctgcactcaccggacagcatcctcctcgccgcgtggagctgctgaatgtggctccccaacgtcgctgttgcctactgctcgctctatagcagctcgccggctccctggaaattccccagccatcgtccggcttccttgcctcgccgattacgttatccgtggatcaatcgcttggtggagtaattttctagagactggtcatcaccctgaagactcgtgaaattttatttccttagtcctcggctcttctctgcaacaaaggctatagtttgtgctgccgatggtgatgttaagtgccggtgggctcggccttcttataagtctaagtaacctttctatacttcttattgaggatggtctcttgagctagcatatatttcaaacttatacgtttataatcactccgatgaaaataatgtaaaatttttgtaacttgtaaaatttggtaataaaatttccgctgcaaaaatattgatgtatgtgattcgtgtttacttaatcttgcgatcttggtggtagtggtttatccgaggtcccctgggatactcggacagatcctgttaagttatcgggcacacatgcatagctgtttgatgtctttgagacaaggacaagtgcatgtgggtcctataatttgggaggttcagccacagcccacatcttcactagcgccactgtggcgttcggcgtcagctggtaaattcgaacttcgaaacactgtagcacttcgatgataaattgatgcagaggggggggggtgaataggcgtaatctgaaatttacaacttaaaacacaagctacgagccgaggttagcgctagaacttaaatcaagtctaggagagagaggaaaacaaatcaaatggaaattaagcgaatgaacacggtgatttgttt

SEQ ID NO: 61326 - DNA, 1405 bp, Zea Mays
ctccaatcgagttcctcccactcgtctggccatcgtggggttctctggcgcgccccatctctgccgtgagcttgctggcttcttctaggcgcgcccagccgcttctctgctctcctgcgtcggcctctcgccccgcgtacgctcgccaatttttttgactgcgtctgccgagcttcccagcgctccagctagccgatatcgtcagattgtcccagctcgtcctagtggccgttgatttggagctctgcgtggactcgaccatacccaacactgtccatgtagccgtcgtacgtctccgcgtcattttttctgtgtcattgttgcaccagaagacgaaagggaagcgctagtgcaatgctcgtcaagtatcgatgatatatgcaagccggaccgcgttgccgatttcatggtttcaagtcagaattagccctggaacgctagtgatcacgtgatgcggaggatcagagccaagttattccccaagatgatgcaaagaggtggacatctccgcaagacgatgtcgttagtcgggccaatctgaagatggataaatcaagcaagtgctcaactaagagatgatcgacaagcgagcatcgtctaacaaacactaacgtattgttattccaggcaagccccggtgcatgcaaccccttccttgtgtttttaaataattttttgcacactttaagtctagtgaaatgtgcattaagtttataggaattgcttggaaactacttgatgcattgccttccttgaaatccatacctttatagatacttctggtgaagtatcaaaatatgatttacaaaatgcttagccctgcttagaacttgtggatagaagttgttttttgcattaaggcctagctcaggggttatcctgaggaaagatggcttctacatgcaagaatattttcattgagagcatggtgggatcttactgcaaagtttcccttgatgctcttttcatcttaaggaatacaaacaattctaaggatggaagtacttaaatcgagacttgggctaggaacaggtgatgttctacccagattgattaaggattggatgcatatgtaggcttgctgatcaaagactatcttaactggcccacatgccctggatatgggacagggtaagctttgcctcgggcagactaataccagaataagataccacgcaatgggagtggagagatggcgagagtagcgtgtaccctccgtggcaagaggctggacggtggtgtatctgtgctctcggttggcgtgaacctgatctggtcttaagaaccccggtggcgagttgacatatgcaagggttaagtgctacatatgtcgtgtggttagagatcctcagctgagtaaatcgattcggatcgccgttttatccccggatagtggagacttggt

SEQ ID NO: 61327 - DNA, 652 bp, Zea Mays
caattcctgaaagaataccgggaatagtgcaggcgtccatgttgatactgttgtcatgaatcctccctttggtacacgaaggaatggagcagacatggagttcctctctatggccttgcaggttgcttctcaagctgtctattctctacacaagacttccactagagaacatatcaagaaggcagccttgcgtggcttcaatgccatcagtgcggaggttctatgcgagctgcgttacaatctaccgcggacgtacaagttgcacaagaaaaaagagatcgacattgcagtcgatctgtggcgctttgttcctaacgcccaacgccgcagctagcgcgctcgctatgggccgaggggcacaggtgatggaatggaactgaacatgaatggaaaatgatcaaatggatatgtgtctcaaaaggctggacttgatcgaagagatcccaagcgtcacgcttgctgtgcttatcgtcttcttggtgccagtaagggtagctcagaatttgacgaactgtgtagagttttgtgggcacagatgatgctcccagtagtgtgcacaatgaatgctttgtatgtattgtgctctattgcctgtgctaacgctacagaataatatttacaattaatttggtgatcagtcagtggcgccgca

SEQ ID NO: 61328 - DNA, 1210 bp, Zea Mays
gatttaacagaacatcccatttctcgtgcggccaaggcccagtccgatgactctggccaaggcccagtccgatgactctggccctataactctgagccccatcggagactcggagtcgggggcgccagcgtctcgcctcgccgtcagcagcagcagcagctgcacctccattccacggcttccgtcgtgcgcttcgtctgcacccacaaaggcgacggcgacggcagggggaggagatgaagctgaagcagctggagggcctcttgggtggcctgacccagttctccgaccccaagatggcgttgttgggtgtagctggagctggagcagtatgcgacgggccctcacatcgcgtcgcggatgctctacatggcagagaatagtttcaatgacataactggcaaagtggtagctgacttcggctgtggctgtggcactctggctgtggcgagtgctttactggatgctgaacatgttcttggtattgatattgacccgactatcacttgaacttgctcaagaaaatgctgctgatctggagctggacatcgatttagtttggtctgacataaagaacttaaatctgaaaggcgtccatgttgatactgttgtcatgaatcctccctttggtacacgaaggaatggagcagacatggagttcctctctatggccttgcaggttgcttctcaagctgtctattctctacacaagacttccactagagaacatatcaagaaggcagccttgcgtggcttcaatgccatcagtgcggaggttctatgcgagctgcgttacaatctaccgcggacgtacaagttgcacaagaaaaaagagatcgacattgcagtcgatctgtggcgctttgttcctaacgcccaacgccgcagctagcgcgctcgctatgggccgaggggcacaggtgatggaatggaactgaacatgaatggaaaatgatcaaatggatatgtgtctcaaaaggctggacttgatcgaagagatcccaagcgtcacgcttgctgtgcttatcgtcttcttggtgccagtaagggtagctcagaatttgacgaactgtgtagagttttgtgggcacagatgatgctcccagtagtgtgcacaatgaatgctttgtatgtattgtgctctattgcctgtgctaacgctacagaataatatttacaattaatttggtgatcagtcagtggcgccgca

SEQ ID NO: 61329 - DNA, 1036 bp, Zea Mays
gatttaacagaacatcccatttctcgtgcggccaaggcccagtccgatgactctggccaaggcccagtccgatgactctggccctataactctgagccccatcggagactcggagtcgggggcgccagcgtctcgcctcgccgtcagcagcagcagcagctgcacctccattccacggcttccgtcgtgcgcttcgtctgcacccacaaaggcgacggcgacggcagggggaggagatgaagctgaagcagctggagggcctcttgggtggcctgacccagttctccgaccccaagacatgttcttggtattgatattgacccgactatcacttgaacttgctcaagaaaatgctgctgatctggagctggacatcgatttagtttggtctgacataaagaacttaaatctgaaaggcgtccatgttgatactgttgtcatgaatcctccctttggtacacgaaggaatggagcagacatggagttcctctctatggccttgcaggttgcttctcaagctgtctattctctacacaagacttccactagagaacatatcaagaaggcagccttgcgtggcttcaatgccatcagtgcggaggttctatgcgagctgcgttacaatctaccgcggacgtacaagttgcacaagaaaaaagagatcgacattgcagtcgatctgtggcgctttgttcctaacgcccaacgccgcagctagcgcgctcgctatgggccgaggggcacaggtgatggaatggaactgaacatgaatggaaaatgatcaaatggatatgtgtctcaaaaggctggacttgatcgaagagatcccaagcgtcacgcttgctgtgcttatcgtcttcttggtgccagtaagggtagctcagaatttgacgaactgtgtagagttttgtgggcacagatgatgctcccagtagtgtgcacaatgaatgctttgtatgtattgtgctctattgcctgtgctaacgctacagaataatatttacaattaatttggtgatcagtcagtggcgccgca

SEQ ID NO: 61330 - DNA, 1134 bp, Zea Mays
gatttaacagaacatcccatttctcgtgcggccaaggcccagtccgatgactctggccaaggcccagtccgatgactctggccctataactctgagccccatcggagactcggagtcgggggcgccagcgtctcgcctcgccgtcagcagcagcagcagctgcacctccattccacggcttccgtcgtgcgcttcgtctgcacccacaaaggcgacggcgacggcagggggaggagatgaagctgaagcagctggagggcctcttgggtggcctgacccagttctccgaccccaaggcagagaatagtttcaatgacataactggcaaagtggtagctgacttcggctgtggctgtggcactctggctgtggcgagtgctttactggatgctgaacatgttcttggtattgatattgacccgactatcacttgaacttgctcaagaaaatgctgctgatctggagctggacatcgatttagtttggtctgacataaagaacttaaatctgaaaggcgtccatgttgatactgttgtcatgaatcctccctttggtacacgaaggaatggagcagacatggagttcctctctatggccttgcaggttgcttctcaagctgtctattctctacacaagacttccactagagaacatatcaagaaggcagccttgcgtggcttcaatgccatcagtgcggaggttctatgcgagctgcgttacaatctaccgcggacgtacaagttgcacaagaaaaaagagatcgacattgcagtcgatctgtggcgctttgttcctaacgcccaacgccgcagctagcgcgctcgctatgggccgaggggcacaggtgatggaatggaactgaacatgaatggaaaatgatcaaatggatatgtgtctcaaaaggctggacttgatcgaagagatcccaagcgtcacgcttgctgtgcttatcgtcttcttggtgccagtaagggtagctcagaatttgacgaactgtgtagagttttgtgggcacagatgatgctcccagtagtgtgcacaatgaatgctttgtatgtattgtgctctattgcctgtgctaacgctacagaataatatttacaattaatttggtgatcagtcagtggcgccgca

SEQ ID NO: 61331 - DNA, 713 bp, Zea Mays
aaggcccagtccgatgactctggccctataactctgagccccatcggagactcggagtcgggggcgccagcgtctcgcctcgccgtcagcagcagcagcagctgcacctccattccacggcttccgtcgtgcgcttcgtctgcacccacaaaggcgacggcgacggcagggggaggagatgaagctgaagcagctggagggcctcttgggtggcctgacccagttctccgaccccaaggtactgctgactgcgccaccgccaccgcccccacctcttgggtggcctttctttcttcctttctcgtaccctgctcgatttcgcctcgcccaaccccgacaaaagggagggggaaaagcggaggagtatctgacttttgccaccaatggcgtgtttttttacaacgagatggcgttgttgggtgtagctggagctggagcagtatgcgacgggccctcacatcgcgtcgcggatgctctacatgacatgttcttggtattgatattgacccacagtcacttgaacttgctcaagaaaatgctgctgatctggagctggacatcgatttagtttggtctgacataaagaacttaaatctgaaaggtaggagagacacaagctcgacctccccatgaagtatgatatgaatttatcctttgctgcttcatgagcctgattcatgagatcttcaaattgtcgctgctcatcggccgac

SEQ ID NO: 61332 - DNA, 926 bp, Zea Mays
aaggcccagtccgatgactctggccctataactctgagccccatcggagactcggagtcgggggcgccagcgtctcgcctcgccgtcagcagcagcagcagctgcacctccattccacggcttccgtcgtgcgcttcgtctgcacccacaaaggcgacggcgacggcagggggaggagatgaagctgaagcagctggagggcctcttgggtggcctgacccagttctccgaccccaagatggcgttgttgggtgtagctggagctggagcagtatgcgacgggccctcacatcgcgtcgcggatgctctacatggcagagaatagtttcaatgacataactggcaaagtggtagctgtctagctgacttcggctgtggctgtggcactctggctgtggcgagtgctttactggatgctgaacatgttcttggtattgatattgacccacagtcacttgaacttgctcaagaaaatgctgctgatctggagctggacatcgatttagtttggtctgacataaagaacttaaatctgaaagggaagagcaagtgggaagttttgtccttagctgaccaaacaagttcgtcaacatatacctcttttggctcatcatttgagctactactgtcatgacacgtattatgatgagatggctcttgaatttctatgcttcggctttcataagccaaagcttgatgatgtaactaagctagcgaaaagaactgtgtgctacctaatttttcttttaagtatggacgcaacccattgaaagctaactttgctaactgcttatctatgacatggatctgaaaacatcagtttctagtatctctaaaccttcagaaacaatctttactgattcattgaccccttgccagagcgatgccagaccaactaaatctaacacgtaatccttggagaaaac

SEQ ID NO: 61333 - DNA, 996 bp, Zea Mays
aaggcccagtccgatgactctggccctataactctgagccccatcggagactcggagtcgggggcgccagcgtctcgcctcgccgtcagcagcagcagcagctgcacctccattccacggcttccgtcgtgcgcttcgtctgcacccacaaaggcgacggcgacggcagggggaggagatgaagctgaagcagctggagggcctcttgggtggcctgacccagttctccgaccccaagctggagctggagcagtatgcgacgggccctcacatcgcgtcgcggatgctctacatggcagagaatagtttcaatgacataactggcaaagtggtagctgtctagctgacttcggctgtggctgtggcactctggctgtggcgagtgctttactggatgctgaacatgttcttggtattgatattgacccacagtcacttgaacttgctcaagaaaatgctgctgatctggagctggacatcgatttagtttggtctgacataaagaacttaaatctgaaaggcgtccatgttgatactgttgtcatgaatcctccctttggtacacgaaggaatggagcagacatggagttcctctctatggccttgcagggaagagcaagtgggaagttttgtccttagctgaccaaacaagttcgtcaacatatacctcttttggctcatcatttgagctactactgtcatgacacgtattatgatgagatggctcttgaatttctatgcttcggctttcataagccaaagcttgatgatgtaactaagctagcgaaaagaactgtgtgctacctaatttttcttttaagtatggacgcaacccattgaaagctaactttgctaactgcttatctatgacatggatctgaaaacatcagtttctagtatctctaaaccttcagaaacaatctttactgattcattgaccccttgccagagcgatgccagaccaactaaatctaacacgtaatccttggagaaaac

SEQ ID NO: 61334 - DNA, 911 bp, Zea Mays
aaggcccagtccgatgactctggccctataactctgagccccatcggagactcggagtcgggggcgccagcgtctcgcctcgccgtcagcagcagcagcagctgcacctccattccacggcttccgtcgtgcgcttcgtctgcacccacaaaggcgacggcgacggcagggggaggagatgaagctgaagcagctggagggcctcttgggtggcctgacccagttctccgaccccaagctggagctggagcagtatgcgacgggccctcacatcgcgtcgcggatgctctacatggcagagaatagtttcaatgacataactggcaaagtggtagctgtctagctgacttcggctgtggctgtggcactctggctgtggcgagtgctttactggatgctgagtgaacatgttcttggtattgatattgacccacagtcacttgaacttgctcaagaaaatgctgctgatctggagctggacatcgatttagtttggtctgacataaagaacttaaatctgaaagggaagagcaagtgggaagttttgtccttagctgaccaaacaagttcgtcaacatatacctcttttggctcatcatttgagctactactgtcatgacacgtattatgatgagatggctcttgaatttctatgcttcggctttcataagccaaagcttgatgatgtaactaagctagcgaaaagaactgtgtgctacctaatttttcttttaagtatggacgcaacccattgaaagctaactttgctaactgcttatctatgacatggatctgaaaacatcagtttctagtatctctaaaccttcagaaacaatctttactgattcattgaccccttgccagagcgatgccagaccaactaaatctaacacgtaatccttggagaaaac

SEQ ID NO: 61335 - DNA, 918 bp, Zea Mays
ttattagtaccctaaattatataaaatatacttatttataagttacattatatttttatagttataggtcacgttattagagatgatttaacagaacatcccatttctcgtgcggccaaggcccagtccgatgactctggccctataactctgagccccatcggagactcggagtcgggggcgccagcgtctcgcctcgccgtcagcagcagcagcagctgcacctccattccacggcttccgtcgtgcgcttcgtctgcacccacaaaggcgacggcgacggcagggggaggagatgaagctgaagcagctggagggcctcttgggtggcctgacccagttctccgaccccaagctggagctggagcagtatgcgacgggccctcacatcgcgtcgcggatgctctacatgacatgttcttggtattgatattgacccacagtcacttgaacttgctcaagaaaatgctgctgatctggagctggacatcgatttagtttggtctgacataaagaacttaaatctgaaagggaagagcaagtgggaagttttgtccttagctgaccaaacaagttcgtcaacatatacctcttttggctcatcatttgagctactactgtcatgacacgtattatgatgagatggctcttgaatttctatgcttcggctttcataagccaaagcttgatgatgtaactaagctagcgaaaagaactgtgtgctacctaatttttcttttaagtatggacgcaacccattgaaagctaactttgctaactgcttatctatgacatggatctgaaaacatcagtttctagtatctctaaaccttcagaaacaatctttactgattcattgaccccttgccagagcgatgccagaccaactaaatctaacacgtaatccttggagaaaac

SEQ ID NO: 61336 - DNA, 1024 bp, Zea Mays
ttattagtaccctaaattatataaaatatacttatttataagttacattatatttttatagttataggtcacgttattagagatgatttaacagaacatcccatttctcgtgcggccaaggcccagtccgatgactctggccctataactctgagccccatcggagactcggagtcgggggcgccagcgtctcgcctcgccgtcagcagcagcagcagctgcacctccattccacggcttccgtcgtgcgcttcgtctgcacccacaaaggcgacggcgacggcagggggaggagatgaagctgaagcagctggagggcctcttgggtggcctgacccagttctccgaccccaagctggagctggagcagtatgcgacgggccctcacatcgcgtcgcggatgctctacatggcagagaatagtttcaatgacataactggcaaagtggtagctgtctagctgacttcggctgtggctgtggcactctggctgtggcgagtgctttactggatgctgaacatgttcttggtattgatattgacccacagtcacttgaacttgctcaagaaaatgctgctgatctggagctggacatcgatttagtttggtctgacataaagaacttaaatctgaaagggaagagcaagtgggaagttttgtccttagctgaccaaacaagttcgtcaacatatacctcttttggctcatcatttgagctactactgtcatgacacgtattatgatgagatggctcttgaatttctatgcttcggctttcataagccaaagcttgatgatgtaactaagctagcgaaaagaactgtgtgctacctaatttttcttttaagtatggacgcaacccattgaaagctaactttgctaactgcttatctatgacatggatctgaaaacatcagtttctagtatctctaaaccttcagaaacaatctttactgattcattgaccccttgccagagcgatgccagaccaactaaatctaacacgtaatccttggagaaaac

SEQ ID NO: 61337 - DNA, 574 bp, Zea Mays
aaggcccagtccgatgactctggccctataactctgagccccatcggagactcggagtcgggggcgccagcgtctcgcctcgccgtcagcagcagcagcagctgcacctccattccacggcttccgtcgtgcgcttcgtctgcacccacaaaggcgacggcgacggcagggggaggagatgaagctgaagcagctggagggcctcttgggtggcctgacccagttctccgaccccaagctggagctggagcagtatgcgacgggccctcacatcgcgtcgcggatgctctacatggcagagaatagtttcaatgacataactggcaaagtggtagctgtctagctgacttcggctgtggctgtggcactctggctgtggcgagtgctttactggatgctgaacatgttcttggtattgatattgacccacagtcacttgaacttgctcaagaaaatgctgctgatctggagctggacatcgatttagtttggtctgacataaagaacttaaatctgaaagcaatggccaggccaataaagttgatgaaacagcgtcacacagagcaaatggaac

SEQ ID NO: 61338 - DNA, 570 bp, Zea Mays
aaggcccagtccgatgactctggccctataactctgagccccatcggagactcggagtcgggggcgccagcgtctcgcctcgccgtcagcagcagcagcagctgcacctccattccacggcttccgtcgtgcgcttcgtctgcacccacaaaggcgacggcgacggcagggggaggagatgaagctgaagcagctggagggcctcttgggtggcctgacccagttctccgaccccaagctggagctggagcagtatgcgacgggccctcacatcgcgtcgcggatgctctacatgagaatagtttcaatgacataactggcaaagtggtagctgtctagctgacttcggctgtggctgtggcactctggctgtggcgagtgctttactggatgctgaacatgttcttggtattgatattgacccacagtcacttgaacttgctcaagaaaatgctgctgatctggagctggacatcgatttagtttggtctgacataaagaacttaaatctgaaagcaatggccaggccaataaagttgatgaaacagcgtcacacagagcaaatggaac

SEQ ID NO: 61339 - DNA, 597 bp, Zea Mays
aaggcccagtccgatgactctggccctataactctgagccccatcggagactcggagtcgggggcgccagcgtctcgcctcgccgtcagcagcagcagcagctgcacctccattccacggcttccgtcgtgcgcttcgtctgcacccacaaaggcgacggcgacggcagggggaggagatgaagctgaagcagctggagggcctcttgggtggcctgacccagttctccgaccccaagctggagctggagcagtatgcgacgggccctcacatcgcgtcgcggatgctctacatggcagagaatagtttcaatgacataactggcaaagtggtagctgtctagctgacttcggctgtggctgtggcactctggctgtggcgagtgctttactggatgctgaacatgttcttggtattgatattgacccacagtcacttgaacttgctcaagaaaatgctgctgatctggaggagaactgcgcatttttgtattaagaagaaagagaataggggaaaggtccccataatacaaaacaattcctgaaagaataccgggaataggtgagaccatgagaacagactcggaccacacaaggg

SEQ ID NO: 61340 - DNA, 459 bp, Zea Mays
ggcccgtatatattcaaatcgttaaatgatcaactagcatatcatagtaaggttctcgaaccaaacaaaggacatgaacaatctatccccagttatatctctaaccaaacaaaaaacaaggatcatctcatccttccaaccaaataatatgaggaatcattccattcccaacttaggagccattctattctgccctcatttgtccagcaaccaaacgtatcctaatataataaatagagatagagatgtttgtccgaccggcaattaccaaggtacacagacgaggacataaatacttcaactaagggatgctgttgacaaatcacaatcgatatagaacaaatgatgggcgacaataacttttgcattcatgcatgcaggaagcgatcgaaccattcgcttgctgccttcaccatgtcgattgtgattttatggccgactccaggctctgcaatgaac

SEQ ID NO: 61341 - DNA, 641 bp, Zea Mays
gagattttctctaatggcccgtatatattcaaatcgttaaatgatcaactagcatatcatagtaaggttctcgaaccaaacaaaggacatgaacaatctatccccagttatatctctaaccaaacaaaaaacaaggatcatctcatccttccaaccaaataatatgaggaatcattccattcccaacttaggagccattctattctgccctcatttgtccagcaaccaaacgtatcctaatataataaatagagatagagatgtttgtccgaccggcaattaccaaggtacacagacgaggacataaatacttcaactaagggatgctgttgacaaatcacaatcgatatagaacaaatgatgggcgacaataacttttgcattcatgcatgcaggaagcgatcgaaccattcgcttgctgccttcaccatgtcgattgtgattttatggccgactccaggctctgcaatgaacatgaacttctccgcgcaaccagattcttcgtaagctttagcagtttttgaaatagcttctcctaaaccacttattgggcaacgaggatcttcagcgcctatgagcgaattaagtataaacatcaaaaaatgtattactctctactttaaaatataagttatgtattt

SEQ ID NO: 61342 - DNA, 5867 bp, Zea Mays
ctctaatggcccgtatatattcaaatcgttaaatgatcaactagcatatcatagtaaggttctcgaaccaaacaaaggacatgaacaatctatccccagttatatctctaaccaaacaaaaaacaaggatcatctcatccttccaaccaaataatatgaggaatcattccattcccaacttaggagccattctattctgccctcatttgtccagcaaccaaacgtatcctaatataataaatagagatagagatgtttgtccgaccggcaattaccaaggtacacagacgaggacataaatacttcaactaagggatgctgttgacaaatcacaatcgatatagaacaaatgatgggcgacaataacttttgcattcatgcatgcaggaagcgatcgaaccattcgcttgctgccttcaccatgtcgattgtgattttatggccgactccaggctctgcaatgaactgaccagtacagataataaagatgttagcagcccaaacggtgaaagcttgcttatatttcagagagaaactagagctctctatctgttcatccgaaccaagtgccctttgtgtgatccaatagcaggagataattcaacacatttttgacaagttgtgtgttgtctagttagaaaaaggttggtacatgctcttacgctctcaccacgagtaatatacggcactaataagggtcgtcagatatgatattgttacatctaatatatgtacctaaatacgaatgagcagcagactaagaaggtgttcggtttacagagaacctttcattttattctattttaatagataaattatcaaatataaaactaaaagtttattttagttttttgtatttaacaacttagagattataataaaataaaatgaatagactaaaaattagtttttagaaagcaaacacctctagactcgtgtgaaactgatgccaccagccaccgagctggtagtagcatctctttactcttcactagtaacttttgcgcgcgtcgcgcgcgtggaaaacacaggtatatatatatatatatataaaagatagaaatagattcagcagtgttttcctggttgcgcaaacaatcattagtcgaatgaggcagtggcgtaaagtatggagcataaaattaataaccttaaactgaagctatatgtatatacgtagataaaatcagtacaatttgtatctacggggaagagtataataatgtacatcgctatctgctaaagccaataaatatgcgtagacgatcaaacagaatactacaaattcattagggttttcagattcatagatacattaataacattttttttaattcagctcagcaggattttcgtttcatgtacatggctgtagcctgtagctcaaaaaaactttaatccgatgaggcagtggaaaaggaaggcaggcctgattgcttctggaaaagcaggggtttagaggaaaacagtcgccatggaagcgctaataaccaaaaaaatacgaattttgaattaaaaagtagtggggtaggatctacgcacctttgggaaatcggaaacaaaggatactaaaatgtaaagacttgataaatatgatacaggaaaaagccaaccgaggaagacagaggagatccaaacccgacctaaacaacttcagactccgggtcctttccctaccgaacaacgaaggaacaccaaataaaattggtaaacaaatttcagcttgaggagaagcagcaatggttattcggcaaattgcttgttccgaatttttaactaaccaactcccaatcatgggaatcacaaaaaagaagctcggattccgcttctatcacaacggaaactgatgcaagccatgctgaattcaaacaatccacttgagatatcccggcacacaaaaccataggaaaatgactgaaaatgagagagacccaatcccagaccgcgaggaagggatacatacggagggccaaaggttcctcgccgtcgctgttggattgtcgcgaacattgaaggtgtcatcctttttggagaaacgacaatgctcacaggcacttctgttcgctagagtccattcgtatgtaaagacagcctagaagtctcccgacgcatctggtgatgagcggaattgtgaacaatatctgcgaaaaagatattctggtcgctgcgctttgagtcccttcagtgttgtgcttcccttgtcgttgaggcaccatcgaacggctgacgttttataagttgacgtggacatcgtagctttgcaggaatcctccccgctttaatatatagaatgtaaagacagcctagaagtctcccgacgcatctggtgatgagcggaattgtgaacaatatctgcgaaaaagatattctggtcgctgcgctttgagtcccttcagtgttgtgcttcccttgtcgttgaggcaccatcgaacggctgacgttttataagttgacgtggacatcgtagctttgcaggaatcctccccgctttaatatatagaaatagaaatatgcaaatctagaggtaaaccaccaggatgcatagccatctctcccccgcggcccgccgcatcgtgcgacgagagcatcactgcagctaggcgacaccaccgatggtcgtcatctaccatcctcaactgtcccgcactgggttctactctgcctcggcgcgtcttccattccatagtcccaacggcattctccactactacggcatcctcctccactattacgcctggaccatcttcgatgggcgcaacggtatactcctccacttcctcaccgtccatccagaggtcaccaggtggccatcgcctccgctgccactgcggccgccacacgtgtggcaacgtgccacgcgccaacgccgatgctcaccgcatgccacgacgaggtcatctggtcagcgacgaaacccccctatacaccagtcacgcgggtaaggtgttcgtcgatatgaataagtcagtatcactgccttgcgtatgtaactacttgaatggactggagcaggggtaagaaatgttggcaacgtatagagcaccgtgtcagctcctgaatacatttgttttgttagaaatcataacaaaatttgatatggcatgagttaatgcttcctttgttttaccatgtctaaccatgttgatgtcttcatccacgatgaataatatactagaaaggaagcggagttttgttcttagttagctactatatgcaggttgtatgaagaattgaagattatcattttgtcggtcaaactgtctgaagttctcttcaaaagaagttgaaagcatattctgcaatcactaagttgtgtccgatactgctttcttctcttgctaccagttactgaagatggatcagttaattgttcaacaatagggctaggatatttcttctaagcgattatagtcatgatggttcaatctcaacttcacatttctatgtggtggtacaccggtggatctaggattgattgatggtaagaggagactatttttctctccttcagcaccgctattattattattttttttgggtctatttttcccaccactttcgtatacatctccattgtgtgcaaggacatatgaggctggagcacccccaacccccatgttacagctgtcctgttaataaaaccatgcgtgctgttgttgtcgtatgtgccgaatttccccacatgcatgaacttttggttttgtagctaaatccggaagaagtttgtacagcggttgtttaaaaagttaaccagtaacactatttattcatatttttttcttcatatttgtatctattgtttaccagaaatttcattcaatctctcctctccattttatttcacatttgaagattattattttgttagtcaaactgtctgaacttctcttcaaagcatattctgcaattactcagttgtgtccagtaacccgatactactttcttctcttgcatattctgcaattattatttctctctaagcgattatcatcctgatagtttctaaaaatgccgttggtaattatcactgtcccaacacatttctgtatggtgaaatcaagggctcgatctaggattgatggtaagaggagtctattttttcactccttcagcacccctactcttttttgtctattttttctcagaccccttcatatatttctcaatgttgtgcaaccatggtgtgcaaggacataggaggctagagcacctctaaccccatgctggcctgcttctaaagcttacaatgtcgtgtacttcatctatttgttctaagtataagttattttaactttttttgagtcaccatcttagtttgaccaaatttatataatactatgatacttaataagtattgttagaccctttattaattgtatttttatagtatatctatataatatttatgaatcttcataattttagttgaacttaagatattttttacttttcttaaaaaataaaataatttataatttaagaccaagagagtggttagtactacgctgttacagctatcctgcctgttaataaaaccatgcgcgccggttgttgtcgtatgcgctgaatttcccaacatgcatgcacttttggttttgtaactaaatccggattaagtttgtacagcggttgtttaaaaaaggtgaaccagtaacgctatttattcatatttttcttcacatttctatctattgtttaccagaaatttcattcaatctctcctcttcatttcatttcacatttctttattcgaaatttaccctcaatttctccacaactcgttatggtatcattatatatattactatgaatggccaatacacagtggcggagacaggtgtgggccctactcttaagccgaaaaattgctagggacctaaatatgttcttaaagaatgagagaattcgtataattcgttcatggtcatatgtgccattatctatgcatttgcatgatttaagattttctagctgatataaatatttgttaatgttatatcgggctctacacttagagaaatcttggctccgccactgccaatacagattatccatccaagattacttctcacactgtgcggcgttacagactttagttcttcaaatattgaaacctcatcatccacctagtgtggcggtattgcgcggacgcataaacaacatattgtccccacaactcaacattcaactgaagccgattcatctttaagatggaaaacttgtatacagtatgagagtcatgactaccatcgctacttgactacttctttcgtcccagaaagaatgggcagttattccaccggtgggtagtgattcttctgtcttagaaaaatataattataatatagtatcgtgttttattatcttatttgttatatattaaaatattaatattcatgatatcagaactatagaatttatttttattataaattaaattggtgtataaatttgaataatatttattaaaaatttagttgaacatgaactattttaattgacatataatctatagttgtatgtacctcttcttacgaagggagtagttcctaaggctatccacacttatagaactttaaatttctatcaaaaaaaatatcttgtacttgtcagtaatttttttttgttctatatcataattcacggtagttatatttacatcatatctcaatcatgtaccaactactatattttatattattttttcaattctcttctatacacgtacacccgcatgcagtggatcgacgcgtcgttcgtgcaccctatggtaaaatagggtagcacatgcagtgctttgctgtagcgaatttattacgctatctcggtacgttgagtgccccactgcagacaacctaaaacgctag

SEQ ID NO: 61343 - DNA, 2330 bp, Zea Mays
taaaaaataaacaatggcacccaggtgtgaatctgcagataggaccagtttacagccatccgtcccgtctctaggattgcgccctgaaaaaaagaaagatacacacaggcaagagcaagaacaagaggacacccgccgtacagcgcgatttatcggcagaaccaaaaggctcaaacagaccatatgtgtgtgcagcttattgttcttcaccaccaatacgataactaaatacaggcacggcatcctacgcgcgttgctaatgcgccgtcggatcgcagcctacgaaaacgcatttgaagttcaggccctgtacacggcgcaggccttcttggagaacctgacgggcttggtcttcttggcgtccacgacgacggggcacgtcacgtgcaccttgtgcgtcacccgcacgagcttgccgatcacgtagccccgcgaggtcaggtccaagtccagcgtcaggggcaccgccccgcccgtgcttgtcgacagcatcaggctgcccccggcgccgtacagcggcaccttctcgccgtggatgaccgccgtcaccatccggtggctcttcctcggctggtaatacctccgaacctgagagtgatcgcagtcacagtagccacgtcagattcaatgactattaccagcaattctggcttttgactcaactgatgcaaacagatgtccagaaatgaaaggaaggattcatgcaacaacatttgctggactattagcactgtctattgctgaagcagccctagtatacatactgtctttattcttttgtccccacaaacaaaacttttcaactcgatcatgcattttgtacgattaacttgacaaggaattacgcatccgttagtcagatctttgacgacctttgaggctttgatgcgatggatgggacaaatatggatggaattatggatagaaaggtgaagcacatgagaaatgtttcgctagtggagtttctcttaaatgaatggcgaagttaatagagaggtaaaaaggaagagattcggctcctcgcgcagtttactctctcgacacgaggcagagcagtatcatcagtcaatgcgaggacagcacttaaaagcggctattaaataggccaaggacggaggatggatatacctgaccgactgctattgggatctctgaatacatcaggtggatggggccagaagtgacatgaattccaaacattgtggcagggttgtagacagctatgtgcagagagcagtttgttgtgaccaattttgttggaacgccgctgtggtccgtgccttcacccgcgtagaagtcgtccatcaccaagctctgcacaaaacacaagcgagagaagttcgtggttcaggccagaaatctgtggctgtggcaaacaccacgctcagatctacggaaacgaagttttgccatgccaaatagtgcgaatcataaacgcgtgttgatcatcgaagcgattttgttttcttgcaaaatgcagccccaaaagtcagcatgctaaatgcagtgccactgccagccagcaacatcccatcagagatctcattattaatctgcaatgagacttggtatatttgacttttattcagtcttcagtgaggtccattgtttaagacctggggaactggagatataaaacagatattcgtttatgattccatcagatctcattattaattagtttatgattctgcagatataaaacagacattggtttcattttcagaggaactggaaaatgttggcacaaagaaaccagtctgttattatacagtaaaaagagcatcaactgaacttatacaattcgaagtcatgaaccaatctatactccaactagagcttaacaagctaccgcaaaattagcccccccgggttcaccacttactcgcaaccgcaatatctgagcaacaaaaccaaaatcacacccacacccagcttgcaattgtaaaatcccaatctgcattgctgtcttgttcctcattagtgtccaacatatcactgtccaactgagccaccaatcaattggatggtgatgtaacccatctcgcctaccgctggaaccgtgggacatcagacatgagtcaaatttagtaactagcggtcaattactcggtttagggattagataggaaacaaccaaacagagaggaagaggaacgactattatcccataaactgaagaagaagaagaagtgaactgaggttgctcagactccaatttaggggtggacgtggaactaattgtgtataccttgacgatgacctcgggctcgtacggccgggcggcgccccagatgatgaggcagaagacggtgaagaggaggacgaag

SEQ ID NO: 61344 - DNA, 1414 bp, Zea Mays
gtttctactgaataggaaatgaaatgaccaagctatgcgtgtcactgcaggcggacctacaagctctttggaggagtagagacttccagccatcccttctacgctctccccgttcccgtgtcgtcctcccgacaaagagggagccgctagggtttagcggcttccgcgtctgggcgagggcttacccgcgagggacggcgcgacgcggcggcacttgagctagggtttaaccctccgatcccgttcctttcccggcgaggcgatggacgaggcggcgattgacgacttgatccggcggctcctcgaggcccgcggcgggcgcaccccgcgcaacgcgcaggtgactgacgccgagatccggcgcctctgcgccaccgccaaggacgttttcctctcccagcccaacctcctggagctcgaggcccccattaagatatgcggggatgtccatggccagtattcagacctccttcgattatttgagtatggtggctatccaccagatgcaaattatctgttcctgggtgactatgttgatcgggggaaacagagcatagaaacaatatgccttctcttggcgtacaagataaagtacccagaaaacttctttcttctcaggggaaaccatgaatgtgcctcgatcaaccggatatatgggttttttgatgagtgtaagaggagattcaataacatggatcaaatacgtaacatttctcgtcctgtggatgttcctgacgttggtcttctatgtgatctgttatggtcggaccctgataaagagattgttgggtggggtgagaatgacaggggtgtttcctacacctttggagctgacatagttgctgagtttcttcagaaacatgatctagatttgatctgcagggctcaccaggtcgtagaggatggctatgagtttttcgcaaatcgccagcttgtaacaatattctcagcaccgaactactgtggagagtttgacaatgctggtgcactgatgagcatcgacgactccctagtatgctcgttccagatactcaagccttctgaaaagaaaagaaaagcaggagctgagaacatgccaaagcccggttttttggtgagcttaacacggtgttaaactgtggagtgtggaccaccgtgcttatgtcttgctgatctgaagtcatgcaaatgtatcctggcgttttgccaaacaaaaaagatcatgctaacagaaacttctggattttttttttattgtggacctctgttcttattccccaacagatgcaacatgtttatgaatgggtagcattgcttgcattggagattgtgctttcttttgtactacttaataaatacttaatagcatgtataaggtctgtatttggaaacgctaactaacagtaacagcacatgccctttactgatgtttatg

SEQ ID NO: 61345 - DNA, 2478 bp, Zea Mays
gttttcttttgtttccatatgagatatgactcattaatgccatgccaggtatgaaattctgcatggtgagaaaactaaggattcttgcaagaaagggactgagcataatgtcaaagtggaagatttgtactgtgacaaagatttggatgcagcattggattcttttgacaatctcttctgtcgacgatgtctagtgtttgattgcaagctacatgggtgttctcaagatttagtatttcctacagaaaaacaaccagcttggagtggcgttgatgacagtgtaccctgtggtattcattgccataaactggcatctgaaccagatgctgctgctggtgctgatcacatgctttttgatgttgaggagccaactcactcatcagacaatgtgatgaaccagccaggttcaaataggaaaaagaacggctccagtggaaggaagactaaatctcaacaaagtgaaagctcttcaactgcaagagttatctcagaaagcagtgattcggaagtacatccaataagcaataaatctccacaacactcccctagtccctcaaaagttaaaattgggccgaaaggtggaatcagaaagattaccaatagacgaatcgctgagagaattcttatgagtgtgaagaaaggacaaagggaaatggcatcatctgattctaattttgttagtggatatcttttggcaagggacatgaagcttaggtctgatacacgaaatggaaataaggaattaattgtatcctcacaacagagttctccaagcacaagaagttccaaaaagaagagtacacctcaaattgggaacagctcagcttttgctgaggctcataatgattcaacagaggaagcaaataaccgtcattcagcaacagatggttacgatagttcaaggaaagaagaattcgtcaatgagaatttatgcaagcaggaggtgtacttgagatcatggaaggcaattgagcagggacttcttgtgaaaggattagagatttttggaaggaacagttgtttaattgctcggaaccttcttggtggaatgaagacgtgcaaagatgtttttcaatatatgaattatattgaaaacaacagtgcctctggagctcttagtggtgttgattctcttgttaaaggatatattaagggtactgagttgcgcacaagatcaagatattttagaaggcgaggtaaagtccgtcgtttgaagtacacctggaaatctgcaggttacaatttcaaaaggattaccgaaaggaaggatcagccttgtcgacaatataatccttgtggttgtcaatctacatgcggaaagcagtgtccatgtctttcaaatgggacatgttgtgagaaatactgtgggtgtccaaaaatttgcaagaatcgttttcgaggatgtcactgtgcaaagagccagtgtcgcagccgccaatgtccatgttttgcagctgacagggaatgcgatccggatgtttgcagaaactgttgggttgggtgtggtgatggtacattgggagttccaaaccagagaggagataattatgaatgccggaacatgaaactgcttcttaaacaacaacaaagggtcttacttggaagatcagatgtctctggctggggagcattcctcaagaatagtgttagcaaacatgaataccttggtgagtacactggggaactaatctcacacaaagaagcagataagcgtggaaagatatatgatcgtgagaactcatcgttccttttcaacctgaacaatgagtatgttcttgacgcatacagaatgggtgacaagctgaaatttgccaaccatgcccctgacccgaattgctatgccaaggttatcatggtaactggtgatcatagagtgggcatattcgccaaagaaagaatcctcgctggtgaagagttattctacgattaccgctatgagcctgacagagctcctgcttgggcccgtaagcctgaggcgtcgggagcaaaggatgatgggcaaccgttcaatgggcgtgcaaagaagctcgcccaaaacaaccgaggctgaatctgatttgattctttcattgttaggacaaatttggcagccattcaactaatacaaggaacctgtcattcataggccccaatttatttgaactcgtcattgtaactcgtatgtgcttgaattctccatggcatctggtcctgccatccgtagagttaggtcccgtttgttttgtttgttttgaggaactaaaaattaatccctctattttagtcacattgagtctctagattgtcaaacggcgggactaaaacaaagactaaactatttgtctctagttcctcaagccatgacttaaagggaataaatcacataaattttatttttatccttcctttatttcagttacactaatgatgtaataattgtatgaggtattttggtcctcttagagcatctccaagtgactcttcattttttgctctcta

SEQ ID NO: 61346 - DNA, 2421 bp, Zea Mays
gttttcttttgtttccatatgagatatgactcattaatgccatgccaggtatgaaattctgcatggtgagaaaactaaggattcttgcaagaaagggactgagcataatgtcaaagtggaagatttgtactgtgacaaagatttggatgcagcattggattcttttgacaatctcttctgtcgacgatgtctagtgtttgattgcaagctacatgggtgttctcaagatttagtatttcctacagaaaaacaaccagcttggagtggcgttgatgacagtgtaccctgtggtattcattgccataaactgccaactcactcatcagacaatgtgatgaaccagccaggttcaaataggaaaaagaacggctccagtggaaggaagactaaatctcaacaaagtgaaagctcttcaactgcaagagttatctcagaaagcagtgattcggaagtacatccaataagcaataaatctccacaacactcccctagtccctcaaaagttaaaattgggccgaaaggtggaatcagaaagattaccaatagacgaatcgctgagagaattcttatgagtgtgaagaaaggacaaagggaaatggcatcatctgattctaattttgttagtggatatcttttggcaagggacatgaagcttaggtctgatacacgaaatggaaataaggaattaattgtatcctcacaacagagttctccaagcacaagaagttccaaaaagaagagtacacctcaaattgggaacagctcagcttttgctgaggctcataatgattcaacagaggaagcaaataaccgtcattcagcaacagatggttacgatagttcaaggaaagaagaattcgtcaatgagaatttatgcaagcaggaggtgtacttgagatcatggaaggcaattgagcagggacttcttgtgaaaggattagagatttttggaaggaacagttgtttaattgctcggaaccttcttggtggaatgaagacgtgcaaagatgtttttcaatatatgaattatattgaaaacaacagtgcctctggagctcttagtggtgttgattctcttgttaaaggatatattaagggtactgagttgcgcacaagatcaagatattttagaaggcgaggtaaagtccgtcgtttgaagtacacctggaaatctgcaggttacaatttcaaaaggattaccgaaaggaaggatcagccttgtcgacaatataatccttgtggttgtcaatctacatgcggaaagcagtgtccatgtctttcaaatgggacatgttgtgagaaatactgtgggtgtccaaaaatttgcaagaatcgttttcgaggatgtcactgtgcaaagagccagtgtcgcagccgccaatgtccatgttttgcagctgacagggaatgcgatccggatgtttgcagaaactgttgggttgggtgtggtgatggtacattgggagttccaaaccagagaggagataattatgaatgccggaacatgaaactgcttcttaaacaacaacaaagggtcttacttggaagatcagatgtctctggctggggagcattcctcaagaatagtgttagcaaacatgaataccttggtgagtacactggggaactaatctcacacaaagaagcagataagcgtggaaagatatatgatcgtgagaactcatcgttccttttcaacctgaacaatgagtatgttcttgacgcatacagaatgggtgacaagctgaaatttgccaaccatgcccctgacccgaattgctatgccaaggttatcatggtaactggtgatcatagagtgggcatattcgccaaagaaagaatcctcgctggtgaagagttattctacgattaccgctatgagcctgacagagctcctgcttgggcccgtaagcctgaggcgtcgggagcaaaggatgatgggcaaccgttcaatgggcgtgcaaagaagctcgcccaaaacaaccgaggctgaatctgatttgattctttcattgttaggacaaatttggcagccattcaactaatacaaggaacctgtcattcataggccccaatttatttgaactcgtcattgtaactcgtatgtgcttgaattctccatggcatctggtcctgccatccgtagagttaggtcccgtttgttttgtttgttttgaggaactaaaaattaatccctctattttagtcacattgagtctctagattgtcaaacggcgggactaaaacaaagactaaactatttgtctctagttcctcaagccatgacttaaagggaataaatcacataaattttatttttatccttcctttatttcagttacactaatgatgtaataattgtatgaggtattttggtcctcttagagcatctccaagtgactcttcattttttgctctcta

SEQ ID NO: 61347 - DNA, 3305 bp, Zea Mays
cccccaccaaatcctcgttcatttttttccaagcgacttcgcgtgtgagggcgggagagcgcgcggggctagggtttccacgggtgatggaagcagaggctgccgcggcggtagtggcgtcgtccgcatctgcctcggcttccgcgggccggtctcgcccatctagcagcgccgcccaggtcaccagtaattcggctgtgcgagctggagaagaaaatgctgcctccctctatgttttatctgttattgactcgttaaaaaagaggattaccgcagatcgtttgacttacattaaggataggggagaacaagactaatatcagcagctatacacagaggacttacaatttatcaaaaaataggcaaattagtacatcaaagggtactgattcagcatcaaatttgctcacaaaaaggcaagatgatgcgctatgcaccctgcatagtcttgatattattccggttgacaaagatggtggtacttttcaagacgaaagtcctttctcttcatctaatgttatgtttggtggaaatcttggtcccaagaatgctattattagaccaattaaactaccagaagtgccaaagcttccaccttatacaacatggatatttttggacaggaaccaaaggatgacagaagaccaatctgtacttggtcgacggaggatttactatgataccagttgtggtgaagctctaatttgcagtgatagtgaagatgaagccattgaagatgaggaggaaaaaaaggaatttaaacattctgaagatcacattattcggatgacagttcaagaatgtggcatgtctgatgctgtactgcaaacgctagctcgacacatggagcgggctgctgatgacataaaggccaggtatgaaattctgcatggtgagaaaactaaggattcttgcaagaaagggactgagcataatgtcaaagtggaagatttgtactgtgacaaagatttggatgcagcattggattcttttgacaatctcttctgtcgacgatgtctagtgtttgattgcaagctacatgggtgttctcaagatttagtatttcctacagaaaaacaaccagcttggagtggcgttgatgacagtgtaccctgtggtattcattgccataaactggcatctgaaccagatgctgctgctggtgctgatcacatgctttttgatgttgaggagccaactcactcatcagacaatgtgatgaaccagccaggttcaaataggaaaaagaacggctccagtggaaggaagactaaatctcaacaaagtgaaagctcttcaactgcaagagttatctcagaaagcagtgattcggaagtacatccaataagcaataaatctccacaacactcccctagtccctcaaaagttaaaattgggccgaaaggtggaatcagaaagattaccaatagacgaatcgctgagagaattcttatgagtgtgaagaaaggacaaagggaaatggcatcatctgattctaattttgttagtggatatcttttggcaagggacatgaagcttaggtctgatacacgaaatggaaataaggaattaattgtatcctcacaacagagttctccaagcacaagaagttccaaaaagaagagtacacctcaaattgggaacagctcagcttttgctgaggctcataatgattcaacagaggaagcaaataaccgtcattcagcaacagatggttacgatagttcaaggaaagaagaattcgtcaatgagaatttatgcaagcaggaggtgtacttgagatcatggaaggcaattgagcagggacttcttgtgaaaggattagagatttttggaaggaacagttgtttaattgctcggaaccttcttggtggaatgaagacgtgcaaagatgtttttcaatatatgaattatattgaaaacaacagtgcctctggagctcttagtggtgttgattctcttgttaaaggatatattaagggtactgagttgcgcacaagatcaagatattttagaaggcgaggtaaagtccgtcgtttgaagtacacctggaaatctgcaggttacaatttcaaaaggattaccgaaaggaaggatcagccttgtcgacaatataatccttgtggttgtcaatctacatgcggaaagcagtgtccatgtctttcaaatgggacatgttgtgagaaatactgtgggtgtccaaaaatttgcaagaatcgttttcgaggatgtcactgtgcaaagagccagtgtcgcagccgccaatgtccatgttttgcagctgacagggaatgcgatccggatgtttgcagaaactgttgggttgggtgtggtgatggtacattgggagttccaaaccagagaggagataattatgaatgccggaacatgaaactgcttcttaaacaacaacaaagggtcttacttggaagatcagatgtctctggctggggagcattcctcaagaatagtgttagcaaacatgaataccttggtgagtacactggggaactaatctcacacaaagaagcagataagcgtggaaagatatatgatcgtgagaactcatcgttccttttcaacctgaacaatgagtatgttcttgacgcatacagaatgggtgacaagctgaaatttgccaaccatgcccctgacccgaattgctatgccaaggttatcatggtaactggtgatcatagagtgggcatattcgccaaagaaagaatcctcgctggtgaagagttattctacgattaccgctatgagcctgacagagctcctgcttgggcccgtaagcctgaggcgtcgggagcaaaggatgatgggcaaccgttcaatgggcgtgcaaagaagctcgcccaaaacaaccgaggctgaatctgatttgattctttcattgttaggacaaatttggcagccattcaactaatacaaggaacctgtcattcataggccccaatttatttgaactcgtcattgtaactcgtatgtgcttgaattctccatggcatctggtcctgccatccgtagagttaggtcccgtttgttttgtttgttttgaggaactaaaaattaatccctctattttagtcacattgagtctctagattgtcaaacggcgggactaaaacaaagactaaactatttgtctctagttcctcaagccatgacttaaagggaataaatcacataaattttatttttatccttcctttatttcagttacactaatgatgtaataattgtatgaggtattttggtcctcttagagcatctccaagtgactcttcattttttgctctcta

SEQ ID NO: 61348 - DNA, 3317 bp, Zea Mays
cacccctccctcccccaccaaatcctcgttcatttttttccaagcgacttcgcgtgtgagggcgggagagcgcgcggggctagggtttccacgggtgatggaagcagaggctgccgcggcggtagtggcgtcgtccgcatctgcctcggcttccgcgggccggtctcgcccatctagcagcgccgcccaggtcaccagtaattcggctgtgcgagctggagaagaaaatgctgcctccctctatgttttatctgttattgactcgttaaaaaagaggattaccgcagatcgtttgacttacattaagaataggataggggagaacaagactaatatcagcagctatacacagaggacttacaatttatcaaaaaataggcaaattagtacatcaaagggtactgattcagcatcaaatttgctcacaaaaaggcaagatgatgcgctatgcaccctgcatagtcttgatattattccggttgacaaagatggtggtacttttcaagacgaaagtcctttctcttcatctaatgttatgtttggtggaaatcttggtcccaagaatgctattattagaccaattaaactaccagaagtgccaaagcttccaccttatacaacatggatatttttggacaggaaccaaaggatgacagaagaccaatctgtacttggtcgacggaggatttactatgataccagttgtggtgaagctctaatttgcagtgatagtgaagatgaagccattgaagatgaggaggaaaaaaaggaatttaaacattctgaagatcacattattcggatgacagttcaagaatgtggcatgtctgatgctgtactgcaaacgctagctcgacacatggagcgggctgctgatgacataaaggccaggtatgaaattctgcatggtgagaaaactaaggattcttgcaagaaagggactgagcataatgtcaaagtggaagatttgtactgtgacaaagatttggatgcagcattggattcttttgacaatctcttctgtcgacgatgtctagtgtttgattgcaagctacatgggtgttctcaagatttagtatttcctaaaaacaaccagcttggagtggcgttgatgacagtgtaccctgtggtattcattgccataaactggcatctgaaccagatgctgctgctggtgctgatcacatgctttttgatgttgaggagccaactcactcatcagacaatgtgatgaaccagccaggttcaaataggaaaaagaacggctccagtggaaggaagactaaatctcaacaaagtgaaagctcttcaactgcaagagttatctcagaaagcagtgattcggaagtacatccaataagcaataaatctccacaacactcccctagtccctcaaaagttaaaattgggccgaaaggtggaatcagaaagattaccaatagacgaatcgctgagagaattcttatgagtgtgaagaaaggacaaagggaaatggcatcatctgattctaattttgttagtggatatcttttggcaagggacatgaagcttaggtctgatacacgaaatggaaataaggaattaattgtatcctcacaacagagttctccaagcacaagaagttccaaaaagaagagtacacctcaaattgggaacagctcagcttttgctgaggctcataatgattcaacagaggaagcaaataaccgtcattcagcaacagatggttacgatagttcaaggaaagaagaattcgtcaatgagaatttatgcaagcaggaggtgtacttgagatcatggaaggcaattgagcagggacttcttgtgaaaggattagagatttttggaaggaacagttgtttaattgctcggaaccttcttggtggaatgaagacgtgcaaagatgtttttcaatatatgaattatattgaaaacaacagtgcctctggagctcttagtggtgttgattctcttgttaaaggatatattaagggtactgagttgcgcacaagatcaagatattttagaaggcgaggtaaagtccgtcgtttgaagtacacctggaaatctgcaggttacaatttcaaaaggattaccgaaaggaaggatcagccttgtcgacaatataatccttgtggttgtcaatctacatgcggaaagcagtgtccatgtctttcaaatgggacatgttgtgagaaatactgtgggtgtccaaaaatttgcaagaatcgttttcgaggatgtcactgtgcaaagagccagtgtcgcagccgccaatgtccatgttttgcagctgacagggaatgcgatccggatgtttgcagaaactgttgggttgggtgtggtgatggtacattgggagttccaaaccagagaggagataattatgaatgccggaacatgaaactgcttcttaaacaacaacaaagggtcttacttggaagatcagatgtctctggctggggagcattcctcaagaatagtgttagcaaacatgaataccttggtgagtacactggggaactaatctcacacaaagaagcagataagcgtggaaagatatatgatcgtgagaactcatcgttccttttcaacctgaacaatgagtatgttcttgacgcatacagaatgggtgacaagctgaaatttgccaaccatgcccctgacccgaattgctatgccaaggttatcatggtaactggtgatcatagagtgggcatattcgccaaagaaagaatcctcgctggtgaagagttattctacgattaccgctatgagcctgacagagctcctgcttgggcccgtaagcctgaggcgtcgggagcaaaggatgatgggcaaccgttcaatgggcgtgcaaagaagctcgcccaaaacaaccgaggctgaatctgatttgattctttcattgttaggacaaatttggcagccattcaactaatacaaggaacctgtcattcataggccccaatttatttgaactcgtcattgtaactcgtatgtgcttgaattctccatggcatctggtcctgccatccgtagagttaggtcccgtttgttttgtttgttttgaggaactaaaaattaatccctctattttagtcacattgagtctctagattgtcaaacggcgggactaaaacaaagactaaactatttgtctctagttcctcaagccatgacttaaagggaataaatcacataaattttatttttatccttcctttatttcagttacactaatgatgtaataattgtatgaggtattttggtcctcttagagcatctccaagtgactcttcattttttgctctcta

SEQ ID NO: 61349 - DNA, 3320 bp, Zea Mays
ctccccccacccctccctcccccaccaaatcctcgttcatttttttccaagcgacttcgcgtgtgagggcgggagagcgcgcggggctagggtttccacgggtgatggaagcagaggctgccgcggcggtagtggcgtcgtccgcatctgcctcggcttccgcgggccggtctcgcccatctagcagcgccgcccagtaattcggctgtgcgagctggagaagaaaatgctgcctccctctatgttttatctgttattgactcgttaaaaaagaggattaccgcagatcgtttgacttacattaagaataggataggggagaacaagactaatatcagcagctatacacagaggacttacaatttatcaaaaaataggcaaattagtacatcaaagggtactgattcagcatcaaatttgctcacaaaaaggcaagatgatgcgctatgcaccctgcatagtcttgatattattccggttgacaaagatggtggtacttttcaagacgaaagtcctttctcttcatctaatgttatgtttggtggaaatcttggtcccaagaatgctattattagaccaattaaactaccagaagtgccaaagcttccaccttatacaacatggatatttttggacaggaaccaaaggatgacagaagaccaatctgtacttggtcgacggaggatttactatgataccagttgtggtgaagctctaatttgcagtgatagtgaagatgaagccattgaagatgaggaggaaaaaaaggaatttaaacattctgaagatcacattattcggatgacagttcaagaatgtggcatgtctgatgctgtactgcaaacgctagctcgacacatggagcgggctgctgatgacataaaggccaggtatgaaattctgcatggtgagaaaactaaggattcttgcaagaaagggactgagcataatgtcaaagtggaagatttgtactgtgacaaagatttggatgcagcattggattcttttgacaatctcttctgtcgacgatgtctagtgtttgattgcaagctacatgggtgttctcaagatttagtatttcctacagaaaaacaaccagcttggagtggcgttgatgacagtgtaccctgtggtattcattgccataaactggcatctgaaccagatgctgctgctggtgctgatcacatgctttttgatgttgaggagccaactcactcatcagacaatgtgatgaaccagccaggttcaaataggaaaaagaacggctccagtggaaggaagactaaatctcaacaaagtgaaagctcttcaactgcaagagttatctcagaaagcagtgattcggaagtacatccaataagcaataaatctccacaacactcccctagtccctcaaaagttaaaattgggccgaaaggtggaatcagaaagattaccaatagacgaatcgctgagagaattcttatgagtgtgaagaaaggacaaagggaaatggcatcatctgattctaattttgttagtggatatcttttggcaagggacatgaagcttaggtctgatacacgaaatggaaataaggaattaattgtatcctcacaacagagttctccaagcacaagaagttccaaaaagaagagtacacctcaaattgggaacagctcagcttttgctgaggctcataatgattcaacagaggaagcaaataaccgtcattcagcaacagatggttacgatagttcaaggaaagaagaattcgtcaatgagaatttatgcaagcaggaggtgtacttgagatcatggaaggcaattgagcagggacttcttgtgaaaggattagagatttttggaaggaacagttgtttaattgctcggaaccttcttggtggaatgaagacgtgcaaagatgtttttcaatatatgaattatattgaaaacaacagtgcctctggagctcttagtggtgttgattctcttgttaaaggatatattaagggtactgagttgcgcacaagatcaagatattttagaaggcgaggtaaagtccgtcgtttgaagtacacctggaaatctgcaggttacaatttcaaaaggattaccgaaaggaaggatcagccttgtcgacaatataatccttgtggttgtcaatctacatgcggaaagcagtgtccatgtctttcaaatgggacatgttgtgagaaatactgtgggtgtccaaaaatttgcaagaatcgttttcgaggatgtcactgtgcaaagagccagtgtcgcagccgccaatgtccatgttttgcagctgacagggaatgcgatccggatgtttgcagaaactgttgggttgggtgtggtgatggtacattgggagttccaaaccagagaggagataattatgaatgccggaacatgaaactgcttcttaaacaacaacaaagggtcttacttggaagatcagatgtctctggctggggagcattcctcaagaatagtgttagcaaacatgaataccttggtgagtacactggggaactaatctcacacaaagaagcagataagcgtggaaagatatatgatcgtgagaactcatcgttccttttcaacctgaacaatgagtatgttcttgacgcatacagaatgggtgacaagctgaaatttgccaaccatgcccctgacccgaattgctatgccaaggttatcatggtaactggtgatcatagagtgggcatattcgccaaagaaagaatcctcgctggtgaagagttattctacgattaccgctatgagcctgacagagctcctgcttgggcccgtaagcctgaggcgtcgggagcaaaggatgatgggcaaccgttcaatgggcgtgcaaagaagctcgcccaaaacaaccgaggctgaatctgatttgattctttcattgttaggacaaatttggcagccattcaactaatacaaggaacctgtcattcataggccccaatttatttgaactcgtcattgtaactcgtatgtgcttgaattctccatggcatctggtcctgccatccgtagagttaggtcccgtttgttttgtttgttttgaggaactaaaaattaatccctctattttagtcacattgagtctctagattgtcaaacggcgggactaaaacaaagactaaactatttgtctctagttcctcaagccatgacttaaagggaataaatcacataaattttatttttatccttcctttatttcagttacactaatgatgtaataattgtatgaggtattttggtcctcttagagcatctccaagtgactcttcattttttgctctcta

SEQ ID NO: 61350 - DNA, 3349 bp, Zea Mays
gcttcacctctctccctccccctcttctccccccacccctccctcccccaccaaatcctcgttcatttttttccaagcgacttcgcgtgtgagggcgggagagcgcgcggggctagggtttccacgggtgatggaagcagaggctgccgcggcggtagtggcgtcgtccgcatctgcctcggcttccgcgggccggtctcgcccatctagcagcgccgcccaggtcaccagtaattcggctgtgcgagctggagaagaaaatgctgcctccctctatgttttatctgttattgactcgttaaaaaagaggattaccgcagatcgtttgacttacattaagaataggataggggagaacaagactaatatcagcagctatacacagaggacttacaatttatcaaaaaataggcaaattagtacatcaaagggtactgattcagcatcaaatttgctcacaaaaaggcaagatgatgcgctatgcaccctgcatagtcttgatattattccggttgacaaagatggtggtacttttcaagacgaaagtcctttctcttcatctaatgttatgtttggtggaaatcttggtcccaagaatgctattattagaccaattaaactaccagaagtgccaaagcttccaccttatacaacatggatatttttggacaggaaccaaaggatgacagaagaccaatctgtacttggtcgacggaggatttactatgataccagttgtggtgaagctctaatttgcagtgatagtgaagatgaagccattgaagatgaggaggaaaaaaaggaatttaaacattctgaagatcacattattcggatgacagttcaagaatgtggcatgtctgatgctgtactgcaaacgctagctcgacacatggagcgggctgctgatgacataaaggccaggtatgaaattctgcatggtgagaaaactaaggattcttgcaagaaagggactgagcataatgtcaaagtggaagatttgtactgtgacaaagatttggatgcagcattggattcttttgacaatctcttctgtcgacgatgtctagtgtttgattgcaagctacatgggtgttctcaagatttagtatttcctacagaaaaacaaccagcttggagtggcgttgatgacagtgtaccctgtggtattcattgccataaactggcatctgaaccagatgctgctgctggtgctgatcacatgctttttgatgttgaggagccaactcactcatcagacaatgtgatgaaccagccaggttcaaataggaaaaagaacggctccagtggaaggaagactaaatctcaacaaagtgaaagctcttcaactgcaagagttatctcagaaagcagtgattcggaagtacatccaataagcaataaatctccacaacactcccctagtccctcaaaagttaaaattgggccgaaaggtggaatcagaaagattaccaatagacgaatcgctgagagaattcttatgagtgtgaagaaaggacaaagggaaatggcatcatctgattctaattttgttagtggatatcttttggcaagggacatgaagcttaggtctgatacacgaaatggaaataaggaattaattgtatcctcacaacagagttctccaagcacaagaagttccaaaaagaagagtacacctcaaattgggaacagctcagcttttgctgaggctcataatgattcaacagaggaagcaaataaccgtcattcagcaacagatggttacgatagttcaaggaaagaagaattcgtcaatgagaatttatgcaagcaggaggtgtacttgagatcatggaaggcaattgagcagggacttcttgtgaaaggattagagatttttggaaggaacagttgtttaattgctcggaaccttcttggtggaatgaagacgtgcaaagatgtttttcaatatatgaattatattgaaaacaacagtgcctctggagctcttagtggtgttgattctcttgttaaaggatatattaagggtactgagttgcgcacaagatcaagatattttagaaggcgaggtaaagtccgtcgtttgaagtacacctggaaatctgcaggttacaatttcaaaaggattaccgaaaggaaggatcagccttgtcgacaatataatccttgtggttgtcaatctacatgcggaaagcagtgtccatgtctttcaaatgggacatgttgtgagaaatactgtgggtgtccaaaaatttgcaagaatcgttttcgaggatgtcactgtgcaaagagccagtgtcgcagccgccaatgtccatgttttgcagctgacagggaatgcgatccggatgtttgcagaaactgttgggttgggtgtggtgatggtacattgggagttccaaaccagagaggagataattatgaatgccggaacatgaaactgcttcttaaacaacaacaaagggtcttacttggaagatcagatgtctctggctggggagcattcctcaagtgttagcaaacatgaataccttggtgagtacactggggaactaatctcacacaaagaagcagataagcgtggaaagatatatgatcgtgagaactcatcgttccttttcaacctgaacaatgagtatgttcttgacgcatacagaatgggtgacaagctgaaatttgccaaccatgcccctgacccgaattgctatgccaaggttatcatggtaactggtgatcatagagtgggcatattcgccaaagaaagaatcctcgctggtgaagagttattctacgattaccgctatgagcctgacagagctcctgcttgggcccgtaagcctgaggcgtcgggagcaaaggatgatgggcaaccgttcaatgggcgtgcaaagaagctcgcccaaaacaaccgaggctgaatctgatttgattctttcattgttaggacaaatttggcagccattcaactaatacaaggaacctgtcattcataggccccaatttatttgaactcgtcattgtaactcgtatgtgcttgaattctccatggcatctggtcctgccatccgtagagttaggtcccgtttgttttgtttgttttgaggaactaaaaattaatccctctattttagtcacattgagtctctagattgtcaaacggcgggactaaaacaaagactaaactatttgtctctagttcctcaagccatgacttaaagggaataaatcacataaattttatttttatccttcctttatttcagttacactaatgatgtaataattgtatgaggtattttggtcctcttagagcatctccaagtgactcttcattttttgctctcta

SEQ ID NO: 61351 - DNA, 3437 bp, Zea Mays
agcctcaccccacactcccacaggccacaaggtcacgagccgctcatttcaaaacaaaaacgcctctctcaccctcctccgcagccccgcttcacctctctccctccccctcttctccccccacccctccctcccccaccaaatcctcgttcatttttttccaagcgacttcgcgtgtgagggcgggagagcgcgcggggctagggtttccacgggtgatggaagcagaggctgccgcggcggtagtggcgtcgtccgcatctgcctcggcttccgcgggccggtctcgcccatctagcagcgccgcccaggtcaccagtaattcggctgtgcgagctggagaagaaaatgctgcctccctctatgttttatctgttattgactcgttaaaaaagaggattaccgcagatcgtttgacttacattaagaataggataggggagaacaagactaatatcagcagctatacacagaggacttacaatttatcaaaaaataggcaaattagtacatcaaagggtactgattcagcatcaaatttgctcacaaaaaggcaagatgatgcgctatgcaccctgcatagtcttgatattattccggttgacaaagatggtggtacttttcaagacgaaagtcctttctcttcatctaatgttatgtttggtggaaatcttggtcccaagaatgctattattagaccaattaaactaccagaagtgccaaagcttccaccttatacaacatggatatttttggacaggaaccaaaggatgacagaagaccaatctgtacttggtcgacggaggatttactatgataccagttgtggtgaagctctaatttgcagtgatagtgaagatgaagccattgaagatgaggaggaaaaaaaggaatttaaacattctgaagatcacattattcggatgacagttcaagaatgtggcatgtctgatgctgtactgcaaacgctagctcgacacatggagcgggctgctgatgacataaaggccaggtatgaaattctgcatggtgagaaaactaaggattcttgcaagaaagggactgagcataatgtcaaagtggaagatttgtactgtgacaaagatttggatgcagcattggattcttttgacaatctcttctgtcgacgatgtgtttgattgcaagctacatgggtgttctcaagatttagtatttcctacagaaaaacaaccagcttggagtggcgttgatgacagtgtaccctgtggtattcattgccataaactggcatctgaaccagatgctgctgctggtgctgatcacatgctttttgatgttgaggagccaactcactcatcagacaatgtgatgaaccagccaggttcaaataggaaaaagaacggctccagtggaaggaagactaaatctcaacaaagtgaaagctcttcaactgcaagagttatctcagaaagcagtgattcggaagtacatccaataagcaataaatctccacaacactcccctagtccctcaaaagttaaaattgggccgaaaggtggaatcagaaagattaccaatagacgaatcgctgagagaattcttatgagtgtgaagaaaggacaaagggaaatggcatcatctgattctaattttgttagtggatatcttttggcaagggacatgaagcttaggtctgatacacgaaatggaaataaggaattaattgtatcctcacaacagagttctccaagcacaagaagttccaaaaagaagagtacacctcaaattgggaacagctcagcttttgctgaggctcataatgattcaacagaggaagcaaataaccgtcattcagcaacagatggttacgatagttcaaggaaagaagaattcgtcaatgagaatttatgcaagcaggaggtgtacttgagatcatggaaggcaattgagcagggacttcttgtgaaaggattagagatttttggaaggaacagttgtttaattgctcggaaccttcttggtggaatgaagacgtgcaaagatgtttttcaatatatgaattatattgaaaacaacagtgcctctggagctcttagtggtgttgattctcttgttaaaggatatattaagggtactgagttgcgcacaagatcaagatattttagaaggcgaggtaaagtccgtcgtttgaagtacacctggaaatctgcaggttacaatttcaaaaggattaccgaaaggaaggatcagccttgtcgacaatataatccttgtggttgtcaatctacatgcggaaagcagtgtccatgtctttcaaatgggacatgttgtgagaaatactgtgggtgtccaaaaatttgcaagaatcgttttcgaggatgtcactgtgcaaagagccagtgtcgcagccgccaatgtccatgttttgcagctgacagggaatgcgatccggatgtttgcagaaactgttgggttgggtgtggtgatggtacattgggagttccaaaccagagaggagataattatgaatgccggaacatgaaactgcttcttaaacaacaacaaagggtcttacttggaagatcagatgtctctggctggggagcattcctcaagaatagtgttagcaaacatgaataccttggtgagtacactggggaactaatctcacacaaagaagcagataagcgtggaaagatatatgatcgtgagaactcatcgttccttttcaacctgaacaatgagtatgttcttgacgcatacagaatgggtgacaagctgaaatttgccaaccatgcccctgacccgaattgctatgccaaggttatcatggtaactggtgatcatagagtgggcatattcgccaaagaaagaatcctcgctggtgaagagttattctacgattaccgctatgagcctgacagagctcctgcttgggcccgtaagcctgaggcgtcgggagcaaaggatgatgggcaaccgttcaatgggcgtgcaaagaagctcgcccaaaacaaccgaggctgaatctgatttgattctttcattgttaggacaaatttggcagccattcaactaatacaaggaacctgtcattcataggccccaatttatttgaactcgtcattgtaactcgtatgtgcttgaattctccatggcatctggtcctgccatccgtagagttaggtcccgtttgttttgtttgttttgaggaactaaaaattaatccctctattttagtcacattgagtctctagattgtcaaacggcgggactaaaacaaagactaaactatttgtctctagttcctcaagccatgacttaaagggaataaatcacataaattttatttttatccttcctttatttcagttacactaatgatgtaataattgtatgaggtattttggtcctcttagagcatctccaagtgactcttcattttttgctctcta

SEQ ID NO: 61352 - DNA, 3353 bp, Zea Mays
agcctcaccccacactcccacaggccacaaggtcacgagccgctcatttcaaaacaaaaacgcctctctcaccctcctccgcagccccgcttcacctctctccctccccctcttctccccccacccctccctcccccaccaaatcctcgttcatttttttccaagcgacttcgcgtgtgagggcgggagagcgcgcggggctagggtttccacgggtgatggaagcagaggctgccgcggcggtagtggcgtcgtccgcatctgcctcggcttccgcgggccggtctcgcccatctagcagcgccgcccaggtcaccagtaattcggctgtgcgagctggagaagaaaatgctgcctccctctatgttttatctgttattgactcgttaaaaaagaggattaccgcagatcgtttgacttacattaagaataggataggggagaacaagactaatatcagcagctatacacagaggacttacaatttatcaaaaaataggcaaattagtacatcaaagggtactgattcagcatcaaatttgctcacaaaaaggcaagatgatgcgctatgcaccctgcatagtcttgatattattccggttgacaaagatggtggtacttttcaagacgaaagtcctttctcttcatctaatgttatgtttggtggaaatcttggtcccaagaatgctattattagaccaattaaactaccagaagtgccaaagcttccaccttatacaacatggatatttttggacaggaaccaaaggatgacagaagaccaatctgtacttggtcgacggaggatttactatgataccagttgtggtgaagctctaatttgcagtgatagtgaagatgaagccattgaagatgaggaggaaaaaaaggaatttaaacattctgaagatcacattattcggatgacagttcaagaatgtggcatgtctgatgctgtactgcaaacgctagctcgacacatggagcgggctgctgatgacataaaggccaggtatgaaattctgcatggtgagaaaactaaggattcttgcaagaaagggactgagcataatgtcaaagtggaagatttgtactgtgacaaagatttggatgcagcattggattcttttgacaatctcttctgtcgacgatgtctagtgtttgattgcaagctacatgggtgttctcaagatttagtatttcctacagaaaaacaaccagcttggagtggcgttgatgacagtgtaccctgtggtattcattgccataaactggcatctgaaccagatgctgctgctggtgctgatcacatgctttttgatgttgaggagccaactcactcatcagacaatgtgatgaaccagccaggttcaaataggaaaaagaacggctccagtggaaggaagactaaatctcaacaaagtgaaagctcttcaactgcaagagttatctcagaaagcagtgattcggaagtacatccaataagcaataaatctccacaacactcccctagtccctcaaaagttaaaattgggccgaaaggtggaatcagaaagattaccaatagacgaatcgctgagagaattcttatgagtgtgaagaaaggacaaagggaaatggcatcatctgattctaattttgttagtggatatcttttggcaagggacatgaagcttaggtctgatacacgaaatggaaataaggaattaattgtatcctcacaacagagttctccaagcacaagaagttccaaaaagaagagtacacctcaaattgggaacagctcagcttttgctgaggctcataatgattcaacagaggaagcaaataaccgtcattcagcaacagatggttacgatagttcaaggaaagaagaattcgtcaatgagaatttatgcaagcaggaggtgtacttgagatcatggaaggcaattgagcagggacttcttgtgaaaggattagagatttttggaaggaacagttgtttaattgctcggaaccttcttggtggaatgaagacgtgcaaagatgtttttcaatatatgaattatattgaaaacaacagtgcctctggagctcttagtggtgttgattctcttgttaaaggatatattaagggtactgagttgcgcacaagatcaagatattttagaaggcgaggtaaagtccgtcgtttgaagtacacctggaaatctgcagtgtccatgtctttcaaatgggacatgttgtgagaaatactgtgggtgtccaaaaatttgcaagaatcgttttcgaggatgtcactgtgcaaagagccagtgtcgcagccgccaatgtccatgttttgcagctgacagggaatgcgatccggatgtttgcagaaactgttgggttgggtgtggtgatggtacattgggagttccaaaccagagaggagataattatgaatgccggaacatgaaactgcttcttaaacaacaacaaagggtcttacttggaagatcagatgtctctggctggggagcattcctcaagaatagtgttagcaaacatgaataccttggtgagtacactggggaactaatctcacacaaagaagcagataagcgtggaaagatatatgatcgtgagaactcatcgttccttttcaacctgaacaatgagtatgttcttgacgcatacagaatgggtgacaagctgaaatttgccaaccatgcccctgacccgaattgctatgccaaggttatcatggtaactggtgatcatagagtgggcatattcgccaaagaaagaatcctcgctggtgaagagttattctacgattaccgctatgagcctgacagagctcctgcttgggcccgtaagcctgaggcgtcgggagcaaaggatgatgggcaaccgttcaatgggcgtgcaaagaagctcgcccaaaacaaccgaggctgaatctgatttgattctttcattgttaggacaaatttggcagccattcaactaatacaaggaacctgtcattcataggccccaatttatttgaactcgtcattgtaactcgtatgtgcttgaattctccatggcatctggtcctgccatccgtagagttaggtcccgtttgttttgtttgttttgaggaactaaaaattaatccctctattttagtcacattgagtctctagattgtcaaacggcgggactaaaacaaagactaaactatttgtctctagttcctcaagccatgacttaaagggaataaatcacataaattttatttttatccttcctttatttcagttacactaatgatgtaataattgtatgaggtattttggtcctcttagagcatctccaagtgactcttcattttttgctctcta

SEQ ID NO: 61353 - DNA, 3186 bp, Zea Mays
ccaaagtctagtgtgacccctcaccacggctgctggcgccacgagatgaccacaggtcaccagtaattcggctgtgcgagctggagaagaaaatgctgcctccctctatgttttatctgttattgactcgttaaaaaagaggattaccgcagatcgtttgacttacattaagaataggataggggagaacaagactaatatcagcagctatacacagaggacttacaatttatcaaaaaataggcaaattagtacatcaaagggtactgattcagcatcaaatttgctcacaaaaaggcaagatgatgcgctatgcaccctgcatagtcttgatattattccggttgacaaagatggtggtacttttcaagacgaaagtcctttctcttcatctaatgttatgtttggtggaaatcttggtcccaagaatgctattattagaccaattaaactaccagaagtgccaaagcttccaccttatacaacatggatatttttggacaggaaccaaaggatgacagaagaccaatctgtacttggtcgacggaggatttactatgataccagttgtggtgaagctctaatttgcagtgatagtgaagatgaagccattgaagatgaggaggaaaaaaaggaatttaaacattctgaagatcacattattcggatgacagttcaagaatgtggcatgtctgatgctgtactgcaaacgctagctcgacacatggagcgggctgctgatgacataaaggccaggtatgaaattctgcatggtgagaaaactaaggattcttgcaagaaagggactgagcataatgtcaaagtggaagatttgtactgtgacaaagatttggatgcagcattggattcttttgacaatctcttctgtcgacgatgtctagtgtttgattgcaagctacatgggtgttctcaagatttagtatttcctacagaaaaacaaccagcttggagtggcgttgatgacagtgtaccctgtggtattcattgccataaactggcatctgaaccagatgctgctgctggtgctgatcacatgctttttgatgttgaggagccaactcactcatcagacaatgtgatgaaccagccaggttcaaataggaaaaagaacggctccagtggaaggaagactaaatctcaacaaagtgaaagctcttcaactgcaagagttatctcagaaagcagtgattcggaagtacatccaataagcaataaatctccacaacactcccctagtccctcaaaagttaaaattgggccgaaaggtggaatcagaaagattaccaatagacgaatcgctgagagaattcttatgagtgtgaagaaaggacaaagggaaatggcatcatctgattctaattttgttagtggatatcttttggcaagggacatgaagcttaggtctgatacacgaaatggaaataaggaattaattgtatcctcacaacagagttctccaagcacaagaagttccaaaaagaagagtacacctcaaattgggaacagctcagcttttgctgaggctcataatgattcaacagaggaagcaaataaccgtcattcagcaacagatggttacgatagttcaaggaaagaagaattcgtcaatgagaatttatgcaagcaggaggtgtacttgagatcatggaaggcaattgagcagggacttcttgtgaaaggattagagatttttggaaggaacagttgtttaattgctcggaaccttcttggtggaatgaagacgtgcaaagatgtttttcaatatatgaattatattgaaaacaacagtgcctctggagctcttagtggtgttgattctcttgttaaaggatatattaagggtactgagttgcgcacaagatcaagatattttagaaggcgaggtaaagtccgtcgtttgaagtacacctggaaatctgcaggttacaatttcaaaaggattaccgaaaggaaggatcagccttgtcgacaatataatccttgtggttgtcaatctacatgcggaaagcagtgtccatgtctttcaaatgggacatgttgtgagaaatactgtgggtgtccaaaaatttgcaagaatcgttttcgaggatgtcactgtgcaaagagccagtgtcgcagccgccaatgtccatgttttgcagctgacagggaatgcgatccggatgtttgcagaaactgttgggttgggtgtggtgatggtacattgggagttccaaaccagagaggagataattatgaatgccggaacatgaaactgcttcttaaacaacaacaaagggtcttacttggaagatcagatgtctctggctggggagcattcctcaagaatagtgttagcaaacatgaataccttggtgagtacactggggaactaatctcacacaaagaagcagataagcgtggaaagatatatgatcgtgagaactcatcgttccttttcaacctgaacaatgagtatgttcttgacgcatacagaatgggtgacaagctgaaatttgccaaccatgcccctgacccgaattgctatgccaaggttatcatggtaactggtgatcatagagtgggcatattcgccaaagaaagaatcctcgctggtgaagagttattctacgattaccgctatgagcctgacagagctcctgcttgggcccgtaagcctgaggcgtcgggagcaaaggatgatgggcaaccgttcaatgggcgtgcaaagaagctcgcccaaaacaaccgaggctgaatctgatttgattctttcattgttaggacaaatttggcagccattcaactaatacaaggaacctgtcattcataggccccaatttatttgaactcgtcattgtaactcgtatgtgcttgaattctccatggcatctggtcctgccatccgtagagttaggtcccgtttgttttgtttgttttgaggaactaaaaattaatccctctattttagtcacattgagtctctagattgtcaaacggcgggactaaaacaaagactaaactatttgtctctagttcctcaagccatgacttaaagggaataaatcacataaattttatttttatccttcctttatttcagttacactaatgatgtaataattgtatgaggtattttggtcctcttagagcatctccaagtgactcttcattttttgctctcta

SEQ ID NO: 61354 - DNA, 3316 bp, Zea Mays
gccgtcgcagatggctagcacgggtgagcacttgcgtagcatagaggatagtgaactagcaaggaaatggttagaacgcatgaggagctccgggcatggcgtcgaccacatcgtcattggacaagcataccaaacacgtcagcgtcggacaccgccacatgaactcgtccttctaaaacaggtcaccagtaattcggctgtgcgagctggagaagaaaatgctgcctccctctatgttttatctgttattgactcgttaaaaaagaggattaccgcagatcgtttgacttacattaagaataggataggggagaacaagactaatatcagcagctatacacagaggacttacaatttatcaaaaaataggcaaattagtacatcaaagggtactgattcagcatcaaatttgctcacaaaaaggcaagatgatgcgctatgcaccctgcatagtcttgatattattccggttgacaaagatggtggtacttttcaagacgaaagtcctttctcttcatctaatgttatgtttggtggaaatcttggtcccaagaatgctattattagaccaattaaactaccagaagtgccaaagcttccaccttatacaacatggatatttttggacaggaaccaaaggatgacagaagaccaatctgtacttggtcgacggaggatttactatgataccagttgtggtgaagctctaatttgcagtgatagtgaagatgaagccattgaagatgaggaggaaaaaaaggaatttaaacattctgaagatcacattattcggatgacagttcaagaatgtggcatgtctgatgctgtactgcaaacgctagctcgacacatggagcgggctgctgatgacataaaggccaggtatgaaattctgcatggtgagaaaactaaggattcttgcaagaaagggactgagcataatgtcaaagtggaagatttgtactgtgacaaagatttggatgcagcattggattcttttgacaatctcttctgtcgacgatgtctagtacgtgtttgattgcaagctacatgggtgttctcaagatttagtatttcctacagaaaaacaaccagcttggagtggcgttgatgacagtgtaccctgtggtattcattgccataaactggcatctgaaccagatgctgctgctggtgctgatcacatgctttttgatgttgaggagccaactcactcatcagacaatgtgatgaaccagccaggttcaaataggaaaaagaacggctccagtggaaggaagactaaatctcaacaaagtgaaagctcttcaactgcaagagttatctcagaaagcagtgattcggaagtacatccaataagcaataaatctccacaacactcccctagtccctcaaaagttaaaattgggccgaaaggtggaatcagaaagattaccaatagacgaatcgctgagagaattcttatgagtgtgaagaaaggacaaagggaaatggcatcatctgattctaattttgttagtggatatcttttggcaagggacatgaagcttaggtctgatacacgaaatggaaataaggaattaattgtatcctcacaacagagttctccaagcacaagaagttccaaaaagaagagtacacctcaaattgggaacagctcagcttttgctgaggctcataatgattcaacagaggaagcaaataaccgtcattcagcaacagatggttacgatagttcaaggaaagaagaattcgtcaatgagaatttatgcaagcaggaggtgtacttgagatcatggaaggcaattgagcagggacttcttgtgaaaggattagagatttttggaaggaacagttgtttaattgctcggaaccttcttggtggaatgaagacgtgcaaagatgtttttcaatatatgaattatattgaaaacaacagtgcctctggagctcttagtggtgttgattctcttgttaaaggatatattaagggtactgagttgcgcacaagatcaagatattttagaaggcgaggtaaagtccgtcgtttgaagtacacctggaaatctgcaggttacaatttcaaaaggattaccgaaaggaaggatcagccttgtcgacaatataatccttgtggttgtcaatctacatgcggaaagcagtgtccatgtctttcaaatgggacatgttgtgagaaatactgtgggtgtccaaaaatttgcaagaatcgttttcgaggatgtcactgtgcaaagagccagtgtcgcagccgccaatgtccatgttttgcagctgacagggaatgcgatccggatgtttgcagaaactgttgggttgggtgtggtgatggtacattgggagttccaaaccagagaggagataattatgaatgccggaacatgaaactgcttcttaaacaacaacaaagggtcttacttggaagatcagatgtctctggctggggagcattcctcaagaatagtgttagcaaacatgaataccttggtgagtacactggggaactaatctcacacaaagaagcagataagcgtggaaagatatatgatcgtgagaactcatcgttccttttcaacctgaacaatgagtatgttcttgacgcatacagaatgggtgacaagctgaaatttgccaaccatgcccctgacccgaattgctatgccaaggttatcatggtaactggtgatcatagagtgggcatattcgccaaagaaagaatcctcgctggtgaagagttattctacgattaccgctatgagcctgacagagctcctgcttgggcccgtaagcctgaggcgtcgggagcaaaggatgatgggcaaccgttcaatgggcgtgcaaagaagctcgcccaaaacaaccgaggctgaatctgatttgattctttcattgttaggacaaatttggcagccattcaactaatacaaggaacctgtcattcataggccccaatttatttgaactcgtcattgtaactcgtatgtgcttgaattctccatggcatctggtcctgccatccgtagagttaggtcccgtttgttttgtttgttttgaggaactaaaaattaatccctctattttagtcacattgagtctctagattgtcaaacggcgggactaaaacaaagactaaactatttgtctctagttcctcaagccatgacttaaagggaataaatcacataaattttatttttatccttcctttatttcagttacactaatgatgtaataattgtatgaggtattttggtcctcttagagcatctccaagtgactcttcattttttgctctcta

SEQ ID NO: 61355 - DNA, 3311 bp, Zea Mays
ggcggccgtcgcagatggctagcacgggtgagcacttgcgtagcatagaggatagtgaactagcaaggaaatggttagaacgcatgaggagctccgggcatggcgtcgaccacatcgtcattggacaagcataccaaacacgtcagcgtcggacaccgccacatgaactcgtccttctaaaacaggtcaccagtaattcggctgtgcgagctggagaagaaaatgctgcctccctctatgttttatctgttattgactcgttaaaaaagaggattaccgcagatcgtttgacttacattaagaataggataggggagaacaagactaatatcagcagctatacacagaggacttacaatttatcaaaaaataggcaaattagtacatcaaagggtactgattcagcatcaaatttgctcacaaaaaggcaagatgatgcgctatgcaccctgcatagtcttgatattattccggttgacaaagatggtggtacttttcaagacgaaagtcctttctcttcatctaatgttatgtttggtggaaatcttggtcccaagaatgctattattagaccaattaaactaccagaagtgccaaagcttccaccttatacaacatggatatttttggacaggaaccaaaggatgacagaagaccaatctgtacttggtcgacggaggatttactatgataccagttgtggtgaagctctaatttgcagtgatagtgaagatgaagccattgaagatgaggaggaaaaaaaggaatttaaacattctgaagatcacattattcggatgacagttcaagaatgtggcatgtctgatgctgtactgcaaacgctagctcgacacatggagcgggctgctgatgacataaaggtatgaaattctgcatggtgagaaaactaaggattcttgcaagaaagggactgagcataatgtcaaagtggaagatttgtactgtgacaaagatttggatgcagcattggattcttttgacaatctcttctgtcgacgatgtctagtgtttgattgcaagctacatgggtgttctcaagatttagtatttcctacagaaaaacaaccagcttggagtggcgttgatgacagtgtaccctgtggtattcattgccataaactggcatctgaaccagatgctgctgctggtgctgatcacatgctttttgatgttgaggagccaactcactcatcagacaatgtgatgaaccagccaggttcaaataggaaaaagaacggctccagtggaaggaagactaaatctcaacaaagtgaaagctcttcaactgcaagagttatctcagaaagcagtgattcggaagtacatccaataagcaataaatctccacaacactcccctagtccctcaaaagttaaaattgggccgaaaggtggaatcagaaagattaccaatagacgaatcgctgagagaattcttatgagtgtgaagaaaggacaaagggaaatggcatcatctgattctaattttgttagtggatatcttttggcaagggacatgaagcttaggtctgatacacgaaatggaaataaggaattaattgtatcctcacaacagagttctccaagcacaagaagttccaaaaagaagagtacacctcaaattgggaacagctcagcttttgctgaggctcataatgattcaacagaggaagcaaataaccgtcattcagcaacagatggttacgatagttcaaggaaagaagaattcgtcaatgagaatttatgcaagcaggaggtgtacttgagatcatggaaggcaattgagcagggacttcttgtgaaaggattagagatttttggaaggaacagttgtttaattgctcggaaccttcttggtggaatgaagacgtgcaaagatgtttttcaatatatgaattatattgaaaacaacagtgcctctggagctcttagtggtgttgattctcttgttaaaggatatattaagggtactgagttgcgcacaagatcaagatattttagaaggcgaggtaaagtccgtcgtttgaagtacacctggaaatctgcaggttacaatttcaaaaggattaccgaaaggaaggatcagccttgtcgacaatataatccttgtggttgtcaatctacatgcggaaagcagtgtccatgtctttcaaatgggacatgttgtgagaaatactgtgggtgtccaaaaatttgcaagaatcgttttcgaggatgtcactgtgcaaagagccagtgtcgcagccgccaatgtccatgttttgcagctgacagggaatgcgatccggatgtttgcagaaactgttgggttgggtgtggtgatggtacattgggagttccaaaccagagaggagataattatgaatgccggaacatgaaactgcttcttaaacaacaacaaagggtcttacttggaagatcagatgtctctggctggggagcattcctcaagaatagtgttagcaaacatgaataccttggtgagtacactggggaactaatctcacacaaagaagcagataagcgtggaaagatatatgatcgtgagaactcatcgttccttttcaacctgaacaatgagtatgttcttgacgcatacagaatgggtgacaagctgaaatttgccaaccatgcccctgacccgaattgctatgccaaggttatcatggtaactggtgatcatagagtgggcatattcgccaaagaaagaatcctcgctggtgaagagttattctacgattaccgctatgagcctgacagagctcctgcttgggcccgtaagcctgaggcgtcgggagcaaaggatgatgggcaaccgttcaatgggcgtgcaaagaagctcgcccaaaacaaccgaggctgaatctgatttgattctttcattgttaggacaaatttggcagccattcaactaatacaaggaacctgtcattcataggccccaatttatttgaactcgtcattgtaactcgtatgtgcttgaattctccatggcatctggtcctgccatccgtagagttaggtcccgtttgttttgtttgttttgaggaactaaaaattaatccctctattttagtcacattgagtctctagattgtcaaacggcgggactaaaacaaagactaaactatttgtctctagttcctcaagccatgacttaaagggaataaatcacataaattttatttttatccttcctttatttcagttacactaatgatgtaataattgtatgaggtattttggtcctcttagagcatctccaagtgactcttcattttttgctctcta

SEQ ID NO: 61356 - DNA, 3318 bp, Zea Mays
cgggcggccgtcgcagatggctagcacgggtgagcacttgcgtagcatagaggatagtgaactagcaaggaaatggttagaacgcatgaggagctccgggcatggcgtcgaccacatcgtcattggacaagcataccaaacacgtcagcgtcggacaccgccacatgaactcgtccttctaaaacaggtcaccagtaattcggctgtgcgagctggagaagaaaatgctgcctccctctatgttttatctgttattgactcgttaaaaaagaggattaccgcagatcgtttgacttacattaagaataggataggggagaacaagactaatatcagcagctatacacagaggacttacaatttatcaaaaaataggcaaattagtacatcaaagggtactgattcagcatcaaatttgctcacaaaaaggcaagatgatgcgctatgcaccctgcatagtcttgatattattccggttgacaaagatggtggtacttttcaagacgaaagtcctttctcttcatctaatgttatgtttggtggaaatcttggtcccaagaatgctattattagaccaattaaactaccagaagtgccaaagcttccaccttatacaacatggatatttttggacaggaaccaaaggatgacagaagaccaatctgtacttggtcgacggaggatttactatgataccagttgtggtgaagctctaatttgcagtgatagtgaagatgaagccattgaagatgaggaggaaaaaaaggaatttaaacattctgaagatcacattattcggatgacagttcaagaatgtggcatgtctgatgctgtactgcaaacgctagctcgacacatggagcgggctgctgatgacataaaggccaggtatgaaattctgcatggtgagaaaactaaggattcttgcaagaaagggactgagcataatgtcaaagtggaagatttgtactgtgacaaagatttggatgcagcattggattcttttgacaatctcttctgtcgacgatgtctagtgtttgattgcaagctacatgggtgttctcaagatttagtatttcctacagaaaaacaaccagcttggagtggcgttgatgacagtgtaccctgtggtattcattgccataaactggcatctgaaccagatgctgctgctggtgctgatcacatgctttttgatgttgaggagccaactcactcatcagacaatgtgatgaaccagccaggttcaaataggaaaaagaacggctccagtggaaggaagactaaatctcaacaaagtgaaagctcttcaactgcaagagttatctcagaaagcagtgattcggaagtacatccaataagcaataaatctccacaacactcccctagtccctcaaaagttaaaattgggccgaaaggtggaatcagaaagattaccaatagacgaatcgctgagagaattcttatgagtgtgaagaaaggacaaagggaaatggcatcatctgattctaattttgttagtggatatcttttggcaagggacatgaagcttaggtctgatacacgaaatggaaataaggaattaattgtatcctcacaacagagttctccaagcacaagaagttccaaaaagaagagtacacctcaaattgggaacagctcagcttttgctgaggctcataatgattcaacagaggaagcaaataaccgtcattcagcaacagatggttacgatagttcaaggaaagaagaattcgtcaatgagaatttatgcaagcaggaggtgtacttgagatcatggaaggcaattgagcagggacttcttgtgaaaggattagagatttttggaaggaacagttgtttaattgctcggaaccttcttggtggaatgaagacgtgcaaagatgtttttcaatatatgaattatattgaaaacaacagtgcctctggagctcttagtggtgttgattctcttgttaaaggatatattaagggtactgagttgcgcacaagatcaagatattttagaaggcgaggtaaagtccgtcgtttgaagtacacctggaaatctgcaggttacaatttcaaaaggattaccgaaaggaaggatcagccttgtcgacaatataatccttgtggttgtcaatctacatgcggaaagcagtgtccatgtctttcaaatgggacatgttgtgagaaatactgtgggtgtccaaaaatttgcaagaatcgttttcgaggatgtcactgtgcaaagagccagtgtcgcagccgccaatgtccatgttttgcagctgacagggaatgcgatccggatgtttgcagaaactgttgggttgggtgtggtgatggtacattgggagttccaaaccagagaggagataattatgaatgccggaacatgaaactgcttcttaaacaacaacaaagggtcttacttggaagatcagatgtctctggctggggagcattcctcaagaatagtgttagcaaacatgaataccttggtgagtacactggggaactaatctcacacaaagaagcagataagcgtggaaagatatatgatcgtgagaactcatcgttccttttcaacctgaacaatgagtatgttcttgacgcatacagaatgggtgacaagctgaaatttgccaaccatgcccctgacccgaattgctatgccaaggttatcatggtaactggtgatcatagagtgggcatattcgccaaagaaagaatcctcgctggtgaagagttattctacgattaccgctatgagcctgacagagctcctgcttgggcccgtaagcctgaggcgtcgggagcaaaggatgatgggcaaccgttcaatgggcgtgcaaagaagctcgcccaaaacaaccgaggctgaatctgatttgattctttcattgttaggacaaatttggcagccattcaactaatacaaggaacctgtcattcataggccccaatttatttgaactcgtcattgtaactcgtatgtgcttgaattctccatggcatctggtcctgccatccgtagagttaggtcccgtttgttttgtttgttttgaggaactaaaaattaatccctctattttagtcacattgagtctctagattgtcaaacggcgggactaaaacaaagactaaactatttgtctctagttcctcaagccatgacttaaagggaataaatcacataaattttatttttatccttcctttatttcagttacactaatgatgtaataattgtatgaggtattttggtcctcttagagcatctccaagtgactcttcattttttgctctcta

SEQ ID NO: 61357 - DNA, 3259 bp, Zea Mays
cctcgggcggccgtcgcagatggctagcacgggtgagcacttgcgtagcatagaggatagtgaactagcaaggaaatggttagaacgcatgaggagctccgggcatggcgtcgaccacatcgtcattggacaagcataccaaacacgtcagcgtcggacaccgccacatgaactcgtccttctaaaacaggtcaccagtaattcggctgtgcgagctggagaagaaaatgctgcctccctctatgttttatctgttattgactcgttaaaaaagaggattaccgcagatcgtttgacttacattaagaataggataggggagaacaagactaatatcagcagctatacacagaggacttacaatttatcaaaaaataggcaaattagtacatcaaagggtactgattcagcatcaaatttgctcacaaaaaggcaagatgatgcgctatgcaccctgcatagtcttgatattattccggttgacaaagatggtggaaccaaaggatgacagaagaccaatctgtacttggtcgacggaggatttactatgataccagttgtggtgaagctctaatttgcagtgatagtgaagatgaagccattgaagatgaggaggaaaaaaaggaatttaaacattctgaagatcacattattcggatgacagttcaagaatgtggcatgtctgatgctgtactgcaaacgctagctcgacacatggagcgggctgctgatgacataaaggccaggtatgaaattctgcatggtgagaaaactaaggattcttgcaagaaagggactgagcataatgtcaaagtggaagatttgtactgtgacaaagatttggatgcagcattggattcttttgacaatctcttctgtcgacgatgtctagtacgcttgactgtaactttcagatattcttttctaggacctgtgtgctgatggacatttctgctcattggtgatgctgataggtgtttgattgcaagctacatgggtgttctcaagatttagtatttcctacagaaaaacaaccagcttggagtggcgttgatgacagtgtaccctgtggtattcattgccataaactggcatctgaaccagatgctgctgctggtgctgatcacatgctttttgatgttgaggagccaactcactcatcagacaatgtgatgaaccagccaggttcaaataggaaaaagaacggctccagtggaaggaagactaaatctcaacaaagtgaaagctcttcaactgcaagagttatctcagaaagcagtgattcggaagtacatccaataagcaataaatctccacaacactcccctagtccctcaaaagttaaaattgggccgaaaggtggaatcagaaagattaccaatagacgaatcgctgagagaattcttatgagtgtgaagaaaggacaaagggaaatggcatcatctgattctaattttgttagtggatatcttttggcaagggacatgaagcttaggtctgatacacgaaatggaaataaggaattaattgtatcctcacaacagagttctccaagcacaagaagttccaaaaagaagagtacacctcaaattgggaacagctcagcttttgctgaggctcataatgattcaacagaggaagcaaataaccgtcattcagcaacagatggttacgatagttcaaggaaagaagaattcgtcaatgagaatttatgcaagcaggaggtgtacttgagatcatggaaggcaattgagcagggacttcttgtgaaaggattagagatttttggaaggaacagttgtttaattgctcggaaccttcttggtggaatgaagacgtgcaaagatgtttttcaatatatgaattatattgaaaacaacagtgcctctggagctcttagtggtgttgattctcttgttaaaggatatattaagggtactgagttgcgcacaagatcaagatattttagaaggcgaggtaaagtccgtcgtttgaagtacacctggaaatctgcaggttacaatttcaaaaggattaccgaaaggaaggatcagccttgtcgacaatataatccttgtggttgtcaatctacatgcggaaagcagtgtccatgtctttcaaatgggacatgttgtgagaaatactgtgggtgtccaaaaatttgcaagaatcgttttcgaggatgtcactgtgcaaagagccagtgtcgcagccgccaatgtccatgttttgcagctgacagggaatgcgatccggatgtttgcagaaactgttgggttgggtgtggtgatggtacattgggagttccaaaccagagaggagataattatgaatgccggaacatgaaactgcttcttaaacaacaacaaagggtcttacttggaagatcagatgtctctggctggggagcattcctcaagaatagtgttagcaaacatgaataccttggtgagtacactggggaactaatctcacacaaagaagcagataagcgtggaaagatatatgatcgtgagaactcatcgttccttttcaacctgaacaatgagtatgttcttgacgcatacagaatgggtgacaagctgaaatttgccaaccatgcccctgacccgaattgctatgccaaggttatcatggtaactggtgatcatagagtgggcatattcgccaaagaaagaatcctcgctggtgaagagttattctacgattaccgctatgagcctgacagagctcctgcttgggcccgtaagcctgaggcgtcgggagcaaaggatgatgggcaaccgttcaatgggcgtgcaaagaagctcgcccaaaacaaccgaggctgaatctgatttgattctttcattgttaggacaaatttggcagccattcaactaatacaaggaacctgtcattcataggccccaatttatttgaactcgtcattgtaactcgtatgtgcttgaattctccatggcatctggtcctgccatccgtagagttaggtcccgtttgttttgtttgttttgaggaactaaaaattaatccctctattttagtcacattgagtctctagattgtcaaacggcgggactaaaacaaagactaaactatttgtctctagttcctcaagccatgacttaaagggaataaatcacataaattttatttttatccttcctttatttcagttacactaatgatgtaataattgtatgaggtattttggtcctcttagagcatctccaagtgactcttcattttttgctctcta

SEQ ID NO: 61358 - DNA, 3946 bp, Zea Mays
gtcgggtgtgcgtgctgtgaccagcagaccggctgacgccaggtgaaggcccactggcccagcagcaaaaaacagttcacagcagcactcgtcggtgtagctgcacttgaggaacctcctgcaaccacagcactgctctttgtgggaacttgacgactgctcctgctcggcctcgaagcaccttggtcagacatcagactctgcaatttacaaattagagctgctcaagtcaagctgtgcaagggccaagggacatgctcacggctcacctcacctacaaggataggaacctcgtacgtggtgggagcaggctgcgccgctggccgctgcagtcggactccggtggtcctggggagtgccggagtggggagtgccggtcctagatagtggagacttggactcctggcttggcctcggacgctcggtggctcctagggatgcgtcctcctccggtggtcctggggatccggcaggagcaggatgcggcggccctggggatgcgtcctccggtggtggtgacggcggagggggtggccggggtggggcgggcagcggcgggcggatctatcgtggccgcggccgcctggagccctggacgcctggtgcagtggtgctagcctgctaatctgctatggcggccggttggggacttggggttgagggatttgggtttttctcagggcccactggaatacaaactggatgcgcacgggacttgggcgggtggccggctgcaactctgcgcttcgggcgtagctccgggttccgggtgacccgcgggcgaaaatcaaaacccgcacccgcacccgtaatgcttcgggtcgggtttgggtctaacccgtgggtggatttttacacccgaacccgaacctgacgggtgcaaaacccgacggggcccgaacccgcgggtgaaattgccatccctacctcgtgggcgctgcttggcttgctactggtctgcgtgtatctcttctctttccctctttctcttgcgcctatgagcggtgggggtatataaatagttgggattaggcgaacggccaggtggggattaggcgtgggggcgtgactgggtgggtgggatggcgattagggcgtgtgcgtggcgggatttttcgcgggcgcgagtcggtgcgcacggctgtgggctgcctggtgtgtggcgacagggacggccggcgcttgcgcgctgtgagtgtgtgacggtgactatgagcttatcgccagggagtttttagcagagtaaactagtcgctcgttaggttttggtgtgacaggtgcggtcattagtgcgctcgatataattgatggtcggtgcgcactgggaacgccgtgatgcaacatggaatcttgatatggcacgctcagttctgtctgaacgccgcaaaagctacgaggggtggacatgtacaggtacagcgacaaacgatggcaacgcaagtaggcgtcgatgccagctttacgttacgtgcacggtgcaccgcatctggctggccccgccgcggcggcggcggcggtaacgagtgctgtgcttggctaatcaagagagccgtcgcagttacgcaacgggatcatgtaaccccggggtggccagccgatgcgaccgtccaccacgcaagagacgcgaccgagccgagaggcgtgcgctgccgacgggggccgagcagctagctactagccagcacctcgcccgtgtcagctgcggcgcgacacgcgaccgtctacgaacgcgagagccgtgtgcgacgccggacggtggccgaacagcccaccctcgccaatgtcagcagcgccgcgtgtcgcgctgcaaggagggcagcgaacggacggacgggcaccgggatgggccggccgcgagccgagacggtgcgcggcgaccgacgaggacgggacagctagcacacgccgacatgcgtgggagagcggcggccacgtggcgacgcggacagactccccctccccccggctagatacgggaagcgagcgctgcgagcctatgacctcgagcggagtgggagaaagagaagccgtgccggacgggcggggcgtcccgtgtgtccgtgtcgcgtagcgcggggcccgccaccacagcccgacaaggcgggagcgaccgcgacgccgttgttatccgctttggttcggttcggtcctccggggtgtgccgatgccgataccccgatgccgcccgcactcccgcgcacgcggggccctgctgccgtgcggtgccggcccttgcatttcttttcctgcctctcgttcgtcaacgacgccacgcggggtagggcggctgacggtttggggttgtctggttccgtatccttgagcggctggagttggccggtggtcggccgggtcaccgactcgccgctcccttggtgagtttgtcccgtcacgctggggccactgaaggcgatccgctgcttcgcccgtagtactagtggatttcgcgacgcagcttccagacagttccttcactgagacaggtggttcgatggcagcgtcggtagctggatacggaaccacgttcgcgaatcgcggctgtcgtcctgtactagcaggtggttttcacgtggcgctcatgttttcgcacggtccagggtgtctggcaggtgggacagccggacaggtttaccgtacagagtgaagcagaagatatacgccaacggaagcaggacataaaaggatactgttattagggataacgtttctcatttttttcatatactggatgatttgttgattggttggctacgctcatagccgtggcgttccgctgaccatatttggcgtgtgttttgatagttgcatagcatctctatcgtctgctcccacgcatagagcgttggtgtttttttatgggtagcttgcatgtgtggaaacgtaactttctcttgtttccagcggcccagactggcacgatagtggcgcgagacgcccctacaaccaatcatgcgtatagatgttctgccaacagcgaaaaagaaaaaaatatggaaagaatctcgaacatacaccatccagggaagagctagagattttttttttgttattaatgggttcaggaatatacgtataactataaatcataataatacctcatatagatattatatagattaaagggtgaaaacataccagctgaataggatccttaaaccatatgtttgtattatgtttaaaaaacactttgatgctttgcaatgtatatgtagtttcctcattcctgatataattaaacaaaaaaattatgttaatttcacaagttttgaacatttgatcatgcacaattaattgaagtactataaatactcacatgttaaagctccccacttcgaaatttcatcttcttaaatcgtatgtttggttactcgtaccgtctcgtcttggaccaccgcatgcgttgactcttgactctatctaagctcctgtttggttgcctgcacaagggagacgcaggctgcatgagcggatgcaaaacaagttatttagctatttggttgcatccacatgtacgtagaaaattgccgtatcggattagccaaggccacccgagcctgcgcgtccagatacaggcatccaatcaggcgaaaaagatcaatcacctcatcattaccaatggttgaaaacatatctacatagcatattaggcaatcactcgagaactgatcacccatattatttgttaactttttctttacaacattcatagctaaaaacatcttttccattgacgttatggcaaccggcaatattagtactagttttaaaagttgatagaccaatggaaaagtaatatgctttatttgtttgcaccattaatttagctagatcgcacatgattttatgaaatcagaagcagcctagatgctactggcattagtcggcagcagcaaggaagagaataagcgacgaccaaccggaaccaagaagctgaattgacaaaaac

SEQ ID NO: 61359 - DNA, 2779 bp, Zea Mays
gaaaaatcccaccgcccagcctctgtcttccacctccgtccatcgtccctctccttgagcctcttccccagccgcgccctactcggttccccctgcgtcgcgcgcctggcttgctccctgctaggcgttctcctcccctgcttctatagcggctgagctccctctgcttgcgcgtcccttgctcctcccagccggccgagctcctgcttcccctccgtggagcaccccctgctcctgctccccgagctcgcccctgcgctcggattttctccctcggccatggtagccgcgcgccattcctgctcgcccttcgctcggccgcctctccttggtctcccatggcgccctggctgcgacctcgccttggttatcacatcttctcgtgttgttgtgcgtttgttgatgttttagtcatcgcatagctcgctgatggccgggcatttcaccttcgattagctcaccatgacgccgacgtctagccctgactccagtctcctcgccacgaaagcacaaccgctactcagtgtgttgatgtcatatgcgtggcaccgtcgtgggttgtcgtcgttcgtcgtcgcgtcatgtgtgcaacaacgtcgctgattcctccatggtgcttgtcgatgaacttcgcttcataggttccccgccttcggttcggctcacgtatgcacaccgaacgcattcaccgcttgaccctgtgtcgctgtgtcgctagagctcgtgacctcgccgtcgtcggagtcctcactggattcgtgtcctcgtaagagctcgcgctaacctgctcgaccacacctcaccagctcgctgcagactcgatctcgtcgtcattccgtgcgtcatcaagaaaacccaagagtcgggtgaagacgaagctagcagcgtgatgttcaccaagtactcgacgcaagggctgaaccagaatccttgccgtattcgcagatagcttgtcagatttagtatggtacgataattaatcacgtgacgcggagaaccaaagccaagtcgaccctaagatgacgtaacgggtggactactccgcaagaggatgttaatggacaaacctgaagatagataaattgaacaagtatcggaacaaaagctgatcgccaagtggtcgtcacctaacaaacactaacctagtgttcttccaggcaagccccagtgcatttgccacctccttgctgttttaaaatctttatcaccttgtttgatgcattaggtgataggagttgtgtgctaaacaattgatgtatttccttccttggaaaattgattacccttccttgatacccttttatgaaaaggatttttatgatgcttagccttgctctagaaaataaaatgttttgttttaaaaacaaaaggtgatacttcacagtggatgggaatgttttcaaaaataaaacttgatgggggatccatcagggccatgatgggttcaacatctgaaaggatgtacctctgctaggtaccaaactttgggtttaaataataaagttgagacggggcggttgacttgcacgagaagggagtctcggtgtagtgtctccgtctgagtcgattaaggaccgtgtcgatgtgggactgctgactgaggaccctttaattggtcacatgcctcgtcatgggcaagctttgcctcaggcagactaataccagaaaggccaacatgcaatgggagtggagagatggcgtgagtagcgtgtaccctccgtggcaagaggctggacggtggtgtatctgtgctctcggttggtgtgaacccagtctggtcttaagaaacccggtggagagttgacatatgcaagggttaagtgctacatatgtcgtgtgattggagatcctcagctgagtattaatcgattcggatcgtcgttacttctcagatatgaagacttggtcactgacttacacgtagcaatccagtgaactgaaggggtgataaaagacggctagtataggccaagtgtttgaactaggatagaaagaactatagatgcaggtaactttacttaacttgacaagtaaaaaatggattttaaggatccactcatagtaagcttttctgcaaacagagtctttgaatattgataagcctaaccttgattcccaacaagctagcatatccttgagagtcttttctttagtcgggtaagtcttgctgagtaattgcgtactcagggttttattccctgttgtttttcaggttataattttgtactgctattgatggtgttaagtgcatgtgggctcggccttcttataagtctaagtaactcttctatacttcttattgaggatggtcccttaagctagcatatattttaaagcttacaaaatgttttgcaatatttcaaagtgaaattcttttgtaactactctgatttcttttgtaacttgtatactccttgtaataagattccgctgcaagatgttggtgtgtgatttgtgttacttaatctcgcggtcctatttgtaagtggtttatccgaggtccttggggcactcgaacagatcctgttaagttatctagtgcacatgcatagctgtctgaggtctttgagacaagggcaggtgcatgtgggcccaataacttgggaggttctgccacacccttgctaatattttgatcagagggtgattatgaagacattgcagatgatgtcgacgagtactaagtctaacgatgcgccagtcaccttcttgtggaagagtgtccctgtttaattctgtcgtactttaataatgatacttgttaaagatattatgattt

SEQ ID NO: 61360 - DNA, 3822 bp, Zea Mays
atcatgtcccattattgttgtcgatcctaattattgaccctttgattatcgctaaaaatcgtgatccaaaatatctgcaattctttcttaaaggaagaagaaattaaaaaagaggaaaatctccacgtcgccctccagatttttttccggccgcctggccttatcctgccgcccctctgcctgatttttctctacagccgcctcccctgaccttttatctacgcgcgctgcttcttcttatcccctgcgccactcaagctcgtggaaaaatcccaccgcccagcctctgtcttccacctccgtccatcgtccctctccttgagcctcttccccagccgcgccctactcggttccccctgcgtcgcgcgcctggcttgctccctgctaggcgttctcctcccctgcttctatagcggctgagctccctctgcttgcgcgtcccttgctcctcccagccggccgagctcctgcttcccctccgtggagcaccccctgctcctgctccccgagctcgcccctgcgctcggattttctccctcggccatggtagccgcgcgccattcctgctcgcccttcgctcggccgcctctccttggtctcccatggcgccctggctgcgacctcgccttggttatcacatcttctcgtgttgttgtgcgtttgttgatgttttagtcatcgcatagctcgctgatggccgggcatttcaccttcgattagctcaccatgacgccgacgtctagccctgactccagtctcctcgccacgaaagcacaaccgctactcagtgtgttgatgtcatatgcgtggcaccgtcgtgggttgtcgtcgttcgtcgtcgcgtcatgtgtgcaacaacgtcgctgattcctccatggtgcttgtcgatgaacttcgcttcataggttccccgccttcggttcggctcacgtatgcacaccgaacgcattcaccgcttgaccctgtgtcgctgtgtcgctagagctcgtgacctcgccgtcgtcggagtcctcactggattcgtgtcctcgtaagagctcgcgctaacctgctcgaccacacctcaccagctcgctgcagactcgatctcgtcgtcattccgtgcgtcatcaagaaaacccaagagtcgggtgaagacgaagctagcagcgtgatgttcaccaagtactcgacgcaagggctgaaccagaatccttgccgtattcgcagatagcttgtcagatttagtatggtaagccgattcatatttctgttagcttaattattggtttgatgaatagattgtgtacataagcatgaagtggttgtgtcacgcgaaactcaattttaaaatgattattgtgtgaggagtggttaagtgaataataagtctagtgtctcgctcatatagctgataaatacggtcgtggttatattaaatggttgttaaaatgtatcataggtagtatgtggtgatgctcataaatgtagagttgacacatcgtctttgtatgatgaagcataggtttggggtgttaattatgttgaagatattgatagacatatatgccatattttggctagttcataacatgtaaaataggtttgggattttaatcagccagccaatagtttctacttgaatagtagtggtgaagtagtgatttgctttaatagtgtcgtattatgttgttaatcggctaggtttcatagatgaatgttgatcacttaagtcgacatttagggataaatgtgggtcgtagctcaaaattatttagaaacgagtagcgtcggtaagcctatttcaatcgaaatctgagaagccatgtactaaaatggtataaatatgttagactgttaaggttatgtttttgtggggacctctgctctgatgaagatccatgatggttgcctatgaaatgtcatgatgccttactattaaatgtttaattctttattgtgtaaaatcataatattatcttgtgacattcgtcttattatgcattcatgtgcataatgcatttcatttaggtacgataattaatcacgtgacgcggagaaccaaagccaagtcgaccctaagatgacgtaacgggtggactactccgcaagaggatgttaatggacaaacctgaagatagataaattgaacaagtatcggaacaaaagctgatcgccaagtggtcgtcacctaacaaacactaacctagtgttcttccaggcaagccccagtgcatttgccacctccttgctgttttaaaatctttatcaccttgtttgatgcattaggtgataggagttgtgtgctaaacaattgatgtatttccttccttggaaaattgattacccttccttgatacccttttatgaaaaggatttttatgatgcttagccttgctctagaaaataaaatgttttgttttaaaaacaaaaggtgatacttcacagtggatgggaatgttttcaaaaataaaacttgatgggggatccatcagggccatgatgggttcaacatctgaaaggatgtacctctgctaggtaccaaactttgggtttaaataataaagttgagacggggcggttgacttgcacgagaagggagtctcggtgtagtgtctccgtctgagtcgattaaggaccgtgtcgatgtgggactgctgactgaggaccctttaattggtcacatgcctcgtcatgggcaagctttgcctcaggcagactaataccagaaaggccaacatgcaatgggagtggagagatggcgtgagtagcgtgtaccctccgtggcaagaggctggacggtggtgtatctgtgctctcggttggtgtgaacccagtctggtcttaagaaacccggtggagagttgacatatgcaagggttaagtgctacatatgtcgtgtgattggagatcctcagctgagtattaatcgattcggatcgtcgttacttctcagatatgaagacttggtcactgacttacacgtagcaatccagtgaactgaaggggtgataaaagacggctagtataggccaagtgtttgaactaggatagaaagaactatagatgcaggtaactttacttaacttgacaagtaaaaaatggattttaaggatccactcatagtaagcttttctgcaaacagagtctttgaatattgataagcctaaccttgattcccaacaagctagcatatccttgagagtcttttctttagtcgggtaagtcttgctgagtaattgcgtactcagggttttattccctgttgtttttcaggttataattttgtactgctattgatggtgttaagtgcatgtgggctcggccttcttataagtctaagtaactcttctatacttcttattgaggatggtcccttaagctagcatatattttaaagcttacaaaatgttttgcaatatttcaaagtgaaattcttttgtaactactctgatttcttttgtaacttgtatactccttgtaataagattccgctgcaagatgttggtgtgtgatttgtgttacttaatctcgcggtcctatttgtaagtggtttatccgaggtccttggggcactcgaacagatcctgttaagttatctagtgcacatgcatagctgtctgaggtctttgagacaagggcaggtgcatgtgggcccaataacttgggaggttctgccacacccttgctaatattttgatcagagggtgattatgaagacattgcagatgatgtcgacgagtactaagtctaacgatgcgccagtcaccttcttgtggaagagtgtccctgtttaattctgtcgtactttaataatgatacttgttaaagatattatgattt

SEQ ID NO: 61361 - DNA, 2186 bp, Zea Mays
cacttgtcatgatgtgtgatgattggaatcgatctagcatataatttgcactctgctttcggtaactggtttcctggatcaaagccactacttcagcaggcaatgaacaagatcatgaagtcaaatcctgccctgtatgtcctgagggagagaataaggaagggtctgcagttgtactcttctgaacccacagaaccgtacctgtcttcacaaaactatggagagatattcagcaatcaaatcatatggtttgtggatgatacaaatgtgtatcgagtcactattcacaaaacatttgagggtaacttgaccaccaaaccaatcaatggtgctattttcattttcaatccaagaacgggtcaactttttcttaaggttatccacacaagtgtatgggcagggcaaaaacgtcttgggcagctggccaagtggaaaacagctgaggaggttgctgcattagttcgatctcttcctgtagaagagcagccaaagcaaattattgtgacaaggaagggcatgttagatcccttggaggtccatctacttgacttccctaacattgttatcaaaggcagcgagctgcagcttcctttccaggcttgcttgaagattgagaagtttggtgatctgatactgaaggcaactgaaccacaaatggttctttataatatatatgatgattggttgaaaagtatctcatcatacacagcattctctcgcattgtgcttatcctacgtgcacttcatgtgaataatgagaaggcaaagatgttgctcaaacctgacaaaacaattgttactgaaccacatcatatatggccaactctgaatgatgaacagtggttgaaggttgaatgtgcactaagggacctcattctttccgattatgcaaagaaaaacaatgttaatacttctgcactcacacaatctgaaatgcgagatatcatccttggtgctgaaattgctccaccatcacagcagaggcaacagattgctgaaattgagaaacagtcaagagagacgactcagttaactgctgtaaccacaaggacaacaaatgtgcatggagatgaactcattatcacaaccacaagtccatacgagcaacaagcattcgcatccaagactgattggcgtgtcagagccatctctgccacaaacttgtatcttcgtgtaaatcacatttatgtcaattctgatgatataaaggagactggctacacttacattatgccaaagaacatattgaagaaattcatatgcatagcagatctgcggacacaaattgctggatttttgtatgggctgagtccacaggacaatcctcaagtcaaagagattaggtgtatagccatgcctccacagcatggaacacaccagatggtgactcttccagcaaatcttcctgagcacgagttccttaatgatctagaacccttgggatggatgcatacacagccaaatgaagctccacagctatcgccacaggacctgacatcacatgccaagattctggagaacaacaaacaatgggatggtgagaagtgcatcattctgacatgcagcttcaccccaggatcttgctcgttgactgcatacaagctgacaccaagcggttacgagtggggacgcagcaacaaggacaacggaagcaatccacatggataccttccaactcactacgagaaggtccagatgcttctgagcgaccgcttccttggattctacatggttccggataacgctccttggaacttcaacttcatgggagtgaagcacgacccacagatgaagtacaacatgaagctgggcatgccccgggacttctatcacgaggaccacaggccaacacacttcctcgagttcagcaacatcgaggagggtgaggccgctgaaggcgatagggaggacacattcacgtaggcgcctgttagaaactgctctgttttaacggcagtgtgtgtagctgtaacctgacttgacgggtgtcatctgttcgcctgttgcttaagcctgtattatactacctctttgttgtaagaagccctggtgagggattaaaattgtacaagtgcgcgccatggtaacagtaaaggttttgcttcctcccaagcttccaccttcaatccttccaggcttcataaatttaaattaaaaaaggtcttttaatagattcctttctttat

SEQ ID NO: 61362 - DNA, 2241 bp, Zea Mays
ggaacgtattgtcacctcacaggaagaaaaacagcaagcagccttggatttttatgataacctgctaggtgtgatgattggaatcgatctagcatataatttgcactctgctttcggtaactggtttcctggatcaaagccactacttcagcaggcaatgaacaagatcatgaagtcaaatcctgccctgtatgtcctgagggagagaataaggaagggtctgcagttgtactcttctgaacccacagaaccgtacctgtcttcacaaaactatggagagatattcagcaatcaaatcatatggtttgtggatgatacaaatgtgtatcgagtcactattcacaaaacatttgagggtaacttgaccaccaaaccaatcaatggtgctattttcattttcaatccaagaacgggtcaactttttcttaaggttatccacacaagtgtatgggcagggcaaaaacgtcttgggcagctggccaagtggaaaacagctgaggaggttgctgcattagttcgatctcttcctgtagaagagcagccaaagcaaattattgtgacaaggaagggcatgttagatcccttggaggtccatctacttgacttccctaacattgttatcaaaggcagcgagctgcagcttcctttccaggcttgcttgaagattgagaagtttggtgatctgatactgaaggcaactgaaccacaaatggttctttataatatatatgatgattggttgaaaagtatctcatcatacacagcattctctcgcattgtgcttatcctacgtgcacttcatgtgaataatgagaaggcaaagatgttgctcaaacctgacaaaacaattgttactgaaccacatcatatatggccaactctgaatgatgaacagtggttgaaggttgaatgtgcactaagggacctcattctttccgattatgcaaagaaaaacaatgttaatacttctgcactcacacaatctgaaatgcgagatatcatccttggtgctgaaattgctccaccatcacagcagaggcaacagattgctgaaattgagaaacagtcaagagagacgactcagttaactgctgtaaccacaaggacaacaaatgtgcatggagatgaactcattatcacaaccacaagtccatacgagcaacaagcattcgcatccaagactgattggcgtgtcagagccatctctgccacaaacttgtatcttcgtgtaaatcacatttatgtcaattctgatgatataaaggagactggctacacttacattatgccaaagaacatattgaagaaattcatatgcatagcagatctgcggacacaaattgctggatttttgtatgggctgagtccacaggacaatcctcaagtcaaagagattaggtgtatagccatgcctccacagcatggaacacaccagatggtgactcttccagcaaatcttcctgagcacgagttccttaatgatctagaacccttgggatggatgcatacacagccaaatgaagctccacagctatcgccacaggacctgacatcacatgccaagattctggagaacaacaaacaatgggatggtgagaagtgcatcattctgacatgcagcttcaccccaggatcttgctcgttgactgcatacaagctgacaccaagcggttacgagtggggacgcagcaacaaggacaacggaagcaatccacatggataccttccaactcactacgagaaggtccagatgcttctgagcgaccgcttccttggattctacatggttccggataacgctccttggaacttcaacttcatgggagtgaagcacgacccacagatgaagtacaacatgaagctgggcatgccccgggacttctatcacgaggaccacaggccaacacacttcctcgagttcagcaacatcgaggagggtgaggccgctgaaggcgatagggaggacacattcacgtaggcgcctgttagaaactgctctgttttaacggcagtgtgtgtagctgtaacctgacttgacgggtgtcatctgttcgcctgttgcttaagcctgtattatactacctctttgttgtaagaagccctggtgagggattaaaattgtacaagtgcgcgccatggtaacagtaaaggttttgcttcctcccaagcttccaccttcaatccttccaggcttcataaatttaaattaaaaaaggtcttttaatagattcctttctttat

SEQ ID NO: 61363 - DNA, 4190 bp, Zea Mays
atgtggaacggcgtgccgcctccgcctccgcctccgttgcagatggcggcggcccctcctccccctggcacgacggtgcccggggcaggccagcccccgcccccgcccccgccgcctgccggggcgtcgcagggcggcaagccgctgacaccgatggagctggaggcgcagctggtggagaaggcccgcaaatggcaccagctcaactccaagcgctacggcgacaaacgcaagttcgggttcgtcgaggcacagaaggaggacatgccccctgagcacgtccgcaaaatcaccagagaccatggagacatgacttccaagaagtacagacatgataagcgtgtttatcttggagcactcaaatttgtgccccacgctgtgtacaaactgctggagaacatgccgatgccttgggagcaggttcgccatgtgaaaatcttgtatcatatcactggggctatcacttttgtaaatgaaatcccatgggttgttgaacccatatacctcgcacagtggggtacaatgtggattatgatgcgacgagagaagagggataggcgtcattttaaacgaatgcggtttcctccatttgatgatgaggaacccccactggactatgctgataatttgttggatgttgaaccacttgaagctatacagttggagttggatgaggaggaagatgcagctgtctatgaatggttctatgatcacaaacctctgatgaagacgaagctcataaatggccctagttacaggaaatggcatctatctcttcccataatggcaacactatatcgccttgctggccagctgttgtcagatctgatcgataggaattatttctacctatttgatatggagtctttctttactgccaaggcccttaatatgtgcattccagggggtccgaagtttgagccattataccgtgatatggagaagggtgatgaggactggaatgagttcaatgatataaataagctcatcatacgtcagccacttcgaactgagtacaggattgctttccctcacctgtacaacaacaggccaaggaaagtgaaacttggtatatatcatacccccatgataatgtatatcaagactgaagatccagacctgccagcgttctactatgatcctctgataaaccctatcacttcaaccaacaaggttgatcgtagggagaggaaagcagctgaagaggaagatgatgaagatttttgtctcccagaagatgtagagcctctcttgaaacagactgaactctacactgatacaacagctgctggtatatcgttactttttgctccaaagccttttaacatgagatctggtcggacacgtcgtgcagaggatattcctcttgtatctgagtggtacaaggaacattgccctccagcttatcctgtgaaagttcgggtgagctatcagaagctattgaagtgttatgtgctcaatgagctacatcataggcctcccaaggctcagaaaaagaagcatctgttccgttcactccaagcaactaagtttttccaaactactgagcttgactgggcagaagcaggcttgcaagtttgcaagcaggggtacaacatgttaaacttgttgattcacaggaagaatcttaattatctccatttagattacaatttcaatttgaagcctgtgaagactcttacaacaaaggaaaggaagaaatctcgttttggaaatgcatttcatctgtgtcgtgagattttacgacttacgaagttggttgttgatgctaacatccagttccgtctgggaaatgtggatgccttccagttggctgatggtctgcaatatatattttctcatgttggacagttaactggtatgtataggtacaagtaccgattgatgaggcagattaggatgtgcaaagatctgaagcacttgatatattaccgtttcaacactggtcctgttggcaaaggacctggttgtgggttttgggctccaatgtggagagtgtggctctttttccttcgaggtgtgatgattggaatcgatctagcatataatttgcactctgctttcggtaactggtttcctggatcaaagccactacttcagcaggcaatgaacaagatcatgaagtcaaatcctgccctgtatgtcctgagggagagaataaggaagggtctgcagttgtactcttctgaacccacagaaccgtacctgtcttcacaaaactatggagagatattcagcaatcaaatcatatggtttgtggatgatacaaatgtgtatcgagtcactattcacaaaacatttgagggtaacttgaccaccaaaccaatcaatggtgctattttcattttcaatccaagaacgggtcaactttttcttaaggttatccacacaagtgtatgggcagggcaaaaacgtcttgggcagctggccaagtggaaaacagctgaggaggttgctgcattagttcgatctcttcctgtagaagagcagccaaagcaaattattgtgacaaggaagggcatgttagatcccttggaggtccatctacttgacttccctaacattgttatcaaaggcagcgagctgcagcttcctttccaggcttgcttgaagattgagaagtttggtgatctgatactgaaggcaactgaaccacaaatggttctttataatatatatgatgattggttgaaaagtatctcatcatacacagcattctctcgcattgtgcttatcctacgtgcacttcatgtgaataatgagaaggcaaagatgttgctcaaacctgacaaaacaattgttactgaaccacatcatatatggccaactctgaatgatgaacagtggttgaaggttgaatgtgcactaagggacctcattctttccgattatgcaaagaaaaacaatgttaatacttctgcactcacacaatctgaaatgcgagatatcatccttggtgctgaaattgctccaccatcacagcagaggcaacagattgctgaaattgagaaacagtcaagagagacgactcagttaactgctgtaaccacaaggacaacaaatgtgcatggagatgaactcattatcacaaccacaagtccatacgagcaacaagcattcgcatccaagactgattggcgtgtcagagccatctctgccacaaacttgtatcttcgtgtaaatcacatttatgtcaattctgatgatataaaggagactggctacacttacattatgccaaagaacatattgaagaaattcatatgcatagcagatctgcggacacaaattgctggatttttgtatgggctgagtccacaggacaatcctcaagtcaaagagattaggtgtatagccatgcctccacagcatggaacacaccagatggtgactcttccagcaaatcttcctgagcacgagttccttaatgatctagaacccttgggatggatgcatacacagccaaatgaagctccacagctatcgccacaggacctgacatcacatgccaagattctggagaacaacaaacaatgggatggtgagaagtgcatcattctgacatgcagcttcaccccaggatcttgctcgttgactgcatacaagctgacaccaagcggttacgagtggggacgcagcaacaaggacaacggaagcaatccacatggataccttccaactcactacgagaaggtccagatgcttctgagcgaccgcttccttggattctacatggttccggataacgctccttggaacttcaacttcatgggagtgaagcacgacccacagatgaagtacaacatgaagctgggcatgccccgggacttctatcacgaggaccacaggccaacacacttcctcgagttcagcaacatcgaggagggtgaggccgctgaaggcgatagggaggacacattcacgtaggcgcctgttagaaactgctctgttttaacggcagtgtgtgtagctgtaacctgacttgacgggtgtcatctgttcgcctgttgcttaagcctgtattatactacctctttgttgtaagaagccctggtgagggattaaaattgtacaagtgcgcgccatggtaacagtaaaggttttgcttcctcccaagcttccaccttcaatccttccaggcttcataaatttaaattaaaaaaggtcttttaatagattcctttctttat

SEQ ID NO: 61364 - DNA, 4197 bp, Zea Mays
caacgttctattctgaattgagttaaaaaaaaaacgttctattctgaagagcggcttccattttgccaattttctcatctctcgaacacacaccacctggcttgacgacgcttaagccctagcggcaggtgccggaggccgctgcgccgcgcccgccccgtcgccgatgtggaacggcgtgccgcctccgcctccgcctccgttgcagatggcggcggcccctcctccccctggcacgacggtgcccggggcaggccagcccccgcccccgcccccgccgcctgccggggcgtcgcagggcggcaagccgctgacaccgatggagctggaggcgcagctggtggagaaggcccgcaaatggcaccagctcaactccaagcgctacggcgacaaacgcaagttcgggttcgtcgaggcacagaaggaggacatgccccctgagcacgtccgcaaaatcaccagagaccatggagacatgacttccaagaagtacagacatgataagcgtgtttatcttggagcactcaaatttgtgccccacgctgtgtacaaactgctggagaacatgccgatgccttgggagcaggttcgccatgtgaaaatcttgtatcatatcactggggctatcacttttgtaaatgaaatcccatgggttgttgaacccatatacctcgcacagtggggtacaatgtggattatgatgcgacgagagaagagggataggcgtcattttaaacgaatgcggtttcctccatttgatgatgaggaacccccactggactatgctgataatttgttggatgttgaaccacttgaagctatacagttggagttggatgaggaggaagatgcagctgtctatgaatggttctatgatcacaaacctctgatgaagacgaagctcataaatggccctagttacaggaaatggcatctatctcttcccataatggcaacactatatcgccttgctggccagctgttgtcagatctgatcgataggaattatttctacctatttgatatggagtctttctttactgccaaggcccttaatatgtgcattccagggggtccgaagtttgagccattataccgtgatatggagaagggtgatgaggactggaatgagttcaatgatataaataagctcatcatacgtcagccacttcgaactgagtacaggattgctttccctcacctgtacaacaacaggccaaggaaagtgaaacttggtatatatcatacccccatgataatgtatatcaagactgaagatccagacctgccagcgttctactatgatcctctgataaaccctatcacttcaaccaacaaggttgatcgtagggagaggaaagcagctgaagaggaagatgatgaagatttttgtctcccagaagatgtagagcctctcttgaaacagactgaactctacactgatacaacagctgctggtatatcgttactttttgctccaaagccttttaacatgagatctggtcggacacgtcgtgcagaggatattcctcttgtatctgagtggtacaaggaacattgccctccagcttatcctgtgaaagttcgggtgagctatcagaagctattgaagtgttatgtgctcaatgagctacatcataggcctcccaaggctcagaaaaagaagcatctgttccgttcactccaagcaactaagtttttccaaactactgagcttgactgggcagaagcaggcttgcaagtttgcaagcaggggtacaacatgttaaacttgttgattcacaggaagaatcttaattatctccatttagattacaatttcaatttgaagcctgtgaagactcttacaacaaaggaaaggaagaaatctcgttttggaaatgcatttcatctgtgtcgtgagattttacgacttacgaagttggttgttgatgctaacatccagttccgtctgggaaatgtggatgccttccagttggctgatggtctgcaatatatattttctcatgttggacagttaactggtgtgatgattggaatcgatctagcatataatttgcactctgctttcggtaactggtttcctggatcaaagccactacttcagcaggcaatgaacaagatcatgaagtcaaatcctgccctgtatgtcctgagggagagaataaggaagggtctgcagttgtactcttctgaacccacagaaccgtacctgtcttcacaaaactatggagagatattcagcaatcaaatcatatggtttgtggatgatacaaatgtgtatcgagtcactattcacaaaacatttgagggtaacttgaccaccaaaccaatcaatggtgctattttcattttcaatccaagaacgggtcaactttttcttaaggttatccacacaagtgtatgggcagggcaaaaacgtcttgggcagctggccaagtggaaaacagctgaggaggttgctgcattagttcgatctcttcctgtagaagagcagccaaagcaaattattgtgacaaggaagggcatgttagatcccttggaggtccatctacttgacttccctaacattgttatcaaaggcagcgagctgcagcttcctttccaggcttgcttgaagattgagaagtttggtgatctgatactgaaggcaactgaaccacaaatggttctttataatatatatgatgattggttgaaaagtatctcatcatacacagcattctctcgcattgtgcttatcctacgtgcacttcatgtgaataatgagaaggcaaagatgttgctcaaacctgacaaaacaattgttactgaaccacatcatatatggccaactctgaatgatgaacagtggttgaaggttgaatgtgcactaagggacctcattctttccgattatgcaaagaaaaacaatgttaatacttctgcactcacacaatctgaaatgcgagatatcatccttggtgctgaaattgctccaccatcacagcagaggcaacagattgctgaaattgagaaacagtcaagagagacgactcagttaactgctgtaaccacaaggacaacaaatgtgcatggagatgaactcattatcacaaccacaagtccatacgagcaacaagcattcgcatccaagactgattggcgtgtcagagccatctctgccacaaacttgtatcttcgtgtaaatcacatttatgtcaattctgatgatataaaggagactggctacacttacattatgccaaagaacatattgaagaaattcatatgcatagcagatctgcggacacaaattgctggatttttgtatgggctgagtccacaggacaatcctcaagtcaaagagattaggtgtatagccatgcctccacagcatggaacacaccagatggtgactcttccagcaaatcttcctgagcacgagttccttaatgatctagaacccttgggatggatgcatacacagccaaatgaagctccacagctatcgccacaggacctgacatcacatgccaagattctggagaacaacaaacaatgggatggtgagaagtgcatcattctgacatgcagcttcaccccaggatcttgctcgttgactgcatacaagctgacaccaagcggttacgagtggggacgcagcaacaaggacaacggaagcaatccacatggataccttccaactcactacgagaaggtccagatgcttctgagcgaccgcttccttggattctacatggttccggataacgctccttggaacttcaacttcatgggagtgaagcacgacccacagatgaagtacaacatgaagctgggcatgccccgggacttctatcacgaggaccacaggccaacacacttcctcgagttcagcaacatcgaggagggtgaggccgctgaaggcgatagggaggacacattcacgtaggcgcctgttagaaactgctctgttttaacggcagtgtgtgtagctgtaacctgacttgacgggtgtcatctgttcgcctgttgcttaagcctgtattatactacctctttgttgtaagaagccctggtgagggattaaaattgtacaagtgcgcgccatggtaacagtaaaggttttgcttcctcccaagcttccaccttcaatccttccaggcttcataaatttaaattaaaaaaggtcttttaatagattcctttctttat

SEQ ID NO: 61365 - DNA, 932 bp, Zea Mays
gttagactgccctcacgcgcgcgctccctacgtcactgacccgtgggaccttctcccatgcctcactgatgtgtgggacctctaggtcagggtcatcttccccattggcgcgtacacagcagatccgagcctcgtttgagctcagagtttgttaagatttcgctagatttatcaccgcaacaacccaagcatctctatttatatgcgtccacctaggattcctcgttttatctaaccctagccacaacaccgagagattcgaactgtagtggaggcgaagagagggaagccgtgaccaccatggtcgattcgtggacaagcctgcgtcggagcctcaattgattactagggaaacttccttggcgtatgcaaaagcggatagtgtaggttggcgggtgcaggtctgaccggatgtgggtgaattgatcgccggagatagggctctgccatggatccgccaagccgcgtgggcagccatcctcgcaagcttaatagacgttctcttgtgcaggagaacgaagtagacaactgctgctcctattttactacggagattcagacaggtgaagtataccagcagtgagaagtttttgaatatgtatctgatggccttctctcgatcaagtaagatgttttcagttttggggtcctccttgagattataagtggaaagaggagctcaggttttcagcacaatggagagttctacgaccttcttgaatatgtaagcaaccaaggactcgacaatctgtagaattggtaaaactgatatgttttcccttataacaagattgcattatactaacagatcacttagtattgacggtgtatctgtatggtgttctacattatttctttccatgaagtatagggtggtttcctgtacctccctgttttattgatattgtctagcatttgtagctacatctaac

SEQ ID NO: 61366 - DNA, 944 bp, Zea Mays
ggccaacaaggccgcaaaagggacgacgaagtcgtcactctgtggcgctttcgtctgaatctccatttcgctgctgcaactcgtgactctatgtaccacgtcgttgtctctttgagctcccgcctgtcggccacccctgctccacgcccgtatcttgcgctgcggccgcaccaccgcgcgtcatggcctatcttcttcgacgacacgacaacacgacctctccgccctgtcctctacgatggcggcccccttatctccagcgtccaggggcaagggtggaggacgcacaccaatgcaccgcccttccctttcctactcttctctctcctctaaagggaaggtccttgctcctgctcaccattggtccttgcatacttcatcccattcgatggtgcacatgtccttgctactgttcaccattggatatcagtgaggcgaatgggataaactatgcaaaaaagatattcagactactgcaaaattgaagggatagcttcgaagaaagctgcttatcctatgactttgaaaaagagctgctgaaaaaattagagtgatgacttcgtcgtcccttttgcggccttctctgccaagcggatcgcccaaacgcaacgacccttttccgacaacggggcacttctagagtcttcgacgaacgttttttttccacgcaccgacttgaacaacggcagcagagtcttcacaaaaggaggacatctcatgttctacgtcgttcaaattgaatctgacggtccatgttttcctaccgacggggataggctgaaaggtcacgttttggaccggctttgtaaaaatttcttttcttttataaaaaagggttgggttggaggacagctacttttcctactttgaaaaaaggaacaataaaaaattatcaggtgagcctttatatacttcagtgttgtacactttagcgtctatcaaag

SEQ ID NO: 61367 - DNA, 1645 bp, Zea Mays
ggccaacaaggccgcaaaagggacgacgaagtcgtcactctgtggcgctttcgtctgaatctccatttcgctgctgcaactcgtgactctatgtaccacgtcgttgtctctttgagctcccgcctgtcggccacccctgctccacgcccgtatcttgcgctgcggccgcaccaccgcgcgtcatggcctatcttcttcgacgacacgacaacacgacctctccgccctgtcctctacgatggcggcccccttatctccagcgtccaggggcaagggtggaggacgcacaccaatgcaccgcccttccctttcctactcttctctctcctctaaagggaaggtccttgctcctgctcaccattggtccttgcatacttcatcccattcgatggtgcacatgtccttgctactgttcaccattggatatcagtgaggcgaatgggataaactatgcaaaaaagatattcagactactgcaaaattgaaggtgtgcatcctcatataaaaatattcactaaaagtttgtaacttacaattcagatttaaaagtaaattcttttccatgacaacaacgagtatgtggtcaacttgacaatgagattatataatgcttgaagaaacaaattacaaagcagtatggatgcattactcctaactcttgctgaaacacatgatgtttttttaaataaaccttctttatatgttcacatggattatatggtattcttgaaatctaaattgaggacttgatttatggattctagatatttgctggactcaagtatgataatattgcagtctacatatagcttttgatgggctctctaacacatgcatttcagatgcatttttttgtttgattgttttcgtgatactcttctccatctcccatcgctttaatactaaagttttcaagataaaatatttttctgttttaggttgtctttggttccatcggttgtcaagttccaaactcaaatatcttctccagtttcatgtcttaccgttttagttttatgaaccgattagccaagtgatagagaacacaatgctgcaacagcaagagcattcttttgctccataagtaatcgtttgtcagtaccatgctacctctaggcttccatttcttgaaacaccacaataggaataaagctttttcagttcatttggtttgttttgatgcctacagggatagcttcgaagaaagctgcttatcctatgactttgaaaaagagctgctgaaaaaattagagtgatgacttcgtcgtcccttttgcggccttctctgccaagcggatcgcccaaacgcaacgacccttttccgacaacggggcacttctagagtcttcgacgaacgttttttttccacgcaccgacttgaacaacggcagcagagtcttcacaaaaggaggacatctcatgttctacgtcgttcaaattgaatctgacggtccatgttttcctaccgacggggataggctgaaaggtcacgttttggaccggctttgtaaaaatttcttttcttttataaaaaaggttgggttggaggacagctacttttcctactttgaaaaaaggaacaataaaaaattatcaggtgagcctttatatacttcagtgttgtacactttagcgtctatcaaag

SEQ ID NO: 61368 - DNA, 966 bp, Zea Mays
aaaagggtcgttgcgtttgggcaatccgcttggccaacaaggccgcaaaagggacgacgaagtcgtcactctgtggcgctttcgtctgaatctccatttcgctgctgcaactcgtgactctatgtaccacgtcgttgtctctttgagctcccgcctgtcggccacccctgctccacgcccgtatcttgcgctgcggccgcaccaccgcgcgtcatggcctatcttcttcgacgacacgacaacacgacctctccgccctgtcctctacgatggcggcccccttatctccagcgtccaggggcaagggtggaggacgcacaccaatgcaccgcccttccctttcctactcttctctctcctctaaagggaaggtccttgctcctgctcaccattggtccttgcatacttcatcccattcgatggtgcacatgtccttgctactgttcaccattgtgaggcgaatgggataaactatgcaaaaaagatattcagactactgcaaaattgaagggatagcttcgaagaaagctgcttatcctatgactttgaaaaagagctgctgaaaaaattagagtgatgacttcgtcgtcccttttgcggccttctctgccaagcggatcgcccaaacgcaacgacccttttccgacaacggggcacttctagagtcttcgacgaacgttttttttccacgcaccgacttgaacaacggcagcagagtcttcacaaaaggaggacatctcatgttctacgtcgttcaaattgaatctgacggtccatgttttcctaccgacggggataggctgaaaggtcacgttttggaccggctttgtaaaaatttcttttcttttataaaaaaggttgggttggaggacagctacttttcctactttgaaaaaaggaacaataaaaaattatcaggtgagcctttatatacttcagtgttgtacactttagcgtctatcaaag

SEQ ID NO: 61369 - DNA, 1112 bp, Zea Mays
aaaagggtcgttgcgtttgggcaatccgcttggccaacaaggccgcaaaagggacgacgaagtcgtcactctgtggcgctttcgtctgaatctccatttcgctgctgcaactcgtgactctatgtaccacgtcgttgtctctttgagctcccgcctgtcggccacccctgctccacgcccgtatcttgcgctgcggccgcaccaccgcgcgtcatggcctatcttcttcgacgacacgacaacacgacctctccgccctgtcctctacgatggcggcccccttatctccagcgtccaggggcaagggtggaggacgcacaccaatgcaccgcccttccctttcctactcttctctctcctctaaagggaaggatatcagtgaggcgaatgggataaactatgcaaaaaagatattcagactactgcaaaattgaagggatagcttcgaagaaagctgcttatcctatgactttgaaaaagagctgctgaaaaaattaggtgacctgttatacacacattattgttgtattattacactactattttgctttcaccataaaattatactatcttatttgagttcgaataaacttttaaattcgaaaggcttcattttatccatctcagctctattaaacctataaattctccaaattttatataaaaatgaaactgtacatttagatatttagcttccttctacgtatacccttcgcagagtgatgacttcgtcgtcccttttgcggccttctctgccaagcggatcgcccaaacgcaacgacccttttccgacaacggggcacttctagagtcttcgacgaacgttttttttccacgcaccgacttgaacaacggcagcagagtcttcacaaaaggaggacatctcatgttctacgtcgttcaaattgaatctgacggtccatgttttcctaccgacggggataggctgaaaggtcacgttttggaccggctttgtaaaaatttcttttcttttataaaaaaggttgggttggaggacagctacttttcctactttgaaaaaaggaacaataaaaaattatcaggtgagcctttatatacttcagtgttgtacactttagcgtctatcaaag

SEQ ID NO: 61370 - DNA, 701 bp, Zea Mays
cggcccccttatctccagcgtccaggggcaagggtggaggacgcacaccaatgcaccgcccttccctttcctactcttctctctcctctaaagggaaggtccttgctcctgctcaccattggtccttgcatacttcatcccattcgatggtgcacatgtccttgctactgttcaccattggatatcagtgaggcgaatgggataaactatgcaaaaaagatattcagactactgcaaaattgaagggatagcttcgaagaaagctgcttatcctatgactttgaaaaagagctgctgaaaaaattagagtgatgacttcgtcgtcccttttgcggccttctctgccaagcggatcgcccaaacgcaacgacccttttccgacaacggggcacttctagagtcttcgacgaacgttttttttccacgcaccgacttgaacaacggcagcagagtcttcacaaaaggaggacatctcatgttctacgtcgttcaaattgaatctgacggtccatgttttcctaccgacggggataggctgaaaggtcacgttttggaccggctttgtaaaaatttcttttcttttataaaaaaggttgggttggaggacagctacttttcctactttgaaaaaaggaacaataaaaaattatcaggtgagcctttatatacttcagtgttgtacactttagcgtctatcaaag

SEQ ID NO: 61371 - DNA, 1451 bp, Zea Mays
ttggtttggttgcttgctgtggccgtgtgtttgtgtctcccccaattgcatataagcatgggctcctcacgcttcacaagcctttgctcttggcctttccctcatcgcctaatgtcttggacccttgccccgcctcctgcaagttgcaggcaaccgagaagctaccactactagctgctcaggctctgcccagctcaaaaggcgttcaggtttagtgcacgaaatgagcagcgcgctgcccgcggcagatcgggcgacagggagaaggaggagggagagatgttgctgctaggattagccacgggctgctgcgtcctcgccgtcgccggggaagccgagaagcaggacggcggcggggcgtcctccgggggcggtcatggtcttggttccaagattagccccgccgtgctgttcgccgtggtgatagcggccgtggtgctgttcgtctcctgcctgctgcatctcttggtcaggctcttgctcaggcgcggccgtgcccgtgcccgtgcgcgcgcgccggccgaggccggtgccggtgccggcggtggggcggacgcggcgggcggcggcggggaggagtccgcgttgcagaggcagctgcagcagctgttccacctgcacgacgccgggctggaccaggacgtcatcgacgcgctcccggtgttcctgtaccgggaggtggtcggcgccggcgccggcgccaaggagccgttcgactgcgcggtctgcctgtgcgagttcgccggcgaggaccggctgcggctgctgccgctgtgcgggcacgcgttccacatcggctgcatcgacacctggctgctctccaactccacgtgcccgctgtgccggtgcgcgctcggcgccgacgctgccgcgctgttcgacgaggaaggcatgtgggagcacgaggacgccgtgctccccgtgcgcctcggcaagttcaagaacctggccagggcggcgcctggccccgtgcgcgccggcgccggcattgtgaccagggaggccggcgagacgagcagcagcagcctggacgccaggcggtgctactccatgggctcctaccagtacgtcctcgccgaggcgagcctccaggtgtccgtccacaggaggcacggcgacggccatggcaggggcggggcggggctcagaggcgtcggcgtgggctccaaccgcgccggcgccacagaggggaagaggatcggcgcgggcagcaaaggcgacagcttctcggtgtccaagatttggcagtggccgcggaacggcaaggagaagcttcccgtgctcgcgtccgatgactcgccggccatgaacggcaggctgccgtggcagaggccaagtcccggggattcgtgaatcgtgtcgtgacacaaagaaagcgtgtgtggtggtgcatgaggaagatgaaacttgtgtgttcaacagagcatcccaatctggaattagccattcca

SEQ ID NO: 61372 - DNA, 976 bp, Zea Mays
ctgaatttgaatctggagctggttagcttctgccgagtcgctcccccttccagggtctcaaacgcaaaccccaatctcggcgtcaccgccccaaatctagcaaacggaaatcccatctcgccgccgccgcgatgtctcgccgctatgacagtcgcacgacgatcttctcgccggaggggcgtctctaccagcgctacgcgctctcctaccaggagcccatccccgtcgagcagctcgtccagtccctctgcgacaccaagcagggttacacccagtttggtggcctccgcccctttggggtctccttcctattcgccggttgggacaagcaccacggtttccagctctacatgagcgacccatctggcaactacggcgggtggaaggccgccgctgttggggccaacagccaggccgcgcagtccatgctcaagcaggactacaaggacgccttgacccgcgaggaggccgtcggtctcgcgctcaaggtcctcagcaagaccatggactccaccagcttgactgccgagaagctggagctggccgaggtatttctgcagcccgacaccggggaggtacagtaccaggtgtgctctcctgaggcgctggggaagctgcttgcaaactccggcctgacacagccaacacccgaggcataatgtactggtttgcagtggcatgtgatgccttctactgctcttagacatggtttaagcagttatgcttctgttgtgtgaacttaaatattcgacaattatgtgttctatttttgtgttgagcatccttgatccgttaatgtttcatctgtaatagtgcattgcattgaattggttgcaaattgttgatctctatctgctctgctttattgttgtcacgattatggagcatgtggatgttggacagtggaacaggggaaggtaggttcaggtctactagggcaatttgaggcacctggatgatgcttagtaaacatggg

SEQ ID NO: 61373 - DNA, 2276 bp, Zea Mays
ctgttgcattcctttttttattaagaatgctgctcgcttggacagtgaaataatttatgatagggatttcgactatgactactttggcttcaaaactctggagaggtcttacctcttgaagcttggtgggaaggtcgttgaaaggcctcagcacatgctgatgagggtttcagtgggaatacacaaggaagacattgagtctgccattaggacgtaccatctgatgtcccagcgctggtttacacatgcatcaccaacacttttcaacgctggcacaccgaggccccaattaagcagctgttttcttatatgcatgaaagatgacagcattgagggaatctatgaaaccctgaaggagtgtgctgtaataagcaaatcagctggaggaattggtgtctcagttcataatattcgtgctactgggagttacatacgaggaacaaatggaacatcaaatggaattgtgcctatgttacgagtctttaatgatactgctcgttatgttgatcagggtggtgggaaaagaaagggtgcatttgctgtatacttggagccttggcatgctgatattttcgagttccttgatctaagaaagaaccatgggaaggaggaaaatcgtgcaagggatcttttctatgcgctatgggttcctgatctattcatgcaaagagtccagagtaatggagaatggtcattgttttgccctaatgaagctccagggttggctgattgctggggtgaggagtttgataatttgtacaagaaatatgagagccaaggcaaggcaaagaaagttgttcctgcacagaccctctggtttgacattttgaaggcacaaatagagactggtacaccttatatgctttacaaggatacttgcaataggaaaagtaaccagcagaatctgggcacaattaaatcgtcaaacttgtgcactgagataattgagtttacaagccctactgaaactgctgtctgcaacctagcatctattgctttacctcgttttgttcgggaaaagggtgttccattagagtcccatccatctaagcttgtgggtagcagtgattcgaaaaatagatattttgattttgagaagctggctgaggttacctcaactgttacttacaatcttaacaaaattatcgatattaattactatcctgttgagacagcaaagagatcaaatatgcgtcacaggccaattggcataggtgttcaaggcctggccgatactttcatattattgggcatgccatttgattcactagaggctcatcagttgaataaggatatatttgaaactatctactatcatgctctgaaatcttctgctgaacttgctgttaaagaaggtccctatgaaacatatgaagggagccctgttagcaagggcattcttcaacctgacatgtggaatgtagtgccatctaccaggtggaattggccatctctaagggagaccatttctaaagctgggataagaaattctcttcttgttgctccaatgcccactgcttccactagtcagattcttggcaacaatgagtgctttgaaccctacacatctaatatttacagtcgacgggttctaagtggggaatttgttgtggttaacaagcatcttcttcatgatttgactgaaatgggcatttggactcctactctgaaaaaccagataatatatgatgatggttctgtccaaaagatagcagaaatcccagatgatctgaaagcaatctacaagactgtttgggagatcaagcagaaaactttagttgatatggcggttgaccgtggatgctatattgaccagagccagagcctcaacgtccacatggagcaagcaaactttgggaagctaacatcacttcacttccatgcttggtccaagggcctgaaaactggaatgtactatctacgcacacgagctgctgctgatgcaatcaagtttaccgtcgataccacacttctaaaggagaatgggaatgggatgaatgatggaaagcccacagaggaagacgtagaagctaaaatggcacaaatggtctgttcttttaacaaccgggaagagtgcctggcgtgtggaagctagattggagctccatctggacactgcaattatttgtgacctcaggccacagcattatatgccgccggctgatgactggagcccaataatcagaacgaaatctgatgtaggatgagacgagcaagccatagaggatccagggcttcagctggttgagactgctgagcaggagctcgttgaaggc

SEQ ID NO: 61374 - DNA, 2738 bp, Zea Mays
cctccccccgccccacctcaatacaatcctctgctcgcgttctctcgtcccggcggcggcgtaggcgcgcgcaccaggtgttcgacgggagttttcgccaccgcggaagatgtacgtggtcaagcgggacggccgccaggagacagtgcacttcgacaagatcacggcgcgcctcaagaagctcagctacggccttagccaggaccactgcgacccggtgctcgtcgcgcagaaggtctgcgcgggggtctacaagggcgtcaccaccagccagctcgacgagctcgccgccgagaccgcggcggccatgactgcgtcccaccccgactacgcctcgttggcggcgaggattgctgtgtctaacctgcacaagaacacaaagaagtccttctcggagacgattaaggacatgtacaggcactttaacgagaggtctgggctgatggcccctctggtcgctgaagatgtttatgaaatcatcatgaataatgctgctcgcttggacagtgaaataatttatgatagggatttcgactatgactactttggcttcaaaactctggagaggtcttacctcttgaagcttggtgggaaggtcgttgaaaggcctcagcacatgctgatgagggtttcagtgggaatacacaaggaagacattgagtctgccattaggacgtaccatctgatgtcccagcgctggtttacacatgcatcaccaacacttttcaacgctggcacaccgaggccccaattaagcagctgttttcttatatgcatgaaagatgacagcattgagggaatctatgaaaccctgaaggagtgtgctgtaataagcaaatcagctggaggaattggtgtctcagttcataatattcgtgctactgggagttacatacgaggaacaaatggaacatcaaatggaattgtgcctatgttacgagtctttaatgatactgctcgttatgttgatcagggtggtgggaaaagaaagggtgcatttgctgtatacttggagccttggcatgctgatattttcgagttccttgatctaagaaagaaccatgggaaggaggaaaatcgtgcaagggatcttttctatgcgctatgggttcctgatctattcatgcaaagagtccagagtaatggagaatggtcattgttttgccctaatgaagctccagggttggctgattgctggggtgaggagtttgataatttgtacaagaaatatgagagccaaggcaaggcaaagaaagttgttcctgcacagaccctctggtttgacattttgaaggcacaaatagagactggtacaccttatatgctttacaaggatacttgcaataggaaaagtaaccagcagaatctgggcacaattaaatcgtcaaacttgtgcactgagataattgagtttacaagccctactgaaactgctgtctgcaacctagcatctattgctttacctcgttttgttcgggaaaagggtgttccattagagtcccatccatctaagcttgtgggtagcagtgattcgaaaaatagatattttgattttgagaagctggctgaggttacctcaactgttacttacaatcttaacaaaattatcgatattaattactatcctgttgagacagcaaagagatcaaatatgcgtcacaggccaattggcataggtgttcaaggcctggccgatactttcatattattgggcatgccatttgattcactagaggctcatcagttgaataaggatatatttgaaactatctactatcatgctctgaaatcttctgctgaacttgctgttaaagaaggtccctatgaaacatatgaagggagccctgttagcaagggcattcttcaacctgacatgtggaatgtagtgccatctaccaggtggaattggccatctctaagggagaccatttctaaagctgggataagaaattctcttcttgttgctccaatgcccactgcttccactagtcagattcttggcaacaatgagtgctttgaaccctacacatctaatatttacagtcgacgggttctaagtggggaatttgttgtggttaacaagcatcttcttcatgatttgactgaaatgggcatttggactcctactctgaaaaaccagataatatatgatgatggttctgtccaaaagatagcagaaatcccagatgatctgaaagcaatctacaagactgtttgggagatcaagcagaaaactttagttgatatggcggttgaccgtggatgctatattgaccagagccagagcctcaacgtccacatggagcaagcaaactttgggaagctaacatcacttcacttccatgcttggtccaagggcctgaaaactggaatgtactatctacgcacacgagctgctgctgatgcaatcaagtttaccgtcgataccacacttctaaaggagaatgggaatgggatgaatgatggaaagcccacagaggaagacgtagaagctaaaatggcacaaatggtctgttcttttaacaaccgggaagagtgcctggcgtgtggaagctagattggagctccatctggacactgcaattatttgtgacctcaggccacagcattatatgccgccggctgatgactggagcccaataatcagaacgaaatctgatgtaggatgagacgagcaagccatagaggatccagggcttcagctggttgagactgctgagcaggagctcgttgaaggc

SEQ ID NO: 61375 - DNA, 2798 bp, Zea Mays
cctccccccgccccacctcaatacaatcctctgctcgcgttctctcgtcccggcggcggcgtaggcgcgcgcaccaggtgttcgacgggagttttcgccaccgcggaagatgtacgtggtcaagcgggacggccgccaggagacagtgcacttcgacaagatcacggcgcgcctcaagaagctcagctacggccttagccaggaccactgcgacccggtgctcgtcgcgcagaaggtctgcgcgggggtctacaagggcgtcaccaccagccagctcgacgagctcgccgccgagaccgcggcggccatgactgcgtcccaccccgactacgcctcgttggcggcgaggattgctgtgtctaacctgcacaagaacacaaagaagtccttctcggagacggtgaaggctggattagttggattgggttgtgagttggaatgtggccgttgtggatgcaggattaaggacatgtacaggcactttaacgagaggtctgggctgatggcccctctggtcgctgaagatgtttatgaaatcatcatgaataatgctgctcgcttggacagtgaaataatttatgatagggatttcgactatgactactttggcttcaaaactctggagaggtcttacctcttgaagcttggtgggaaggtcgttgaaaggcctcagcacatgctgatgagggtttcagtgggaatacacaaggaagacattgagtctgccattaggacgtaccatctgatgtcccagcgctggtttacacatgcatcaccaacacttttcaacgctggcacaccgaggccccaattaagcagctgttttcttatatgcatgaaagatgacagcattgagggaatctatgaaaccctgaaggagtgtgctgtaataagcaaatcagctggaggaattggtgtctcagttcataatattcgtgctactgggagttacatacgaggaacaaatggaacatcaaatggaattgtgcctatgttacgagtctttaatgatactgctcgttatgttgatcagggtggtgggaaaagaaagggtgcatttgctgtatacttggagccttggcatgctgatattttcgagttccttgatctaagaaagaaccatgggaaggaggaaaatcgtgcaagggatcttttctatgcgctatgggttcctgatctattcatgcaaagagtccagagtaatggagaatggtcattgttttgccctaatgaagctccagggttggctgattgctggggtgaggagtttgataatttgtacaagaaatatgagagccaaggcaaggcaaagaaagttgttcctgcacagaccctctggtttgacattttgaaggcacaaatagagactggtacaccttatatgctttacaaggatacttgcaataggaaaagtaaccagcagaatctgggcacaattaaatcgtcaaacttgtgcactgagataattgagtttacaagccctactgaaactgctgtctgcaacctagcatctattgctttacctcgttttgttcgggaaaagggtgttccattagagtcccatccatctaagcttgtgggtagcagtgattcgaaaaatagatattttgattttgagaagctggctgaggttacctcaactgttacttacaatcttaacaaaattatcgatattaattactatcctgttgagacagcaaagagatcaaatatgcgtcacaggccaattggcataggtgttcaaggcctggccgatactttcatattattgggcatgccatttgattcactagaggctcatcagttgaataaggatatatttgaaactatctactatcatgctctgaaatcttctgctgaacttgctgttaaagaaggtccctatgaaacatatgaagggagccctgttagcaagggcattcttcaacctgacatgtggaatgtagtgccatctaccaggtggaattggccatctctaagggagaccatttctaaagctgggataagaaattctcttcttgttgctccaatgcccactgcttccactagtcagattcttggcaacaatgagtgctttgaaccctacacatctaatatttacagtcgacgggttctaagtggggaatttgttgtggttaacaagcatcttcttcatgatttgactgaaatgggcatttggactcctactctgaaaaaccagataatatatgatgatggttctgtccaaaagatagcagaaatcccagatgatctgaaagcaatctacaagactgtttgggagatcaagcagaaaactttagttgatatggcggttgaccgtggatgctatattgaccagagccagagcctcaacgtccacatggagcaagcaaactttgggaagctaacatcacttcacttccatgcttggtccaagggcctgaaaactggaatgtactatctacgcacacgagctgctgctgatgcaatcaagtttaccgtcgataccacacttctaaaggagaatgggaatgggatgaatgatggaaagcccacagaggaagacgtagaagctaaaatggcacaaatggtctgttcttttaacaaccgggaagagtgcctggcgtgtggaagctagattggagctccatctggacactgcaattatttgtgacctcaggccacagcattatatgccgccggctgatgactggagcccaataatcagaacgaaatctgatgtaggatgagacgagcaagccatagaggatccagggcttcagctggttgagactgctgagcaggagctcgttgaaggc

SEQ ID NO: 61376 - DNA, 3032 bp, Zea Mays
cggcgtaggcgcgcgcaccaggtgttcgacgggagttttcgccaccgcggaagatgtacgtggtcaagcgggacggccgccaggagacagtgcacttcgacaagatcacggcgcgcctcaagaagctcagctacggccttagccaggaccactgcgacccggtgctcgtcgcgcagaaggtctgcgcgggggtctacaagggcgtcaccaccagccagctcgacgagctcgccgccgagaccgcggcggccatgactgcgtcccaccccgactacgcctcgttggcggcgaggattgctgtgtctaacctgcacaagaacacaaagaagtccttctcggagacaggattaaggacatgtacaggcactttaacgagaggtctgggctgatggcccctctggtcgctgaagatgtttatgaaatcatcatgaataatgctgctcgcttggacagtgaaataatttatgatagggatttcgactatgactactttggcttcaaaactctggagaggtcttacctcttgaagcttggtgggaaggtcgttgaaaggcctcagcacatgctgatgagggtttcagtgggaatacacaaggaagacattgagtctgccattaggacgtaccatctgatgtcccagcgctggtttacacatgcatcaccaacacttttcaacgctggcacaccgaggccccaattaagcagctgttttcttatatgcatgaaagatgacagcattgagggaatctatgaaaccctgaaggagtgtgctgtaataagcaaatcagctggaggaattggtgtctcagttcataatattcgtgctactgggagttacatacgaggaacaaatggaacatcaaatggaattgtgcctatgttacgagtctttaatgatactgctcgttatgttgatcagggtggtgggaaaagaaagggtgcatttgctgtatacttggagccttggcatgctgatattttcgagttccttgatctaagaaagaaccatgggaaggaggaaaatcgtgcaagggatcttttctatgcgctatgggttcctgatctattcatgcaaagagtccagagtaatggagaatggtcattgttttgccctaatgaagctccagggttggctgattgctggggtgaggagtttgataatttgtacaagaaatatgagagccaaggcaaggcaaagaaagttgttcctgcacagaccctctggtttgacattttgaaggcacaaatagagactggtacaccttatatgctttacaaggatacttgcaataggaaaagtaaccagcagaatctgggcacaattaaatcgtcaaacttgtgcactgagataattgagtttacaagccctactgaaactgctgtctgcaacctagcatctattgctttacctcgttttgttcgggaaaagggtgttccattagagtcccatccatctaagcttgtgggtagcagtgattcgaaaaatagatattttgattttgagaagctggctgaggttacctcaactgttacttacaatcttaacaaaattatcgatattaattactatcctgttgagacagcaaagagatcaaatatgcgtcacaggccaattggcataggtgttcaaggcctggccgatactttcatattattgggcatgccatttgattcactagaggctcatcagttgaataaggatatatttgaaactatctactatcatgctctgaaatcttctgctgaacttgctgttaaagaaggtccctatgaaacatatgaagggagccctgttagcaagggcattcttcaacctgacatgtggaatgtagtgccatctaccaggtggaattggccatctctaagggagaccatttctaaagctgggataagaaattctcttcttgttgctccaatgcccactgcttccactagtcagattcttggcaacaatgagtgctttgaaccctacacatctaatatttacagtcgacgggttctaagtggggaatttgttgtggttaacaagcatcttcttcatgatttgactgaaatgggcatttggactcctactctgaaaaaccagataatatatgatgatggttctgtccaaaagatagcagaaatcccagatgatctgaaagcaatctacaagactgtttgggagatcaagcagaaaactttagttgatatggcggttgaccgtggatgctatattgaccagagccagagcctcaacgtccacatggagcaagcaaactttgggaagctaacatcacttcacttccatgcttggtccaagggcctgaaaactggaatgtactatctacgcacacgagctgctgctgatgcaatcaagtttaccgtcgataccacacttctaaaggagaatgggaatgggatgaatgatggaaagcccacagaggaagacgtagaagctaaaatggcacaaatggtctgttcttttaacaaccgggaagagtgcctggcgtgtggaagctagattggagctccatctggacactgcaattatttgtgacctcaggccacagcattatatgccgccggctgatgactggagcccaataatcagaacgaaatctgatgtaggatgaggtagaaactccattcccttcccataatgggaacaataccttgcctctgaaatactgttaggactagtttggtaactctattttttcaagagattcatattttttcaagtgaaaatgaattaattttcttttgagaaaatagaaagaaatcccttgaaaaaaatgagattctctaggagccataaaaccggagtaaattggaggagctaaattcatcctttttattcaattttgaataagaggaatttagctcctctggttttgtggcttccaaactaaggttgtattctctaagatatttgtgctgctgctgctgccaatgtactgtaaatatctactaccatcaaagttattgatgttctctaagctattttttaactgtgcgcgttggatcgaacatgatgtaatgcatcattt

SEQ ID NO: 61377 - DNA, 3081 bp, Zea Mays
ccccgccccacctcaatacaatcctctgctcgcgttctctcgtcccggcggcggcgtaggcgcgcgcaccaggtgttcgacgggagttttcgccaccgcggaagatgtacgtggtcaagcgggacggccgccaggagacagtgcacttcgacaagatcacggcgcgcctcaagaagctcagctacggccttagccaggaccactgcgacccggtgctcgtcgcgcagaaggtctgcgcgggggtctacaagggcgtcaccaccagccagctcgacgagctcgccgccgagaccgcggcggccatgactgcgtcccaccccgactacgcctcgttggcggcgaggattgctgtgtctaacctgcacaagaacacaaagaagtccttctcggagacgattaaggacatgtacaggcactttaacgagaggtctgggctgatggcccctctggtcgctgaagatgtttatgaaatcatcatgaataatgctgctcgcttggacagtgaaataatttatgatagggatttcgactatgactactttggcttcaaaactctggagaggtcttacctcttgaagcttggtgggaaggtcgttgaaaggcctcagcacatgctgatgagggtttcagtgggaatacacaaggaagacattgagtctgccattaggacgtaccatctgatgtcccagcgctggtttacacatgcatcaccaacacttttcaacgctggcacaccgaggccccaattaagcagctgttttcttatatgcatgaaagatgacagcattgagggaatctatgaaaccctgaaggagtgtgctgtaataagcaaatcagctggaggaattggtgtctcagttcataatattcgtgctactgggagttacatacgaggaacaaatggaacatcaaatggaattgtgcctatgttacgagtctttaatgatactgctcgttatgttgatcagggtggtgggaaaagaaagggtgcatttgctgtatacttggagccttggcatgctgatattttcgagttccttgatctaagaaagaaccatgggaaggaggaaaatcgtgcaagggatcttttctatgcgctatgggttcctgatctattcatgcaaagagtccagagtaatggagaatggtcattgttttgccctaatgaagctccagggttggctgattgctggggtgaggagtttgataatttgtacaagaaatatgagagccaaggcaaggcaaagaaagttgttcctgcacagaccctctggtttgacattttgaaggcacaaatagagactggtacaccttatatgctttacaaggatacttgcaataggaaaagtaaccagcagaatctgggcacaattaaatcgtcaaacttgtgcactgagataattgagtttacaagccctactgaaactgctgtctgcaacctagcatctattgctttacctcgttttgttcgggaaaagggtgttccattagagtcccatccatctaagcttgtgggtagcagtgattcgaaaaatagatattttgattttgagaagctggctgaggttacctcaactgttacttacaatcttaacaaaattatcgatattaattactatcctgttgagacagcaaagagatcaaatatgcgtcacaggccaattggcataggtgttcaaggcctggccgatactttcatattattgggcatgccatttgattcactagaggctcatcagttgaataaggatatatttgaaactatctactatcatgctctgaaatcttctgctgaacttgctgttaaagaaggtccctatgaaacatatgaagggagccctgttagcaagggcattcttcaacctgacatgtggaatgtagtgccatctaccaggtggaattggccatctctaagggagaccatttctaaagctgggataagaaattctcttcttgttgctccaatgcccactgcttccactagtcagattcttggcaacaatgagtgctttgaaccctacacatctaatatttacagtcgacgggttctaagtggggaatttgttgtggttaacaagcatcttcttcatgatttgactgaaatgggcatttggactcctactctgaaaaaccagataatatatgatgatggttctgtccaaaagatagcagaaatcccagatgatctgaaagcaatctacaagactgtttgggagatcaagcagaaaactttagttgatatggcggttgaccgtggatgctatattgaccagagccagagcctcaacgtccacatggagcaagcaaactttgggaagctaacatcacttcacttccatgcttggtccaagggcctgaaaactggaatgtactatctacgcacacgagctgctgctgatgcaatcaagtttaccgtcgataccacacttctaaaggagaatgggaatgggatgaatgatggaaagcccacagaggaagacgtagaagctaaaatggcacaaatggtctgttcttttaacaaccgggaagagtgcctggcgtgtggaagctagattggagctccatctggacactgcaattatttgtgacctcaggccacagcattatatgccgccggctgatgactggagcccaataatcagaacgaaatctgatgtaggatgaggtagaaactccattcccttcccataatgggaacaataccttgcctctgaaatactgttaggactagtttggtaactctattttttcaagagattcatattttttcaagtgaaaatgaattaattttcttttgagaaaatagaaagaaatcccttgaaaaaaatgagattctctaggagccataaaaccggagtaaattggaggagctaaattcatcctttttattcaattttgaataagaggaatttagctcctctggttttgtggcttccaaactaaggttgtattctctaagatatttgtgctgctgctgctgccaatgtactgtaaatatctactaccatcaaagttattgatgttctctaagctattttttaactgtgcgcgttggatcgaacatgatgtaatgcatcattt

SEQ ID NO: 61378 - DNA, 3566 bp, Zea Mays
aaaaccaaaccaaaaaccgatggaatgaaaagtcgtattccattcagtttttgtctactaactagggtttgccgcggatccggtccctcctccactaacataagtcgccatccccgccgctgcagttcgagctccgaccggtcccacgccggatctacccggtgtcgtcctcgactttcgccgttagtcccctcaaggaaaggaaagaaggagagggatgacgtggttccgcgccgcatcgggtgccgcccgcctcgccctccgccgcagcctcgccacccgcacgccgccagccgccgccacccgatgcggccgctgcttccactccaccgctatgcgtccccgctccgccgcccccgtgccccgggccgtcccgctctcgcgcctctctgacagcttcctcgacggtaccagcagcgtctacctcgaggagctccagcggacctgggaggctgacccttcctccgtcgacgagtcatgggacaacttcttccgcaacttcgtcgcccaggcctctccttccgccggcgtctccggccagaccatccaggagagcatgcagctcctcctcctcgtcagggcctaccaagtcaacggccacatgatggccaagctcgaccccctgggcctcgacgacagagccgtccccgaagatctccgcctcggcctctacggcttcacagaggccgacctcgatagggagttcttcctcggcgtctggaggatgtccggttttctctccgagaaccgccccgtgctcacactccgtgagatcctcaacaagctccagcaggcatactgtggacccatcggctacgagtacatgcacatccctgatagagacaagtgcaactggctcagggaaaagatcgagactgccaagcccaaggaatataacaaggaccgccgccttgtcatgcttgacaggcttatctggagcacccagtttgagaatttcctagccaccaagtgggccaccgccaagaggtttggccttgagggtggtgagacgctcatccctggcatgaaggagatgttcgatagggctgctgacctcggtgttgagaacattgtcatcggtatgccgcataggggaaggctcaatgtccttggtaatgtcgttcgcaagccactgtctcagatattcagcgagttcactggcggcacaaggcctgttgaaggcgaagatggtctctacaccggaactggtgatgtcaagtaccacctgggtacctcctatgatcgcccaactcgaggcggcaacaggatccatttgtccttggttgccaatcccagccatctggaagccgttgatcctgttgtcattggcaagacgcgtgctaagcagttctactccaatgatgctgacaggacaaagaacatgggtattctgatccacggagatggcagctttgctggccagggtgtggtctatgagacactccatctaagtgccctcccaaactacactactggtggaaccattcatattgttgtcaataaccaagttgcctttacgactgatccaagagctggcaggtcctcccagtactgcacagatgttgccaaagccctgaatgctcctatattccatgtaaatggcgacgatttagaggctgttgtttgtgtttgtgagcttgcagcggagtggcgccagactttccactccgatgtggtggttgatctgatttgctaccgccgtttcgggcataacgaaattgatgaaccttccttcacacagccaaaaatgtatcaggtcattaagaaccatcccagctcattgaagctttatgagcagaaactgctaggaacgggtgaagtcatgaaagaagatgtccagaggatccatgacaaggtgaaccgaatcttgaacgaagagtttgctaagagcaaagactacgttcccaacaagagggattggctctcagcttactggactggctttaagtcaccagagcaaatatcacgtgttcgcaacactgggcaattactacactgcctgaaaacttcaaaccacacagagcagtgaagaagatttttgagctgcgtgcagctatgatagagagtggtcaaggaattgattgggctgttgctgaagccctggcctttgcaacacttatagtggaaggcaatcatgttaggctaagtggacaggatgtggaaagaggaactttcagccatcggcatgcagttctgcatgatcaggaaactggagcaaagtactgtccacttgaccatgttgcaatggatcaaaatgaggagctatttactgttagcaacagttcactttcagagtttgctgttcttgggtttgaattgggttactccatggagaaccctaattcattggtactttgggaagcacaatttggcgattttgccaatggtgcacaagtgatgttcgaccaatttttgagcagcggcgaggcaaaatggttgcggcaaaccggccttgttgttctgttgcctcatggttatgatggccaaggtcctgagcattctagtgcccgcttggagcgcttccttcagatgagtgatgataatccttttgtcatacctgagatggaaccaacacttcgcaagcagatacaagagtgtaactggcaagttgtgaatgtgacaactcctgcaaattattttcatctgttgcgtcggcagatacatagggagttccggaagccgctgattgtaacagctcctaagaacctgcttaggcacaaggattgcaagtcaaatctttcagagtttgatgatgttgaaggccatctaggattcgataagcagggaacacgtttcaagcgactgataaaggaccgtaatgatcacaagcaagtcgaggagggtgtcaaccgtcttatcttatgttctgggaaagtttactatgaacttgacgaagagcgtaagaagtcggagcgtggcgatgttgcaatttgcagagttgagcaactttgcccgttcccctatgaccttatccaaagagagctgaagagatacccaaatgcggagattgtgtggtgccaggaggagcccatgaacatgggtgcatacagctatatctctcctcgtctgtttactgcgatgaaggctcttgggcggggttcgtttgaagacatcaagtatgttggcagagcaccttcagctgctacagcaacaggcttcctgtcggttcatgcgcaggagcagtcagagctagtgaagaaggcactgcaggcagagccgatcaaattcctctgatgtatgcaccgtatctacagcaacaacctgcctgcatggttgcaggaacatgccagggattttcttttccccggccagttttgaggcttttcagcgttggaactaatgacgacttccttccttgaagacatcatattaattgccctaatcagctatctagtagttaattataaactacgtgcgaacagaccctggtttagctggcagttcaatttgagacctgggttcaaaaaaaaaaatctctgagtcgggtttaaggcagccagacaacacaggagttcagcttctgacccataataaaactatttatatttaataaaactatatttaac

SEQ ID NO: 61379 - DNA, 3595 bp, Zea Mays
ctttttctttccttctttctcaccaaacaaaaccaaaccaaaaaccgatggaatgaaaagtcgtattccattcagtttttgtctactaactagggtttgccgcggatccggtccctcctccactaacataagtcgccatccccgccgctgcagttcgagctccgaccggtcccacgccggatctacccggtgtcgtcctcgactttcgccgttagtcccctcaaggaaaggaaagaaggagagggatgacgtggttccgcgccgcatcgggtgccgcccgcctcgccctccgccgcagcctcgccacccgcacgccgccagccgccgccacccgatgcggccgctgcttccactccaccgctatgcgtccccgctccgccgcccccgtgccccgggccgtcccgctctcgcgcctctctgacagcttcctcgacggtaccagcagcgtctacctcgaggagctccagcggacctgggaggctgacccttcctccgtcgacgagtcatgggacaacttcttccgcaacttcgtcgcccaggcctctccttccgccggcgtctccggccagaccatccaggagagcatgcagctcctcctcctcgtcagggcctaccaagtcaacggccacatgatggccaagctcgaccccctgggcctcgacgacagagccgtccccgaagatctccgcctcggcctctacggcttcacagaggccgacctcgatagggagttcttcctcggcgtctggaggatgtccggttttctctccgagaaccgccccgtgctcacactccgtgagatcctcaacaagctccagcaggcatactgtggacccatcggctacgagtacatgcacatccctgatagagacaagtgcaactggctcagggaaaagatcgagactgccaagcccaaggaatataacaaggaccgccgccttgtcatgcttgacaggcttatctggagcacccagtttgagaatttcctagccaccaagtgggccaccgccaagaggtttggccttgagggtggtgagacgctcatccctggcatgaaggagatgttcgatagggctgctgacctcggtgttgagaacattgtcatcggtatgccgcataggggaaggctcaatgtccttggtaatgtcgttcgcaagccactgtctcagatattcagcgagttcactggcggcacaaggcctgttgaaggcgaagatggtctctacaccggaactggtgatgtcaagtaccacctgggtacctcctatgatcgcccaactcgaggcggcaacaggatccatttgtccttggttgccaatcccagccatctggaagccgttgatcctgttgtcattggcaagacgcgtgctaagcagttctactccaatgatgctgacaggacaaagaacatgggtattctgatccacggagatggcagctttgctggccagggtgtggtctatgagacactccatctaagtgccctcccaaactacactactggtggaaccattcatattgttgtcaataaccaagttgcctttacgactgatccaagagctggcaggtcctcccagtactgcacagatgttgccaaagccctgaatgctcctatattccatgtaaatggcgacgatttagaggctgttgtttgtgtttgtgagcttgcagcggagtggcgccagactttccactccgatgtggtggttgatctgatttgctaccgccgtttcgggcataacgaaattgatgaaccttccttcacacagccaaaaatgtatcaggtcattaagaaccatcccagctcattgaagctttatgagcagaaactgctaggaacgggtgaagtcatgaaagaagatgtccagaggatccatgacaaggtgaaccgaatcttgaacgaagagtttgctaagagcaaagactacgttcccaacaagagggattggctctcagcttactggactggctttaagtcaccagagcaaatatcacgtgttcgcaacactggggtgaagcctgaaatactgaaacgtgtaggtcaggcaattactacactgcctgaaaacttcaaaccacacagagcagtgaagaagatttttgagctgcgtgcagctatgatagagagtggtcaaggaattgattgggctgttgctgaagccctggcctttgcaacacttatagtggaaggcaatcatgttaggctaagtggacaggatgtggaaagaggaactttcagccatcggcatgcagttctgcatgatcaggaaactggagcaaagtactgtccacttgaccatgttgcaatggatcaaaatgaggagctatttactgttagcaacagttcactttcagagtttgctgttcttgggtttgaattgggttactccatggagaaccctaattcattggtactttgggaagcacaatttggcgattttgccaatggtgcacaagtgatgttcgaccaatttttgagcagcggcgaggcaaaatggttgcggcaaaccggccttgttgttctgttgcctcatggttatgatggccaaggtcctgagcattctagtgcccgcttggagcgcttccttcagatggaaccaacacttcgcaagcagatacaagagtgtaactggcaagttgtgaatgtgacaactcctgcaaattattttcatctgttgcgtcggcagatacatagggagttccggaagccgctgattgtaacagctcctaagaacctgcttaggcacaaggattgcaagtcaaatctttcagagtttgatgatgttgaaggccatctaggattcgataagcagggaacacgtttcaagcgactgataaaggaccgtaatgatcacaagcaagtcgaggagggtgtcaaccgtcttatcttatgttctgggaaagtttactatgaacttgacgaagagcgtaagaagtcggagcgtggcgatgttgcaatttgcagagttgagcaactttgcccgttcccctatgaccttatccaaagagagctgaagagatacccaaatgcggagattgtgtggtgccaggaggagcccatgaacatgggtgcatacagctatatctctcctcgtctgtttactgcgatgaaggctcttgggcggggttcgtttgaagacatcaagtatgttggcagagcaccttcagctgctacagcaacaggcttcctgtcggttcatgcgcaggagcagtcagagctagtgaagaaggcactgcaggcagagccgatcaaattcctctgatgtatgcaccgtatctacagcaacaacctgcctgcatggttgcaggaacatgccagggattttcttttccccggccagttttgaggcttttcagcgttggaactaatgacgacttccttccttgaagacatcatattaattgccctaatcagctatctagtagttaattataaactacgtgcgaacagaccctggtttagctggcagttcaatttgagacctgggttcaaaaaaaaaaatctctgagtcgggtttaaggcagccagacaacacaggagttcagcttctgacccataataaaactatttatatttaataaaactatatttaac

SEQ ID NO: 61380 - DNA, 1070 bp, Zea Mays
atgtcgcggctcggtttatcccttccccagattccttgggcactgggtctgcccttgtttgggaagagaggtattgagaagcagcctttccagcttcctgactttatagctgcaactggaatagaaaagataagacaggcgtatattgagaaagaggatagcaagaagttgaaacagaaacagcgggagcgcatgcagcccaaaatgggcaaaatggatatagattatcaggttttgcatgatgcgttcttcaaatatcagacaaaacccaagttgtctagtcatggtgatctgtattatgaaggcaaagagtttgaggttaaactgagggaaatgaagccaggcatgctgtctcatgagcttaaagatgctcttggtatgcctgatggtgcccctcccccatggcttataaacatgcagcgctatggtccacctccatcttatccccaactgaagatcccaggtcttaatgccccaatcccccctggtgccagttttggttatagaccaggagagtggggaaagccaccagttgatgaggatgaacctgttgatcgcagcaaacactggggagatttggaggaagaggaggaagaagaggaagaggaggaagaggaagaaccaatggaagacgaggaaatggaagacggaattcagtccgtcgataccatttcaagtactccgactggtgttgaaacacctgatgttatcgaccttcggaagctgcagaggaaggagactgacaagcaggcagaacggccgttgtatcaggttcttgaacagaaggacaaaaggatcgcccctgggacactatatgggtcaagccatacgtacgtgctgggagcacaagataaatcatcagctccgaaaagagtggatctgcttaagaatcaaaagtcagacaaggtggacgtcaccatccaacccgatgccatggatgatgttgtggcagccaagtacgaagaagcgcgagaggaagagaagcttcggaaccaaaaggaggacttcagcgacatggtggcggagaatgctcacaagaggaagcggaagcaagagaaggaaggcaagtc

SEQ ID NO: 61381 - DNA, 1133 bp, Zea Mays
atgtcgcggctcggtttatcccttccccagattccttgggcactgggtctgcccttgtttgggaagagaggtattgagaagcagcctttccagcttcctgactttatagctgcaactggaatagaaaagataagacaggcgtatattgagaaagaggatagcaagaagttgaaacagaaacagcgggagcgcatgcagcccaaaatgggcaaaatggatatagattatcaggttttgcatgatgcgttcttcaaatatcagacaaaacccaagttgtctagtcatggtgatctgtattatgaaggcaaagagtttgaggttaaactgagggaaatgaagccaggcatgctgtctcatgagcttaaagatgctcttggtatgcctgatggtgcccctcccccatggcttataaacatgcagcgctatggtccacctccatcttatccccaactgaagatcccaggtcttaatgccccaatcccccctggtgccagttttggttatagaccaggagagtggggaaagccaccagttgatgagcatggacgcccactctatggagacgtttttggtgttcttcagcaggacgaacctagctacgatgatgaacctgttgatcgcagcaaacactggggagatttggaggaagaggaggaagaagaggaagaggaggaagaggaagaaccaatggaagacgaggaaatggaagacggaattcagtccgtcgataccatttcaagtactccgactggtgttgaaacacctgatgttatcgaccttcggaagctgcagaggaaggagactgacaagcaggcagaacggccgttgtatcaggttcttgaacagaaggacaaaaggatcgcccctgggacactatatgggtcaagccatacgtacgtgctgggagcacaagataaatcatcagctccgaaaagagtggatctgcttaagaatcaaaagtcagacaaggtggacgtcaccatccaacccgatgccatggatgatgttgtggcagccaagtacgaagaagcgcgagaggaagagaagcttcggaaccaaaaggaggacttcagcgacatggtggcggagaatgctcacaagaggaagcggaagcaagagaaggaaggcaagtc

SEQ ID NO: 61382 - DNA, 617 bp, Zea Mays
tttttcttttctctctttgtaaagaatatcgagccttcttctcttgagagttgagaacctagctttcaagtgggccaagataaagcccagtttgtcccactgggctgggtacgcacagaacctacccaggcgaacaggatatcgagcctctcctcgtttcggccctcctcgcttgcgcgccgccgccgactatggccgccgccggggtggagcctcgccccaacccgcctcctaccatggcttccgacctccccaacggaagtaaaaccaagtcgcgagagtccgaccggcgccgccgccgccgcaaggtcaagaagaacaagtccgccgctgaggccggtgcccagaacgagggcgggggagcttctagctccgacgccaaggagaacgcagatcctaaccccgagcccatggtggaggtggagatagagtatgtactggagaaggccgagctggacgatcctctcctcgatgacttcaagaccatcttcgaaaagttcacctttaagggcgctgccgcagcagcgaccgaggtatttggattaacgaagcgtttcttcaacccgtcggtcgatgagcgagcctaaagccctgtttgtctacttctaggattatat

SEQ ID NO: 61383 - DNA, 3433 bp, Zea Mays
atggccgccgctaggatcgccgcctgcaccacctccgcccgcaccgccctcgccttggcagacgaccccgcgccgccggacacgctggacgtggtgcgccggcagcgccagctcctacgccgcgccgcggccctctgcctcgaccccatcgccgaggagtccgacgttatttgccccctcccagtccctcgcatggccgttttttcagcgtcgaaggcggtctcggatgaatccgctttccgtgtggccggtagagtcttcgtcttcgtctcgtctcgtctcgtcccaaacacgcgaacgcgacacgccgacacccgtatcgtaccacctaacttttgctccgagatctcctcctcccgtctcatcagtcttttccaatcaatcaccagctcaaacttgtacccaaaaccctacaccggagggagagggatggtcaagaaagccgtctccaccgcgccagcagacgccgaggccgacgagcgccgccgcctccgctcgctcgccttctccaacggcctgctccagcgaggcgaccccgcggcgccgcgggcgccgctcgcgccggcggctgccgtcacgcgcctacagggccgcgacgtcgtccgccgtggcggccagcgaaagagccgctacctcttctccttccctggcctcctcgcgccagcagcctcgggtggccgggtcggagagctcgccgacctcgggaccaagaaccccctgctgtacctcgagttcccacagggaaggatgaagctcttcgggacgcacgtttaccccaagaacaagtacctcacgctgcagatgaccaggtcggccaagggcgtcgtctgtgaggacgtctttgagagcctgattgtgttttctgaagcctggtgggtgggaacaaaagaagataatccggaagagctcaaacttgagtttccaaaagaattccaaaatgatggcacgacagcagactgtgatttcagaggtggtgcaggtggtgccatcgatgaagcaactggaagcaaagctggaaaggaaattgcagaacctcgttccccaaagtttgcatctgatgacgatgctcctgaggattcaaatcataaggatgagaataacacacagactatgagtggaacaccagttagacagtctgctaggaatgcagggaaaaccttgaaaaggtacacagacttatcttctggaggtgaatcgtctgacaataataatgaaactgatatatctgaggacttggatgataaggaggtggagagtccagaaattaaggacgagattgaaagcgaagatgtcaaacccgcagattcttcagcaatttccctctctagcaagaaggagcctcttgttcaggctactttgtctagcatgtttataagggcagaagaaaaaaagagatctacaaggagtcctaaagggtcccctgcaaccaaaggtgctgctgctaagaagcagcgagcaagtccaatggcaaaacagccagcagggatcaagaaggttagcggaactcggggaaagaaaaaaccaaaggtgggagaagatgaaatcgaagagctctcaagttcctcccaggataacgacgcagatgatgatagtgacgaggactgggccgaataatgcgatggagtaaggaagccgacaccacttggagttgctgccaactaccgggctcggctgtcaaattctctatctggcagccagcccgtgtccaattccaactccaccggtggtaaaccatcgacagcaggagcagggagggcaggctgcacaagaaaagagcatcattcctgctgatcggctcggctccactccaccccgaataaaatggcttccttctcgggacatctccaccgccccctgtccgccatggccgtggccgccttcgccgccgtctcctcccacgagcttcccgacaagctgtcccaccacaggcttcctgatgccagcacaggcacggacgcgctcgcctcgcttccattgaccaggtcagatgttcccgcagcgccttcggcatctgccctttctggcgcgcagctattgccacgggacctccacagcttgcgtctgctgaaggcgcccttcgcgtctgtgccggtcatgcagacggtgtaccagtacgccaactttgccaaaacctcgggacaggccgatgcgatgcctgcaattccttcctcgccgtccgatgtgctgtaccgctggcacctgccagaccccagggtctatgccgacttccctgacaagtctcagacggtcgtggtccttcttggttggttgggctcaaggcagaagcacctcaagagatatgccgattggtacacctccaggggcttccatgtcgtcactttcaccctcccgatgtctgacattctcagttataaccttggagggaaggctgagaagaacgttgagatgctatctgaacatattgctgactgggtcagggaggagagtgggaagaagattattttccacaccttcagtaatactggttggctttgttatggcgtaattctggagaacttgcaacagcatgatccttcagcagtggacaaaattaaagcttgtgtagtagactcagcacctgttgctgcacctgatcctcaggtttgggctttgggcttctcggctgccctcatgaaaaaacgcagtgtcaccacgaagggactaggttcagatgattcaaggtctgatgtcctagttgtggagtccaacaaggagctcaagctgggggcaacagaggcggttatactgtcagcgttagagagtttctttgacgttgttttgaactatccaaagatcaataggaggttgtgtgacgtgatggagctcttgtcctggaagcaacccaagtgcccccaattgtacatatacagctccgccgacagggtgatcccagcgaaatcagtggaggcattcatcgacggccagcggaaagccgggcatgaggtgagggcctgcgacttcgtgtcatcgccccatgtggaccattaccggagcaatcctgggctgtatagctctcagctggccaacttcttggaggattgtgtgcttgccaagcgctgtgagggtgcttgcacatcatgattgtctcttttatttgttcctggtcttgaattggaatgcaccagggacactgacatacgtgggttatacatgattttgttctctccttgttttaacggtctttgtgggtgacttttttttccccctcttgtaactcttgtctttgtggttggagtctgggcgcacaattgtaaaaacgtgtgaggagaaataaccaaatgaaaggagaggaaattcttttttttttatccactgagactgactgatagcctgaattacattttgattatgttactcgacctgtatggaatgatgtgcacagtgaatttggacctgtatggaatgattgaatgatgtgcacagtgaatttgtg

SEQ ID NO: 61384 - DNA, 4512 bp, Zea Mays
atggccgccgctaggatcgccgcctgcaccacctccgcccgcaccgccctcgccttggcagacgaccccgcgccgccggacacgctggacgtggtgcgccggcagcgccagctcctacgccgcgccgcggccctctgcctcgaccccatcgccgaggagtccgacgttatttgccccctcccagtccctcgcatggccgttttttcagcgtcgaaggcggtctcggatgaatccgctttccgtgtggccggtagagtcttcgtcttcgtctcgtctcgtctcgtcccaaacacgcgaacgcgacacgccgacacccgtatcgtaccacctaacttttgctccgagatctcctcctcccgtctcatcagtcttttccaatcaatcaccagctcaaacttgtacccaaaaccctacaccggagggagagggatggtcaagaaagccgtctccaccgcgccagcagacgccgaggccgacgagcgccgccgcctccgctcgctcgccttctccaacggcctgctccagcgaggcgaccccgcggcgccgcgggcgccgctcgcgccggcggctgccgtcacgcgcctacagggccgcgacgtcgtccgccgtggcggccagcgaaagagccgctacctcttctccttccctggcctcctcgcgccagcagcctcgggtggccgggtcggagagctcgccgacctcgggaccaagaaccccctgctgtacctcgagttcccacagggaaggatgaagctcttcgggacgcacgtttaccccaagaacaagtacctcacgctgcagatgaccaggtcggccaagggcgtcgtctgtgaggacgtctttgagagcctgattgtgttttctgaagcctggtgggtgggaacaaaagaagataatccggaagagctcaaacttgagtttccaaaagaattccaaaatgatggcacgacagcagactgtgatttcagaggtggtgcaggtggtgccatcgatgaagcaactggaagcaaagctggaaaggaaattgcagaacctcgttccccaaagtttgcatctgatgacgatgctcctgaggattcaaatcataaggatgagaataacacacagactatgagtggaacaccagttagacagtctgctaggaatgcagggaaaaccttgaaaaggtacacagacttatcttctggaggtgaatcgtctgacaataataatgaaactgatatatctgaggacttggatgataaggaggtggagagtccagaaattaaggacgagattgaaagcgaagatgtcaaacccgcagattcttcagcaatttccctctctagcaagaaggagcctcttgttcaggctactttgtctagcatgtttataagggcagaagaaaaaaagagatctacaaggagtcctaaagggtcccctgcaaccaaaggtgctgctgctaagaagcagcgagcaagtccaatggcaaaacagccagcagggatcaagaaggttagcggaactcggggaaagaaaaaaccaaaggtgggagaagatgaaatcgaagagctctcaagttcctcccaggataacgacgcagatgatgatagtgacgaggactgggccgaataatgcgatggtacagacgacggataggttgggccgttggggaagcatatgcataattgatgtgcggctgaagagaaggatggattgggggatggcacagaaactgcctgttttcatggactggtttggctggtcatgtctgacgacggatctagaatatggaatatcctgatctgttgtcaagctgagtccatgaaacgttggttgatgaaacattagttagtcagaagcgggtttgtttgtagttaggaactaggaacacacacacccgaggttgtgatggggttgcatacttggactagccattcccattcatctgtctgtactctgttcgactgttcctttgtgtggctcacacctgttgtgtttctgatggtggtcatttctccagccaggggcaaagaacacactgcgtttcgctgatcctttaattcagacccatagtccttttttttcttcagcacattctgatgtggctctttgtattgcagactgtatcatggtatcagattggtttcgacttgaaacccctctctcttcattacgcgtgtttctgatcttcttgttttggagtcagatcagatcggaagcaggagaggagaatatccgagatagataccctttccaagaggagagattccgcggggattctgagtagccttcggagttcggagcggtggggctggggcgtgcgggcgcggaccggcctcacctcccttcccctattttggtcctcctccctccccttgcgttcacaggccctatataacattagctagattcctcctccctccttcctcacggctgctgctgccctgccctgccctggtacgcgtccctcccctctcctcgtttcttgcttgcacgcgcgcgccgtgaatcgccacatccccatatccgtacctacccccacgcgttttcattcaaccaatccaatctcttcccggccccctctgctctgcaatctccctcccgtgagggaggtggtggggttcctgctttcctggaacaagcaaatccttgcttgccggttcgtctcccgacgatggtgggagacgaaagcaaaagagaaagcgccgtcctttttccgcccgccgcctcgctttcaattccccaccgccctcccgtgcctactttcgttttccctttctttttttcttctcgcttttccccttctcctacgcctctgcaaattgccgtatgcatagagtaaggaagccgacaccacttggagttgctgccaactaccgggctcggctgtcaaattctctatctggcagccagcccgtgtccaattccaactccaccggtggtaaaccatcgacagcaggagcagggagggcaggctgcacaagaaaagagcatcattcctgctgatcggctcggctccactccaccccgaataaaatggcttccttctcgggacatctccaccgccccctgtccgccatggccgtggccgccttcgccgccgtctcctcccacgagcttcccgacaagctgtcccaccacaggcttcctgatgccagcacaggcacggacgcgctcgcctcgcttccattgaccagacggtgtaccagtacgccaactttgccaaaacctcgggacaggccgatgcgatgcctgcaattccttcctcgccgtccgatgtgctgtaccgctggcacctgccagaccccagggtctatgccgacttccctgacaagtctcagacggtcgtggtccttcttggttggttgggctcaaggcagaagcacctcaagagatatgccgattggtacacctccaggggcttccatgtcgtcactttcaccctcccgatgtctgacattctcagttataaccttggagggaaggctgagaagaacgttgagatgctatctgaacatattgctgactgggtcagggaggagagtgggaagaagattattttccacaccttcagtaatactggttggctttgttatggcgtaattctggagaacttgcaacagcatgatccttcagcagtggacaaaattaaagcttgtgtagtagactcagcacctgttgctgcacctgatcctcaggtttgggctttgggcttctcggctgccctcatgaaaaaacgcagtgtcaccacgaagggactaggttcagatgattcaaggtctgatgtcctagttgtggagtccaacaaggagctcaagctgggggcaacagaggcggttatactgtcagcgttagagagtttctttgacgttgttttgaactatccaaagatcaataggaggttgtgtgacgtgatggagctcttgtcctggaagcaacccaagtgcccccaattgtacatatacagctccgccgacagggtgatcccagcgaaatcagtggaggcattcatcgacggccagcggaaagccgggcatgaggtgagggcctgcgacttcgtgtcatcgccccatgtggaccattaccggagcaatcctgggctgtatagctctcagctggccaacttcttggaggattgtgtgcttgccaagcgctgtgagggtgcttgcacatcatgattgtctcttttatttgttcctggtcttgaattggaatgcaccagggacactgacatacgtgggttatacatgattttgttctctccttgttttaacggtctttgtgggtgacttttttttccccctcttgtaactcttgtctttgtggttggagtctgggcgcacaattgtaaaaacgtgtgaggagaaataaccaaatgaaaggagaggaaattcttttttttttatccactgagactgactgatagcctgaattacattttgattatgttactcgacctgtatggaatgatgtgcacagtgaatttggacctgtatggaatgattgaatgatgtgcacagtgaatttgtg

SEQ ID NO: 61385 - DNA, 4467 bp, Zea Mays
atatattccctcggagcaaagtgttgcggaattcacatcagccagggagaagcccgctgacagctgcaactgcaagccgccacgggctgagctgaggctgtgtcgatccatccgtattcaggaaaacaacgccaatcaatccagtccagaggaagggcgatggccgccgctaggatcgccgcctgcaccacctccgcccgcaccgccctcgccttggcagacgaccccgcgccgccggacacgctggacgtggtgcgccggcagcgccagctcctacgccgcgccgcggccctctgcctcgaccccatcgccgaggagtccgacgttatttgccccctcccagtccctcgcatggccgttttttcagcgtcgaaggcggtctcggatgaatccgctttccgtgtggccggtagagtcttcgtcttcgtctcgtctcgtctcgtcccaaacacgcgaacgcgacacgccgacacccgtatcgtaccacctaacttttgctccgagatctcctcctcccgtctcatcagtcttttccaatcaatcaccagctcaaacttgtacccaaaaccctacaccggagggagagggatggtcaagaaagccgtctccaccgcgccagcagacgccgaggccgacgagcgccgccgcctccgctcgctcgccttctccaacggcctgctccagcgaggcgaccccgcggcgccgcgggcgccgctcgcgccggcggctgccgtcacgcgcctacagggccgcgacgtcgtccgccgtggcggccagcgaaagagccgctacctcttctccttccctggcctcctcgcgccagcagcctcgggtggccgggtcggagagctcgccgacctcgggaccaagaaccccctgctgtacctcgagttcccacagggaaggatgaagctcttcgggacgcacgtttaccccaagaacaagtacctcacgctgcagatgaccaggtcggccaagggcgtcgtctgtgaggacgtctttgagagcctgattgtgttttctgaagcctggtgggtgggaacaaaagaagataatccggaagagctcaaacttgagtttccaaaagaattccaaaatgatggcacgacagcagactgtgatttcagaggtggtgcaggtggtgccatcgatgaagcaactggaagcaaagctggaaaggaaattgcagaacctcgttccccaaagtttgcatctgatgacgatgctcctgaggattcaaatcataaggatgagaataacacacagactatgagtggaacaccagttagacagtctgctaggaatgcagggaaaaccttgaaaaggtacacagacttatcttctggaggtgaatcgtctgacaataataatgaaactgatatatctgaggacttggatgataaggaggtggagagtccagaaattaaggacgagattgaaagcgaagatgtcaaacccgcagattcttcagcaatttccctctctagcaagaaggagcctcttgttcaggctactttgtctagcatgtttataagggcagaagaaaaaaaggcgagagtgcaaaaccatctacctctatctatcactaacagacaaccagcatgtctatagctttaacctaactcgattgcgctgaagcaataccacattctacaaggatgtttctgtgttaaacatgtctatttacatttgttgtcaagaaatttaacacatacttaattcctgttccagagatctacaaggagtcctaaagggtcccctgcaaccaaaggtgctgctgctaagaagcagcgagcaagtccaatggcaaaacagccagcagggatcaagaaggttagcggaactcggggaaagaaaaaaccaaaggtgggagaagatgaaatcgaagagctctcaagttcctcccaggataacgacgcagatgatgatagtgacgaggactgggccgaataatgcgatggtacagacgacggataggttgggccgttggggaagcatatgcataattgatgtgcggctgaagagaaggatggattgggggatggcacagaaactgcctgttttcatggactggtttggctggtcatgtctgacgacggatctagaatatggaatatcctgatctgttgtcaagctgagtccatgaaacgttggttgatgaaacattagttagtcagaagcgggtttgtttgtagttaggaactaggaacacacacacccgaggttgtgatggggttgcatacttggactagccattcccattcatctgtctgtactctgttcgactgttcctttgtgtggctcacacctgttgtgtttctgatggtggtcatttctccagccaggggcaaagaacacactgcgtttcgctgatcctttaattcagacccatagtccttttttttcttcagcacattctgatgtggctctttgtattgcagactgtatcatggtatcagattggtttcgacttgaaacccctctctcttcattacgcgtgtttctgatcttcttgttttggagtcagatcagatcggaagcaggagaggagaatatccgagatagataccctttccaagaggagagattccgcggggattctgagtagccttcggagttcggagcggtggggctggggcgtgcgggcgcggaccggcctcacctcccttcccctattttggtcctcctccctccccttgcgttcacaggccctatataacattagctagattcctcctccctccttcctcacggctgctgctgccctgccctgccctggagtaaggaagccgacaccacttggagttgctgccaactaccgggctcggctgtcaaattctctatctggcagccagcccgtgtccaattccaactccaccggtggtaaaccatcgacagcaggagcagggaggctgcacaagaaaagagcatcattcctgctgatcggctcggctccactccaccccgaataaaatggcttccttctcgggacatctccaccgccccctgtccgccatggccgtggccgccttcgccgccgtctcctcccacgagcttcccgacaagctgtcccaccacaggcttcctgatgccagcacaggcacggacgcgctcgcctcgcttccattgaccagacggtgtaccagtacgccaactttgccaaaacctcgggacaggccgatgcgatgcctgcaattccttcctcgccgtccgatgtgctgtaccgctggcacctgccagaccccagggtctatgccgacttccctgacaagtctcagacggtcgtggtccttcttggttggttgggctcaaggcagaagcacctcaagagatatgccgattggtacacctccaggggcttccatgtcgtcactttcaccctcccgatgtctgacattctcagttataaccttggagggaaggctgagaagaacgttgagatgctatctgaacatattgctgactgggtcagggaggagagtgggaagaagattattttccacaccttcagtaatactggttggctttgttatggcgtaattctggagaacttgcaacagcatgatccttcagcagtggacaaaattaaagcttgtgtagtagactcagcacctgttgctgcacctgatcctcaggtttgggctttgggcttctcggctgccctcatgaaaaaacgcagtgtcaccacgaagggactaggttcagatgattcaaggtctgatgtcctagttgtggagtccaacaaggagctcaagctgggggcaacagaggcggttatactgtcagcgttagagagtttctttgacgttgttttgaactatccaaagatcaataggaggttgtgtgacgtgatggagctcttgtcctggaagcaacccaagtgcccccaattgtacatatacagctccgccgacagggtgatcccagcgaaatcagtggaggcattcatcgacggccagcggaaagccgggcatgaggtgagggcctgcgacttcgtgtcatcgccccatgtggaccattaccggagcaatcctgggctgtatagctctcagctggccaacttcttggaggattgtgtgcttgccaagcgctgtgagggtgcttgcacatcatgattgtctcttttatttgttcctggtcttgaattggaatgcaccagggacactgacatacgtgggttatacatgattttgttctctccttgttttaacggtctttgtgggtgacttttttttccccctcttgtaactcttgtctttgtggttggagtctgggcgcacaattgtaaaaacgtgtgaggagaaataaccaaatgaaaggagaggaaattcttttttttttatccactgagactgactgatagcctgaattacattttgattatgttactcgacctgtatggaatgatgtgcacagtgaatttggacctgtatggaatgattgaatgatgtgcacagtgaatttgtg

SEQ ID NO: 61386 - DNA, 4277 bp, Zea Mays
ataagagtgctcggaccgtgagattatatattccctcggagcaaagtgttgcggaattcacatcagccagggagaagcccgctgacagctgcaactgcaagccgccacgggctgagctgaggctgtgtcgatccatccgtattcaggaaaacaacgccaatcaatccagtccagaggaagggcgatggccgccgctaggatcgccgcctgcaccacctccgcccgcaccgccctcgccttggcagacgaccccgcgccgccggacacgctggacgtggtgcgccggcagcgccagctcctacgccgcgccgcggccctctgcctcgaccccatcgccgaggagtccgacgttatttgccccctcccagtccctcgcatggccgttttttcagcgtcgaaggcggtctcggatgaatccgctttccgtgtggccggtagagtcttcgtcttcgtctcgtctcgtctcgtcccaaacacgcgaacgcgacacgccgacacccgtatcgtaccacctaacttttgctccgagatctcctcctcccgtctcatcagtcttttccaatcaatcaccagctcaaacttgtacccaaaaccctacaccggagggagagggatggtcaagaaagccgtctccaccgcgccagcagacgccgaggccgacgagcgccgccgcctccgctcgctcgccttctccaacggcctgctccagcgaggcgaccccgcggcgccgcgggcgccgctcgcgccggcggctgccgtcacgcgcctacagggccgcgacgtcgtccgccgtggcggccagcgaaagagccgctacctcttctccttccctggcctcctcgcgccagcagcctcgggtggccgggtcggagagctcgccgacctcgggaccaagaaccccctgctgtacctcgagttcccacagggaaggatgaagctcttcgggacgcacgtttaccccaagaacaagtacctcacgctgcagatgaccaggtcggccaagggcgtcgtctgtgaggacgtctttgagagcctgattgtgttttctgaagcctggtgggtgggaacaaaagaagataatccggaagagctcaaacttgagtttccaaaagaattccaaaatgtggtgccatcgatgaagcaactggaagcaaagctggaaaggaaattgcagaacctcgttccccaaagtttgcatctgatgacgatgctcctgaggattcaaatcataaggatgagaataacacacagactatgagtggaacaccagttagacagtctgctaggaatgcagggaaaaccttgaaaaggtacacagacttatcttctggaggtgaatcgtctgacaataataatgaaactgatatatctgaggacttggatgataaggaggtggagagtccagaaattaaggacgagattgaaagcgaagatgtcaaacccgcagattcttcagcaatttccctctctagcaagaaggagcctcttgttcaggctactttgtctagcatgtttataagggcagaagaaaaaaagagatctacaaggagtcctaaagggtcccctgcaaccaaaggtgctgctgctaagaagcagcgagcaagtccaatggcaaaacagccagcagggatcaagaaggttagcggaactcggggaaagaaaaaaccaaaggtgggagaagatgaaatcgaagagctctcaagttcctcccaggataacgacgcagatgatgatagtgacgaggactgggccgaataatgcgatggtacagacgacggataggttgggccgttggggaagcatatgcataattgatgtgcggctgaagagaaggatggattgggggatggcacagaaactgcctgttttcatggactggtttggctggtcatgtctgacgacggatctagaatatggaatatcctgatctgttgtcaagctgagtccatgaaacgttggttgatgaaacattagttagtcagaagcgggtttgtttgtagttaggaactaggaacacacacacccgaggttgtgatggggttgcatacttggactagccattcccattcatctgtctgtactctgttcgactgttcctttgtgtggctcacacctgttgtgtttctgatggtggtcatttctccagccaggggcaaagaacacactgcgtttcgctgatcctttaattcagacccatagtccttttttttcttcagcacattctgatgtggctctttgtattgcagactgtatcatggtatcagattggtttcgacttgaaacccctctctcttcattacgcgtgtttctgatcttcttgttttggagtcagatcagatcggaagcaggagaggagaatatccgagatagataccctttccaagaggagagattccgcggggattctgagtagccttcggagttcggagcggtggggctggggcgtgcgggcgcggaccggcctcacctcccttcccctattttggtcctcctccctccccttgcgttcacaggccctatataacattagctagattcctcctccctccttcctcacggctgctgctgccctgccctgccctggagtaaggaagccgacaccacttggagttgctgccaactaccgggctcggctgtcaaattctctatctggcagccagcccgtgtccaattccaactccaccggtggtaaaccatcgacagcaggagcagggagggcaggctgcacaagaaaagagcatcattcctgctgatcggctcggctccactccaccccgaataaaatggcttccttctcgggacatctccaccgccccctgtccgccatggccgtggccgccttcgccgccgtctcctcccacgagcttcccgacaagctgtcccaccacaggcttcctgatgccagcacaggcacggacgcgctcgcctcgcttccattgaccagacggtgtaccagtacgccaactttgccaaaacctcgggacaggccgatgcgatgcctgcaattccttcctcgccgtccgatgtgctgtaccgctggcacctgccagaccccagggtctatgccgacttccctgacaagtctcagacggtcgtggtccttcttggttggttgggctcaaggcagaagcacctcaagagatatgccgattggtacacctccaggggcttccatgtcgtcactttcaccctcccgatgtctgacattctcagttataaccttggagggaaggctgagaagaacgttgagatgctatctgaacatattgctgactgggtcagggaggagagtgggaagaagattattttccacaccttcagtaatactggttggctttgttatggcgtaattctggagaacttgcaacagcatgatccttcagcagtggacaaaattaaagcttgtgtagtagactcagcacctgttgctgcacctgatcctcaggtttgggctttgggcttctcggctgccctcatgaaaaaacgcagtgtcaccacgaagggactaggttcagatgattcaaggtctgatgtcctagttgtggagtccaacaaggagctcaagctgggggcaacagaggcggttatactgtcagcgttagagagtttctttgacgttgttttgaactatccaaagatcaataggaggttgtgtgacgtgatggagctcttgtcctggaagcaacccaagtgcccccaattgtacatatacagctccgccgacagggtgatcccagcgaaatcagtggaggcattcatcgacggccagcggaaagccgggcatgaggtgagggcctgcgacttcgtgtcatcgccccatgtggaccattaccggagcaatcctgggctgtatagctctcagctggccaacttcttggaggattgtgtgcttgccaagcgctgtgagggtgcttgcacatcatgattgtctcttttatttgttcctggtcttgaattggaatgcaccagggacactgacatacgtgggttatacatgattttgttctctccttgttttaacggtctttgtgggtgacttttttttccccctcttgtaactcttgtctttgtggttggagtctgggcgcacaattgtaaaaacgtgtgaggagaaataaccaaatgaaaggagaggaaattcttttttttttatccactgagactgactgatagcctgaattacattttgattatgttactcgacctgtatggaatgatgtgcacagtgaatttggacctgtatggaatgattgaatgatgtgcacagtgaatttgtg

SEQ ID NO: 61387 - DNA, 3898 bp, Zea Mays
gcaagccaacgtacacatggcagtccaagcaacaaggaaagggaaaggaaatgaaatcctcaagaagtttcctttctccttccttgcttctccaactcattttgctttgccttgccttgcctggctcctctcccctgtatatcttctataaatataagagtgctcggaccgtgagattatatattccctcggagcaaagtgttgcggaattcacatcagccagggagaagcccgctgacagctgcaactgcaagccgccacgggctgagctgaggctgtgtcgatccatccgtattcaggaaaacaacgccaatcaatccagtccagaggaagggcgatggccgccgctaggatcgccgcctgcaccacctccgcccgcaccgccctcgccttggcagacgaccccgcgccgccggacacgctggacgtggtgcgccggcagcgccagctcctacgccgcgccgcggccctctgcctcgaccccatcgccgaggagtccgacgttatttgccccctcccagtccctcgcatggccgttttttcagcgtcgaaggcggtctcggatgaatccgctttccgtgtggccggtagagtcttcgtcttcgtctcgtctcgtctcgtcccaaacacgcgaacgcgacacgccgacacccgtatcgtaccacctaacttttgctccgagatctcctcctcccgtctcatcagtcttttccaatcaatcaccagctcaaacttgtacccaaaaccctacaccggagggagagggatggtcaagaaagccgtctccaccgcgccagcagacgccgaggccgacgagcgccgccgcctccgctcgctcgccttctccaacggcctgctccagcgaggcgaccccgcggcgccgcgggcgccgctcgcgccggcggctgccgtcacgcgcctacagggccgcgacgtcgtccgccgtggcggccagcgaaagagccgctacctcttctccttccctggcctcctcgcgccagcagcctcgggtggccgggtcggagagctcgccgacctcgggaccaagaaccccctgctgtacctcgagttcccacagggaaggatgaagctcttcgggacgcacgtttaccccaagaacaagtacctcacgctgcagatgaccaggtcggccaagggcgtcgtctgtgaggacgtctttgagagcctgattgtgttttctgaagcctggtgggtgggaacaaaagaagataatccggaagagctcaaacttgagtttccaaaagaattccaaaatgatggcacgacagcagactgtgatttcagaggtggtgcaggtggtgccatcgatgaagcaactggaagcaaagctggaaaggaaattgcagaacctcgttccccaaagtttgcatctgatgacgatgctcctgaggattcaaatcataaggatgagaataacacacagactatgagtggaacaccagttagacagtctgctaggaatgcagggaaaaccttgaaaaggtacacagacttatcttctggaggtgaatcgtctgacaataataatgaaactgatatatctgaggacttggatgataaggaggtggagagtccagaaattaaggacgagattgaaagcgaagatgtcaaacccgcagattcttcagcaatttccctctctagcaagaaggagcctcttgttcaggctactttgtctagcatgtttataagggcagaagaaaaaaaggcgagagtgcaaaaccatctacctctatctatcactaacagacaaccagcatgtctatagctttaacctaactcgattgcgctgaagcaataccacattctacaaggatgtttctgtgttaaacatgtctatttacatttgttgtcaagaaatttaacacatacttaattcctgttccagagatctacaaggagtcctaaagggtcccctgcaaccaaaggtgctgctgctaagaagcagcgagcaagtccaatggcaaaacagccagcagggatcaagaaggttagcggaactcggggaaagaaaaaaccaaaggtgggagaagatgaaatcgaagagctctcaagttcctcccaggagtaaggaagccgacaccacttggagttgctgccaactaccgggctcggctgtcaaattctctatctggcagccagcccgtgtccaattccaactccaccggtggtaaaccatcgacagcaggagcagggagggcaggctgcacaagaaaagagcatcattcctgctgatcggctcggctccactccaccccgaataaaatggcttccttctcgggacatctccaccgccccctgtccgccatggccgtggccgccttcgccgccgtctcctcccacgagcttcccgacaagctgtcccaccacaggcttcctgatgccagcacaggcacggacgcgctcgcctcgcttccattgaccaggtcagatgttcccgcagcgccttcggcatctgccctttctggcgcgcagctattgccacgggacctccacagcttgcgtctgctgaaggcgcccttcgcgtctgtgccggtcatgcagacggtgtaccagtacgccaactttgccaaaacctcgggacaggccgatgcgatgcctgcaattccttcctcgccgtccgatgtgctgtaccgctggcacctgccagaccccagggtctatgccgacttccctgacaagtctcagacggtcgtggtccttcttggttggttgggctcaaggcagaagcacctcaagagatatgccgattggtacacctccaggggcttccatgtcgtcactttcaccctcccgatgtctgacattctcagttataaccttggagggaaggctgagaagaacgttgagatgctatctgaacatattgctgactgggtcagggaggagagtgggaagaagattattttccacaccttcagtaatactggttggctttgttatggcgtaattctggagaacttgcaacagcatgatccttcagcagtggacaaaattaaagcttgtgtagtagactcagcacctgttgctgcacctgatcctcaggtttgggctttgggcttctcggctgccctcatgaaaaaacgcagtgtcaccacgaagggactaggttcagatgattcaaggtctgatgtcctagttgtggagtccaacaaggagctcaagctgggggcaacagaggcggttatactgtcagcgttagagagtttctttgacgttgttttgaactatccaaagatcaataggaggttgtgtgacgtgatggagctcttgtcctggaagcaacccaagtgcccccaattgtacatatacagctccgccgacagggtgatcccagcgaaatcagtggaggcattcatcgacggccagcggaaagccgggcatgaggtgagggcctgcgacttcgtgtcatcgccccatgtggaccattaccggagcaatcctgggctgtatagctctcagctggccaacttcttggaggattgtgtgcttgccaagcgctgtgagggtgcttgcacatcatgattgtctcttttatttgttcctggtcttgaattggaatgcaccagggacactgacatacgtgggttatacatgattttgttctctccttgttttaacggtctttgtgggtgacttttttttccccctcttgtaactcttgtctttgtggttggagtctgggcgcacaattgtaaaaacgtgtgaggagaaataaccaaatgaaaggagaggaaattcttttttttttatccactgagactgactgatagcctgaattacattttgattatgttactcgacctgtatggaatgatgtgcacagtgaatttggacctgtatggaatgattgaatgatgtgcacagtgaatttgtg

SEQ ID NO: 61388 - DNA, 4525 bp, Zea Mays
gaaagactggtggtggtgacgttgaagctcaagctagcgtgtggtgtgcaatggcaacacctgcaacaagtagcgtacctagattcaacggcctcccctgtccatatgtatgtatcactgtccttgagcagcaagccaacgtacacatggcagtccaagcaacaaggaaagggaaaggaaatgaaatcctcaagaagtttcctttctccttccttgcttctccaactcattttgctttgccttgccttgcctggctcctctcccctgtatatcttctataaatataagagtgctcggaccgtgagattatatattccctcggagcaaagtgttgcggaattcacatcagccagggagaagcccgctgacagctgcaactgcaagccgccacgggctgagctgaggctgtgtcgatccatccgtattcaggaaaacaacgccaatcaatccagtccagaggaagggcgatggccgccgctaggatcgccgcctgcaccacctccgcccgcaccgccctcgccttggcagacgaccccgcgccgccggacacgctggacgtggtgcgccggcagcgccagctcctacgccgcgccgcggccctctgcctcgaccccatcgccgaggagtccgacgttatttgccccctcccagtccctcgcatggccgttttttcagcgtcgaaggcggtctcggatgaatccgctttccgtgtggccggtagagtcttcgtcttcgtctcgtctcgtctcgtcccaaacacgcgaacgcgacacgccgacacccgtatcgtaccacctaacttttgctccgagatctcctcctcccgtctcatcagtcttttccaatcaatcaccagctcaaacttgtacccaaaaccctacaccggagggagagggatggtcaagaaagccgtctccaccgcgccagcagacgccgaggccgacgagcgccgccgcctccgctcgctcgccttctccaacggcctgctccagcgaggcgaccccgcggcgccgcgggcgccgctcgcgccggcggctgccgtcacgcgcctacagggccgcgacgtcgtccgccgtggcggccagcgaaagagccgctacctcttctccttccctggcctcctcgcgccagcagcctcgggtggccgggtcggagagctcgccgacctcgggaccaagaaccccctgctgtacctcgagttcccacagggaaggatgaagctcttcgggacgcacgtttaccccaagaacaagtacctcacgctgcagatgaccaggtcggccaagggcgtcgtctgtgaggacgtctttgagagcctgattgtgttttctgaagcctggtgggtgggaacaaaagaagataatccggaagagctcaaacttgagtttccaaaagaattccaaaatgatggcacgacagcagactgtgatttcagaggtggtgcaggtggtgccatcgatgaagcaactggaagcaaagctggaaaggaaattgcagaacctcgttccccaaagtttgcatctgatgacgatgctcctgaggattcaaatcataaggatgagaataacacacagactatgagtggaacaccagttagacagtctgctaggaatgcagggaaaaccttgaaaaggtacacagacttatcttctggaggtgaatcgtctgacaataataatgaaactgatatatctgaggacttggatgataaggaggtggagagtccagaaattaaggacgagattgaaagcgaagatgtcaaacccgcagattcttcagcaatttccctctctagcaagaaggagcctcttgttcaggctactttgtctagcatgtttataagggcagaagaaaaaaagagatctacaaggagtcctaaagggtcccctgcaaccaaaggtgctgctgctaagaagcagcgagcaagtccaatggcaaaacagccagcagggatcaagaaggttagcggaactcggggaaagaaaaaaccaaaggtgggagaagatgaaatcgaagagctctcaagttcctcccaggataacgacgcagatgatgatagtgacgaggactgggccgaataatgcgatggtacagacgacggataggttgggccgttggggaagcatatgcataattgatgtgcggctgaagagaaggatggattgggggatggcacagaaactgcctgttttcatggactggtttggctggtcatgtctgacgacggatctagaatatggaatatcctgatctgttgtcaagctgagtccatgaaacgttggttgatgaaacattagttagtcagaagcgggtttgtttgtagttaggaactaggaacacacacacccgaggttgtgatggggttgcatacttggactagccattcccattcatctgtctgtactctgttcgactgttcctttgtgtggctcacacctgttgtgtttctgatggtggtcatttctccagccaggggcaaagaacacactgcgtttcgctgatcctttaattcagacccatagtccttttttttcttcagcacattctgatgtggctctttgtattgcagactgtatcatgatcagatcggaagcaggagaggagaatatccgagatagataccctttccaagaggagagattccgcggggattctgagtagccttcggagttcggagcggtggggctggggcgtgcgggcgcggaccggcctcacctcccttcccctattttggtcctcctccctccccttgcgttcacaggccctatataacattagctagattcctcctccctccttcctcacggctgctgctgccctgccctgccctggagtaaggaagccgacaccacttggagttgctgccaactaccgggctcggctgtcaaattctctatctggcagccagcccgtgtccaattccaactccaccggtggtaaaccatcgacagcaggagcagggagggcaggctgcacaagaaaagagcatcattcctgctgatcggctcggctccactccaccccgaataaaatggcttccttctcgggacatctccaccgccccctgtccgccatggccgtggccgccttcgccgccgtctcctcccacgagcttcccgacaagctgtcccaccacaggcttcctgatgccagcacaggcacggacgcgctcgcctcgcttccattgaccagacggtgtaccagtacgccaactttgccaaaacctcgggacaggccgatgcgatgcctgcaattccttcctcgccgtccgatgtgctgtaccgctggcacctgccagaccccagggtctatgccgacttccctgacaagtctcagacggtcgtggtccttcttggttggttgggctcaaggcagaagcacctcaagagatatgccgattggtacacctccaggggcttccatgtcgtcactttcaccctcccgatgtctgacattctcagttataaccttggagggaaggctgagaagaacgttgagatgctatctgaacatattgctgactgggtcagggaggagagtgggaagaagattattttccacaccttcagtaatactggttggctttgttatggcgtaattctggagaacttgcaacagcatgatccttcagcagtggacaaaattaaagcttgtgtagtagactcagcacctgttgctgcacctgatcctcaggtttgggctttgggcttctcggctgccctcatgaaaaaacgcagtgtcaccacgaagggactaggttcagatgattcaaggtctgatgtcctagttgtggagtccaacaaggagctcaagctgggggcaacagaggcggttatactgtcagcgttagagagtttctttgacgttgttttgaactatccaaagatcaataggaggttgtgtgacgtgatggagctcttgtcctggaagcaacccaagtgcccccaattgtacatatacagctccgccgacagggtgatcccagcgaaatcagtggaggcattcatcgacggccagcggaaagccgggcatgaggtgagggcctgcgacttcgtgtcatcgccccatgtggaccattaccggagcaatcctgggctgtatagctctcagctggccaacttcttggaggattgtgtgcttgccaagcgctgtgagggtgcttgcacatcatgattgtctcttttatttgttcctggtcttgaattggaatgcaccagggacactgacatacgtgggttatacatgattttgttctctccttgttttaacggtctttgtgggtgacttttttttccccctcttgtaactcttgtctttgtggttggagtctgggcgcacaattgtaaaaacgtgtgaggagaaataaccaaatgaaaggagaggaaattcttttttttttatccactgagactgactgatagcctgaattacattttgattatgttactcgacctgtatggaatgatgtgcacagtgaatttggacctgtatggaatgattgaatgatgtgcacagtgaatttgtg

SEQ ID NO: 61389 - DNA, 1395 bp, Zea Mays
tttcttttagagtagaaatttagagttatatgagtgcggatagcctaacgcccgaggcgccgacggctgctccctggccgtcctcggaagcgcggcggccaggcgctgaggcgcaccacgccacgccggcggtgggacggaggagaggccggaagttgctggctcaagatatctgacatcaaaagggcaaacagtttggtaactgacagccagatgtttgcacacaaatcgctgctcatacctctaccaggaatgcccatgccatccctgaatgcttgtggtcaaagaacgataagaacgtgtgctccaaaccatcggcaaaagagagacgcgcccaagtctcgtcagcagggtgcgtcatctgcaatgaataccttgcagagatactatggcctaacaccacctcagaaaggaggaaataccatggatagcagcactgaactgtctgtgtaccataagggcggcggcttccagagtaacctcagcgaaacattgctcaatccttccgcagctccaggcaccgacagcagctggaattttgaagcgctaggcttttcagcgaccgagggcgatggcggggcaccgaaaccagagcaagatggttctatgcggcggcgacagaaagtggaagcagagtctaacgcccagggtgattttctagtgaaggcgatcaagagtctgttgatttccagcgtccgtctagacacgtatgcaggcagcccaggttccagccagaagagcggcttcagatctgtgactgtgaggaagtccccgagcgcgcccagctttgcggatgctgacaatggagtctctatgtggtcaagttccaagtggacgttcagccatgactccttcacccgaccgttgcttgatggcctgcccaaaccagcgtcagctcggaggaccaaccaaaaccgcgttggactgaaactgaactgaatacacacatgtttgagcgtctcctttgatgaacgacgagctgtggcgtgactaggcgactgacttggcagcagagcatatctgtctgcagctctggtgttagcacaattgattggcttgtacaactcctacaaaagagaagagttacgatggagcctagctacatgtaatgtatacaacatgcatacatgcatgtgttgatggaatgaattgtattgtatcccatcccaggcagtgctacacacagatattctgtctgctgtgtgatggggtgaatttggtttcagttactccctaaatcaaatggaagttcttcttttttttttcccactgtggtttggttttcgttattattattatactaggtcagtacccgtgcgttgcaacgggaacatataataccatgataacttatatacaaaatgtgtcttatattgttataagaaaatatttcat

SEQ ID NO: 61390 - DNA, 4208 bp, Zea Mays
ctaggataaaatatttcttttagagtacgaatttagagtagtatgagtgcgtaaaaatctgctgcaacgttgcaccttaccgcccatcttaaattaaaggaagacatgaaaaacgctacttctagagctactccaaatctccctcctcccgtcatggaaacttgtgcgctgacagcgtgaggcgatgtggctgtacgtgtgtggtagcgtggtagaaagaaatcatataatatatggtagttggtatagagttgagatatgaagtagatatgactgcggagaattgtagtatagagtaaaaaattttgctgactaggtcagaatatttcttttagagtagaaatttagagttatatgagtgcggatagcctaacgcccgaggcgccgacggctgctccctggccgtcctcggaagcgcggcggccaggcgctgaggcgcaccacgccacgccggcggtgggacggaggagaggccggaagttgctggctcaagatactcttcctttatcatgtccggcgagatgaggccacagcagctgggggcgatgcggcgtgccatctggaggagctggcctatcctgtgcttgcagtcacagcacaggcttctaccatctttctgtgcctcaaccaaggccgccacgatggccgcctcgtctctgccaccaccaactcatcataagaagaaggacacggtcatcgtcatctctggtcctactggtgctggaaagagcaggctggcgctggaggtggccaggaggctcggaggggagatcatcagtgcggactccgtgcaagtctaccgtggccttgacgttggttctgccaaaccgtccgcggcggagatgagcctagtgccgcatcacttgatcgacatactggacacgtccgacgattactcggctggagcctttttccgcgatgcccggagggcgacgcaggatgttcttgacagaggctgcgtgcccgttatcgcaggagggactgggctgtacctgagatggtacatctatggcaagccgaacgttccacagtcatccatggagtccactttggccgtgtggtctgagctcgctgattttcgggagaacggccagtgggaggaagcggtagagctggtggtgcaggctggtgaccccagagcccgggacttgtctgtcaataactggaacagattgagccgcagcctcgagattatcaggtcatcaggctcccctccttctgccttcgccttaccgtacgatgcattctgtgaacagcatgacactgacctaactgaggctccctcatccgctggaaactacgaggccagggagatggagtatgacttcttctgcattttcctcgcaagtccacgcattgaactgtaccggtcaattgatctgaggtgtgaagaaatgctggttgacacaggcggcttactttcggaagcctcatggctgcttgatatcgggttgcagccacgtatgaactctgcaagtagtgccatcggttacaagcaagccatggagtacctgctgcactgtaggcagaacggaggcgaaagcaccccacaagagttccttgacttccttgccaagtttcagaggacatctaggaacttcgcaaagaggcaacttacctggttccgcaatgagaagatttaccactgggtcgatggctcgaaaccatttgaggcacttgttcaatttgtctgtgatgcttaccatggctgcagtgcaaggatggttcctgaatcacttgaaatgaaaagggaaaattgcgtgctcaaaagccgtgatctcaaaacctatcgctcaatgaacagggtgtttcttgggggtgatgactgctctcacgttttgaattggatcaggagaacacagagcaaatgaaatatagatctactcccttatcatgtttttttcaaacatggaaattgtctagctttttggtgttgaccaattaggacaggagtttagtagatcaagacgcaaataacacatgaatttagtttataggtttttattctgttttctatcatagtgaaaatgccttttcaaagtgccacaatggaacgaaaagtcaggtttctcctttgacatctctccattttgagctttgtaagaagctcggttcctgttttcttaaggcaggtttcttctttgggcatctccctctttgagctttacgtaaatagtagtacctgattttgtaatatcttaatcttgaagtgtgattcgtgcagaattaagctgaggtgtgttgaggacctcttttcatgtgaactgtaccatgaatgctcagtatttgcgattctgcagtagtgcatcgcaactattcatgttttctgtcatgggtattatctgccgtcaacctctgccaatatctggtatgctttttaaacagtcgaagacagtacaagtttggttatttggtctgcagtggttacagaagagatgggaggccaaattaatcagtggcttggtgaaattctggttggacaacgcggtggtcaaaggaggagtggggtcggattgccgggaagcacgtggctattataagctcagcaacccgaaccgcgtaacaaaacaaaagcatttcggcaaacggcaggctgcacctgcaacacaagaaaagaaaaggcgcgccttttctcctctcgttccaccgacggcgacgcaggcctcacccgcaccaaccttcgttctccttccccttctcctccacgcgcgtcaatttgccatcccaggaaggcagaaccccacacctctgatctgctctgcccatcatccagcgcatccccggccctgacttaacttgctgctcacctcgccatgggaatctcccaccctctctccgacgagtacgacgccctccgcggcgccgtcctctcgccggatacgacgcctccctcatcgccgctcgcccaccgccacctcctggagcacgaggttactaggatggacacgctcgccggcatcgccatcaagtacggcgtcgagatatctgacatcaaaagggcaaacagtttggtaactgacagccagatgtttgcacacaaatcgctgctcatacctctaccaggaatgcccatgccatccctgaatgcttgtggtcaaagaacgataagaacgtgtgctccaaaccatcggcaaaagagagacgcgcccaagtctcgtcagcagggtgcgtcatctgcaatgaataccttgcagagatactatggcctaacaccacctcagaaaggaggaaataccatggatagcagcactgaactgtctgtgtaccataagggcggcggcttccagagtaacctcagcgaaacattgctcaatccttccgcagctccaggcaccgacagcagctggaattttgaagcgctaggcttttcagcgaccgagggcgatggcggggcaccgaaaccagagcaagatggttctatgcggcggcgacagaaagtggaagcagagtctaacgcccagggtgattttctagtgaaggcgatcaagagtctgttgatttccagcgtccgtctagacacgtatgcaggcagcccaggttccagccagaagagcggcttcagatctgtgactgtgaggaagtccccgagcgcgcccagctttgcggatgctgacaatggagtctctatgtggtcaagttccaagtggacgttcagccatgactccttcacccgaccgttgcttgatggcctgcccaaaccagcgtcagctcggaggaccaaccaaaaccgcgttggactgaaactgaactgaatacacacatgtttgagcgtctcctttgatgaacgacgagctgtggcgtgactaggcgactgacttggcagcagagcatatctgtctgcagctctggtgttagcacaattgattggcttgtacaactcctacaaaagagaagagttacgatggagcctagctacatgtaatgtatacaacatgcatacatgcatgtgttgatggaatgaattgtattgtatcccatcccaggcagtgctacacacagatattctgtctgctgtgtgatggggtgaatttggtttcagttactccctaaatcaaatggaagttcttcttttttttttcccactgtggtttggttttcgttattattattatactaggtcagtacccgtgcgttgcaacgggaacatataataccatgataacttatatacaaaatgtgtcttatattgttataagaaaatatttcat

SEQ ID NO: 61391 - DNA, 3801 bp, Zea Mays
atccctctctgcccttgaagcttaccgagttgaacctgtagttgaaatcttcgtcctctgcggaagggatggagcgagggaaccagatactcttcctttatcatgtccggcgagatgaggccacagcagctgggggcgatgcggcgtgccatctggaggagctggcctatcctgtgcttgcagtcacagcacaggcttctaccatctttctgtgcctcaaccaaggccgccacgatggccgcctcgtctctgccaccaccaactcatcataagaagaaggacacggtcatcgtcatctctggtcctactggtgctggaaagagcaggctggcgctggaggtggccaggaggctcggaggggagatcatcagtgcggactccgtgcaagtctaccgtggccttgacgttggttctgccaaaccgtccgcggcggagatgagcctagtgccgcatcacttgatcgacatactggacacgtccgacgattactcggctggagcctttttccgcgatgcccggagggcgacgcaggatgttcttgacagaggctgcgtgcccgttatcgcaggagggactgggctgtacctgagatggtacatctatggcaagccgaacgttccacagtcatccatggagtccactttggccgtgtggtctgagctcgctgattttcgggagaacggccagtgggaggaagcggtagagctggtggtgcaggctggtgaccccagagcccgggacttgtctgtcaataactggaacagattgagccgcagcctcgagattatcaggtcatcaggctcccctccttctgccttcgccttaccgtacgatgcattctgtgaacagcatgacactgacctaactgaggctccctcatccgctggaaactacgaggccagggagatggagtatgacttcttctgcattttcctcgcaagtccacgcattgaactgtaccggtcaattgatctgaggtgtgaagaaatgctggttgacacaggcggcttactttcggaagcctcatggctgcttgatatcgggttgcagccacgtatgaactctgcaagtagtgccatcggttacaagcaagccatggagtacctgctgcactgtaggcagaacggaggcgaaagcaccccacaagagttccttgacttccttgccaagtttcagaggacatctaggaacttcgcaaagaggcaacttacctggttccgcaatgagaagatttaccactgggtcgatggctcgaaaccatttgaggcacttgttcaatttgtctgtgatgcttaccatggctgcagtgcaaggatggttcctgaatcacttgaaatgaaaagggaaaattgcgtgctcaaaagccgtgatctcaaaacctatcgctcaatgaacagggtgtttcttgggggtgatgactgctctcacgttttgaattggatcaggagaacacagagcaaatgaaatatagatctactcccttatcatgtttttttcaaacatggaaattgtctagctttttggtgttgaccaattaggacaggagtttagtagatcaagacgcaaataacacatgaatttagtttataggtttttattctgttttctatcatagtgaaaatgccttttcaaagtgccacaatggaacgaaaagtcaggtttctcctttgacatctctccattttgagctttgtaagaagctcggttcctgttttcttaaggcaggtttcttctttgggcatctccctctttgagctttacgtaaatagtagtacctgattttgtaatatcttaatcttgaagtgtgattcgtgcagaattaagctgaggtgtgttgaggacctcttttcatgtgaactgtaccatgaatgctcagtatttgcgattctgcagtagtgcatcgcaactattcatgttttctgtcatgggtattatctgccgtcaacctctgccaatatctggtatgctttttaaacagtcgaagacagtacaagtttggttatttggtctgcagtggttacagaagagatgggaggccaaattaatcagtggcttggtgaaattctggttggacaacgcggtggtcaaaggaggagtggggtcggattgccgggaagcacgtggctattataagctcagcaacccgaaccgcgtaacaaaacaaaagcatttcggcaaacggcaggctgcacctgcaacacaagaaaagaaaaggcgcgccttttctcctctcgttccaccgacggcgacgcaggcctcacccgcaccaaccttcgttctccttccccttctcctccacgcgcgtcaatttgccatcccaggaaggcagaaccccacacctctgatctgctctgcccatcatccagcgcatccccggccctgacttaacttgctgctcacctcgccatgggaatctcccaccctctctccgacgagtacgacgccctccgcggcgccgtcctctcgccggatacgacgcctccctcatcgccgctcgcccaccgccacctcctggagcacgaggttactaggatggacacgctcgccggcatcgccatcaagtacggcgtcgagatatctgacatcaaaagggcaaacagtttggtaactgacagccagatgtttgcacacaaatcgctgctcatacctctaccaggaatgcccatgccatccctgaatgcttgtggtcaaagaacgataagaacgtgtgctccaaaccatcggcaaaagagagacgcgcccaagtctcgtcagcagggtgcgtcatctgcaatgaataccttgcagagatactatggcctaacaccacctcagaaaggaggaaataccatggatagcagcactgaactgtctgtgtaccataagggcggcggcttccagagtaacctcagcgaaacattgctcaatccttccgcagctccaggcaccgacagcagctggaattttgaagcgctaggcttttcagcgaccgagggcgatggcggggcaccgaaaccagagcaagatggttctatgcggcggcgacagaaagtggaagcagagtctaacgcccagggtgattttctagtgaaggcgatcaagagtctgttgatttccagcgtccgtctagacacgtatgcaggcagcccaggttccagccagaagagcggcttcagatctgtgactgtgaggaagtccccgagcgcgcccagctttgcggatgctgacaatggagtctctatgtggtcaagttccaagtggacgttcagccatgactccttcacccgaccgttgcttgatggcctgcccaaaccagcgtcagctcggaggaccaaccaaaaccgcgttggactgaaactgaactgaatacacacatgtttgagcgtctcctttgatgaacgacgagctgtggcgtgactaggcgactgacttggcagcagagcatatctgtctgcagctctggtgttagcacaattgattggcttgtacaactcctacaaaagagaagagttacgatggagcctagctacatgtaatgtatacaacatgcatacatgcatgtgttgatggaatgaattgtattgtatcccatcccaggcagtgctacacacagatattctgtctgctgtgtgatggggtgaatttggtttcagttactccctaaatcaaatggaagttcttcttttttttttcccactgtggtttggttttcgttattattattatactaggtcagtacccgtgcgttgcaacgggaacatataataccatgataacttatatacaaaatgtgtcttatattgttataagaaaatatttcat

SEQ ID NO: 61392 - DNA, 3692 bp, Zea Mays
atctgttcaccgtgttgaaagtcccagtgtagtagcttgcaccgctaatgccacttgaaactgttctgcatcacaaacaggaacaaggtattgcacttgaggagaggagaggagaggaggtgtctcatgtctgtctatgcactgctaactgatgagcagtacctgttcagagtagctgaaacggtctcctgcacggcagccttccagttgtatccacggttagagatactcttcctttatcatgtccggcgagatgaggccacagcagctgggggcgatgcggcgtgccatctggaggagctggcctatcctgtgcttgcagtcacagcacaggcttctaccatctttctgtgcctcaaccaaggccgccacgatggccgcctcgtctctgccaccaccaactcatcataagaagaaggacacggtcatcgtcatctctggtcctactggtgctggaaagagcaggctggcgctggaggtggccaggaggctcggaggggagatcatcagtgcggactccgtgcaagtctaccgtggccttgacgttggttctgccaaaccgtccgcggcggagatgagcctagtgccgcatcacttgatcgacatactggacacgtccgacgattactcggctggagcctttttccgcgatgcccggagggcgacgcaggatgttcttgacagaggctgcgtgcccgttatcgcaggagggactgggctgtacctgagatggtacatctatggcaagccgaacgttccacagtcatccatggagtccactttggccgtgtggtctgagctcgctgattttcgggagaacggccagtgggaggaagcggtagagctggtggtgcaggctggtgaccccagagcccgggacttgtctgtcaataactggaacagattgagccgcagcctcgagattatcaggtcatcaggctcccctccttctgccttcgccttaccgtacgatgcattctgtgaacagcatgacactgacctaactgaggctccctcatccgctggaaactacgaggccagggagatggagtatgacttcttctgcattttcctcgcaagtccacgcattgaactgtaccggtcaattgatctgaggtgtgaagaaatgctggttgacacaggcggcttactttcggaagcctcatggctgcttgatatcgggttgcagccacgtatgaactctgcaagtagtgccatcggttacaagcaagccatggagtacctgctgcactgtaggcagaacggaggcgaaagcaccccacaagagttccttgacttccttgccaagtttcagaggacatctaggaacttcgcaaagaggcaacttacctggttccgcaatgagaagatttaccactgggtcgatggctcgaaaccatttgaggcacttgttcaatttgtctgtgatgcttaccatggctgcagtgcaaggatggttcctgaatcacttgaaatgaaaagggaaaattgcgtgctcaaaagccgtgatctcaaaacctatcgctcaatgaacagggtgtttcttgggggtgatgactgctctcacgttttgaattggatcaggagaacacagagcaaatgaaatatagatctactcccttatcatgtttttttcaaacatggaaattgtctagctttttggtgttgaccaattaggacaggagtttagtagatcaagacgcaaataacacatgaatttagtttataggtttttattctgttttctatcatagtgaaaatgccttttcaaagtgccacaatggaacgaaaagtcaggtttctcctttgacatctctccattttgagctttgtaagaagctcggttcctgttttcttaaggcaggtttcttctttgggcatctccctctttgagctttacgtaaatagtagtacctgattttgtaatatcttaatcttgaagtgtgattcgtgcagaattaagctgaggtgtgttgaggacctcttttcatgtgaactgtaccatgaatgctcagtatttgcgattctgcagtagtgcatcgcaactattcatgttttctgtcatgggtattatctgccgtcaacctctgccaatatctggtatgctttttaaacagtcgaagacagtacaagtttggttatttggtctgcagtggttacagaagagatgggaggccaaattaatcagattatataatccgaattattgaaagggaaatgtgccattgggctatttctaagtattttggtgatttagtgttcaacacaagtgcctaagtgtaaaatggtggacaaagtacaaatcaaggataaaggtatgtttctcagacttagtacattgttttagagactaatgtattgtgtctaagtgctggaaacaggaaaaatccaattggaaatgtcttggctcgggcagccaagactctgctcagtctgggtgcaccggacagtgtccggtggtgcaccggacagtgtccggtgcgccaggctggatcgagcgaagtggccgctctcgggaattcactggcgacgtacgactataattcaccggactgtccggtgtgcaccggactgtccggtgagccaacggtcggccgcgcaatctgcgcgggacacgtggccgagccaacggctagaagggggcaccggactgtctggtgtgcaccggacatgtccggtgcgccaacggctcccaaatccgcaacggtcggcttcgctatttaaggaaggaaatcgggcaccggacagtgtccggtgtgcaccggacagtgtccggtgcgccactcgacagaaggcaagatcagccttcctagattgctctcaacggctcctagctgccttggggctataaaagggtcccctaggcgcatggaggaggacaccaagattcctacaacattcctaagcaccaagacatcgattccgcgcctttgattctttgctatagcaattagagctctagttgagtggtgaactcattgagttgtgttgtgagctctcgttgcgacttgcgtgcgtggtgttgctgtgatttcttgtcttgagtgtgttgctaatccctcccttgctccatgcttctttgtgaacttcaagtgtaagggcgagaggctccaagttgtggagattcctcgcaaacgggattgagaaaagcaagcaaaacaccgtggtattcaagtgggtctttggaccgcttgagaggggttgattgcaaccctcgtccgttgggacgccacaacgtggagtaggcaagcgttggtcttggccgaaccacgggataaccaccgtgccatctctgtgattgatttcatgtggttattgtgttttgttgagattcctctctagccacttggcatttactgtgctaacacctaacaaagtttttgtggcttaagttttcaagttttacaggatcacctattcaccccccctctaggtgctctcaattggtatcagagccgttatcttcacaaagggactaaccgcccgaagagatggatcctaaggggaagggtatcgtgatcaacgataaagagaaggagtctttcgtcaacgagccaaaggatgacaagcctaccgactcgggctcgggtcatagacgaaaagatgggaagaagaagaagacaaggcgcattaaggagatcgtctaatacgacgacagtgatgagtccacttcttcccacaaggacaacgac

SEQ ID NO: 61393 - DNA, 975 bp, Zea Mays
ctccccggatccggtgcccctgcttgtcgtgcggtctccacccccgacaggcaccgaacattgctccacccagcccccgccccaaccctaaaactcctcccagccgccgcctaccgtgctctcaatggtcaccaacgcctcacacacacacggagagagagagagagagagagagagagagagagaaggggagggtaggcatcgaaattccgaatccccacctcgtcgctcccaccaccaccgcggattgcgtcccgttcgattgcgcaggagtttttgttccaggatgagcaccgagtcaggggagctgctcgggatcgaccccgtcgagctccggttcccattcgagttaaataagcagatctcctgcacgctgcaactcacgaacaagacagacaagcaggtcgcgttcaaggtcaagacaacgagccccaaaaagtactgtgttcggccaaacaatagcatggtggtgccccggtccaaagctgacattgttgtcacaatgcaagcgcaatgggacgcgccaccatacatgcattgcaaggacaaattccttgtgcagagcgccatcatggccaaggagatcatgtcgaaggaagtcactggagacatgtttaccaaagattcaggcaatatagtggatgaagtgaagttgaaggtagtttatacagcgccatcgtcctctcaaagcgagggatttgaggatggtaatctcggcagtttgagttatcaagagcaatcaatacttgaagcaatcaattttgccaaacctggaattggcaaaatggtgctacctggtgactgaatgtattactatggcgcatcacagtgtatgtctgcaattgctctcatatggttatattgctccaggtttgatattgaaacgggactcttgactcgttatttgaaaagtgctcagagaaggccaattgcattaggctcattcttcccagcatatctgacacacctcttcca

SEQ ID NO: 61394 - DNA, 1924 bp, Zea Mays
ggggcagtgagaagggatggcggtggagttggccaagcaattgcttgcggttattggaagctatacaccacctctctgggctaccctcatcgccggggtttttgttatcatctccgtctcgctgtccctgtacttgctgttcaatcatctgtcagcctacaaaaacccagaggaacagaagtttcttgtcggcgtcattctcatggtgccgtgctatgcagtcgagtcgtacatatcactggtaaatccatcaataagtgttgatatcgaaatcatgcgagatggctatgaggcatttgctatgtactgttttgggcgctatctagttgcttgcttaggtggtgaagataggacaattgaatttttgaatagggaaggtggttcaggttctgctgcaccacttttaggacaagcatctgaacaacgatacgtaaaccatccttttccaatgaactacgtgcttaaaccgtggccgctaggcgaatggttctacttggtcatcaaatttgggctagttcagtatatgataataaaatcaatatgtgctattcttgcggtgattcttgaatcctttggagtgtattgtgaaggagagtttaagttgaactgtgggtatagcaatcgcattgctcttcaactggggtttgttgagaggtcctatcgctcaagaactgcagttcaagtcaagtatccaagacttcattatctgcatagagatgggtgttgctgccgttgcccacctgtatgtcttccctgcgaagccgtacgagctgatcggtgatcgtcttgttggagatgtttctgttcttggagactacgcttctgtcgactgccctctagatccagacgaggtcaaggatagcgagcgcccaaccaagttcaggcttccccagccagatgatcatgtccggtgttccactgccataaaagaaagcgttcgcgatgtcgtacttggaggcggtgaatatatcgtgaatgacttgaagttcactgtgaaccacgcggtggaacccatcaatgagaagctgcacatgatatccgagaacataaaaaagcgcgagaagggaaagaagaaaacaaatgacgatagctgcatcggttcacccacatccttgaccagggtcatcagtgggattgatgatcccctcctgaacgggagcctgagtgacaacagtggcccaaagaaagcgcgaaggcagcacaggaaatcaggctatgcaggcgcggagagcggcggagagagcagcgaccatggcctaggtgggtttgagatccgagggaacagatggattactagctagggagtgacaactaagagcaacctgtggagatgctatacaaatgtcacaggagttagcctagccagtgggttcaagtgtaggatgaggtatctggcatgatgttgtagcatgggcaaatcgagatgagtgagcaatcaggttgttgtctgttgattcttttagctgagcgcctgagctgctgaggccttgatcctgtatttaagatgtcaggccttgattctttcagcaagcgttggaaggaaggaagcaatgtgcctgttctgagctcccgtcagcatcacttgtaaagttcttataagtacagactagaactagtcatgcatacaagagaatagacagtcgatgtttctatctgtttttgtttcattctaaggcccttgtcacacgagcaccagaattttttttctttccttttggtaccatgatggtgatggacgtgagagttccttgagatgatcaaagcatctatctttccaattccatgtgtatcctgataactgaagatgatcgtttggttttccttttggtacgcaacatgccaagtgcaggatgaactctgccctgcaagaaaaaccacaggcaagtttgtccgattaacaactatctgcacaggtcataaaaag

SEQ ID NO: 61395 - DNA, 2398 bp, Zea Mays
ctgacaagtacgattccgccacctaatcctctgtatgtaaatgtaatcaagccccacgctccccatggttctcttccaaccccaattaatcctaggcaggcaaagctcgttttttcttgtgcgccggttgattgggctctctgtttgcggagtcttgctctccctctggtcggttttcgttgatccctcctgcattggtttgctccggctcagatccgattctctaggaagagagaccaaagtatcaagtggaacaacagaattttagatttcattccaaacggggcataatcattgaagaccagttaaggggggcagtgagaagggatggcggtggagttggccaagcaattgcttgcggttattggaagctatacaccacctctctgggctaccctcatcgccggggtttttgttatcatctccgtctcgctgtccctgtacttgctgttcaatcatctgtcagcctacaaaaacccagaggaacagaagtttcttgtcggcgtcattctcatggtgccgtgctatgcagtcgagtcggtaagtacatatcactggtaaatccatcaataagtgttgatatcgaaatcatgcgagatggctatgaggcatttgctatgtactgttttgggcgctatctagttgcttgcttaggtggtgaagataggacaattgaatttttgaatagggaaggtggttcaggttctgctgcaccacttttaggacaagcatctgaacaacgatacgtaaaccatccttttccaatgaactacgtgcttaaaccgtggccgctaggcgaatggttctacttggtcatcaaatttgggctagttcagtatatgataataaaatcaatatgtgctattcttgcggtgattcttgaatcctttggagtgtattgtgaaggagagtttaagttgaactgtgggtactcttacacggccgtggttctcaatttcagtcagtcatgggccttatactgtctcgtccagttctacaccgtgataaaggatgagttagctcatataaagcctcttgcgaagtttctgacattcaagtccattgtgttcttaacatggtggcaaggtatagcaatcgcattgctcttcaactggggtttgttgagaggtcctatcgctcaagaactgcagttcaagtcaagtatccaagacttcattatctgcatagagatgggtgttgctgccgttgcccacctgtatgtcttccctgcgaagccgtacgagctgatcggtgatcgtcttgttggagatgtttctgttcttggagactacgcttctgtcgactgccctctagatccagacgaggtcaaggatagcgagcgcccaaccaagttcaggcttccccagccagatgatcatgtccggtgttccactgccataaaagaaagcgttcgcgatgtcgtacttggaggcggtgaatatatcgtgaatgacttgaagttcactgtgaaccacgcggtggaacccatcaatgagaagctgcacatgatatccgagaacataaaaaagcgcgagaagggaaagaagaaaacaaatgacgatagctgcatcggttcacccacatccttgaccagggtcatcagtgggattgatgatcccctcctgaacgggagcctgagtgacaacagtggcccaaagaaagcgcgaaggcagcacaggaaatcaggctatgcaggcgcggagagcggcggagagagcagcgaccatggcctaggtgggtttgagatccgagggaacagatggattactagctagggagtgacaactaagagcaacctgtggagatgctatacaaatgtcacaggagttagcctagccagtgggttcaagtgtaggatgaggtatctggcatgatgttgtagcatgggcaaatcgagatgagtgagcaatcaggttgttgtctgttgattcttttagctgagcgcctgagctgctgaggccttgatcctgtatttaagatgtcaggccttgattctttcagcaagcgttggaaggaaggaagcaatgtgcctgttctgagctcccgtcagcatcacttgtaaagttcttataagtacagactagaactagtcatgcatacaagagaatagacagtcgatgtttctatctgtttttgtttcattctaaggcccttgtcacacgagcaccagaattttttttctttccttttggtaccatgatggtgatggacgtgagagttccttgagatgatcaaagcatctatctttccaattccatgtgtatcctgataactgaagatgatcgtttggttttccttttggtacgcaacatgccaagtgcaggatgaactctgccctgcaagaaaaaccacaggcaagtttgtccgattaacaactatctgcacaggtcataaaaag

SEQ ID NO: 61396 - DNA, 2485 bp, Zea Mays
gtctccctgacaagtacgattccgccacctaatcctctgtatgtaaatgtaatcaagccccacgctccccatggttctcttccaaccccaattaatcctaggcaggcaaagctcgttttttcttgtgcgccggttgattgggctctctgtttgcggagtcttgctctccctctggtcggttttcgttgatccctcctgcattggtttgctccggctcagatccgattctctaggaagagagaccaaagtatcaagtggaacaacagaattttaggtactgccgtgccgctcaacaagggaagagcaagagctccagtctctgtctcacttattatgatcctctatgaaccataccctgcaacagatttcattccaaacggggcataatcattgaagaccagttaaggggggcagtgagaagggatggcggtggagttggccaagcaattgcttgcggttattggaagctatacaccacctctctgggctaccctcatcgccggggtttttgttatcatctccgtctcgctgtccctgtacttgctgttcaatcatctgtcagcctacaaaaacccagaggaacagaagtttcttgtcggcgtcattctcatggtgccgtgctatgcagtcgagtcgtacatatcactggtaaatccatcaataagtgttgatatcgaaatcatgcgagatggctatgaggcatttgctatgtactgttttgggcgctatctagttgcttgcttaggtggtgaagataggacaattgaatttttgaatagggaaggtggttcaggttctgctgcaccacttttaggacaagcatctgaacaacgatacgtaaaccatccttttccaatgaactacgtgcttaaaccgtggccgctaggcgaatggttctacttggtcatcaaatttgggctagttcaatgataataaaatcaatatgtgctattcttgcggtgattcttgaatcctttggagtgtattgtgaaggagagtttaagttgaactgtgggtactcttacacggccgtggttctcaatttcagtcagtcatgggccttatactgtctcgtccagttctacaccgtgataaaggatgagttagctcatataaagcctcttgcgaagtttctgacattcaagtccattgtgttcttaacatggtggcaaggtatagcaatcgcattgctcttcaactggggtttgttgagaggtcctatcgctcaagaactgcagttcaagtcaagtatccaagacttcattatctgcatagagatgggtgttgctgccgttgcccacctgtatgtcttccctgcgaagccgtacgagctgatcggtgatcgtcttgttggagatgtttctgttcttggagactacgcttctgtcgactgccctctagatccagacgaggtcaaggatagcgagcgcccaaccaagttcaggcttccccagccagatgatcatgtccggtgttccactgccataaaagaaagcgttcgcgatgtcgtacttggaggcggtgaatatatcgtgaatgacttgaagttcactgtgaaccacgcggtggaacccatcaatgagaagctgcacatgatatccgagaacataaaaaagcgcgagaagggaaagaagaaaacaaatgacgatagctgcatcggttcacccacatccttgaccagggtcatcagtgggattgatgatcccctcctgaacgggagcctgagtgacaacagtggcccaaagaaagcgcgaaggcagcacaggaaatcaggctatgcaggcgcggagagcggcggagagagcagcgaccatggcctaggtgggtttgagatccgagggaacagatggattactagctagggagtgacaactaagagcaacctgtggagatgctatacaaatgtcacaggagttagcctagccagtgggttcaagtgtaggatgaggtatctggcatgatgttgtagcatgggcaaatcgagatgagtgagcaatcaggttgttgtctgttgattcttttagctgagcgcctgagctgctgaggccttgatcctgtatttaagatgtcaggccttgattctttcagcaagcgttggaaggaaggaagcaatgtgcctgttctgagctcccgtcagcatcacttgtaaagttcttataagtacagactagaactagtcatgcatacaagagaatagacagtcgatgtttctatctgtttttgtttcattctaaggcccttgtcacacgagcaccagaattttttttctttccttttggtaccatgatggtgatggacgtgagagttccttgagatgatcaaagcatctatctttccaattccatgtgtatcctgataactgaagatgatcgtttggttttccttttggtacgcaacatgccaagtgcaggatgaactctgccctgcaagaaaaaccacaggcaagtttgtccgattaacaactatctgcacaggtcataaaaag

SEQ ID NO: 61397 - DNA, 2292 bp, Zea Mays
tctctccccgccgtccctgtctccctgacaagaagagagaccaaagtatcaagtggaacaacagaattttaggtactgccgtgccgctcaacaagggaagagcaagagctccagtctctgtctcacttattatgatcctctatgaaccataccctgcaacagatttcattccaaacggggcataatcattgaagaccagttaaggggggcagtgagaagggatggcggtggagttggccaagcaattgcttgcggttattggaagctatacaccacctctctgggctaccctcatcgccggggtttttgttatcatctccgtctcgctgtccctgtacttgctgttcaatcatctgtcagcctacaaaaacccagaggaacagaagtttcttgtcggcgtcattctcatggtgccgtgctatgcagtcgagtcggtaagtacatatcactggtaaatccatcaataagtgttgatatcgaaatcatgcgagatggctatgaggcatttgctatgtactgttttgggcgctatctagttgcttgcttaggtggtgaagataggacaattgaatttttgaatagggaaggtggttcaggttctgctgcaccacttttaggacaagcatctgaacaacgatacgtaaaccatccttttccaatgaactacgtgcttaaaccgtggccgctaggcgaatggttctacttggtcatcaaatttgggctagttcagtatatgataataaaatcaatatgtgctattcttgcggtgattcttgaatcctttggagtgtattgtgaaggagagtttaagttgaactgtgggtactcttacacggccgtggttctcaatttcagtcagtcatgggccttatactgtctcgtccagttctacaccgtgataaaggatgagttagctcatataaagcctcttgcgaagtttctgacattcaagtccattgtgttcttaacatggtggcaaggtatagcaatcgcattgctcttcaactggggtttgttgagaggtcctatcgctcaagaactgcagttcaagtcaagtatccaagacttcattatctgcatagagatgggtgttgctgccgttgcccacctgtatgtcttccctgcgaagccgtacgagctgatcggtgatcgtcttgttggagatgtttctgttcttggagactacgcttctgtcgactgccctctagatccagacgaggtcaaggatagcgagcgcccaaccaagttcaggcttccccagccagatgatcatgtccggtgttccactgccataaaagaaagcgttcgcgatgtcgtacttggaggcggtgaatatatcgtgaatgacttgaagttcactgtgaaccacgcggtggaacccatcaatgagaagctgcacatgatatccgagaacataaaaaagcgcgagaagggaaagaagaaaacaaatgacgatagctgcatcggttcacccacatccttgaccagggtcatcagtgggattgatgatcccctcctgaacgggagcctgagtgacaacagtggcccaaagaaagcgcgaaggcagcacaggaaatcaggctatgcaggcgcggagagcggcggagagagcagcgaccatggcctaggtgggtttgagatccgagggaacagatggattactagctagggagtgacaactaagagcaacctgtggagatgctatacaaatgtcacaggagttagcctagccagtgggttcaagtgtaggatgaggtatctggcatgatgttgtagcatgggcaaatcgagatgagtgagcaatcaggttgttgtctgttgattcttttagctgagcgcctgagctgctgaggccttgatcctgtatttaagatgtcaggccttgattctttcagcaagcgttggaaggaaggaagcaatgtgcctgttctgagctcccgtcagcatcacttgtaaagttcttataagtacagactagaactagtcatgcatacaagagaatagacagtcgatgtttctatctgtttttgtttcattctaaggcccttgtcacacgagcaccagaattttttttctttccttttggtaccatgatggtgatggacgtgagagttccttgagatgatcaaagcatctatctttccaattccatgtgtatcctgataactgaagatgatcgtttggttttccttttggtacgcaacatgccaagtgcaggatgaactctgccctgcaagaaaaaccacaggcaagtttgtccgattaacaactatctgcacaggtcataaaaag

SEQ ID NO: 61398 - DNA, 2216 bp, Zea Mays
aaacaatttctctccccgccgtccctgtctccctgacaattgcaggaagagagaccaaagtatcaagtggaacaacagaattttagatttcattccaaacggggcataatcattgaagaccagttaaggggggcagtgagaagggatggcggtggagttggccaagcaattgcttgcggttattggaagctatacaccacctctctgggctaccctcatcgccggggtttttgttatcatctccgtctcgctgtccctgtacttgctgttcaatcatctgtcagcctacaaaaacccagaggaacagaagtttcttgtcggcgtcattctcatggtgccgtgctatgcagtcgagtcggtaagtacatatcactggtaaatccatcaataagtgttgatatcgaaatcatgcgagatggctatgaggcatttgctatgtactgttttgggcgctatctagttgcttgcttaggtggtgaagataggacaattgaatttttgaatagggaaggtggttcaggttctgctgcaccacttttaggacaagcatctgaacaacgatacgtaaaccatccttttccaatgaactacgtgcttaaaccgtggccgctaggcgaatggttctacttggtcatcaaatttgggctagttcagtatatgataataaaatcaatatgtgctattcttgcggtgattcttgaatcctttggagtgtattgtgaaggagagtttaagttgaactgtgggtactcttacacggccgtggttctcaatttcagtcagtcatgggccttatactgtctcgtccagttctacaccgtgataaaggatgagttagctcatataaagcctcttgcgaagtttctgacattcaagtccattgtgttcttaacatggtggcaaggtatagcaatcgcattgctcttcaactggggtttgttgagaggtcctatcgctcaagaactgcagttcaagtcaagtatccaagacttcattatctgcatagagatgggtgttgctgccgttgcccacctgtatgtcttccctgcgaagccgtacgagctgatcggtgatcgtcttgttggagatgtttctgttcttggagactacgcttctgtcgactgccctctagatccagacgaggtcaaggatagcgagcgcccaaccaagttcaggcttccccagccagatgatcatgtccggtgttccactgccataaaagaaagcgttcgcgatgtcgtacttggaggcggtgaatatatcgtgaatgacttgaagttcactgtgaaccacgcggtggaacccatcaatgagaagctgcacatgatatccgagaacataaaaaagcgcgagaagggaaagaagaaaacaaatgacgatagctgcatcggttcacccacatccttgaccagggtcatcagtgggattgatgatcccctcctgaacgggagcctgagtgacaacagtggcccaaagaaagcgcgaaggcagcacaggaaatcaggctatgcaggcgcggagagcggcggagagagcagcgaccatggcctaggtgggtttgagatccgagggaacagatggattactagctagggagtgacaactaagagcaacctgtggagatgctatacaaatgtcacaggagttagcctagccagtgggttcaagtgtaggatgaggtatctggcatgatgttgtagcatgggcaaatcgagatgagtgagcaatcaggttgttgtctgttgattcttttagctgagcgcctgagctgctgaggccttgatcctgtatttaagatgtcaggccttgattctttcagcaagcgttggaaggaaggaagcaatgtgcctgttctgagctcccgtcagcatcacttgtaaagttcttataagtacagactagaactagtcatgcatacaagagaatagacagtcgatgtttctatctgtttttgtttcattctaaggcccttgtcacacgagcaccagaattttttttctttccttttggtaccatgatggtgatggacgtgagagttccttgagatgatcaaagcatctatctttccaattccatgtgtatcctgataactgaagatgatcgtttggttttccttttggtacgcaacatgccaagtgcaggatgaactctgccctgcaagaaaaaccacaggcaagtttgtccgattaacaactatctgcacaggtcataaaaag

SEQ ID NO: 61399 - DNA, 2337 bp, Zea Mays
ggagaaacaatttctctccccgccgtccctgtctccctgacaagcaaagctcgttttttcttgtgcgccggttgattgggctctctgtttgcggagtcttgctctccctctggtcggttttcgttgatccctcctgcattggtttgctccggctcagatccgattctctaggaagagagaccaaagtatcaagtggaacaacagaattttagatttcattccaaacggggcataatcattgaagaccagttaaggggggcagtgagaagggatggcggtggagttggccaagcaattgcttgcggttattggaagctatacaccacctctctgggctaccctcatcgccggggtttttgttatcatctccgtctcgctgtccctgtacttgctgttcaatcatctgtcagcctacaaaaacccagaggaacagaagtttcttgtcggcgtcattctcatggtgccgtgctatgcagtcgagtcgtacatatcactggtaaatccatcaataagtgttgatatcgaaatcatgcgagatggctatgaggcatttgctatgtactgttttgggcgctatctagttgcttgcttaggtggtgaagataggacaattgaatttttgaatagggaaggtggttcaggttctgctgcaccacttttaggacaagcatctgaacaacgatacgtaaaccatccttttccaatgaactacgtgcttaaaccgtggccgctaggcgaatggttctacttggtcatcaaatttgggctagttcagtatatgataataaaatcaatatgtgctattcttgcggtgattcttgaatcctttggagtgtattgtgaaggagagtttaagttgaactgtgggtactcttacacggccgtggttctcaatttcagtcagtcatgggccttatactgtctcgtccagttctacaccgtgataaaggatgagttagctcatataaagcctcttgcgaagtttctgacattcaagtccattgtgttcttaacatggtggcaaggtatagcaatcgcattgctcttcaactggggtttgttgagaggtcctatcgctcaagaactgcagttcaagtcaagtatccaagacttcattatctgcatagagatgggtgttgctgccgttgcccacctgtatgtcttccctgcgaagccgtacgagctgatcggtgatcgtcttgttggagatgtttctgttcttggagactacgcttctgtcgactgccctctagatccagacgaggtcaaggatagcgagcgcccaaccaagttcaggcttccccagccagatgatcatgtccggtgttccactgccataaaagaaagcgttcgcgatgtcgtacttggaggcggtgaatatatcgtgaatgacttgaagttcactgtgaaccacgcggtggaacccatcaatgagaagctgcacatgatatccgagaacataaaaaagcgcgagaagggaaagaagaaaacaaatgacgatagctgcatcggttcacccacatccttgaccagggtcatcagtgggattgatgatcccctcctgaacgggagcctgagtgacaacagtggcccaaagaaagcgcgaaggcagcacaggaaatcaggctatgcaggcgcggagagcggcggagagagcagcgaccatggcctaggtgggtttgagatccgagggaacagatggattactagctagggagtgacaactaagagcaacctgtggagatgctatacaaatgtcacaggagttagcctagccagtgggttcaagtgtaggatgaggtatctggcatgatgttgtagcatgggcaaatcgagatgagtgagcaatcaggttgttgtctgttgattcttttagctgagcgcctgagctgctgaggccttgatcctgtatttaagatgtcaggccttgattctttcagcaagcgttggaaggaaggaagcaatgtgcctgttctgagctcccgtcagcatcacttgtaaagttcttataagtacagactagaactagtcatgcatacaagagaatagacagtcgatgtttctatctgtttttgtttcattctaaggcccttgtcacacgagcaccagaattttttttctttccttttggtaccatgatggtgatggacgtgagagttccttgagatgatcaaagcatctatctttccaattccatgtgtatcctgataactgaagatgatcgtttggttttccttttggtacgcaacatgccaagtgcaggatgaactctgccctgcaagaaaaaccacaggcaagtttgtccgattaacaactatctgcacaggtcataaaaag

SEQ ID NO: 61400 - DNA, 2386 bp, Zea Mays
cccagagagagcgagagttcctggttgacccgaccagacagacagcgactgcaaacaaaaccagagacgttgcgagcatgtggtgcaggagaaacaatttctctccccgccgtccctgtctccctgacaagaagagagaccaaagtatcaagtggaacaacagaattttaggtactgccgtgccgctcaacaagggaagagcaagagctccagtctctgtctcacttattatgatcctctatgaaccataccctgcaacagatttcattccaaacggggcataatcattgaagaccagttaaggggggcagtgagaagggatggcggtggagttggccaagcaattgcttgcggttattggaagctatacaccacctctctgggctaccctcatcgccggggtttttgttatcatctccgtctcgctgtccctgtacttgctgttcaatcatctgtcagcctacaaaaacccagaggaacagaagtttcttgtcggcgtcattctcatggtgccgtgctatgcagtcgagtcgtacatatcactggtaaatccatcaataagtgttgatatcgaaatcatgcgagatggctatgaggcatttgctatgtactgttttgggcgctatctagttgcttgcttaggtggtgaagataggacaattgaatttttgaatagggaaggtggttcaggttctgctgcaccacttttaggacaagcatctgaacaacgatacgtaaaccatccttttccaatgaactacgtgcttaaaccgtggccgctaggcgaatggttctacttggtcatcaaatttgggctagttcagtatatgataataaaatcaatatgtgctattcttgcggtgattcttgaatcctttggagtgtattgtgaaggagagtttaagttgaactgtgggtactcttacacggccgtggttctcaatttcagtcagtcatgggccttatactgtctcgtccagttctacaccgtgataaaggatgagttagctcatataaagcctcttgcgaagtttctgacattcaagtccattgtgttcttaacatggtggcaaggtatagcaatcgcattgctcttcaactggggtttgttgagaggtcctatcgctcaagaactgcagttcaagtcaagtatccaagacttcattatctgcatagagatgggtgttgctgccgttgcccacctgtatgtcttccctgcgaagccgtacgagctgatcggtgatcgtcttgttggagatgtttctgttcttggagactacgcttctgtcgactgccctctagatccagacgaggtcaaggatagcgagcgcccaaccaagttcaggcttccccagccagatgatcatgtccggtgttccactgccataaaagaaagcgttcgcgatgtcgtacttggaggcggtgaatatatcgtgaatgacttgaagttcactgtgaaccacgcggtggaacccatcaatgagaagctgcacatgatatccgagaacataaaaaagcgcgagaagggaaagaagaaaacaaatgacgatagctgcatcggttcacccacatccttgaccagggtcatcagtgggattgatgatcccctcctgaacgggagcctgagtgacaacagtggcccaaagaaagcgcgaaggcagcacaggaaatcaggctatgcaggcgcggagagcggcggagagagcagcgaccatggcctaggtgggtttgagatccgagggaacagatggattactagctagggagtgacaactaagagcaacctgtggagatgctatacaaatgtcacaggagttagcctagccagtgggttcaagtgtaggatgaggtatctggcatgatgttgtagcatgggcaaatcgagatgagtgagcaatcaggttgttgtctgttgattcttttagctgagcgcctgagctgctgaggccttgatcctgtatttaagatgtcaggccttgattctttcagcaagcgttggaaggaaggaagcaatgtgcctgttctgagctcccgtcagcatcacttgtaaagttcttataagtacagactagaactagtcatgcatacaagagaatagacagtcgatgtttctatctgtttttgtttcattctaaggcccttgtcacacgagcaccagaattttttttctttccttttggtaccatgatggtgatggacgtgagagttccttgagatgatcaaagcatctatctttccaattccatgtgtatcctgataactgaagatgatcgtttggttttccttttggtacgcaacatgccaagtgcaggatgaactctgccctgcaagaaaaaccacaggcaagtttgtccgattaacaactatctgcacaggtcataaaaag

SEQ ID NO: 61401 - DNA, 937 bp, Zea Mays
caaacacgcaatcagtatgtctatctacggcgtcggcggctgggctgatgactgatgagatacgaaatgcgcgtggtgggtgcacagatggaccggacgtcgatcctgggcgacacgatcgactacatgaaggagctgctggagaggatcaagctgctgcaggaggagatcgagcagcagggggaggcgccggcgggcatgctcagcgtcttccgggagctcaaccccaacgagatggtggccaggaacacccccaagttggacgtggagcggaaggagggcgccgacacccgggtggagatctactgcggcgccagcgccaggccggggctgctgctgtccacggtgagcacgctggacgcgctagggctggacatccagcagtgcgtcgtcagctgcttcaacgacttcggcatgcacgcctcctgctccgaggtagggggacaatgacatcgcagatgcagagggacatgatcagcgccgacgcgataaagcaggagctgttgaagaccgctggatatggcggaggctgcatgtagagggcatggcgcggctgtaggaaggagaagaagaggaggagccggagcaggaggaggcggcaataaattaagctctattaaacagcgctagtagcaaggagcagcagcagtatcggttcagacttcaggtccagtagctgaaaaggcaggcagggcatgaggccagtgaagatatggcatgggggacctttttgcaatccattctccccatcagaacccacttcgagttagcagtgtgtgtccgccactccgcctgaatctttctcctatatactgctgtatttaattagcaagagcaaagctctcactgcctttctaatgattgatcagaagtgcctttggcgaccccttgtctttctggacatctatatataataacgttcttcattcagctcctc

SEQ ID NO: 61402 - DNA, 989 bp, Zea Mays
ggggatctctccttttttcttggttctttgtccacctcgtcggacaagaaaacagcaaacacgcaatcagtatgtctatctacggcgtcggcggctgggctgatgactgatgagatacgaaatgcgcgtggtgggtgcacagatggaccggacgtcgatcctgggcgacacgatcgactacatgaaggagctgctggagaggatcaagctgctgcaggaggagatcgagcagcagggggaggcgccggcgggcatgctcagcgtcttccgggagctcaaccccaacgagatggtggccaggaacacccccaagttggacgtggagcggaaggagggcgccgacacccgggtggagatctactgcggcgccagcgccaggccggggctgctgctgtccacggtgagcacgctggacgcgctagggctggacatccagcagtgcgtcgtcagctgcttcaacgacttcggcatgcacgcctcctgctccgaggggggacaatgacatcgcagatgcagagggacatgatcagcgccgacgcgataaagcaggagctgttgaagaccgctggatatggcggaggctgcatgtagagggcatggcgcggctgtaggaaggagaagaagaggaggagccggagcaggaggaggcggcaataaattaagctctattaaacagcgctagtagcaaggagcagcagcagtatcggttcagacttcaggtccagtagctgaaaaggcaggcagggcatgaggccagtgaagatatggcatgggggacctttttgcaatccattctccccatcagaacccacttcgagttagcagtgtgtgtccgccactccgcctgaatctttctcctatatactgctgtatttaattagcaagagcaaagctctcactgcctttctaatgattgatcagaagtgcctttggcgaccccttgtctttctggacatctatatataataacgttcttcattcagctcctc

SEQ ID NO: 61403 - DNA, 969 bp, Zea Mays
ggggatctctccttttttcttggttctttgtccacctcgtcggacaagaaaacagcaaacacgcaatcagtatgtctatctacggcgtcggcggctgggctgatgactgatgagatacgaaatgcgcgtggtgggtgcacagatggaccggacgtcgatcctgggcgacacgatcgactacatgaaggagctgctggagaggatcaagctgctgcaggaggagatcgagcagcagggggaggcgccggcgggcatgctcagcgtcttccgggagctcaaccccaacgagatggtggccaggaacacccccaagttggacgtggagcggaaggagggcgccgacacccgggtggagatctactgcggcgccagcgccaggccggggctgctgctgtccacggtgagcacgctggacgcgctagggctggacatccagcagtgcgtcgtcagctgcttcaacgacttcggcatgcacgcctcctgctccgagatgcagagggacatgatcagcgccgacgcgataaagcaggagctgttgaagaccgctggatatggcggaggctgcatgtagagggcatggcgcggctgtaggaaggagaagaagaggaggagccggagcaggaggaggcggcaataaattaagctctattaaacagcgctagtagcaaggagcagcagcagtatcggttcagacttcaggtccagtagctgaaaaggcaggcagggcatgaggccagtgaagatatggcatgggggacctttttgcaatccattctccccatcagaacccacttcgagttagcagtgtgtgtccgccactccgcctgaatctttctcctatatactgctgtatttaattagcaagagcaaagctctcactgcctttctaatgattgatcagaagtgcctttggcgaccccttgtctttctggacatctatatataataacgttcttcattcagctcctc

SEQ ID NO: 61404 - DNA, 613 bp, Zea Mays
gtgcccgctaattactcagtcagtagattaaagggcatcatcacacactatcacagggcagagagctttacccgacgcccaggacgaatcctcctggagcctagcactgtcattatgccctagctaggccaggcctagggttcacaggtcgcaatacaacaaaaaaccagattgggggcctcactgcattctactgctgcgactagcacacacacctccctttttcattcgagttcgaggagaaggcggcggatgcggccatggagctcgacgagcaggccttcctggaggagatcctctccctgcgcagggacgcctgggactgcaatgtgtccatgggggacctcttcgccccggcggcggccgccgccattgactgctccttccacaaccagcaggcgcccaccgtcagcgtcctccccaccttcaccgcctcctgcgccgagccgccggccttcgactgcctcagcgaggtctacggcgccgccgccgcgttcggcgggcccaatgccggcgacgagatggcgttcctccacgtcgcggagcccatggatgcgctgcagctggacaacaacgccggcctcggggttgtgcaaggtggagcccggcctgt

SEQ ID NO: 61405 - DNA, 1308 bp, Zea Mays
ggccttcttatataagtacagatcttgaaacgtttgcagcgacaagcgttttacgacattatgcagctgagggagaggcaagagaaagttgaaagagtgatctcgttgttcaaagctaccaaagttggtccgttcgcagaagaaagcactcgggtcaagggcgttgtcaatgtcgctggctcgctcccaagagacatctcagaagcagaatcttgtatcagttcacggtttgtgtttgaggctcctgtcaggaagaaggattccctgtttgccgagctcagcaccgaacatagatacgtgtctcaggaaaacgatcacatcgagaccccttttgtgttgtcaaagttgatgtacctgtcgaacatcagtgactcgttttcggttgctgttgtaccgaaaggagctaggtgtaaagatttttcaacggaccaaaatatccgagaggaacattggctggccagtttgcgatcttcgctgaggccacctttgctgagtaaaagccacagatatgctggcggcctaatactgagatcgaagaacttcgctgtttctatagcgcagctgatctcagttgccgcgaggccagtaaacggcggtgaagccagcagagtctgtacagagtttgggcaaatctcgtaccagttccctgatgacataaagttgaccctgtctgctgctttgcatggacccagtgtagttcctcggaagaggaaaccaactgctggaggttgcgttggtcttgagctggaaattgatgaggactccagaatcggggcctggatcgagttgaacaagaagtcaagctcacgtttgctgagatgggccctcacactgtcagatacgccggaaggtgaccttggatggggcgtgagcttgcgtagaggcactgaggaaaaaccgcaactgtttcaggtggagggatttctgaacttgcatctggggaaggctgctgccgtgcagcctggcatcgtgttcaacgtggatggccggaggtgcagacctggtctcgtattccactcgagttggtccttgtgattctggtgtaggaacttttggtagatcacagaatgctgatgagattgtatcagctgaaagaggcaaatgattcatttgaaagtgcatgatgctttggtgctgattatttccagttgttataattatttttcaggcgttgacttataatgttgatttgatatccctatagcagatgtgatgaaccatgaatcttctatttttatttttatggcacatatgtaaatgagtgttaaattgcacagaaccggctggaagcaacaagctccaagcatt

SEQ ID NO: 61406 - DNA, 1431 bp, Zea Mays
cttatcttcctctagacttatccccatcgtttctagcttctagtttatccgttgtcggcattatcttttcaagagctggacgcacgtctccatgttgcctgtcggccttatctccatccctcatcacctctgcgagcacaagttttagcgcctgccctcagtccagctcgccagcagctctctgccctcctccctcaagccctagctgagtttttccatggtgctctggatgccagcccctttactcgatgcccctgctaggttccatggtcgtcgctgccccagccatctccttggtgaccgacctcgcccctgccccagccacagcttccccttcggccctattgctgcaagcactcagcctctcctatggcacatggtgctcatccagcccctttctactggtgtttgcaccatctctctggtgctcgacgaaatgaccatgaggagttttgtgttgtgtgtagccccacctgcgacaccgtcgacccccgaagtgaggtccgtgcgacgtttgccaagtgttcgatggaaggtccgaaccgggaacctcgcctttctcgcggatcttcgggtcggtttgtgaattggtacgctagatgattatgcgagctgaaggacatggatcagagcgaaccataagatggtattggtggattaatcttgtggatgcatcaagccaacaccagaatggaagatgctcaccaagtggtcgtcaattaacaacactaacgtagtgtttatcccaggcaagccccggtgcatttgccacctccttgttgttttaaaacttttatcacttatatgctgcattaggtgataggagttgagtgatgaaacaattgatggattgccattccttggaattcgattactattccttgatacctgttttataaagagaactaatgaggcttagccctgcttagaaactaaaagtgtttcttttaaaaagaatgttgtgcaacactggatatgggttttatgaaaaagaacttgcaataatgaaggcatcgctcgcaatgatgaattcattattcgagtattgtacctctgtcaggtacatggtttgagtgttaaataataagatgagaccagacgttgagcaggaaaggtcgcctgtctgtgtcgattaaggaccgttccgattgttggcctgctgatctaggaccctttaactagccacatgcctcatcatgggtaagcttagcctcggctggaccaataccaaaaaggccagcccgcaatgggagtggagagatggcgagagtatcgtgtatccacctggcaagaggctggatggtggggtactgagctctcggttggcggggacccattctggtcttgagaaactcggtggcgagttgacatatgcaagggttaagtgctacatatgtcgtgtggttggagatccccagctgggtattaatc

SEQ ID NO: 61407 - DNA, 1448 bp, Zea Mays
cttatcttcctctagacttatccccatcgtttctagcttctagtttatccgttgtcggcattatcttttcaagagctggacgcacgtctccatgttgcctgtcggccttatctccatccctcatcacctctgcgagcacaagttttagcgcctgccctcagtccagctcgccagcagctctctgccctcctccctcaagccctagctgagtttttccatggtgctctggatgccagcccctttactcgatgcccctgctaggttccatggtcgtcgctgccccagccatctccttggtgaccgacctcgcccctgccccagccacagcttccccttcggccctattgctgcaagcactcagcctctcctatggcacatggtgctcatccagcccctttctactggtgtttgcaccatctctctggtgctcgacgaaatgaccatgaggagttttgtgttgtgtgtagccccacctgcgacaccgtcgacccccgggagttaaccggtaaagaagtgaggtccgtgcgacgtttgccaagtgttcgatggaaggtccgaaccgggaacctcgcctttctcgcggatcttcgggtcggtttgtgaattggtacgctagatgattatgcgagctgaaggacatggatcagagcgaaccataagatggtattggtggattaatcttgtggatgcatcaagccaacaccagaatggaagatgctcaccaagtggtcgtcaattaacaacactaacgtagtgtttatcccaggcaagccccggtgcatttgccacctccttgttgttttaaaacttttatcacttatatgctgcattaggtgataggagttgagtgatgaaacaattgatggattgccattccttggaattcgattactattccttgatacctgttttataaagagaactaatgaggcttagccctgcttagaaactaaaagtgtttcttttaaaaagaatgttgtgcaacactggatatgggttttatgaaaaagaacttgcaataatgaaggcatcgctcgcaatgatgaattcattattcgagtattgtacctctgtcaggtacatggtttgagtgttaaataataagatgagaccagacgttgagcaggaaaggtcgcctgtctgtgtcgattaaggaccgttccgattgttggcctgctgatctaggaccctttaactagccacatgcctcatcatgggtaagcttagcctcggctggaccaataccaaaaaggccagcccgcaatgggagtggagagatggcgagagtatcgtgtatccacctggcaagaggctggatggtggggtactgagctctcggttggcggggacccattctggtcttgagaaactcggtggcgagttgacatatgcaagggttaagtgctacatatgtcgtgtggttggagatccccagctgggtattaatc

SEQ ID NO: 61408 - DNA, 1004 bp, Zea Mays
cttatcttcctctagacttatccccatcgtttctagcttctagtttatccgttgtcggcattatcttttcaagagctggacgcacgtctccatgttgcctgtcggccttatctccatccctcatcacctctgcgagcacaagttttagcgcctgccctcagtccagctcgccagcagctctctgccctcctccctcaagccctagctgagtttttccatggtgctctggatgccagcccctttactcgatgcccctgctaggttccatggtcgtcgctgccccagccatctccttggtgaccgacctcgcccctgccccagccacagcttccccttcggccctattgctgcaagcactcagcctctcctatggcacatggtgctcatccagcccctttctactggtgtttgcaccatctctctggtgctcgacgaaatgaccatgaggagttttgtgttgtgtgtagccccacctgcgacaccgtcgacccccgttaaccggtaaagaagtgaggtccgtgcgacgtttgccaagtgttcgatggaaggtccgaaccgggaacctcgcctttctcgcggatcttcgggtcggtttgtgaattggtacgctagatgattatgcgagctgaaggacatggatcagagcgaaccataagatggtattggtggattaatcttgtggatgcatcaagccaacaccagaatggaagatgctcaccaagtggtcgtcaattaacaacactaacgtagtgtttatcccaggcaagccccggtgcatttgccacctccttgttgttttaaaacttttatcacttatatgctgcattaggtgataggagttgagtgatgaaacaattgatggattgccattccttggaattcgattactattccttgatacctgttttataaagagaactaatgaggcttagccctgcttagaaactaaaagtgtttcttttaaaaagaatgttgtgcaacactggatatgggttttatgaaaa

SEQ ID NO: 61409 - DNA, 346 bp, Zea Mays
gtgcgacccaagtcaagagctggtgcatcgaggggctccgtcagcgtgcgacccaagtcgagagctggtgcatcgagaggctccgtcagcgtgcttcgtgtttgatggaatacatcgagtgtcatcatcaagtactccagtgaagaagcaaccaacagtgcagtttcatgttcagaattgtgtttcacatagatgttatctaaaacatatgatggtgttattacttatttctagacatgtaatttttacgttgtttgtgttaaataatatattatcattaaatgtatcggtgccatttgttgaaatggtcatcaaaataatatatataattattaaatggcctaat

SEQ ID NO: 61410 - DNA, 478 bp, Zea Mays
gtgcgacccaagtcaagagctggtgcatcgaggggctccgtcagcgtgcgacccaagtcgagagctggtgcatcgagaggctccgtcagcgtgcttcgtggtgagtaacctcaagagcgtgcgcgtcggttgttcaccgaagacgacaacaatgatgaggacatcgcgaggggcgttctcatgtggtggatctgaaaccgcagatcgaagtggtcccagctagagcaacatgtttgatggaatacatcgagtgtcatcatcaagtactccagtgaagaagcaaccaacagtgcagtttcatgttcagaattgtgtttcacatagatgttatctaaaacatatgatggtgttattacttatttctagacatgtaatttttacgttgtttgtgttaaataatatattatcattaaatgtatcggtgccatttgttgaaatggtcatcaaaataatatatataattattaaatggcctaat

SEQ ID NO: 61411 - DNA, 1250 bp, Zea Mays
agcgtgcgacccaagtcaagagctggtgcatcgaggggctccgtcagcgtgcgacccaagtcgagagctggtgcatcgagaggctccgtcagcgtgcttcgtggtgagtaacctcaagagcgtgcgcgtcggttgttcaccgaagacgacaacaatgatgaggacatcgcgaggggcgttctcatgtggtggatctgaaaccgcagatcgaagtggtcccagctagagcaacatggtggatctaaagccatagatctatgttctatgtttaatgtttgttacttcagcttgatagtagtgatgcatatatgtttttagtgaaattagtgtcgttacctctcatttcctttcctaatttactcatttccctcattgcctatcttgttcttactagtatacaaagtgatagctcacattatactactattttgactatgttatataagtaatatagcgatatataattattctaaaaccgaaataagctatcattaatgtttcatcacagttttatcccacatacactgaagccttccatgctggcatctttttgcatacacatcaaacaaatgttcaagaattcaagtacaagcagttcatcaactccttatatggcttttgtttttctatgtttggccctacatatgaaacttctgctacatttagatccttagttgctgcctgttttgtaaaactggtagctaatcatttatcatagtagctgcttcatgtttcccttatgccagtagcagtgcgtttacttaatcctgtttgttttgctagtattcatgatagagtccaaagtaatatcattgcagttagtggtttcgccctaatgaaaactatatagcttatatccccctgttagtttaccaaattatgacatctatgaatatattgattatctatgcttctcttgtagattaaaatagtaccgctacagattgtgcaagggcttgtgaggaacaaccgttattctagtattgttgtcatctgctactatttttgatggaatacatcgagtgtcatcatcaagtactccagtgaagaagcaaccaacagtgcagtttcatgttcagaattgtgtttcacatagatgttatctaaaacatatgatggtgttattacttatttctagacatgtaatttttacgttgtttgtgttaaataatatattatcattaaatgtatcggtgccatttgttgaaatggtcatcaaaataatatatataattattaaatggcctaat

SEQ ID NO: 61412 - DNA, 1439 bp, Zea Mays
agcgtgcgacccaagtcaagagctggtgcatcgaggggctccgtcagcgtgcgacccaagtcgagagctggtgcatcgagaggctccgtcagcgtgcttcgtggtgagtaacctcaagagcgtgcgcgtcggttgttcaccgaagacgacaacaatgatgaggacatcgcgaggggcgttctcatgtggtggatctgaaaccgcagatcgaagtggtcccagctagagcaacatggtggatctaaagccatagatctatgttctatgtttaatgtttgttacttcagcttgatagtagtgatgcatatatgtttttagtgaaattagtgtcgttacctctcatttcctttcctaatttactcatttccctcattgcctatcttgttcttactagtatacaaagtgatagctcacattatactactattttgactatgttatataagtaatatagcgatatataattattctaaaaccgaaataagctatcattaatgtttcatcacagttttatcccacatacactgaagccttccatgctggcatctttttgcatacacatcaaacaaatgttcaagaattcaagtacaagcagttcatcaactccttatatggcttttgtttttctatgtttggccctacatatgaaacttctgctacatttagatccttagttgctgcctgttttgtaaaactggtagctaatcatttatcatagtagctgcttcatgtttcccttatgccagtagcagtgcgtttacttaatcctgtttgttttgctagtattcatgatagagtccaaagtaatatcattgcagttagtggtttcgccctaatgaaaactatatagcttatatccccctgttagtttaccaaattatgacatctatgaatatattgattatctatgcttctcttgtagattaaaatagtaccgctacagattgtgcaagggcttgtgaggaacaaccgttattctagtattgttgtcatctgctactattgtaaattcgtaaccagatttttctccagcatataccttgtattaaatgttgcttattcgtgatagcattatttaactagatctggatgtctagctttctttgtttaattgcaattgaatggaccaagaagcactaggatatatacttttctttagtcttagtaacttttctctctgcttatattgatggttgaatgaatcataaagcactaggatttatactaagatcatgatggtgatgcaatgtaattgaatatttatttatctattcatgttttatgtcacaagcacaagtatattatgaatactatgccactttggccattcttgtttgcttgctttgttaatggcaggatttccttcaaagcagatagttctctatacgattttgccatgacatgtcgtatggtatatatgggaatgttacaaacgtcat

SEQ ID NO: 61413 - DNA, 533 bp, Zea Mays
agatctccccaactcctccgtccccttgcttcctgtcgtcgacctcggtggccgccgcgagctgcgggtggttcatcgccgtcgacctcgcctctccgctccttctgcactgcctgttaccggcttcctgttgctctaccggtgcggcgcgggtcgtcagtgaagctccgactatccggattgactcggatcgacctctgctctcgtggcgcctcaagcatggttgcggccatgccattttggagtccgtctggcgatattagctggcaaggtttagggagggttttgtgctgtgctgtggaaagtttgatgagcggctgcgtggacatgtgacaagtacttggaaatagacagtgaagagaatttagcttaaaattggtacaggccatgaaccagggagcataagggaaaaaagggagataaggcagacagagcttgtatttcgtattatccctaataacttaagttcatttatggtagaaactggcaagttccaggtaaaaagtcaagtgtcctgctttattttgtaacct

SEQ ID NO: 61414 - DNA, 2313 bp, Zea Mays
ccctgccgactgccgtcgtgtcggctcgccaacgccaatcccaccaggccaccaccacgccacgcactgcgcctccctcccttgcgtccgcctctcacccgcaacttcaaacccgccgccacctccggggaccagcaaccccaactccagcgctggggaggagcgacgacgagctgcccgattccaccaccaccagcaacttgaggaatagcctcctgcctcctgcctccagcagagcgcgtgtccctcctgcctgccggctacattcgcccgactccgactccgctgagaagccaagccagccatggggtgcgtgtgctcgaggcacttcccggaggacgcgccgggcacgctggcggccgcctacgacgcgcgccgcgggaggtacggccccgggaacttcgactccggcgagctcgccatcccgccgccccactccaacaaggtatcagacacaggtacatttctgggaagagctagcattgctgccgttgaagtgttagacacgctcgggagtagcatgacaagcttgaatcctggcagcggctttctctccggaggaaccaaccggggcaatagagcctgtattttagcatttgaagtcgcgaatacaatagctaaggcttctagtttgtggatgtcatgctctgatgagagtatagaagagctcaagaaagaaattctgcattcagatggagtgcaagtattggtgtcctcaaataccattgagctgttgcatattgctgtcgttgataaaagggaagaacttgccgtcttttcaagagaagtaatacgatttggcaacctctgcaaagatcctatatggcataacttggggcgatatttcgacaagttaacgacagataatacaccccaggatcattcaaaggagactatggaagctactgtccagcaattgattaatttggcacaaaacacctctgagctatatcatgaattgcatgctctggacaggtttgagcaggattttaaaaagaaatttcatgaagaggagcctgtgccagcagctagacgagagagtataatgatattgcatagtgaactaaagcgccagaggaagcttgtgaaaaatctgaagaaaaaatccttgtggtcaaggaccttggaagagatcgtggagaaacttgtggacattgtagtatttttacatagacaaatccgagaatcatttaacgaagctggaaccgatttctgcgcttccgagcaaactcagaacaaaaggctaggttcctgtggtctggcactacattatgctaacatcatcaaccaaattgaaaatataatttcccggcccctctctcttcctcctagtgcaagggacaatctgtaccatggtctgccagtaacagtgaagttagctctgcgatcacgactgcagacatataacaccgaagaagagcgtacggtagctcaaataaaagccgaaatgcagaaaactcttcgctggcttctgccggtagcagaaaatacaataagggcgcaccaaggttttggatgggttggcgaatgggctaatcttgacatgggcaagaaatcaggctaccagcacaggcacagcgtcatccgcatccagacgctgcaccacgccgacaaggcgaaaaccgagcactacatgctggagctggtggtgctcctccaccacctggtgatgcaggtgaagagcagaggctacgggaccggcaagccatcgaggcacgagcatgacgcctcgtcccggtcccgcaaggcggcacctggcctccacccggagacggagacggagacgaggcgcaacacgtcgcccgtgaacagccgcgtggcttcgagcccgctgtcggactgcgagcgggcggcgctggaccacctgggcttcaggagggcgacttacggcaggagccagagctgcgagcctccgccgcctggccgacggagcctggctcgccggagctggggcttgtgccggagccatggcggctcgccggctagggcgttgggcagcaagacccccgccgtgggtcgtgacgcggccatggaccttgatgtaattgatggcttggatttggatagactgacttcgtcgtactcgcacccgccctccccccacgttttgctagaatagctgaattcttcgtacatcttgtatatgtccatatattatcctaagtttattatatgtacatatgaaatcttgagtggaagtatatatagagcaagatcacaagtggcattagatcatctcacctttggaaaaaaaaattagtgttgtttgaatccactctctgaatttaatgaatacgtgattatcatgtttca

SEQ ID NO: 61415 - DNA, 2303 bp, Zea Mays
aaaccaaccctgccgactgccgtcgtgtcggctcgccaacgccaatcccaccaggccaccaccacgccacgcactgcgcctccctcccttgcgtccgcctctcacccgcaacttcaaacccgccgccacctccggggaccagcaaccccaactccagcgctggggaggagcgacgacgagctgcccgattccaccaccaccagcaacttgaggaatagcctcctgcctcctgcctccagcagagcgcgtgtccctcctgcctgccggctacattcgcccgactccgactccgctgagaagccaagccagccatggggtgcgtgtgctcgaggcacttcccggaggacgcgccgggcacgctggcggccgcctacgacgcgcgccgcgggaggtacggccccgggaacttcgactccggcgagctcgccatcccgccgccccactccaacaaggtatcagacacaggtacatttctgggaagagctagcattgctgccgttgaagtgttagacacgctcgggagtagcatgacaagcttgaatcctggcagcggctttctctccggaggaaccaaccggggcaatagagcctgtattttagcatttgaagtcgcgaatacaatagctaaggcttctagtttgtggatgtcatgctctgatgagagtatagaagagctcaagaaagaaattctgcattcagatggagtgcaagtattggtgtcctcaaataccattgagctgttgcatattgctgtcgttgataaaagggaagaacttgccgtcttttcaagagaagtaatacgatttggcaacctctgcaaagatcctatatggcataacttggggcgatatttcgacaagtatgcctctgaaaagttaacgacagataatacaccccaggatcattcaaaggagactatggaagctactgtccagcaattgattaatttggcacaaaacacctctgtttgagcaggattttaaaaagaaatttcatgaagaggagcctgtgccagcagctagacgagagagtataatgatattgcatagtgaactaaagcgccagaggaagcttgtgaaaaatctgaagaaaaaatccttgtggtcaaggaccttggaagagatcgtggagaaacttgtggacattgtagtatttttacatagacaaatccgagaatcatttaacgaagctggaaccgatttctgcgcttccgagcaaactcagaacaaaaggctaggttcctgtggtctggcactacattatgctaacatcatcaaccaaattgaaaatataatttcccggcccctctctcttcctcctagtgcaagggacaatctgtaccatggtctgccagtaacagtgaagttagctctgcgatcacgactgcagacatataacaccgaagaagagcgtacggtagctcaaataaaagccgaaatgcagaaaactcttcgctggcttctgccggtagcagaaaatacaataagggcgcaccaaggttttggatgggttggcgaatgggctaatcttgacatgggcaagaaatcaggctaccagcacaggcacagcgtcatccgcatccagacgctgcaccacgccgacaaggcgaaaaccgagcactacatgctggagctggtggtgctcctccaccacctggtgatgcaggtgaagagcagaggctacgggaccggcaagccatcgaggcacgagcatgacgcctcgtcccggtcccgcaaggcggcacctggcctccacccggagacggagacggagacgaggcgcaacacgtcgcccgtgaacagccgcgtggcttcgagcccgctgtcggactgcgagcgggcggcgctggaccacctgggcttcaggagggcgacttacggcaggagccagagctgcgagcctccgccgcctggccgacggagcctggctcgccggagctggggcttgtgccggagccatggcggctcgccggctagggcgttgggcagcaagacccccgccgtgggtcgtgacgcggccatggaccttgatgtaattgatggcttggatttggatagactgacttcgtcgtactcgcacccgccctccccccacgttttgctagaatagctgaattcttcgtacatcttgtatatgtccatatattatcctaagtttattatatgtacatatgaaatcttgagtggaagtatatatagagcaagatcacaagtggcattagatcatctcacctttggaaaaaaaaattagtgttgtttgaatccactctctgaatttaatgaatacgtgattatcatgtttca

SEQ ID NO: 61416 - DNA, 1034 bp, Zea Mays
gtgtttttatcgttcttgtcttgttcaacaaatgttttgtgttctccatatccacattgctagagctgaatccgaggaagatgctgctgcagctgaggttgttgaaggggctgatctaggtattgtgggtgatgatacacaggtttccagtgatggacctttaagtcctgctcctggtgtagagacagtagttgtcttcccaaaaaatgctggcaaattgtactagcaggtgaagaaactgaattactagttggtctgcaaaatgacggtgaatcaattttgaatgttgttgctgttcattcaactctccatcttccttttgaccacaatatgtatggccagaaccttactgttcagaatttcttcaattcatcagttcctgtttctgtgcaagcaaccttcccctacaagttcgttgtgagcaagttcttgcagcctggagcatatgatctggttggttacatagtgtatgagatcgaccagcacccttaccagaatgtattctacaatggcactatcgaggttgttgaggctggaggcttactcagtgttgagtctgtgttcctcatcacccttggatttgcacttcttggtctgtttggattgtgggcatatggccaggttcagcagctctcgaagaaaacaaagaaggcacccaaggtggagctcggaactggaacaactgatgccaacatcgatgagtggctggagggcacttcgtttgtgcagagaagcaaatccaagaagaagcagacctgagggtagcccttcacaagtgacttttgcagaaagatagatgcgtaaggaggtgctgaaaaccgtaaacatcttcgttgacattttcgaccttgtgtactttacatggaacaaaattttgttaaaagaaagtatatgctgttgccgctgtggtttctgatcttattcgctgcctttgtcatttttcctgtcatggtcaccccaggattttttctttgtttcggtagtttagccgaagccggttggcaaaatgaaattgttaatgaaattgttttgtt

SEQ ID NO: 61417 - DNA, 1017 bp, Zea Mays
ctgcaaggatgctttatcatgttgctcaacctaacattgttgctagagctgaatccgaggaagatgctgctgcagctgaggttgttgaaggggctgatctaggtattgtgggtgatgatacacaggtttccagtgatggacctttaagtcctgctcctggtgtagagacagtagttgtcttcccaaaaaatgctggcaaattgtactagcaggtgaagaaactgaattactagttggtctgcaaaatgacggtgaatcaattttgaatgttgttgctgttcattcaactctccatcttccttttgaccacaatatgtatggccagaaccttactgttcagaatttcttcaattcatcagttcctgtttctgtgcaagcaaccttcccctacaagttcgttgtgagcaagttcttgcagcctggagcatatgatctggttggttacatagtgtatgagatcgaccagcacccttaccagaatgtattctacaatggcactatcgaggttgttgaggctggaggcttactcagtgttgagtctgtgttcctcatcacccttggatttgcacttcttggtctgtttggattgtgggcatatggccaggttcagcagctctcgaagaaaacaaagaaggcacccaaggtggagctcggaactggaacaactgatgccaacatcgatgagtggctggagggcacttcgtttgtgcagagaagcaaatccaagaagaagcagacctgagggtagcccttcacaagtgacttttgcagaaagatagatgcgtaaggaggtgctgaaaaccgtaaacatcttcgttgacattttcgaccttgtgtactttacatggaacaaaattttgttaaaagaaagtatatgctgttgccgctgtggtttctgatcttattcgctgcctttgtcatttttcctgtcatggtcaccccaggattttttctttgtttcggtagtttagccgaagccggttggcaaaatgaaattgttaatgaaattgttttgtt

SEQ ID NO: 61418 - DNA, 1024 bp, Zea Mays
aaaaaagctgctctgtctctgcaaggatgctttatcatgttgctcaacctaacattgttgctagagctgaatccgaggaagatgctgctgcagctgaggttgttgaaggggctgatctaggtattgtgggtgatgatacacaggtttccagtgatggacctttaagtcctgctcctggtgtagagacagtagttgtcttcccaaaaaatgctggcaaaagtgaagaaactgaattactagttggtctgcaaaatgacggtgaatcaattttgaatgttgttgctgttcattcaactctccatcttccttttgaccacaatatgtatggccagaaccttactgttcagaatttcttcaattcatcagttcctgtttctgtgcaagcaaccttcccctacaagttcgttgtgagcaagttcttgcagcctggagcatatgatctggttggttacatagtgtatgagatcgaccagcacccttaccagaatgtattctacaatggcactatcgaggttgttgaggctggaggcttactcagtgttgagtctgtgttcctcatcacccttggatttgcacttcttggtctgtttggattgtgggcatatggccaggttcagcagctctcgaagaaaacaaagaaggcacccaaggtggagctcggaactggaacaactgatgccaacatcgatgagtggctggagggcacttcgtttgtgcagagaagcaaatccaagaagaagcagacctgagggtagcccttcacaagtgacttttgcagaaagatagatgcgtaaggaggtgctgaaaaccgtaaacatcttcgttgacattttcgaccttgtgtactttacatggaacaaaattttgttaaaagaaagtatatgctgttgccgctgtggtttctgatcttattcgctgcctttgtcatttttcctgtcatggtcaccccaggattttttctttgtttcggtagtttagccgaagccggttggcaaaatgaaattgttaatgaaattgttttgtt

SEQ ID NO: 61419 - DNA, 1148 bp, Zea Mays
ctgctttcaccacatgtcttttaatcagctaggataagttgtccatctgtgtgctatcattgactcgttttcgcagtattcttatacctgaagctcaaagtgggctaatgttaaaaaagctgctctgtctctgcaaggatgctttatcatgttgctcaacctaacattgttgctagagctgaatccgaggaagatgctgctgcagctgaggttgttgaaggggctgatctaggtattgtgggtgatgatacacaggtttccagtgatggacctttaagtcctgctcctggtgtagagacagtagttgtcttcccaaaaaatgctggcaaaattgtactagcaggtgaagaaactgaattactagttggtctgcaaaatgacggtgaatcaattttgaatgttgttgctgttcattcaactctccatcttccttttgaccacaatatgtatggccagaaccttactgttcagaatttcttcaattcatcagttcctgtttctgtgcaagcaaccttcccctacaagttcgttgtgagcaagttcttgcagcctggagcatatgatctggttggttacatagtgtatgagatcgaccagcacccttaccagaatgtattctacaatggcactatcgaggttgttgaggctggaggcttactcagtgttgagtctgtgttcctcatcacccttggatttgcacttcttggtctgtttggattgtgggcatatggccaggttcagcagctctcgaagaaaacaaagaaggcacccaaggtggagctcggaactggaacaactgatgccaacatcgatgagtggctggagggcacttcgtttgtgcagagaagcaaatccaagaagaagcagacctgagggtagcccttcacaagtgacttttgcagaaagatagatgcgtaaggaggtgctgaaaaccgtaaacatcttcgttgacattttcgaccttgtgtactttacatggaacaaaattttgttaaaagaaagtatatgctgttgccgctgtggtttctgatcttattcgctgcctttgtcatttttcctgtcatggtcaccccaggattttttctttgtttcggtagtttagccgaagccggttggcaaaatgaaattgttaatgaaattgttttgtt

SEQ ID NO: 61420 - DNA, 2227 bp, Zea Mays
aatagtcgatcgtgtatgtaggaggaagaagaagagtagtgcaatctcaagcaagctagctagatatggatgtgcagtgggaggctgaggatggttgtcacggaacctcccaagatattaggcccacctatagatgtctttgttctgaggacctcagacagtcacacaggtgcactcaatggctcggcaggtccgattacctgtatctccatctcatcgcccaagaacgcttatcccataacatagacattacacaccatcagagtaagcggaaagaattacaataacataatttacattcataagtataatatagaaagagtagttattacataatcgggttctgagtgcttaaacttattacatcacaggaaggcaaaacaccttccagaggtagttcttagttttgttcctcctgtttggaacaaccttggagcagaaacaacaaaactcagcagtttcatcacctacaacaacatgggtttgaaaaccgtgagtacgaagtgtactttcgcaagtcttacccgactaaagaaaaaactcttaaggatatgctggcttttggggttcaaggtaaagcttattaagattcaaagactcttttgcagaaaagcttactatgagtgggtggatccttaagaattcattttacttgttagtttaagtagttacctgcatctagattcctttctattctagatcaagcacttggcctatactagccatcttttatcatcccttcagttcacttgtcgctacgtgtagggcaatgaccaagtcttcatatctgagaagtaacggcgatccgaatcgattaatacccagctagggatctccagccacacgacatatgtagcacttaacccttgcatatgtcaactcacacccaggtttctcaagaccagaatgggttcacgccaaccgagagcacagatactccacagtccagcctcttgccacggagggtacatgctactctcaccatctatccactcccattgcatgatagcctttctggtattggtctgaccgagacaaacttactcatgacgaggcatatggccagttaaaaggtcctcgatcatcaagcctacatcggctcggtccttaagcgactcagatggagacactacaccgagacttctttctcgtgcaagtcatccacccggtctcgtctttattacttaaaaacccaaagtttggtacctgacagaggtactcttttcagatgttgaacccatcacgaccatgaggaattcacaatcataagtcttttctttctaaaaatccccatccaatgagaagcatcacctttttcaaaacaaaacattttgtttttctaaagcaaggctaagcatcagaaaacttgtttgaataaatcaggtaacaagaaatggtaatcaattttccaaggaagggaatgcatcaattgtttagcacacaacttctatcacttaatgcatcaaataaggtgataaagtttttaaaataacaaggaaagggtaaaatgcaccgaggcttgccttgtgttgtaggagattctgtttccacaccgcagatgtcgaagtaaaaattgttctccaccggaggattctcggtctgagagacaacttcctcctctactacggattcttcctcttgttctatacatgataatacatgtacatgaatgctcatgctatgtcatgaatatccaaacattctacgtatgaaggcgagtcgactagggagttacttaccgagattcatcgtgcacagacacacgctcgctgcagcgtgtggctccacggtggaacacgatctccggtgaccaattacctgggtcccggccaacctttgttcgaatcaagcgcgcgtacaacatccacggggtctggagatcatccctagatgttatttcgaggcccaaaccgttgaggcaccgtgatcccccgacaaccgccgtgatggtccgcggtttcctccttctccctccatggcggtctgcaataggggttgggcgacaggtgtccgatttggatgggaatagcgggatcgaggttttatagatgcgaggggatgagcgcaggctcgagacggtcgacatgcgcgagcggcggagatctagcggagctcgcaacaaacagagcaaggagaatgacctgacaggggcggatccatgagccagcgaggaatttggttcaggcgcgcgcggtgttcgctgacaaagcggtctcgcaggtcagtg

SEQ ID NO: 61421 - DNA, 3517 bp, Zea Mays
gataaaagtagggtacgaatagaaaaaaataaaaaacaaggtgcctttctcttagtattgcagaaaataacagcttgagtgatggcgagtgtaccctaaagatcacaaagcgtatcaaactttcactcctctttcttaacagcaacaaagaattgtttgataccctacaaatgtgacactataaaacttagtagcaaaaaagacaccaaaatagttcaaagcataactctcaatggcatttgacctctagggtgagcccatcacacttcacaagggtcctaattggttcagttgagagctagctatcaaaggtctaccagtcctggatagtattgcttatacaagtttggtactatgcttctaagtgaagtgaacatgcgggttcactgcttagatcaaattgaatatctaattttggaggagcatcgtcactacaactacatagatctgttgattagtctgtaactcccaatgcaaaagtaggtgtgttgatcttaagaactctgaaaccacaaaagtgttgttgtcttatagtagaagtggaatgtgaaatattaaaaaaaatgggtcgatcttaagaactctaaaaagagacaacatgataagcaggtagctcaagacaaagaatatattattctagtatatttaagacaaagaatagctggagtcttaaataacaaggtaagctaaaaacaataataaatcaaaggacaatgccaatggagtcttaattctaacaaagggccaagctattagcacatccgtacatgttgtataaggttctggaagaaactgcttactcaccaacctattcccttattgtagaacttgttcatataatctcatgtatatataatctatcaataaaaaccacaacattgacgatggcccagtatctaaatggcccttcctgaaagagcaaaggttggcatacttctaaaagactattatcctaaagaactgcactgctccctattcccaggtgtatggacatgccgtttcctaaaatactacaatggcttctacacgtatcgatagaatggactccatcaggttatatcctttgagctgctaataacgtaactgcagaagccagatacacttaccttctgaagaactcctattgctgcttgcagtggtgttaggtattcataagagatccgaagattaaaaaactttgaaaagcaatactcttatgaatatttgtatactatattatatatacaaacttaaaaagagaacagaaactgtgcttgatcatgtacaagaaatgaagaatgcaactgcagttaccttgtcggttagcagttcccatagaaaatcccacttcgtgcgacctatctaacacaaggggaaatcagtagtaaattgttaagtaaccctagttagggttatgtgggtaaattgttgatgtaatctcccatgaaagcaacaaaacaatggtcagactaataacataaagagaccgaacataatttacattaaagttacagttgttttctgttttagcacaagttatcatacatagaggtgtaacatagcgtaatgatcaaacttgatacatcagaaaactaatcaaaaataagatgtaggaaactaatccaaaataagatgaagatataggaaactaatccaaaataagatgacaggatccaagcctatgttaggtgatgtgcttagggacagacaccacagcgggaggtatatacatgatattatattggggctaatgcaatccacataattatatacataaaccttagaaaactacaagcgcaacttcacttcatctataaaagtcaagcgaacagcctagtccattcacaaaaggcaagcacgatcaattgtcatgtgttcaaacttcagttttcttgaggctgcaaacaacaaatacaagaatgtgactccataaatattccatatgtcatgttccatctaccaaaaaggaattggcatctgagttcattgtatttcacaaccatttaactctaaagtgattgattgtcatcaaggccaaattgtatacgggaatgtatacgacacatgcaaagttaaccaaaataaatctttcactcgcaaccattgttgagcggtgttttttcttaacatacaaatatttgatatggtacagattaaactgtggtcagaggacattcgtagctttccgcatagttttacttttacttatgctgcatcggtaggtacttaagcaatgatgagaaaaataattctgaaggtaggtttttactatgtaggccatctcatttacataacatagttcaagtgaatctatcatcatttcctagccctgtttagatatctacatattctttgcagttgaaacaagcacatatggatatggaggcattatgcgaaaataaagccaagccagtggaacccaacatagtcggcaaatgagatatttcctatgtcattttagagaaaaagaaaaaagagacaacaacaccttaacttaggggcagatccacactgcactcagtggtgtcctttcaggctgtgacatcagtgatttgaggaattacctctgtaaccctactgctatgcaaataataatcctataggctaatgttttagcaagataatttactggtggcacaagtgaattaatttcttagaccagcctctgccttaactcattatactatggaatagagtcatcgtcctgtatttcaatggtagtgttgggctatgctccatccatttccatgtaggttacaatataatagtgtagacgattataactgtgagatcatacacaatctcacaatccgatcgaattaacgagcttcacaaaattaaactggtggcatcaaggcaaagaaaatagtggcatgaaggcaaagaaacattggacgatatattatcctatctaagtgaaaacatgggctaactattaggagccaaaggactacacatagaagttgtagggtgttgcctgttgaaagaataaaaacatattaaattacattacgatttgtttagaaaataattctgtcccatgggaggattctaccagtcccaatgtgatgctgctactgatccactttctattgtccataaggatagccttggtatgcttgcaagcacagaagttgaagagaagaagcagataaagtgctagtattcatgcaaagctaagaaaagatggcccatgaataagcttgttgttgttgttgtgtgtagcagattcgttctcgaacaaataataaggtataaagaaatagggcagcatcacatgaacacaaactacattgcatgatgttaatagagaatcaagcatcacatgaacacaaattacattgcatgatgttaatagagaatcaagcataccgggtgtagtaagcaacaactctgcaagtaaggtattgttagataattggttaactcgtgtgcctagttggttccaggtgacctcgcgatcgtatatagccttaacaacaatccccttgccttgtccgtaatagcgagcaataacatcattctccatcacaagagg

SEQ ID NO: 61422 - DNA, 1761 bp, Zea Mays
gatctgtctacggatcgaagcaacgagaagaagaggtagagagtaagaagaacacgcctcgttgggcagccgccatgccgcgccataccccgtaggctagaggcagcgtccgtcagcagcttttcttctcctttctcttctcttttcttgtcttctcttctgtaataagagatcgagccaggcaactgcaagcaaggcatgatgatggagagccagagggcagcgtaggacgaagcaggttcttctttaagtattttaggaagtgcaagcaatggcgagtagctagggaagggactaccatatgctatagctgccttgctagctagctagggagagggggggggggggggggggggcatccaagagaccaagctcacgggggcggatcggaggtgatggagaacgacgaggaggaggaggggtacgtgaaggtggggacgaggttctaccgggtggcgatgaggccgagcggcgccgtggcgcgtcatcgcctccactacctcgagtcctgctacctctgcaaggagagcatcgcccgcgaccgcgatgtcttcatgtacaagtgcgccaggcccttaaagttgtgaagaagtttgagcatactcttccaccagaaggaaccaattcttctatgaccagggagtctgttgggcgtataatatttattccagatgatatttacccaaggtaaatcataactattgaagaacttatgaaagaattttagaagaagagcatcattttgagtttcaaggcgtaacaccccaagacctccatttacttttctatgagtaaccgtagaccaagcaaccagaggcggctttttggagcttgtgtcattccctctccaaagacaatgcttcctgtaaatgtctatctgcttaatgatagattttggaatcttgagcgtacacataaagaaggttggcaaagctgtaaatactgaatttaccaactccaagcgcccagcctgagataaaaaatttgaggagcatgacaatctcttttcaattctttggataagaggcaggaactgctgaattctgggtttcgcaagacccaaaggcaatccaagataagtgaacgacattgcaccaatttggcaattgagagttcttgagatgatctccatcttctcaggattaacatttatgggatacatattggatttgttatagttgacctttagaccagtggaagatgcaaatgaatttagaattgccttaagaaagaataattgcttcgggcaggcctccaatatcaaaagagtatcatcggcatattgcacaataggaaagtcctgttcacaaatatcaggtagaggaagctgaagcagattcaaatgcctggccttatttataatgctctgaagaaggtcagccgccaagacaaacaacagtggcgaaagaggatctccttgtctaactcctcgtttggagtggaaggatttctcagggactccattgagtaacaccgaagaagtgccagagtgtagaatgttccgaacccagttaatccacttagagccaaaacctttatgagtcatgacctgcataatcagttcatgttctaaagtgtcaaatgctttttcaaaatctagttttagcacaatgatttcttgctttgagaaatgacataagtgaatgtattcataggcccaagccaagcaatcctgaattgtacttccttttatgaaaccatattggttgctgtgaaccaaccgtgtcatgaatgattgcaatcgatttgccaaaagcttcg

SEQ ID NO: 61423 - DNA, 1447 bp, Zea Mays
cgggccgctctggaggaccggcctttttgcacatctacagtccaaagcacaagcagtcagcggaatccaatcccctgcctcgctcggcgctccgccgccacctcgaatccagttcacccacctcctccgtccttattcgtttcttccgccgcaagccagacagagttgactgtcaccgtgttccctcggggtgggcgatggggtcgtcggagccgtcgtcgcgttccgtgcagaacctcgtgctgtacgccgccagcgccgcgctcagctgcctcgtcctcttggccggccttcgccacctcgatcccaaccgcgccgcctctcagaaggcgcagcagcagaagaaggagatcgccaagcgcctcggccggcccctcgtctccaccacgccctatgaggacgtgattgcgtgcgacgtcatcaaccccgacagcatcgacgtcgaattcgattccatcggcggcctcgacaaggtcaagcaagcgctctacgagctcgtcatcctgcccctgcgccgccctgagctcttcgcctccggcaagctcctcagcccccagaagggcgtccttctctatggcccgcccggcacaggaaagaccatgctcgccaaggccattgccagggagtccggtgccgtcttcatcaatgtcaggatctccaatctcatgagcaagtggttcggggacgcgcagaagctcgtgtctgctgtatttagtctcgctcacaagctccagcctgctattatcttcattgacgaggttgatagtttcttggggcagcgacggacaactgatcatgaagccatgactaatatgaagacagagttcatgtccctctgggatggcttcaccactgatcgttacggattcaaagcagcctttctgcatttgtgggaggaatgtttgccttggtttatctcttctccagatcccactcatgtggaagcctccaaccctggagaatgctcgtgtaatggtcctagctgctacaaacaggccttctgagctagatgaggccatcctaaggcgctttactcagatatttgagattggaattcccgtccagagtgaaaggaacaagatacttcaggttgtgttgaagggagaaaatgtcgagcctaatgttgattacgatcacattgcaagattgtgcgagggctttactggatcagacatcctagaggtgtgcaagcaggcagcattctaccctatcagggagctattggacaatgagagaaacgggaggaaattagataaacctagacctttgagacaatcagacttggagagagccttatcaacatctagaaagtgcaagaaggctgcaagttcaggactgcagtcacccttgtgggttcggccgacagattcagaagacgatcagcataattaataaaaaatgatccacgacacgccgcgggctccgaggtcgggactcgggagtggag

SEQ ID NO: 61424 - DNA, 1734 bp, Zea Mays
caagcagtcagcggaatccaatcccctgcctcgctcggcgctccgccgccacctcgaatccagttcacccacctcctccgtccttattcgtttcttccgccgcaagccagacagagttgactgtcaccgtgttccctcggggtgggcgatggggtcgtcggagccgtcgtcgcgttccgtgcagaacctcgtgctgtacgccgccagcgccgcgctcagctgcctcgtcctcttggccggccttcgccacctcgatcccaaccgcgccgcctctcagaaggcgcagcagcagaagaaggagatcgccaagcgcctcggccggcccctcgtctccaccacgccctatgaggacgtgattgcgtgcgacgtcatcaaccccgacagcatcgacgtcgaattcgattccatcggcggcctcgacaaggtcaagcaagcgctctacgagctcgtcatcctgcccctgcgccgccctgagctcttcgcctccggcaagctcctcagcccccagaagggcgtccttctctatggcccgcccggcacaggaaagaccatgctcgccaaggccattgccagggagtccggtgccgtcttcatcaatgtcaggatctccaatctcatgagcaagtggttcggggacgcgcagaagctcgtgtctgctgtatttagtctcgctcacaagctccagcctgctattatcttcattgacgaggttgatagtttcttggggcagcgacggacaactgatcatgaagccatgactaatatgaagacagagttcatgtccctctgggatggcttcaccactgatcgttacggattcaaagcagcctttctgcatttgtgggaggaatgtttgccttggtttatctcttctccagatcccactcatgtggaagcctccaaccctggagaatgctcgtgtaatggtcctagctgctacaaacaggccttctgagctagatgaggccatcctaaggcgctttactcagatatttgagattggaattcccgtccagagtgaaaggaacaagatacttcaggttgtgttgaagggagaaaatgtcgagcctaatgttgattacgatcacattgcaagattgtgcgagggctttactggatcagacatcctagaggtgtgcaagcaggcagcattctaccctatcagggagctattggacaatgagagaaacgggaggaaattagataaacctagacctttgagacaatcagacttggagagagccttatcaacatctagaaagtgcaagaaggctgcaagttcaggactgcagtcacccttgtgggttcggccgacagattcagaagacgatcagatcgcgtgaaaattctacagcggagtaaacgcaggcattacgtcgatacccttaggttttcttacgcagcttgcagagaggttcagcgtatatatatatatgcattaattcgttttgcttggcgagggcgcaccgggttttttgaagctaactgcagctgggagtatgccctggtgtttaagtttattattcaagattgatgcccctgtgggctgtaagctcagaactccatagttgtccggcctacaattggccttagtttccttgcattttatcttcagtttaactagtctagggtagcgaattatacattcatataatgcagaaaggggcccttccgtctcgtcatcatattcctaaacgtgcgttcatttttttgtctgatcgttatttacatgca

SEQ ID NO: 61425 - DNA, 1785 bp, Zea Mays
atctacagtccaaagcacaagcagtcagcggaatccaatcccctgcctcgctcggcgctccgccgccacctcgaatccagttcacccacctcctccgtccttattcgtttcttccgccgcaagccagacagagttgactgtcaccgtgttccctcggggtgggcgatggggtcgtcggagccgtcgtcgcgttccgtgcagaacctcgtgctgtacgccgccagcgccgcgctcagctgcctcgtcctcttggccggccttcgccacctcgatcccaaccgcgccgcctctcagaaggcgcagcagcagaagaaggagatcgccaagcgcctcggccggcccctcgtctccaccacgccctatgaggacgtgattgcgtgcgacgtcatcaaccccgacagcatcgacgtcgaattcgattccatcggcggcctcgacaaggtcaagcaagcgctctacgagctcgtcatcctgcccctgcgccgccctgagctcttcgcctccggcaagctcctcagcccccagaagggcgtccttctctatggcccgcccggcacaggaaagaccatgctcgccaaggccattgccagggagtccggtgccgtcttcatcaatgtcaggatctccaatctcatgagcaagtggttcggggacgcgcagaagctcgtgtctgctgtatttagtctcgctcacaagctccagcctgctattatcttcattgacgaggttgatagtttcttggggcagcgacggacaactgatcatgaagccatgactaatatgaagacagagttcatgtccctctgggatggcttcaccactgatctcaccaggttacggattcaaagcagcctttctgcatttgtgggaggaatgtttgccttggtttatctcttctccagatcccactcatgtggaagcctccaaccctgggtctgccctttatatctttctgaaatgagaatgctcgtgtaatggtcctagctgctacaaacaggccttctgagctagatgaggccatcctaaggcgctttactcagatatttgagattggaattcccgtccagagtgaaaggaacaagatacttcaggttgtgttgaagggagaaaatgtcgagcctaatgttgattacgatcacattgcaagattgtgcgagggctttactggatcagacatcctagaggtgtgcaagcaggcagcattctaccctatcagggagctattggacaatgagagaaacgggaggaaattagataaacctagacctttgagacaatcagacttggagagagccttatcaacatctagaaagtgcaagaaggctgcaagttcaggactgcagtcacccttgtgggttcggccgacagattcagaagacgatcagatcgcgtgaaaattctacagcggagtaaacgcaggcattacgtcgatacccttaggttttcttacgcagcttgcagagaggttcagcgtatatatatatatgcattaattcgttttgcttggcgagggcgcaccgggttttttgaagctaactgcagctgggagtatgccctggtgtttaagtttattattcaagattgatgcccctgtgggctgtaagctcagaactccatagttgtccggcctacaattggccttagtttccttgcattttatcttcagtttaactagtctagggtagcgaattatacattcatataatgcagaaaggggcccttccgtctcgtcatcatattcctaaacgtgcgttcatttttttgtctgatcgttatttacatgca

SEQ ID NO: 61426 - DNA, 1702 bp, Zea Mays
cgcatcggtgccacggccacgggccgctctggaggaccggcctttttgcacatctacagtccaaagcacaagcagtcagcggaatccaatcccctgcctcgctcggcgctccgccgccacctcgaatccagttcacccacctcctccgtccttattcgtttcttccgccgcaagccagacagagttgactgtcaccgtgttccctcggggtgggcgatggggtcgtcggagccgtcgtcgcgttccgtgcagaacctcgtgctgtacgccgccagcgccgcgctcagctgcctcgtcctcttggccggccttcgccacctcgatcccaaccgcgccgcctctcagaaggcgcagcagcagaagaaggagatcgccaagcgcctcggccggcccctcgtctccaccacgccctatgaggacgtgattgcgtgcgacgtcatcaaccccgacagcatcgacgtcgaattcgattccatcggcggcctcgacaaggtcaagcaagcgctctacgagctcgtcatcctgcccctgcgccgccctgagctcttcgcctccggcaagctcctcagcccccagaagggcgtccttctctatggcccgcccggcacaggaaagaccatgctcgccaaggccattgccagggagtccggtgccgtcttcatcaatgtcaggatctccaatctcatgagcaagtggttcggggacgcgcagaagctcgtgtctgctgtatttagtctcgctcacaagctccagcctgctattatcttcattgacgaggttgatagtttcttggggcagcgacggacaactgatcatgaagccatgactaatatgaagacagagttcatgtccctctgggatggcttcaccactgatcagaatgctcgtgtaatggtcctagctgctacaaacaggccttctgagctagatgaggccatcctaaggcgctttactcagatatttgagattggaattcccgtccagagtgaaaggaacaagatacttcaggttgtgttgaagggagaaaatgtcgagcctaatgttgattacgatcacattgcaagattgtgcgagggctttactggatcagacatcctagaggtgtgcaagcaggcagcattctaccctatcagggagctattggacaatgagagaaacgggaggaaattagataaacctagacctttgagacaatcagacttggagagagccttatcaacatctagaaagtgcaagaaggctgcaagttcaggactgcagtcacccttgtgggttcggccgacagattcagaagacgatcagatcgcgtgaaaattctacagcggagtaaacgcaggcattacgtcgatacccttaggttttcttacgcagcttgcagagaggttcagcgtatatatatatatgcattaattcgttttgcttggcgagggcgcaccgggttttttgaagctaactgcagctgggagtatgccctggtgtttaagtttattattcaagattgatgcccctgtgggctgtaagctcagaactccatagttgtccggcctacaattggccttagtttccttgcattttatcttcagtttaactagtctagggtagcgaattatacattcatataatgcagaaaggggcccttccgtctcgtcatcatattcctaaacgtgcgttcatttttttgtctgatcgttatttacatgca

SEQ ID NO: 61427 - DNA, 2342 bp, Zea Mays
aacggacgccacctcctccccctctctcgcccgcttcctgctctctctttctctttctcccctgcttccccttccattcccgacggacgacgcaacaacccgcctgccctgccctgcctcacgctcgcacccgcggcggcgcggagggccggaacctaaaccctaaccctagcggcccgcccgcgatggggcagtgctacgggaaggcaggcggcgcgtcgtcgcggcgggcggaccacgacgaccacgcccacgcggtcgcgccgccgtccccgctgccggccaacggcgcgccgccgccgcagcccgccacgcccgggcgccgcaagtccggatcggccacgccggtgcaccaccaggcggcgacgaccgcctggcccagcccgtaccccgccggcggggccagcccgctccccgcgggcgtgtcgccgtcgcctgccaggtccacgccccgcaggttcttcaagcggcccttcccgccgccctcgcccgccaagcacatcaaggccactctcgccaagcgcctcggcgggggcaagcccaaggagggcaccataccggaggagggcggcgccggcgtcgccgccgactccgccgaggccgagcgcccgttggacaagacgttcggcttcgccaacaacttcggggccaagtacgacctcgggaaggaggtcgggaggggacactttggccacacctgctccgccctggtcaagaagggcgagtacaagggccatgccgtcgccgtcaagatcatctccaaagctaagatgacgacagccatttccattgaagatgttcgtagggaagtcaagattttgaaagctctatcagggcacaataatctcgtcaaattctatgatgcatgtgaggacgccctcaatgtctacattgtcatggaattatgtgaaggtggagagttgctagatagaattttggctagaggcgggagatatacagaagaagatgccaaagctatcgttgtacagattttgagtgtagtgtccttctgtcatcttcagggagtagttcatcgtgatttgaagccagagatgaaaggctcaatgatattgttggaagcgcatattatgtcgctccagaggttctacacagatcgtacagtatggaagcagacatttggagtataggtgtcataacatacattctgctctgtggcagtcggccattttgggcaaggacagaatctgggatctttcggtctgtattaagggctgatcccaactttgacgattcaccatggccttcagtatcggctgaagctaaggattttgtgaagagatttctgaacaaggattaccgtaaaagaatgactgctgtccaagcactgactcacccttggttacgagatgaacaaaggcaaattccattggacatactcgttttcagattagttaagcaatatcttcgtgctactcctcttaaacgtttggcattaaaggcactatctaaggctttaagggaggatgaactgttgtatcttagattgcagtttaagctgctcgagcccagagacgggctcgtatcgctcgacaactttcggacggctctgacgagatacgtaactgatgctatgagagaatcaagggttcttgagtttttgcacgcgttggacccgcttgcgtacagaaagatggacttggaagaattctgtgcggcagcaatcagcccgtaccagctggaggctttggaaagctgggaagaaatcgctggaacggcttttcagcacttcgaacaggagggcaaccgagttatatctgtggaggagttggcgcaggaactaagcctcgccccgactcactactccatcgtgcaagactggatcagaaagtccgacggcaagcttaactttcttgggttcaccaaatttttgcacggtgtcacgatacggggctcaaacacgagacgacactaaaatggacgcgaactgtgtattcgcttctaatttaaagcctctctctcgtcgattatatatagatggccctgattggtgttttgtgatgtcgcgcggctagctgttgttgtcatagctttttgtagagtacgtgtgaagatcatcgtgatggcgaaatcatatggtttgctcaaaaaattcaagtgtcatttgttcctcgccgattttgaatccatcatccgtgggacaaagaccttttgtcaacgtggcgctaaagttgacatcgtcgctactccccagtttctggtccacaaagtactttgttttgaatgggctttcttgtaagccttctagtctgttgcattgcacttgcttctggttcacgggctgatctgggcccaaacttgtacagaagactagtgtagaatgc

SEQ ID NO: 61428 - DNA, 2705 bp, Zea Mays
ctctctctcctctcagctgccgcgctgtagcctgtaactgtaaccgaggcgaggcgagagaaataacggacgccacctcctccccctctctcgcccgcttcctgctctctctttctctttctcccctgcttccccttccattcccgacggacgacgcaacaacccgcctgccctgccctgcctcacgctcgcacccgcggcggcgcggagggccggaacctaaaccctaaccctagcggcccgcccgcgatggggcagtgctacgggaaggcaggcggcgcgtcgtcgcggcgggcggaccacgacgaccacgcccacgcggtcgcgccgccgtccccgctgccggccaacggcgcgccgccgccgcagcccgccacgcccgggcgccgcaagtccggatcggccacgccggtgcaccaccaggcggcgacgaccgcctggcccagcccgtaccccgccggcggggccagcccgctccccgcgggcgtgtcgccgtcgcctgccaggtccacgccccgcaggttcttcaagcggcccttcccgccgccctcgcccgccaagcacatcaaggccactctcgccaagcgcctcggcgggggcaagcccaaggagggcaccataccggaggagggcggcgccggcgtcgccgccgactccgccgaggccgagcgcccgttggacaagacgttcggcttcgccaacaacttcggggccaagtacgacctcgggaaggaggtcgggaggggacactttggccacacctgctccgccctggtcaagaagggcgagtacaagggccatgccgtcgccgtcaagatcatctccaaagctaagatgacgacagccatttccattgaagatgttcgtagggaagtcaagattttgaaagctctatcagggcacaataatctcgtcaaattctatgatgcatgtgaggacgccctcaatgtctacattgtcatggaattatgtgaaggtggagagttgctagatagaattttggctagaggcgggagatatacagaagaagatgccaaagctatcgttgtacagattttgagtgtagtgtccttctgtcatcttcagggagtagttcatcgtgatttgaagccagagaattttcttttcgcaacaagagatgaaagtgctcctatgaagttaattgactttggtctgtctgattttattagaccagatgaaaggctcaatgatattgttggaagcgcatattatgtcgctccagaggttctacacagatcgtacagtatggaagcagacatttggagtataggtgtcataacatacattctgctctgtggcagtcggccattttgggcaaggacagaatctgggatctttcggtctgtattaagggctgatcccaactttgacgattcaccatggccttcagtatcggctgaagctaaggattttgtgaagagatttctgaacaaggattaccgtaaaagaatgactgctgtccaagcactgactcacccttggttacgagatgaacaaaggcaaattccattggacatactcgttttcagattagttaagcaatatcttcgtgctactcctcttaaacgtttggcattaaaggcactatctaaggctttaagggaggatgaactgttgtatcttagattgcagtttaagctgctcgagcccagagacgggctcgtatcgctcgacaactttcggacggctctgacgagatacgtaactgatgctatgagagaatcaagggttcttgagtttttgcacgcggtaagggttcgtcgctgtgaccctaagcaaaggattacacagtgatgctcatcatatctgtctgcagggacatcgtttccgtatattgtcttcaattgtaatgttgaacaattaatgccctacgcccagttttgagccgatgtcgtgattatacagcgatagcagttaattgtatttgatggttggagttgctgacccccttcacatgcttgtgtctcagttggacccgcttgcgtacagaaagatggacttggaagaattctgtgcggcagcaatcagcccgtaccagctggaggctttggaaagctgggaagaaatcgctggaacggcttttcagcacttcgaacaggagggcaaccgagttatatctgtggaggagttggcgcaggaactaagcctcgccccgactcactactccatcgtgcaagactggatcagaaagtccgacggcaagcttaactttcttgggttcaccaaatttttgcacggtgtcacgatacggggctcaaacacgagacgacactaaaatggacgcgaactgtgtattcgcttctaatttaaagcctctctctcgtcgattatatatagatggccctgattggtgttttgtgatgtcgcgcggctagctgttgttgtcatagctttttgtagagtacgtgtgaagatcatcgtgatggcgaaatcatatggtttgctcaaaaaattcaagtgtcatttgttcctcgccgattttgaatccatcatccgtgggacaaagaccttttgtcaacgtggcgctaaagttgacatcgtcgctactccccagtttctggtccacaaagtactttgttttgaatgggctttcttgtaagccttctagtctgttgcattgcacttgcttctggttcacgggctgatctgggcccaaacttgtacagaagactagtgtagaatgc

SEQ ID NO: 61429 - DNA, 2693 bp, Zea Mays
gagcgcatgacaggcagacgatgggtgctctcctgagatcggtgccaaaggagatgtggagactactcggtgaaaagagtacagtcaaggaggcttgggaggcggtgaaaagcatgcgggtcggcgcagatcgcgtgaaggatgccaatgcccagcgcctgttgatggacttcgagaacatcatcttcaacgatggcgagaccgtcgacgacttcgcgatgcgcatcaacggcatggcgtcagatctgcgctcgatgggggaaacagtcgaggacgccaaggtagtgaagaagatgctgcgagttctccccaagagatatgctcagattgcgatttcaatcgagacgttactcgatctgaaatcgctgacattggaggagctcgtcggccgtctaaggatggccgaggaccgcatggagaaggagttcgtcaccgagaagactggaaaactcatgttgacggaggaagaatgggtgtccaagaatcgccaccgtctcctgccagagccatcttcgacaggcggaggcgagaagaggaacgggttcaacccggccaagcacaagggtgtcgcgcgtgatggcagcgggcgtggtgaccgaaaggagcccgtcatcaaattcacatccgaaggaactccgaggcgcaagggtcgctgcagaaactgtggcatttatggccactggaaggtggactgcaaaaggcctaaaaagggagagcgcggggaggaagcacatcatgtgcaagcggagaaggagccggcgctgttgctggccacagtgaacgccgtgcgcattcagggaggaacgcgacgggctttgagccaggtcgtgcatctgaatgaagaaaaggtgattcctgctgatcgtgaggaggatagtgatgtctgggtcctggacaccggggccagcaatcacatgaccgggcggcgcgaggcgatggtgtcgcttgacacatcggtaggcggcgcggtgaggtttggcgacggatcactcgttgctatcgaaggtatgggatctgtcatactccaaacgaagaagaatgggcacaaggtattgactgaagtctatttcattcctaaattgaaaagcaatatagtcagtttaggccaattggaagagggtggatgcaaaatagtgctagaagatggttactgtaaggtgtttgatgtggaacgctctttgcttgctcatgcacctcgagttgggaaccgtctttatttgctgaaattgcatttagctgctccagtttgtttggctgcaaaaacaactgacaaggcatggttgtggcatggtcggtatggtcatctcaatttccgagcacttcgtgagcttggagttaaaggaatggtggaaggattgccactgttggatcgtgtggaagaattttgtgatggctgtgcacttggtaaacagcatcgacaaccattcccacaagtggcaagctaccgggcagacagtcaattggacctgtttcatgctgatctttgtggtcagatcaagccaaggacaccagggggtaagaactatttcttacttttggttgatgattattctcggtatatgtggattgaactgttggcaaccaaggatgaggctttcatgtgtttcaagcgtgtcaagacactagctgaaactgaactaggtggcaagcttcgggcttttcgcagcgatcgtggaggtgaattcaattccatggagttcaaagaatactgtgatcagcatggagtgaagcatttcaccaccacaccgtacacgccacagcagaatggggtagtagagcgtcgtaacaggactgtggttgagatggctaggtgcttgttgaagagtaagaatttgccgggagaattttggggagaggctgtcacaactgcagtatacctgctaaaccgtgcccctaccaaaagtcttcaaggcagaacaccttatgaagcttggtacaacagaaaacctagtgtgcaccacttgagaacttttggttgtgttgtccatgtgaataaagtagggccgggcatatccaagctgaccaacagatcgacacccatggtcttcattggttatgagaaaggtactaaaggttacagggtgtatgatccagtagccaagaagcttcatatatcaagagatgtgatattcgaagaggccaaagcttgggactggataggtacagaacaacagagtccatcagcatctgtaattgatgtggagcattacagtattgcagaaccaggaacagcaactgaaagtgtagagaatggaacagaagaaacaacagcagccgttgattcagatccacagtcacccaatcaaagtcaatggcagatagacactgattatagtgctggttcaaatcagaatacaccacaagggagtccaactgagcaaggaatggtgtttgcaacaccaccatcaaatgtagcaagtggagagctgagattcagaactctggatagtgtatatgatgacactgatgaggttactgattttcagtatagtgggctgtgctacttagctgctgaagaaccaggaagtgttgatgaggccttgggagaacagtgttggagagaagcaatgaaagctgaaatggagtcgattcagtcaaataaaacatgggaactgactgacttacctgcaggacatcgtgctattggcctgaaatgggtgttcaaagttaagaaagatcctgaaggcatgtac

SEQ ID NO: 61430 - DNA, 2620 bp, Zea Mays
gccatagtggtgcacgttctgccgccccgcatcccgtccgcctcgccctctggccctccccgcggcaatctcggcgctcgccctccccagcggcaatctcggtgtcccccgcagcaagctcggcctcccctgcggcaatctcggcgtcccccacaatcacggtgtctatccctcccatctcaccgctgcctcataacactcccgtgtcccacgccatacgcccaagaccgagccgcctagatctgattgggttggctctcgtcgcgggggcgaaggggaaggcgaggaagaaccaggaggcatgcgttcgtccaagatgctgcaactcctgatggcgctggccttctcggcgaccccgctgacgctgtatgtgccgccggcgcgcagcctcagcctcttcgtggaggccatggaggccgtctgccgcgactgcgggccctactcccacggcgctgtcgcccgcttccgcctcggcctctcccgcgtcctcgccggcctagcgtgcgccctccgctaggcgggccggcaccccatcgccggcgccggttcctcctgcctacaggagtatactacacatggacacacacacgcacgttcggtgaccttgtgctctccctgctttctatttccttttgtactactagcgaggaagtggtttctagcgcagcacagcaatctacatgctggagcaggactagcggtcagtttcaagatctttcctgcttcgtttctccctttttgtgctcggtgcgacgtcacgcccagatcccgtgctcacctccccgcaatcaaggtcgtcacgcccgacgaggatggccgccagtcgtcgcacatgttcagataggttgatgatactgaagtcatctgttttttgctgcaaactgaaataattcatctgtgcttgcgaaccatggagatgggtagtgagctatccaaaactgcatagaagcaggagctcgcacggcagttggatctcatcgccaggcaggtggaagtgtggttccagaacacacatgttcagataacacacatgttcatgcttatgctgaccccacacaggttcatatcgtcttctgcgtgtatgtagttgtttcttcttcaattctctttgtggggaaaacgttaattgggattttcccagcaatcagcttgataggcgacatcgtcattgtgggggtgagtgagtctaccgctattattcagtctgagtccactaaaccagaattccacaggatatgattgtacctatatttcctgaaaagacaaatgaaacaaacatcaaaagcaagtcactgcctattatttttgacctcctaatcttctacttcattggatttgcattgttctggctggaggcttttctgagcatgtgggtcattcaggtgaagttactgcctaccgcttcactattcatccgtcttgatactttcagttggttgtgaactataagctttgcgtcccgcggcgtggaaggaaatccacattacaatggtagtggcattttatagatttatagattggcataccactattcaatggtagtggtgaattatctagaagcaacaaagcaacagatttaaaatgccagttatagagttaggcttagttttagttaaaatattagtggtgaattatctaggcatacatccagtccacaccctcaacataccgagttaggctcagttttagttaaacaacgtcttggtttcttgtgcctactgatggcttttcttaatattatatcaatgacatcttaggttttggaaggtggtgcagttgtcaggactcttagagatcatagtattccttctaatggggatatcaatgaaagagcaaaggcaaaaagtccaatatatttattatcgggactacgaaggagatcaacgtaagttcagtttggtccattttatctattttcctttcttatggtatggagtcaacaaatggaattaaatagagcccatgctaagtttggaccaagtcatcacgagagaaaggaatctattggagcacctataaaattggatgtggaagctcatgctcatattcagaagcataggtatgccaatctataaaattggatgtggaagctcatgctcacattcagaagcataggttgtggtcttgttgttacttgaacttcttaccacatagaaagcttcaagaagatttaactgacgaaatggtcaagttaacacgttgatagaaggaagttaacctgatgatggtgtttcctgatttaaatgtaggattgtgatggtatgatggatgtttcaattggagcctactatatagtcctcttcatcatataaggttatgcatatgaactcttgggatttacaaaatttgcttctatatgttggatgcagcgtaatcttacatattcagaaccaaaggctgatgaactggcagcatcagaaatggcagttgcatatagctcctcgaattgggtattattagttgagggatgacatccatctactgctgattccaagaacggaagcatttatctgatgtcctgttaagtgtgtgcaaggtcattggatgactgcattccatttggcttatcgagggagcacaaatgacgcaaagaagtttgacttgtacacgatgctaaaca

SEQ ID NO: 61431 - DNA, 1984 bp, Zea Mays
caccaatctacccatcatgcagtgggattttcccagcaatcagcttgataggcgacatcgtcattgtgggggttttggaaggtggtgcagttgtcaggactcttagagatcatagtattccttctaatggggatatcaatgaaagtaaagtttcttatttgttattattatattcttgttggtgcaacctgaaaatgaaaagccaattactgaaagcggagatgaaatctcttatgaaggagcaaaggcaaaaagtccaatatatttattatcgggactacgaaggagatcaacgtaagttcagtttggtccattttatctattttcctttcttatggtatggagtcaacaaatggaattaaatagagcccatgctaagtttggaccaagtcatcacgagagaaaggaatctattggagcacctataaaattggatgtggaagctcatgctcatattcagaagcataggtatgccaatctataaaattggatgtggaagctcatgctcacattcagaagcatagcgtaatcttacatattcagaaccaaaggctgatgaactggcagcatcagaaatggcagttgcatatagctcctcgaattgggtattattagttgagggatgacatccatctactgctgagtaagtcacagaaagtgctctgttcaggctgactagatagggtaattgttattggtgtgttctgttcagttttttatagcatttttggcggggtaatatgaacttctattcatttttcaaatatattctagaccctaactaactgatccaaaatgtcacattgattgatatgtggattttgatacttctgactccatgcaactacttggaatgttgcttgtcgcgttggctcattttttattccttttactgtgcacattaatagcatttttacctataatgaacagtcttgtggttttattttcatttctggcgttaaatgtatgtctttctttctattgtatgagtttatttaggcataacctttatcactttctatcaatgctacaacagtagatatactaccatttatcattgaagtaattaagcggttgtatttcattttttatgttatcaaaatttttagttcttcaaatataatagatgaatcattgctaaatctaacattgctgtcaatgttttcatagttccaagaacggaagcatttatctgatgtcctgttaagtgtgtgcaaggtcattggatgactgcattccatttggcttatcgagtaagcaatccccatttaacttttcaaacttgtcatataatacatcccagcctgaggtctgtgccttcaagttggttttattttgcacaaaatcggatgtcattccatttggcttattgagagccctgaagcaagattctggtatttcaacttctggaccaatcagctcagtctcttgttcgtgagcaaaataaccttcagttggcacatcttccagcactacaagattatcagaatatgcatactcatggaatatagcttcaatcctttgccttttctaacaagttgggttaacacttgagatatcatcatttaactgggaagggccatcgtctaaccacttataactgccattttcaggataatgcatttgcttataccctaacttgtaatcaatactggcaacattgtcatctgggcggcatgaattagtgatccttccagagaaacgaactatgcaaaacaaatgtcatattaataatctagaaacatgtttgagatgggttttatctattgatgaggagcctgttaagaaatgtttggttcgcctgtagctgcaaggaatgctaacttttttttgggttcgtctctgcggaggatgccattgttagttgtaaatattggcggcatattaggaaacaaattatccctatttgagttgcacacacatttcatgttattagtgtgaatttgtgagatattgaggttgatgatatatatgttgttcattt

SEQ ID NO: 61432 - DNA, 2819 bp, Zea Mays
ctgccgccccgcatcccgtccgcctcgccctctggccctccccgcggcaatctcggcgctcgccctccccagcggcaatctcggtgtcccccgcagcaagctcggcctcccctgcggcaatctcggcgtcccccacaatcacggtgtctatccctcccatctcaccgctgcctcataacactcccgtgtcccacgccatacgcccaagaccgagccgcctagatctgattgggttggctctcgtcgcgggggcgaaggggaaggcgaggaagaaccaggaggcatgcgttcgtccaagatgctgcaactcctgatggcgctggccttctcggcgaccccgctgacgctgtatgtgccgccggcgcgcagcctcagcctcttcgtggaggccatggaggccgtctgccgcgactgcgggccctactcccacggcgctgtcgcccgcttccgcctcggcctctcccgcgtcctcgccggcctagcgtgcgccctccgctaggcgggccggcaccccatcgccggcgccggttcctcctgcctacaggagtatactacacatggacacacacacgcacgttcggtgaccttgtgctctccctgctttctatttccttttgtactactagcgaggaagtggtttctagcgcagcacagcaatctacatgctggagcaggactagcggtcagtttcaagatctttcctgcttcgtttctccctttttgtgctcggtgcgacgtcacgcccagatcccgtgctcacctccccgcaatcaaggtcgtcacgcccgacgaggatggccgccagtcgtcgcacatgttcagataggttgatgatactgaagtcatctgttttttgctgcaaactgaaataattcatctgtgcttgcgaaccatggagatgggtagtgagctatccaaaactgcatagaagcaggagctcgcacggcagttggatctcatcgccaggcaggttcatatcgtcttctgcgtgtatgtagttgtttcttcttcaattctctttgtggggaaaacgttaattgggattttcccagcaatcagcttgataggcgacatcgtcattgtgggggtgagtgagtctaccgctattattcagtctgagtccactaaaccagaattccacaggatatgattgtacctatatttcctgaaaagacaaatgaaacaaacatcaaaagcaagtcactgcctattatttttgacctcctaatcttctacttcattggatttgcattgttctggctggaggcttttctgagcatgtgggtcattcagttgtcaggactcttagagatcatagtattccttctaatggggatatcaatgaaagagcaaaggcaaaaagtccaatatatttattatcgggactacgaaggagatcaacgtaagttcagtttggtccattttatctattttcctttcttatggtatggagtcaacaaatggaattaaatagagcccatgctaagtttggaccaagtcatcacgagagaaaggaatctattggagcacctataaaattggatgtggaagctcatgctcatattcagaagcataggtatgccaatctataaaattggatgtggaagctcatgctcacattcagaagcataggttgtggtcttgttgttacttgaacttcttaccacatagaaagcttcaagaagatttaactgacgaaatggtcaagttaacacgttgatagaaggaagttaacctgatgatggtgtttcctgatttaaatgtaggattgtgatggtatgatggatgtttcaattggagcctactatatagtcctcttcatcatataaggttatgcatatgaactcttgggatttacaaaatttgcttctatatgttggatgcagcgtaatcttacatattcagaaccaaaggctgatgaactggcagcatcagaaatggcagttgcatatagctcctcgaattgggtattattagttgagggatgacatccatctactgctgattccaagaacggaagcatttatctgatgtcctgttaagtgtgtgcaaggtcattggatgactgcattccatttggcttatcgagtaagcaatccccatttaacttttcaaacttgtcatataatacatcccagcctgaggtctgtgccttcaagttggttttattttgcacaaaatcggatgtcattccatttggcttattgagagccctgaagcaagattctggtatttcaacttctggaccaatcagctcagtctcttgttcgtgagcaaaataaccttcagttggcacatcttccagcactacaagattatcagaatatgcatactcatggaatatagcttcaatcctttgccttttctaacaagttgggttaacacttgagatatcatcatttaactgggaagggccatcgtctaaccacttataactgccattttcaggataatgcatttgcttataccctaacttgtaatcaatactggcaacattgtcatctgggcggcatgaattagtgatccttccagagaaacgaactatgcaaaacaaatgtcatattaataatctagaaacatgtttgagatgggttttatctattgatgaggagcctgttaagaaatgtttggttcgcctgtagctgcaaggaatgctaacttttttttgggttcgtctctgcggaggatgccattgttagttgtaaatattggcggcatattaggaaacaaattatccctatttgagttgcacacacatttcatgttattagtgtgaatttgtgagatattgaggttgatgatatatatgttgttcattt

SEQ ID NO: 61433 - DNA, 3669 bp, Zea Mays
ctgccgccccgcatcccgtccgcctcgccctctggccctccccgcggcaatctcggcgctcgccctccccagcggcaatctcggtgtcccccgcagcaagctcggcctcccctgcggcaatctcggcgtcccccacaatcacggtgtctatccctcccatctcaccgctgcctcataacactcccgtgtcccacgccatacgcccaagaccgagccgcctagatctgattgggttggctctcgtcgcgggggcgaaggggaaggcgaggaagaaccaggaggcatgcgttcgtccaagatgctgcaactcctgatggcgctggccttctcggcgaccccgctgacgctgtatgtgccgccggcgcgcagcctcagcctcttcgtggaggccatggaggccgtctgccgcgactgcgggccctactcccacggcgctgtcgcccgcttccgcctcggcctctcccgcgtcctcgccggcctagcgtgcgccctccgctaggcgggccggcaccccatcgccggcgccggttcctcctgcctacaggagtatactacacatggacacacacacgcacgttcggtgaccttgtgctctccctgctttctatttccttttgtactactagcgaggaagtggtttctagcgcagcacagcaatctacatgctggagcaggactagcggtcagtttcaagatctttcctgcttcgtttctccctttttgtgctcggtgcgacgtcacgcccagatcccgtgctcacctccccgcaatcaaggtcgtcacgcccgacgaggatggccgccagtcgtcgcacatgttcagataggttgatgatactgaagtcatctgttttttgctgcaaactgaaataattcatctgtgcttgcgaaccatggagatgggtagtgagctatccaaaactgcatagaagcaggagctcgcacggcagttggatctcatcgccaggcaggtggaagtgtggttccagaacacacatgttcagataacacacatgttcatgcttatgctgaccccacacaggttcatatcgtcttctgcgtgtatgtagttgtttcttcttcaattctctttgtggggaaaacgttaattgggattttcccagcaatcagcttgataggcgacatcgtcattgtgggggtgagtgagtctaccgctattattcagtctgagtccactaaaccagaattccacaggatatgattgtacctatatttcctgaaaagacaaatgaaacaaacatcaaaagcaagtcactgcctattatttttgacctcctaatcttctacttcattggatttgcattgttctggctggaggcttttctgagcatgtgggtcattcaggtgaagttactgcctaccgcttcactattcatccgtcttgatactttcagttggttgtgaactataagctttgcgtcccgcggcgtggaaggaaatccacattacaatggtagtggcattttatagatttatagattggcataccactattcaatggtagtggtgaattatctagaagcaacaaagcaacagatttaaaatgccagttatagagttaggcttagttttagttaaaatattagtggtgaattatctaggcatacatccagtccacaccctcaacataccgagttaggctcagttttagttaaacaacgtcttggtttcttgtgcctactgatggcttttcttaatattatatcaatgacatcttaggttttggaaggtggtgcagttgtcaggactcttagagatcatagtattccttctaatggggatatcaatgaaagtaaagtttcttatttgttattattatattcttgttggtgcaacctgaaaatgaaaagccaattactgaaagcggagatgaaatctcttatgaaggagcaaaggcaaaaagtccaatatatttattatcgggactacgaaggagatcaacgtaagttcagtttggtccattttatctattttcctttcttatggtatggagtcaacaaatggaattaaatagagcccatgctaagtttggaccaagtcatcacgagagaaaggaatctattggagcacctataaaattggatgtggaagctcatgctcatattcagaagcataggttgtggtcttgttgttacttgaacttcttaccacatagaaagcttcaagaagatttaactgacgaaatggtcaagttaacacgttgatagaaggaagttaacctgatgatggtgtttcctgatttaaatgtaggattgtgatgcgtaatcttacatattcagaaccaaaggctgatgaactggcagcatcagaaatggcagttgcatatagctcctcgaattgggtattattagttgagggatgacatccatctactgctgagtaagtcacagaaagtgctctgttcaggctgactagatagggtaattgttattggtgtgttctgttcagttttttatagcatttttggcggggtaatatgaacttctattcatttttcaaatatattctagaccctaactaactgatccaaaatgtcacattgattgatatgtggattttgatacttctgactccatgcaactacttggaatgttgcttgtcgcgttggctcattttttattccttttactgtgcacattaatagcatttttacctataatgaacagtcttgtggttttattttcatttctggcgttaaatgtatgtctttctttctattgtatgagtttatttaggcataacctttatcactttctatcaatgctacaacagtagatatactaccatttatcattgaagtaattaagcggttgtatttcattttttatgttatcaaaatttttagttcttcaaatataatagatgaatcattgctaaatctaacattgctgtcaatgttttcatagttccaagaacggaagcatttatctgatgtcctgttaagtgtgtgcaaggtcattggatgactgcattccatttggcttatcgattggttttattttgcacaaaatcggatgtcattccatttggcttattgagagccctgaagcaagattctggtatttcaacttctggaccaatcagctcagtctcttgttcgtgagcaaaataaccttcagttggcacatcttccagcactacaagattatcagaatatgcatactcatggaatatagcttcaatcctttgccttttctaacaagttgggttaacacttgagatatcatcatttaactgggaagggccatcgtctaaccacttataactgccattttcaggataatgcatttgcttataccctaacttgtaatcaatactggcaacattgtcatctgggcggcatgaattagtgatccttccagagaaacgaactatgcaaaacaaatgtcatattaataatctagaaacatgtttgagatgggttttatctattgatgaggagcctgttaagaaatgtttggttcgcctgtagctgcaaggaatgctaacttttttttgggttcgtctctgcggaggatgccattgttagttgtaaatattggcggcatattaggaaacaaattatccctatttgagttgcacacacatttcatgttattagtgtgaatttgtgagatattgaggttgatgatatatatgttgttcattt

SEQ ID NO: 61434 - DNA, 2692 bp, Zea Mays
ctgccgccccgcatcccgtccgcctcgccctctggccctccccgcggcaatctcggcgctcgccctccccagcggcaatctcggtgtcccccgcagcaagctcggcctcccctgcggcaatctcggcgtcccccacaatcacggtgtctatccctcccatctcaccgctgcctcataacactcccgtgtcccacgccatacgcccaagaccgagccgcctagatctgattgggttggctctcgtcgcgggggcgaaggggaaggcgaggaagaaccaggaggcatgcgttcgtccaagatgctgcaactcctgatggcgctggccttctcggcgaccccgctgacgctgtatgtgccgccggcgcgcagcctcagcctcttcgtggaggccatggaggccgtctgccgcgactgcgggccctactcccacggcgctgtcgcccgcttccgcctcggcctctcccgcgtcctcgccggcctagcgtgcgccctccgctaggcgggccggcaccccatcgccggcgccggttcctcctgcctacaggagtatactacacatggacacacacacgcacgttcggtgaccttgtgctctccctgctttctatttccttttgtactactagcgaggaagtggtttctagcgcagcacagcaatctacatgctggagcaggactagcggtcagtttcaagatctttcctgcttcgtttctccctttttgtgctcggtgcgacgtcacgcccagatcccgtgctcacctccccgcaatcaaggtcgtcacgcccgacgaggatggccgccagtcgtcgcacatgttcagataggttgatgatactgaagtcatctgttttttgctgcaaactgaaataattcatctgtgcttgcgaaccatggagatgggtagtgagctatccaaaactgcatagaagcaggagctcgcacggcagttggatctcatcgccaggcaggtggaagtgtggttccagaacacacatgttcagataacacacatgttcatgcttatgctgaccccacacaggttcatatcgtcttctgcgtgtatgtagttgtttcttcttcaattctctttgtggggaaaacgttaattgggattttcccagcaatcagcttgataggcgacatcgtcattgtgggggtgagtgagtctaccgctattattcagtctgagtccactaaaccagaattccacaggatatgattgtacctatatttcctgaaaagacaaatgaaacaaacatcaaaagcaagtcactgcctattatttttgacctcctaatcttctacttcattggatttgcattgttctggctggaggcttttctgagcatgtgggtcattcaggtgaagttactgcctaccgcttcactattcatccgtcttgatactttcagttggttgtgaactataagctttgcgtcccgcggcgtggaaggaaatccacattacaatggtagtggcattttatagatttatagattggcataccactattcaatggtagtggtgaattatctagaagcaacaaagcaacagatttaaaatgccagttatagagttaggcttagttttagttaaaatattagtggtgaattatctaggcatacatccagtccacaccctcaacataccgagttaggctcagttttagttaaacaacgtcttggtttcttgtgcctactgatggcttttcttaatattatatcaatgacatcttaggttttggaaggtggtgcagttgtcaggactcttagagatcatagtattccttctaatggggatatcaatgaaagtaaagtttcttatttgttattattatattcttgttggtgcaacctgaaaatgaaaagccaattactgaaagcggagatgaaatctcttatgaaggagcaaaggcaaaaagtccaatatatttattatcgggactacgaaggagatcaacgtaagttcagtttggtccattttatctattttcctttcttatggtatggagtcaacaaatggaattaaatagagcccatgctaagtttggaccaagtcatcacgagagaaaggaatctattggagcacctataaaattggatgtggaagctcatgctcatattcagaagcataggtatgccaatctataaaattggatgtggaagctcatgctcacattcagaagcataggattgtgatgcgtaatcttacatattcagaaccaaaggctgatgaactggcagcatcagaaatggcagttgcatatagctcctcgaattgggtattattagttgagggatgacatccatctactgctgagataatgcatttgcttataccctaacttgtaatcaatactggcaacattgtcatctgggcggcatgaattagtgatccttccagagaaacgaactatgcaaaacaaatgtcatattaataatctagaaacatgtttgagatgggttttatctattgatgaggagcctgttaagaaatgtttggttcgcctgtagctgcaaggaatgctaacttttttttgggttcgtctctgcggaggatgccattgttagttgtaaatattggcggcatattaggaaacaaattatccctatttgagttgcacacacatttcatgttattagtgtgaatttgtgagatattgaggttgatgatatatatgttgttcattt

SEQ ID NO: 61435 - DNA, 2632 bp, Zea Mays
ctgccgccccgcatcccgtccgcctcgccctctggccctccccgcggcaatctcggcgctcgccctccccagcggcaatctcggtgtcccccgcagcaagctcggcctcccctgcggcaatctcggcgtcccccacaatcacggtgtctatccctcccatctcaccgctgcctcataacactcccgtgtcccacgccatacgcccaagaccgagccgcctagatctgattgggttggctctcgtcgcgggggcgaaggggaaggcgaggaagaaccaggaggcatgcgttcgtccaagatgctgcaactcctgatggcgctggccttctcggcgaccccgctgacgctgtatgtgccgccggcgcgcagcctcagcctcttcgtggaggccatggaggccgtctgccgcgactgcgggccctactcccacggcgctgtcgcccgcttccgcctcggcctctcccgcgtcctcgccggcctagcgtgcgccctccgctaggcgggccggcaccccatcgccggcgccggttcctcctgcctacaggagtatactacacatggacacacacacgcacgttcggtgaccttgtgctctccctgctttctatttccttttgtactactagcgaggaagtggtttctagcgcagcacagcaatctacatgctggagcaggactagcggtcagtttcaagatctttcctgcttcgtttctccctttttgtgctcggtgcgacgtcacgcccagatcccgtgctcacctccccgcaatcaaggtcgtcacgcccgacgaggatggccgccagtcgtcgcacatgttcagataggttgatgatactgaagtcatctgttttttgctgcaaactgaaataattcatctgtgcttgcgaaccatggagatgggtagtgagctatccaaaactgcatagaagcaggagctcgcacggcagttggatctcatcgccaggcaggttcatatcgtcttctgcgtgtatgtagttgtttcttcttcaattctctttgtggggaaaacgttaattgggattttcccagcaatcagcttgataggcgacatcgtcattgtgggggtgagtgagtctaccgctattattcagtctgagtccactaaaccagaattccacaggatatgattgtacctatatttcctgaaaagacaaatgaaacaaacatcaaaagcaagtcactgcctattatttttgacctcctaatcttctacttcattggatttgcattgttctggctggaggcttttctgagcatgtgggtcattcaggttttggaaggtggtgcagttgtcaggactcttagagatcatagtattccttctaatggggatatcaatgaaagtaaagtttcttatttgttattattatattcttgttggtgcaacctgaaaatgaaaagccaattactgaaagcggagatgaaatctcttatgaaggagcaaaggcaaaaagtccaatatatttattatcgggactacgaaggagatcaacgttgtggtcttgttgttacttgaacttcttaccacatagaaagcttcaagaagatttaactgacgaaatggtcaagttaacacgttgatagaaggaagttaacctgatgatggtgtttcctgatttaaatgtaggattgtgatggtatgatggatgtttcaattggagcctactatatagtcctcttcatcatataaggttatgcatatgaactcttgggatttacaaaatttgcttctatatgttggatgcagcgtaatcttacatattcagaaccaaaggctgatgaactggcagcatcagaaatggcagttgcatatagctcctcgaattgggtattattagttgagggatgacatccatctactgctgattccaagaacggaagcatttatctgatgtcctgttaagtgtgtgcaaggtcattggatgactgcattccatttggcttatcgattggttttattttgcacaaaatcggatgtcattccatttggcttattgagagccctgaagcaagattctggtatttcaacttctggaccaatcagctcagtctcttgttcgtgagcaaaataaccttcagttggcacatcttccagcactacaagattatcagaatatgcatactcatggaatatagcttcaatcctttgccttttctaacaagttgggttaacacttgagatatcatcatttaactgggaagggccatcgtctaaccacttataactgccattttcaggataatgcatttgcttataccctaacttgtaatcaatactggcaacattgtcatctgggcggcatgaattagtgatccttccagagaaacgaactatgcaaaacaaatgtcatattaataatctagaaacatgtttgagatgggttttatctattgatgaggagcctgttaagaaatgtttggttcgcctgtagctgcaaggaatgctaacttttttttgggttcgtctctgcggaggatgccattgttagttgtaaatattggcggcatattaggaaacaaattatccctatttgagttgcacacacatttcatgttattagtgtgaatttgtgagatattgaggttgatgatatatatgttgttcattt

SEQ ID NO: 61436 - DNA, 2599 bp, Zea Mays
ctgccgccccgcatcccgtccgcctcgccctctggccctccccgcggcaatctcggcgctcgccctccccagcggcaatctcggtgtcccccgcagcaagctcggcctcccctgcggcaatctcggcgtcccccacaatcacggtgtctatccctcccatctcaccgctgcctcataacactcccgtgtcccacgccatacgcccaagaccgagccgcctagatctgattgggttggctctcgtcgcgggggcgaaggggaaggcgaggaagaaccaggaggcatgcgttcgtccaagatgctgcaactcctgatggcgctggccttctcggcgaccccgctgacgctgtatgtgccgccggcgcgcagcctcagcctcttcgtggaggccatggaggccgtctgccgcgactgcgggccctactcccacggcgctgtcgcccgcttccgcctcggcctctcccgcgtcctcgccggcctagcgtgcgccctccgctaggcgggccggcaccccatcgccggcgccggttcctcctgcctacaggagtatactacacatggacacacacacgcacgttcggtgaccttgtgctctccctgctttctatttccttttgtactactagcgaggaagtggtttctagcgcagcacagcaatctacatgctggagcaggactagcggtcagtttcaagatctttcctgcttcgtttctccctttttgtgctcggtgcgacgtcacgcccagatcccgtgctcacctccccgcaatcaaggtcgtcacgcccgacgaggatggccgccagtcgtcgcacatgttcagataggttgatgatactgaagtcatctgttttttgctgcaaactgaaataattcatctgtgcttgcgaaccatggagatgggtagtgagctatccaaaactgcatagaagcaggagctcgcacggcagttggatctcatcgccaggcaggtggaagtgtggttccagaacacacatgttcagataacacacatgttcatgcttatgctgaccccacacaggttcatatcgtcttctgcgtgtatgtagttgtttcttcttcaattctctttgtggggaaaacgttaattgggattttcccagcaatcagcttgataggcgacatcgtcattgtgggggtgagtgagtctaccgctattattcagtctgagtccactaaaccagaattccacaggatatgattgtacctatatttcctgaaaagacaaatgaaacaaacatcaaaagcaagtcactgcctattatttttgacctcctaatcttctacttcattggatttgcattgttctggctggaggcttttctgagcatgtgggtcattcaggttttggaaggtggtgcagttgtcaggactcttagagatcatagtattccttctaatggggatatcaatgaaagagcaaaggcaaaaagtccaatatatttattatcgggactacgaaggagatcaacgtaagttcagtttggtccattttatctattttcctttcttatggtatggagtcaacaaatggaattaaatagagcccatgctaagtttggaccaagtcatcacgagagaaaggaatctattggagcacctataaaattggatgtggaagctcatgctcatattcagaagcatagcgtaatcttacatattcagaaccaaaggctgatgaactggcagcatcagaaatggcagttgcatatagctcctcgaattgggtattattagttgagggatgacatccatctactgctgattccaagaacggaagcatttatctgatgtcctgttaagtgtgtgcaaggtcattggatgactgcattccatttggcttatcgagtaagcaatccccatttaacttttcaaacttgtcatataatacatcccagcctgaggtctgtgccttcaagttggttttattttgcacaaaatcggatgtcattccatttggcttattgagagccctgaagcaagattctggtatttcaacttctggaccaatcagctcagtctcttgttcgtgagcaaaataaccttcagttggcacatcttccagcactacaagattatcagaatatgcatactcatggaatatagcttcaatcctttgccttttctaacaagttgggttaacacttgagatatcatcatttaactgggaagggccatcgtctaaccacttataactgccattttcaggataatgcatttgcttataccctaacttgtaatcaatactggcaacattgtcatctgggcggcatgaattagtgatccttccagagaaacgaactatgcaaaacaaatgtcatattaataatctagaaacatgtttgagatgggttttatctattgatgaggagcctgttaagaaatgtttggttcgcctgtagctgcaaggaatgctaacttttttttgggttcgtctctgcggaggatgccattgttagttgtaaatattggcggcatattaggaaacaaattatccctatttgagttgcacacacatttcatgttattagtgtgaatttgtgagatattgaggttgatgatatatatgttgttcattt

SEQ ID NO: 61437 - DNA, 3042 bp, Zea Mays
ctgccgccccgcatcccgtccgcctcgccctctggccctccccgcggcaatctcggcgctcgccctccccagcggcaatctcggtgtcccccgcagcaagctcggcctcccctgcggcaatctcggcgtcccccacaatcacggtgtctatccctcccatctcaccgctgcctcataacactcccgtgtcccacgccatacgcccaagaccgagccgcctagatctgattgggttggctctcgtcgcgggggcgaaggggaaggcgaggaagaaccaggaggcatgcgttcgtccaagatgctgcaactcctgatggcgctggccttctcggcgaccccgctgacgctgtatgtgccgccggcgcgcagcctcagcctcttcgtggaggccatggaggccgtctgccgcgactgcgggccctactcccacggcgctgtcgcccgcttccgcctcggcctctcccgcgtcctcgccggcctagcgtgcgccctccgctaggcgggccggcaccccatcgccggcgccggttcctcctgcctacaggagtatactacacatggacacacacacgcacgttcggtgaccttgtgctctccctgctttctatttccttttgtactactagcgaggaagtggtttctagcgcagcacagcaatctacatgctggagcaggactagcggtcagtttcaagatctttcctgcttcgtttctccctttttgtgctcggtgcgacgtcacgcccagatcccgtgctcacctccccgcaatcaaggtcgtcacgcccgacgaggatggccgccagtcgtcgcacatgttcagataggttgatgatactgaagtcatctgttttttgctgcaaactgaaataattcatctgtgcttgcgaaccatggagatgggtagtgagctatccaaaactgcatagaagcaggagctcgcacggcagttggatctcatcgccaggcaggtggaagtgtggttccagaacacacatgttcagataacacacatgttcatgcttatgctgaccccacacaggttcatatcgtcttctgcgtgtatgtagttgtttcttcttcaattctctttgtggggaaaacgttaattgggattttcccagcaatcagcttgataggcgacatcgtcattgtgggggtgagtgagtctaccgctattattcagtctgagtccactaaaccagaattccacaggatatgattgtacctatatttcctgaaaagacaaatgaaacaaacatcaaaagcaagtcactgcctattatttttgacctcctaatcttctacttcattggatttgcattgttctggctggaggcttttctgagcatgtgggtcattcaggtgaagttactgcctaccgcttcactattcatccgtcttgatactttcagttggttgtgaactataagctttgcgtcccgcggcgtggaaggaaatccacattacaatggtagtggcattttatagatttatagattggcataccactattcaatggtagtggtatgccaatctataaaattggatgtggaagctcatgctcacattcagaagcatagcgtaatcttacatattcagaaccaaaggctgatgaactggcagcatcagaaatggcagttgcatatagctcctcgaattgggtattattagttgagggatgacatccatctactgctgagtaagtcacagaaagtgctctgttcaggctgactagatagggtaattgttattggtgtgttctgttcagttttttatagcatttttggcggggtaatatgaacttctattcatttttcaaatatattctagaccctaactaactgatccaaaatgtcacattgattgatatgtggattttgatacttctgactccatgcaactacttggaatgttgcttgtcgcgttggctcattttttattccttttactgtgcacattaatagcatttttacctataatgaacagtcttgtggttttattttcatttctggcgttaaatgtatgtctttctttctattgtatgagtttatttaggcataacctttatcactttctatcaatgctacaacagtagatatactaccatttatcattgaagtaattaagcggttgtatttcattttttatgttatcaaaatttttagttcttcaaatataatagatgaatcattgctaaatctaacattgctgtcaatgttttcatagttccaagaacggaagcatttatctgatgtcctgttaagtgtgtgcaaggtcattggatgactgcattccatttggcttatcgagtaagcaatccccatttaacttttcaaacttgtcatataatacatcccagcctgaggtctgtgccttcaagttggttttattttgcacaaaatcggatgtcattccatttggcttattgagagccctgaagcaagattctggtatttcaacttctggaccaatcagctcagtctcttgttcgtgagcaaaataaccttcagttggcacatcttccagcactacaagattatcagaatatgcatactcatggaatatagcttcaatcctttgccttttctaacaagttgggttaacacttgagatatcatcatttaactgggaagggccatcgtctaaccacttataactgccattttcaggataatgcatttgcttataccctaacttgtaatcaatactggcaacattgtcatctgggcggcatgaattagtgatccttccagagaaacgaactatgcaaaacaaatgtcatattaataatctagaaacatgtttgagatgggttttatctattgatgaggagcctgttaagaaatgtttggttcgcctgtagctgcaaggaatgctaacttttttttgggttcgtctctgcggaggatgccattgttagttgtaaatattggcggcatattaggaaacaaattatccctatttgagttgcacacacatttcatgttattagtgtgaatttgtgagatattgaggttgatgatatatatgttgttcattt

SEQ ID NO: 61438 - DNA, 2530 bp, Zea Mays
ctgccgccccgcatcccgtccgcctcgccctctggccctccccgcggcaatctcggcgctcgccctccccagcggcaatctcggtgtcccccgcagcaagctcggcctcccctgcggcaatctcggcgtcccccacaatcacggtgtctatccctcccatctcaccgctgcctcataacactcccgtgtcccacgccatacgcccaagaccgagccgcctagatctgattgggttggctctcgtcgcgggggcgaaggggaaggcgaggaagaaccaggaggcatgcgttcgtccaagatgctgcaactcctgatggcgctggccttctcggcgaccccgctgacgctgtatgtgccgccggcgcgcagcctcagcctcttcgtggaggccatggaggccgtctgccgcgactgcgggccctactcccacggcgctgtcgcccgcttccgcctcggcctctcccgcgtcctcgccggcctagcgtgcgccctccgctaggcgggccggcaccccatcgccggcgccggttcctcctgcctacaggagtatactacacatggacacacacacgcacgttcggtgaccttgtgctctccctgctttctatttccttttgtactactagcgaggaagtggtttctagcgcagcacagcaatctacatgctggagcaggactagcggtcagtttcaagatctttcctgcttcgtttctccctttttgtgctcggtgcgacgtcacgcccagatcccgtgctcacctccccgcaatcaaggtcgtcacgcccgacgaggatggccgccagtcgtcgcacatgttcagataggttgatgatactgaagtcatctgttttttgctgcaaactgaaataattcatctgtgcttgcgaaccatggagatgggtagtgagctatccaaaactgcatagaagcaggagctcgcacggcagttggatctcatcgccaggcaggtggaagtgtggttccagaacacacatgttcagataacacacatgttcatgcttatgctgaccccacacaggttcatatcgtcttctgcgtgtatgtagttgtttcttcttcaattctctttgtggggaaaacgttaatgtaagttatatttttactttttgcacctctcactattgtttctacatctttctttcttgaaaactcgtgaatctgaattgtaatgggatttccttccaccaatctacccatcatgcagtgggattttcccagcaatcagcttgataggcgacatcgtcattgtgggggtgagtgagtctaccgctattattcagtctgagtccactaaaccagaattccacaggatatgattgtacctatatttcctgaaaagacaaatgaaacaaacatcaaaagcaagtcactgcctattatttttgacctcctaatcttctacttcattggatttgcattgttctggctggaggcttttctgagcatgtgggtcattcagccaattactgaaagcggagatgaaatctcttatgaaggagcaaaggcaaaaagtccaatatatttattatcgggactacgaaggagatcaacgttgtggtcttgttgttacttgaacttcttaccacatagaaagcttcaagaagatttaactgacgaaatggtcaagttaacacgttgatagaaggaagttaacctgatgatggtgtttcctgatttaaatgtaggattgtgatgcgtaatcttacatattcagaaccaaaggctgatgaactggcagcatcagaaatggcagttgcatatagctcctcgaattgggtattattagttgagggatgacatccatctactgctgattccaagaacggaagcatttatctgatgtcctgttaagtgtgtgcaaggtcattggatgactgcattccatttggcttatcgaagccctgaagcaagattctggtatttcaacttctggaccaatcagctcagtctcttgttcgtgagcaaaataaccttcagttggcacatcttccagcactacaagattatcagaatatgcatactcatggaatatagcttcaatcctttgccttttctaacaagttgggttaacacttgagatatcatcatttaactgggaagggccatcgtctaaccacttataactgccattttcaggataatgcatttgcttataccctaacttgtaatcaatactggcaacattgtcatctgggcggcatgaattagtgatccttccagagaaacgaactatgcaaaacaaatgtcatattaataatctagaaacatgtttgagatgggttttatctattgatgaggagcctgttaagaaatgtttggttcgcctgtagctgcaaggaatgctaacttttttttgggttcgtctctgcggaggatgccattgttagttgtaaatattggcggcatattaggaaacaaattatccctatttgagttgcacacacatttcatgttattagtgtgaatttgtgagatattgaggttgatgatatatatgttgttcattt

SEQ ID NO: 61439 - DNA, 3414 bp, Zea Mays
ctgccgccccgcatcccgtccgcctcgccctctggccctccccgcggcaatctcggcgctcgccctccccagcggcaatctcggtgtcccccgcagcaagctcggcctcccctgcggcaatctcggcgtcccccacaatcacggtgtctatccctcccatctcaccgctgcctcataacactcccgtgtcccacgccatacgcccaagaccgagccgcctagatctgattgggttggctctcgtcgcgggggcgaaggggaaggcgaggaagaaccaggaggcatgcgttcgtccaagatgctgcaactcctgatggcgctggccttctcggcgaccccgctgacgctgtatgtgccgccggcgcgcagcctcagcctcttcgtggaggccatggaggccgtctgccgcgactgcgggccctactcccacggcgctgtcgcccgcttccgcctcggcctctcccgcgtcctcgccggcctagcgtgcgccctccgctaggcgggccggcaccccatcgccggcgccggttcctcctgcctacaggagtatactacacatggacacacacacgcacgttcggtgaccttgtgctctccctgctttctatttccttttgtactactagcgaggaagtggtttctagcgcagcacagcaatctacatgctggagcaggactagcggtcagtttcaagatctttcctgcttcgtttctccctttttgtgctcggtgcgacgtcacgcccagatcccgtgctcacctccccgcaatcaaggtcgtcacgcccgacgaggatggccgccagtcgtcgcacatgttcagataggttgatgatactgaagtcatctgttttttgctgcaaactgaaataattcatctgtgcttgcgaaccatggagatgggtagtgagctatccaaaactgcatagaagcaggagctcgcacggcagttggatctcatcgccaggcaggtggaagtgtggttccagaacacacatgttcagataacacacatgttcatgcttatgctgaccccacacaggttcatatcgtcttctgcgtgtatgtagttgtttcttcttcaattctctttgtggggaaaacgttaattgggattttcccagcaatcagcttgataggcgacatcgtcattgtgggggtgagtgagtctaccgctattattcagtctgagtccactaaaccagaattccacaggatatgattgtacctatatttcctgaaaagacaaatgaaacaaacatcaaaagcaagtcactgcctattatttttgacctcctaatcttctacttcattggatttgcattgttctggctggaggcttttctgagcatgtgggtcattcaggtgaagttactgcctaccgcttcactattcatccgtcttgatactttcagttggttgtgaactataagctttgcgtcccgcggcgtggaaggaaatccacattacaatggtagtggcattttatagatttatagattggcataccactattcaatggtagtggtgaattatctagaagcaacaaagcaacagatttaaaatgccagttatagagttaggcttagttttagttaaaatattagtggtgaattatctaggcatacatccagtccacaccctcaacataccgagttaggctcagttttagttaaacaacgtcttggtttcttgtgcctactgatggcttttcttaatattatatcaatgacatcttaggttttggaaggtggtgcagttgtcaggactcttagagatcatagtattccttctaatggggatatcaatgaaagagcaaaggcaaaaagtccaatatatttattatcgggactacgaaggagatcaacagcccatgctaagtttggaccaagtcatcacgagagaaaggaatctattggagcacctataaaattggatgtggaagctcatgctcatattcagaagcataggtatgccaatctataaaattggatgtggaagctcatgctcacattcagaagcatagcgtaatcttacatattcagaaccaaaggctgatgaactggcagcatcagaaatggcagttgcatatagctcctcgaattgggtattattagttgagggatgacatccatctactgctgagtaagtcacagaaagtgctctgttcaggctgactagatagggtaattgttattggtgtgttctgttcagttttttatagcatttttggcggggtaatatgaacttctattcatttttcaaatatattctagaccctaactaactgatccaaaatgtcacattgattgatatgtggattttgatacttctgactccatgcaactacttggaatgttgcttgtcgcgttggctcattttttattccttttactgtgcacattaatagcatttttacctataatgaacagtcttgtggttttattttcatttctggcgttaaatgtatgtctttctttctattgtatgagtttatttaggcataacctttatcactttctatcaatgctacaacagtagatatactaccatttatcattgaagtaattaagcggttgtatttcattttttatgttatcaaaatttttagttcttcaaatataatagatgaatcattgctaaatctaacattgctgtcaatgttttcatagttccaagaacggaagcatttatctgatgtcctgttaagtgtgtgcaaggtcattggatgactgcattccatttggcttatcgattggttttattttgcacaaaatcggatgtcattccatttggcttattgagagccctgaagcaagattctggtatttcaacttctggaccaatcagctcagtctcttgttcgtgagcaaaataaccttcagttggcacatcttccagcactacaagattatcagaatatgcatactcatggaatatagcttcaatcctttgccttttctaacaagttgggttaacacttgagatatcatcatttaactgggaagggccatcgtctaaccacttataactgccattttcaggataatgcatttgcttataccctaacttgtaatcaatactggcaacattgtcatctgggcggcatgaattagtgatccttccagagaaacgaactatgcaaaacaaatgtcatattaataatctagaaacatgtttgagatgggttttatctattgatgaggagcctgttaagaaatgtttggttcgcctgtagctgcaaggaatgctaacttttttttgggttcgtctctgcggaggatgccattgttagttgtaaatattggcggcatattaggaaacaaattatccctatttgagttgcacacacatttcatgttattagtgtgaatttgtgagatattgaggttgatgatatatatgttgttcattt

SEQ ID NO: 61440 - DNA, 3047 bp, Zea Mays
ctgccgccccgcatcccgtccgcctcgccctctggccctccccgcggcaatctcggcgctcgccctccccagcggcaatctcggtgtcccccgcagcaagctcggcctcccctgcggcaatctcggcgtcccccacaatcacggtgtctatccctcccatctcaccgctgcctcataacactcccgtgtcccacgccatacgcccaagaccgagccgcctagatctgattgggttggctctcgtcgcgggggcgaaggggaaggcgaggaagaaccaggaggcatgcgttcgtccaagatgctgcaactcctgatggcgctggccttctcggcgaccccgctgacgctgtatgtgccgccggcgcgcagcctcagcctcttcgtggaggccatggaggccgtctgccgcgactgcgggccctactcccacggcgctgtcgcccgcttccgcctcggcctctcccgcgtcctcgccggcctagcgtgcgccctccgctaggcgggccggcaccccatcgccggcgccggttcctcctgcctacaggagtatactacacatggacacacacacgcacgttcggtgaccttgtgctctccctgctttctatttccttttgtactactagcgaggaagtggtttctagcgcagcacagcaatctacatgctggagcaggactagcggtcagtttcaagatctttcctgcttcgtttctccctttttgtgctcggtgcgacgtcacgcccagatcccgtgctcacctccccgcaatcaaggtcgtcacgcccgacgaggatggccgccagtcgtcgcacatgttcagataggttgatgatactgaagtcatctgttttttgctgcaaactgaaataattcatctgtgcttgcgaaccatggagatgggtagtgagctatccaaaactgcatagaagcaggagctcgcacggcagttggatctcatcgccaggcaggtggaagtgtggttccagaacacacatgttcagataacacacatgttcatgcttatgctgaccccacacaggttcatatcgtcttctgcgtgtatgtagttgtttcttcttcaattctctttgtggggaaaacgttaattgggattttcccagcaatcagcttgataggcgacatcgtcattgtgggggtgagtgagtctaccgctattattcagtctgagtccactaaaccagaattccacaggatatgattgtacctatatttcctgaaaagacaaatgaaacaaacatcaaaagcaagtcactgcctattatttttgacctcctaatcttctacttcattggatttgcattgttctggctggaggcttttctgagcatgtgggtcattcaggtgaagttactgcctaccgcttcactattcatccgtcttgatactttcagttggttgtgaactataagctttgcgtcccgcggcgtggaaggaaatccacattacaatggtagtggcattttatagatttatagattggcataccactattcaatggtagtggtgaattatctagaagcaacaaagcaacagatttaaaatgccagttatagagttaggcttagttttagttaaaatattagtggtgaattatctaggcatacatccagtccacaccctcaacataccgagttaggctcagttttagttaaacaacgtcttggtttcttgtgcctactgatggcttttcttaatattatatcaatgacatcttaggttttggaaggtggtgcagttgtcaggactcttagagatcatagtattccttctaatggggatatcaatgaaagcaaaaagtccaatatatttattatcgggactacgaaggagatcaacgtaagttcagtttggtccattttatctattttcctttcttatggtatggagtcaacaaatggaattaaatagagcccatgctaagtttggaccaagtcatcacgagagaaaggaatctattggagcacctataaaattggatgtggaagctcatgctcatattcagaagcataggtatgccaatctataaaattggatgtggaagctcatgctcacattcagaagcataggtatgccaaattttttttcttaatatgtgagaagttatcttaggctccagatcaatgcccacattattcttatccacaacttctttattgcacatgcacaatctatttataggaccaattatttgcctggtgttagtaaattgatgtgttgtaagctataattgttgtggtgcctattagcttcattgttgttctaattgtttgaggatttgtgcgtcattttttgtgtcatcaaatgaaggttgtggtcttgttgttacttgaacttcttaccacatagaaagcttcaagaagatttaactgacgaaatggtcaagttaacacgttgatagaaggaagttaacctgatgatggtgtttcctgatttaaatgtaggattgtgatgcgtaatcttacatattcagaaccaaaggctgatgaactggcagcatcagaaatggcagttgcatatagctcctcgaattgggtattattagttgagggatgacatccatctactgctgattccaagaacggaagcatttatctgatgtcctgttaagtgtgtgcaaggtcattggatgactgcattccatttggcttatcgagataatgcatttgcttataccctaacttgtaatcaatactggcaacattgtcatctgggcggcatgaattagtgatccttccagagaaacgaactatgcaaaacaaatgtcatattaataatctagaaacatgtttgagatgggttttatctattgatgaggagcctgttaagaaatgtttggttcgcctgtagctgcaaggaatgctaacttttttttgggttcgtctctgcggaggatgccattgttagttgtaaatattggcggcatattaggaaacaaattatccctatttgagttgcacacacatttcatgttattagtgtgaatttgtgagatattgaggttgatgatatatatgttgttcattt

SEQ ID NO: 61441 - DNA, 3250 bp, Zea Mays
ctgccgccccgcatcccgtccgcctcgccctctggccctccccgcggcaatctcggcgctcgccctccccagcggcaatctcggtgtcccccgcagcaagctcggcctcccctgcggcaatctcggcgtcccccacaatcacggtgtctatccctcccatctcaccgctgcctcataacactcccgtgtcccacgccatacgcccaagaccgagccgcctagatctgattgggttggctctcgtcgcgggggcgaaggggaaggcgaggaagaaccaggaggcatgcgttcgtccaagatgctgcaactcctgatggcgctggccttctcggcgaccccgctgacgctgtatgtgccgccggcgcgcagcctcagcctcttcgtggaggccatggaggccgtctgccgcgactgcgggccctactcccacggcgctgtcgcccgcttccgcctcggcctctcccgcgtcctcgccggcctagcgtgcgccctccgctaggcgggccggcaccccatcgccggcgccggttcctcctgcctacaggagtatactacacatggacacacacacgcacgttcggtgaccttgtgctctccctgctttctatttccttttgtactactagcgaggaagtggtttctagcgcagcacagcaatctacatgctggagcaggactagcggtcagtttcaagatctttcctgcttcgtttctccctttttgtgctcggtgcgacgtcacgcccagatcccgtgctcacctccccgcaatcaaggtcgtcacgcccgacgaggatggccgccagtcgtcgcacatgttcagataggttgatgatactgaagtcatctgttttttgctgcaaactgaaataattcatctgtgcttgcgaaccatggagatgggtagtgagctatccaaaactgcatagaagcaggagctcgcacggcagttggatctcatcgccaggcaggtggaagtgtggttccagaacacacatgttcagataacacacatgttcatgcttatgctgaccccacacaggttcatatcgtcttctgcgtgtatgtagttgtttcttcttcaattctctttgtggggaaaacgttaattgggattttcccagcaatcagcttgataggcgacatcgtcattgtgggggtgagtgagtctaccgctattattcagtctgagtccactaaaccagaattccacaggatatgattgtacctatatttcctgaaaagacaaatgaaacaaacatcaaaagcaagtcactgcctattatttttgacctcctaatcttctacttcattggatttgcattgttctggctggaggcttttctgagcatgtgggtcattcaggtgaagttactgcctaccgcttcactattcatccgtcttgatactttcagttggttgtgaactataagctttgcgtcccgcggcgtggaaggaaatccacattacaatggtagtggcattttatagatttatagattggcataccactattcaatggtagtggtgaattatctagaagcaacaaagcaacagatttaaaatgccagttatagagttaggcttagttttagttaaaatattagtggtgaattatctaggcatacatccagtccacaccctcaacataccgagttaggctcagttttagttaaacaacgtcttggtttcttgtgcctactgatggcttttcttaatattatatcaatgacatcttaggttttggaaggtggtgcagttgtcaggactcttagagatcatagtattccttctaatggggatatcaatgaaagtaaagtttcttatttgttattattatattcttgttggtgcaacctgaaaatgaaaagccaattactgaaagcggagatgaaatctcttatgaaggagcaaaggcaaaaagtccaatatatttattatcgggactacgaaggagatcaacgtaagttcagtttggtccattttatctattttcctttcttatggtatggagtcaacaaatggaattaaatagagcccatgctaagtttggaccaagtcatcacgagagaaaggaatctattggagcacctataaaattggatgtggaagctcatgctcatattcagaagcataggtatgccaatctataaaattggatgtggaagctcatgctcacattcagaagcataggttgtggtcttgttgttacttgaacttcttaccacatagaaagcttcaagaagatttaactgacgaaatggtcaagttaacacgttgatagaaggaagttaacctgatgatggtgtttcctgatttaaatgtaggattgtgatgaaccaaaggctgatgaactggcagcatcagaaatggcagttgcatatagctcctcgaattgggtattattagttgagggatgacatccatctactgctgattccaagaacggaagcatttatctgatgtcctgttaagtgtgtgcaaggtcattggatgactgcattccatttggcttatcgagtaagcaatccccatttaacttttcaaacttgtcatataatacatcccagcctgaggtctgtgccttcaagttggttttattttgcacaaaatcggatgtcattccatttggcttattgagagccctgaagcaagattctggtatttcaacttctggaccaatcagctcagtctcttgttcgtgagcaaaataaccttcagttggcacatcttccagcactacaagattatcagaatatgcatactcatggaatatagcttcaatcctttgccttttctaacaagttgggttaacacttgagatatcatcatttaactgggaagggccatcgtctaaccacttataactgccattttcaggataatgcatttgcttataccctaacttgtaatcaatactggcaacattgtcatctgggcggcatgaattagtgatccttccagagaaacgaactatgcaaaacaaatgtcatattaataatctagaaacatgtttgagatgggttttatctattgatgaggagcctgttaagaaatgtttggttcgcctgtagctgcaaggaatgctaacttttttttgggttcgtctctgcggaggatgccattgttagttgtaaatattggcggcatattaggaaacaaattatccctatttgagttgcacacacatttcatgttattagtgtgaatttgtgagatattgaggttgatgatatatatgttgttcattt

SEQ ID NO: 61442 - DNA, 3395 bp, Zea Mays
ctgccgccccgcatcccgtccgcctcgccctctggccctccccgcggcaatctcggcgctcgccctccccagcggcaatctcggtgtcccccgcagcaagctcggcctcccctgcggcaatctcggcgtcccccacaatcacggtgtctatccctcccatctcaccgctgcctcataacactcccgtgtcccacgccatacgcccaagaccgagccgcctagatctgattgggttggctctcgtcgcgggggcgaaggggaaggcgaggaagaaccaggaggcatgcgttcgtccaagatgctgcaactcctgatggcgctggccttctcggcgaccccgctgacgctgtatgtgccgccggcgcgcagcctcagcctcttcgtggaggccatggaggccgtctgccgcgactgcgggccctactcccacggcgctgtcgcccgcttccgcctcggcctctcccgcgtcctcgccggcctagcgtgcgccctccgctaggcgggccggcaccccatcgccggcgccggttcctcctgcctacaggagtatactacacatggacacacacacgcacgttcggtgaccttgtgctctccctgctttctatttccttttgtactactagcgaggaagtggtttctagcgcagcacagcaatctacatgctggagcaggactagcggtcagtttcaagatctttcctgcttcgtttctccctttttgtgctcggtgcgacgtcacgcccagatcccgtgctcacctccccgcaatcaaggtcgtcacgcccgacgaggatggccgccagtcgtcgcacatgttcagataggttgatgatactgaagtcatctgttttttgctgcaaactgaaataattcatctgtgcttgcgaaccatggagatgggtagtgagctatccaaaactgcatagaagcaggagctcgcacggcagttggatctcatcgccaggcaggtggaagtgtggttccagaacacacatgttcagataacacacatgttcatgcttatgctgaccccacacaggttcatatcgtcttctgcgtgtatgtagttgtttcttcttcaattctctttgtggggaaaacgttaatgtaagttatatttttactttttgcacctctcactattgtttctacatctttctttcttgaaaactcgtgaatctgaattgtaatgggatttccttccaccaatctacccatcatgcagtgggattttcccagcaatcagcttgataggcgacatcgtcattgtgggggtgagtgagtctaccgctattattcagtctgagtccactaaaccagaattccacaggatatgattgtacctatatttcctgaaaagacaaatgaaacaaacatcaaaagcaagtcactgcctattatttttgacctcctaatcttctacttcattggatttgcattgttctggctggaggcttttctgagcatgtgggtcattcaggttttggaaggtggtgcagttgtcaggactcttagagatcatagtattccttctaatggggatatcaatgaaagtaaagtttcttatttgttattattatattcttgttggtgcaacctgaaaatgaaaagccaattactgaaagcggagatgaaatctcttatgaaggagcaaaggcaaaaagtccaatatatttattatcgggactacgaaggagatcaacgtaagttcagtttggtccattttatctattttcctttcttatggtatggagtcaacaaatggaattaaatagagcccatgctaagtttggaccaagtcatcacgagagaaaggaatctattggagcacctataaaattggatgtggaagctcatgctcatattcagaagcataggtatgccaatctataaaattggatgtggaagctcatgctcacattcagaagcatagcgtaatcttacatattcagaaccaaaggctgatgaactggcagcatcagaaatggcagttgcatatagctcctcgaattgggtattattagttgagggatgacatccatctactgctgagtaagtcacagaaagtgctctgttcaggctgactagatagggtaattgttattggtgtgttctgttcagttttttatagcatttttggcggggtaatatgaacttctattcatttttcaaatatattctagaccctaactaactgatccaaaatgtcacattgattgatatgtggattttgatacttctgactccatgcaactacttggaatgttgcttgtcgcgttggctcattttttattccttttactgtgcacattaatagcatttttacctataatgaacagtcttgtggttttattttcatttctggcgttaaatgtatgtctttctttctattgtatgagtttatttaggcataacctttatcactttctatcaatgctacaacagtagatatactaccatttatcattgaagtaattaagcggttgtatttcattttttatgttatcaaaatttttagttcttcaaatataatagatgaatcattgctaaatctaacattgctgtcaatgttttcatagttccaagaacggaagcatttatctgatgtcctgttaagtgtgtgcaaggtcattggatgactgcattccatttggcttatcgagtaagcaatccccatttaacttttcaaacttgtcatataatacatcccagcctgaggtctgtgccttcaagttggttttattttgcacaaaatcggatgtcattccatttggcttattgagagccctgaagcaagattctggtatttcaacttctggaccaatcagctcagtctcttgttcgtgagcaaaataaccttcagttggcacatcttccagcactacaagattatcagaatatgcatactcatggaatatagcttcaatcctttgccttttctaacaagttgggttaacacttgagatatcatcatttaactgggaagggccatcgtctaaccacttataactgccattttcaggataatgcatttgcttataccctaacttgtaatcaatactggcaacattgtcatctgggcggcatgaattagtgatccttccagagaaacgaactatgcaaaacaaatgtcatattaataatctagaaacatgtttgagatgggttttatctattgatgaggagcctgttaagaaatgtttggttcgcctgtagctgcaaggaatgctaacttttttttgggttcgtctctgcggaggatgccattgttagttgtaaatattggcggcatattaggaaacaaattatccctatttgagttgcacacacatttcatgttattagtgtgaatttgtgagatattgaggttgatgatatatatgttgttcattt

SEQ ID NO: 61443 - DNA, 2548 bp, Zea Mays
ctgccgccccgcatcccgtccgcctcgccctctggccctccccgcggcaatctcggcgctcgccctccccagcggcaatctcggtgtcccccgcagcaagctcggcctcccctgcggcaatctcggcgtcccccacaatcacggtgtctatccctcccatctcaccgctgcctcataacactcccgtgtcccacgccatacgcccaagaccgagccgcctagatctgattgggttggctctcgtcgcgggggcgaaggggaaggcgaggaagaaccaggaggcatgcgttcgtccaagatgctgcaactcctgatggcgctggccttctcggcgaccccgctgacgctgtatgtgccgccggcgcgcagcctcagcctcttcgtggaggccatggaggccgtctgccgcgactgcgggccctactcccacggcgctgtcgcccgcttccgcctcggcctctcccgcgtcctcgccggcctagcgtgcgccctccgctaggcgggccggcaccccatcgccggcgccggttcctcctgcctacaggagtatactacacatggacacacacacgcacgttcggtgaccttgtgctctccctgctttctatttccttttgtactactagcgaggaagtggtttctagcgcagcacagcaatctacatgctggagcaggactagcggtcagtttcaagatctttcctgcttcgtttctccctttttgtgctcggtgcgacgtcacgcccagatcccgtgctcacctccccgcaatcaaggtcgtcacgcccgacgaggatggccgccagtcgtcgcacatgttcagataggttgatgatactgaagtcatctgttttttgctgcaaactgaaataattcatctgtgcttgcgaaccatggagatgggtagtgagctatccaaaactgcatagaagcaggagctcgcacggcagttggatctcatcgccaggcaggttcatatcgtcttctgcgtgtatgtagttgtttcttcttcaattctctttgtggggaaaacgttaattgggattttcccagcaatcagcttgataggcgacatcgtcattgtgggggtgagtgagtctaccgctattattcagtctgagtccactaaaccagaattccacaggatatgattgtacctatatttcctgaaaagacaaatgaaacaaacatcaaaagcaagtcactgcctattatttttgacctcctaatcttctacttcattggatttgcattgttctggctggaggcttttctgagcatgtgggtcattcagccaattactgaaagcggagatgaaatctcttatgaaggagcaaaggcaaaaagtccaatatatttattatcgggactacgaaggagatcaacgtaagttcagtttggtccattttatctattttcctttcttatggtatggagtcaacaaatggaattaaatagagcccatgctaagtttggaccaagtcatcacgagagaaaggaatctattggagcacctataaaattggatgtggaagctcatgctcatattcagaagcataggtatgccaatctataaaattggatgtggaagctcatgctcacattcagaagcatagcgtaatcttacatattcagaaccaaaggctgatgaactggcagcatcagaaatggcagttgcatatagctcctcgaattgggtattattagttgagggatgacatccatctactgctgattccaagaacggaagcatttatctgatgtcctgttaagtgtgtgcaaggtcattggatgactgcattccatttggcttatcgagtaagcaatccccatttaacttttcaaacttgtcatataatacatcccagcctgaggtctgtgccttcaagttggttttattttgcacaaaatcggatgtcattccatttggcttattgagagccctgaagcaagattctggtatttcaacttctggaccaatcagctcagtctcttgttcgtgagcaaaataaccttcagttggcacatcttccagcactacaagattatcagaatatgcatactcatggaatatagcttcaatcctttgccttttctaacaagttgggttaacacttgagatatcatcatttaactgggaagggccatcgtctaaccacttataactgccattttcaggataatgcatttgcttataccctaacttgtaatcaatactggcaacattgtcatctgggcggcatgaattagtgatccttccagagaaacgaactatgcaaaacaaatgtcatattaataatctagaaacatgtttgagatgggttttatctattgatgaggagcctgttaagaaatgtttggttcgcctgtagctgcaaggaatgctaacttttttttgggttcgtctctgcggaggatgccattgttagttgtaaatattggcggcatattaggaaacaaattatccctatttgagttgcacacacatttcatgttattagtgtgaatttgtgagatattgaggttgatgatatatatgttgttcattt

SEQ ID NO: 61444 - DNA, 3122 bp, Zea Mays
ctgccgccccgcatcccgtccgcctcgccctctggccctccccgcggcaatctcggcgctcgccctccccagcggcaatctcggtgtcccccgcagcaagctcggcctcccctgcggcaatctcggcgtcccccacaatcacggtgtctatccctcccatctcaccgctgcctcataacactcccgtgtcccacgccatacgcccaagaccgagccgcctagatctgattgggttggctctcgtcgcgggggcgaaggggaaggcgaggaagaaccaggaggcatgcgttcgtccaagatgctgcaactcctgatggcgctggccttctcggcgaccccgctgacgctgtatgtgccgccggcgcgcagcctcagcctcttcgtggaggccatggaggccgtctgccgcgactgcgggccctactcccacggcgctgtcgcccgcttccgcctcggcctctcccgcgtcctcgccggcctagcgtgcgccctccgctaggcgggccggcaccccatcgccggcgccggttcctcctgcctacaggagtatactacacatggacacacacacgcacgttcggtgaccttgtgctctccctgctttctatttccttttgtactactagcgaggaagtggtttctagcgcagcacagcaatctacatgctggagcaggactagcggtcagtttcaagatctttcctgcttcgtttctccctttttgtgctcggtgcgacgtcacgcccagatcccgtgctcacctccccgcaatcaaggtcgtcacgcccgacgaggatggccgccagtcgtcgcacatgttcagataggttgatgatactgaagtcatctgttttttgctgcaaactgaaataattcatctgtgcttgcgaaccatggagatgggtagtgagctatccaaaactgcatagaagcaggagctcgcacggcagttggatctcatcgccaggcaggtggaagtgtggttccagaacacacatgttcagataacacacatgttcatgcttatgctgaccccacacaggttcatatcgtcttctgcgtgtatgtagttgtttcttcttcaattctctttgtggggaaaacgttaatgtaagttatatttttactttttgcacctctcactattgtttctacatctttctttcttgaaaactcgtgaatctgaattgtaatgggatttccttccaccaatctacccatcatgcagtgggattttcccagcaatcagcttgataggcgacatcgtcattgtgggggtgagtgagtctaccgctattattcagtctgagtccactaaaccagaattccacaggatatgattgtacctatatttcctgaaaagacaaatgaaacaaacatcaaaagcaagtcactgcctattatttttgacctcctaatcttctacttcattggatttgcattgttctggctggaggcttttctgagcatgtgggtcattcagccaattactgaaagcggagatgaaatctcttatgaaggagcaaaggcaaaaagtccaatatatttattatcgggactacgaaggagatcaacgtaagttcagtttggtccattttatctattttcctttcttatggtatggagtcaacaaatggaattaaatagagcccatgctaagtttggaccaagtcatcacgagagaaaggaatctattggagcacctataaaattggatgtggaagctcatgctcatattcagaagcataggtatgccaatctataaaattggatgtggaagctcatgctcacattcagaagcataggtatgccaaattttttttcttaatatgtgagaagttatcttaggctccagatcaatgcccacattattcttatccacaacttctttattgcacatgcacaatctatttataggaccaattatttgcctggtgttagtaaattgatgtgttgtaagctataattgttgtggtgcctattagcttcattgttgttctaattgtttgaggatttgtgcgtcattttttgtgtcatcaaatgaaggttgtggtcttgttgttacttgaacttcttaccacatagaaagcttcaagaagatttaactgacgaaatggtcaagttaacacgttgatagaaggaagttaacctgatgatggtgtttcctgatttaaatgtaggattgtgatgcgtaatcttacatattcagaaccaaaggctgatgaactggcagcatcagaaatggcagttgcatatagctcctcgaattgggtattattagttgagggatgacatccatctactgctgattccaagaacggaagcatttatctgatgtcctgttaagtgtgtgcaaggtcattggatgactgcattccatttggcttatcgagtaagcaatccccatttaacttttcaaacttgtcatataatacatcccagcctgaggtctgtgccttcaagttggttttattttgcacaaaatcggatgtcattccatttggcttattgagagccctgaagcaagattctggtatttcaacttctggaccaatcagctcagtctcttgttcgtgagcaaaataaccttcagttggcacatcttccagcactacaagattatcagaatatgcatactcatggaatatagcttcaatcctttgccttttctaacaagttgggttaacacttgagatatcatcatttaactgggaagggccatcgtctaaccacttataactgccattttcaggataatgcatttgcttataccctaacttgtaatcaatactggcaacattgtcatctgggcggcatgaattagtgatccttccagagaaacgaactatgcaaaacaaatgtcatattaataatctagaaacatgtttgagatgggttttatctattgatgaggagcctgttaagaaatgtttggttcgcctgtagctgcaaggaatgctaacttttttttgggttcgtctctgcggaggatgccattgttagttgtaaatattggcggcatattaggaaacaaattatccctatttgagttgcacacacatttcatgttattagtgtgaatttgtgagatattgaggttgatgatatatatgttgttcattt

SEQ ID NO: 61445 - DNA, 3160 bp, Zea Mays
ctgccgccccgcatcccgtccgcctcgccctctggccctccccgcggcaatctcggcgctcgccctccccagcggcaatctcggtgtcccccgcagcaagctcggcctcccctgcggcaatctcggcgtcccccacaatcacggtgtctatccctcccatctcaccgctgcctcataacactcccgtgtcccacgccatacgcccaagaccgagccgcctagatctgattgggttggctctcgtcgcgggggcgaaggggaaggcgaggaagaaccaggaggcatgcgttcgtccaagatgctgcaactcctgatggcgctggccttctcggcgaccccgctgacgctgtatgtgccgccggcgcgcagcctcagcctcttcgtggaggccatggaggccgtctgccgcgactgcgggccctactcccacggcgctgtcgcccgcttccgcctcggcctctcccgcgtcctcgccggcctagcgtgcgccctccgctaggcgggccggcaccccatcgccggcgccggttcctcctgcctacaggagtatactacacatggacacacacacgcacgttcggtgaccttgtgctctccctgctttctatttccttttgtactactagcgaggaagtggtttctagcgcagcacagcaatctacatgctggagcaggactagcggtcagtttcaagatctttcctgcttcgtttctccctttttgtgctcggtgcgacgtcacgcccagatcccgtgctcacctccccgcaatcaaggtcgtcacgcccgacgaggatggccgccagtcgtcgcacatgttcagataggttgatgatactgaagtcatctgttttttgctgcaaactgaaataattcatctgtgcttgcgaaccatggagatgggtagtgagctatccaaaactgcatagaagcaggagctcgcacggcagttggatctcatcgccaggcagttgtttcttcttcaattctctttgtggggaaaacgttaattgggattttcccagcaatcagcttgataggcgacatcgtcattgtgggggtgagtgagtctaccgctattattcagtctgagtccactaaaccagaattccacaggatatgattgtacctatatttcctgaaaagacaaatgaaacaaacatcaaaagcaagtcactgcctattatttttgacctcctaatcttctacttcattggatttgcattgttctggctggaggcttttctgagcatgtgggtcattcaggtgaagttactgcctaccgcttcactattcatccgtcttgatactttcagttggttgtgaactataagctttgcgtcccgcggcgtggaaggaaatccacattacaatggtagtggcattttatagatttatagattggcataccactattcaatggtagtggtgaattatctagaagcaacaaagcaacagatttaaaatgccagttatagagttaggcttagttttagttaaaatattagtggtgaattatctaggcatacatccagtccacaccctcaacataccgagttaggctcagttttagttaaacaacgtcttggtttcttgtgcctactgatggcttttcttaatattatatcaatgacatcttaggttttggaaggtggtgcagttgtcaggactcttagagatcatagtattccttctaatggggatatcaatgaaagtaaagtttcttatttgttattattatattcttgttggtgcaacctgaaaatgaaaagccaattactgaaagcggagatgaaatctcttatgaaggagcaaaggcaaaaagtccaatatatttattatcgggactacgaaggagatcaactttggaccaagtcatcacgagagaaaggaatctattggagcacctataaaattggatgtggaagctcatgctcatattcagaagcataggtatgccaatctataaaattggatgtggaagctcatgctcacattcagaagcataggtatgccaaattttttttcttaatatgtgagaagttatcttaggctccagatcaatgcccacattattcttatccacaacttctttattgcacatgcacaatctatttataggaccaattatttgcctggtgttagtaaattgatgtgttgtaagctataattgttgtggtgcctattagcttcattgttgttctaattgtttgaggatttgtgcgtcattttttgtgtcatcaaatgaaggttgtggtcttgttgttacttgaacttcttaccacatagaaagcttcaagaagatttaactgacgaaatggtcaagttaacacgttgatagaaggaagttaacctgatgatggtgtttcctgatttaaatgtaggattgtgatgcgtaatcttacatattcagaaccaaaggctgatgaactggcagcatcagaaatggcagttgcatatagctcctcgaattgggtattattagttgagggatgacatccatctactgctgattccaagaacggaagcatttatctgatgtcctgttaagtgtgtgcaaggtcattggatgactgcattccatttggcttatcgactcagtctcttgttcgtgagcaaaataaccttcagttggcacatcttccagcactacaagattatcagaatatgcatactcatggaatatagcttcaatcctttgccttttctaacaagttgggttaacacttgagatatcatcatttaactgggaagggccatcgtctaaccacttataactgccattttcaggataatgcatttgcttataccctaacttgtaatcaatactggcaacattgtcatctgggcggcatgaattagtgatccttccagagaaacgaactatgcaaaacaaatgtcatattaataatctagaaacatgtttgagatgggttttatctattgatgaggagcctgttaagaaatgtttggttcgcctgtagctgcaaggaatgctaacttttttttgggttcgtctctgcggaggatgccattgttagttgtaaatattggcggcatattaggaaacaaattatccctatttgagttgcacacacatttcatgttattagtgtgaatttgtgagatattgaggttgatgatatatatgttgttcattt

SEQ ID NO: 61446 - DNA, 3106 bp, Zea Mays
ctgccgccccgcatcccgtccgcctcgccctctggccctccccgcggcaatctcggcgctcgccctccccagcggcaatctcggtgtcccccgcagcaagctcggcctcccctgcggcaatctcggcgtcccccacaatcacggtgtctatccctcccatctcaccgctgcctcataacactcccgtgtcccacgccatacgcccaagaccgagccgcctagatctgattgggttggctctcgtcgcgggggcgaaggggaaggcgaggaagaaccaggaggcatgcgttcgtccaagatgctgcaactcctgatggcgctggccttctcggcgaccccgctgacgctgtatgtgccgccggcgcgcagcctcagcctcttcgtggaggccatggaggccgtctgccgcgactgcgggccctactcccacggcgctgtcgcccgcttccgcctcggcctctcccgcgtcctcgccggcctagcgtgcgccctccgctaggcgggccggcaccccatcgccggcgccggttcctcctgcctacaggagtatactacacatggacacacacacgcacgttcggtgaccttgtgctctccctgctttctatttccttttgtactactagcgaggaagtggtttctagcgcagcacagcaatctacatgctggagcaggactagcggtcagtttcaagatctttcctgcttcgtttctccctttttgtgctcggtgcgacgtcacgcccagatcccgtgctcacctccccgcaatcaaggtcgtcacgcccgacgaggatggccgccagtcgtcgcacatgttcagataggttgatgatactgaagtcatctgttttttgctgcaaactgaaataattcatctgtgcttgcgaaccatggagatgggtagtgagctatccaaaactgcatagaagcaggagctcgcacggcagttggatctcatcgccaggcagtgggattttcccagcaatcagcttgataggcgacatcgtcattgtgggggtgagtgagtctaccgctattattcagtctgagtccactaaaccagaattccacaggatatgattgtacctatatttcctgaaaagacaaatgaaacaaacatcaaaagcaagtcactgcctattatttttgacctcctaatcttctacttcattggatttgcattgttctggctggaggcttttctgagcatgtgggtcattcaggttttggaaggtggtgcagttgtcaggactcttagagatcatagtattccttctaatggggatatcaatgaaagtaaagtttcttatttgttattattatattcttgttggtgcaacctgaaaatgaaaagccaattactgaaagcggagatgaaatctcttatgaaggagcaaaggcaaaaagtccaatatatttattatcgggactacgaaggagatcaacgtaagttcagtttggtccattttatctattttcctttcttatggtatggagtcaacaaatggaattaaatagagcccatgctaagtttggaccaagtcatcacgagagaaaggaatctattggagcacctataaaattggatgtggaagctcatgctcatattcagaagcataggtatgccaatctataaaattggatgtggaagctcatgctcacattcagaagcataggtatgccaaattttttttcttaatatgtgagaagttatcttaggctccagatcaatgcccacattattcttatccacaacttctttattgcacatgcacaatctatttataggaccaattatttgcctggtgttagtaaattgatgtgttgtaagctataattgttgtggtgcctattagcttcattgttgttctaattgtttgaggatttgtgcgtcattttttgtgtcatcaaatgaaggttgtggtcttgttgttacttgaacttcttaccacatagaaagcttcaagaagatttaactgacgaaatggtcaagttaacacgttgatagaaggaagttaacctgatgatggtgtttcctgatttaaatgtaggattgtgatggtatgatggatgtttcaattggagcctactatatagtcctcttcatcatataaggttatgcatatgaactcttgggatttacaaaatttgcttctatatgttggatgcagcgtaatcttacatattcagaaccaaaggctgatgaactggcagcatcagaaatggcagttgcatatagctcctcgaattgggtattattagttgagggatgacatccatctactgctgattccaagaacggaagcatttatctgatgtcctgttaagtgtgtgcaaggtcattggatgactgcattccatttggcttatcgagtaagcaatccccatttaacttttcaaacttgtcatataatacatcccagcctgaggtctgtgccttcaagttggttttattttgcacaaaatcggatgtcattccatttggcttattgagagccctgaagcaagattctggtatttcaacttctggaccaatcagctcagtctcttgttcgtgagcaaaataaccttcagttggcacatcttccagcactacaagattatcagaatatgcatactcatggaatatagcttcaatcctttgccttttctaacaagttgggttaacacttgagatatcatcatttaactgggaagggccatcgtctaaccacttataactgccattttcaggataatgcatttgcttataccctaacttgtaatcaatactggcaacattgtcatctgggcggcatgaattagtgatccttccagagaaacgaactatgcaaaacaaatgtcatattaataatctagaaacatgtttgagatgggttttatctattgatgaggagcctgttaagaaatgtttggttcgcctgtagctgcaaggaatgctaacttttttttgggttcgtctctgcggaggatgccattgttagttgtaaatattggcggcatattaggaaacaaattatccctatttgagttgcacacacatttcatgttattagtgtgaatttgtgagatattgaggttgatgatatatatgttgttcattt

SEQ ID NO: 61447 - DNA, 2641 bp, Zea Mays
ctgccgccccgcatcccgtccgcctcgccctctggccctccccgcggcaatctcggcgctcgccctccccagcggcaatctcggtgtcccccgcagcaagctcggcctcccctgcggcaatctcggcgtcccccacaatcacggtgtctatccctcccatctcaccgctgcctcataacactcccgtgtcccacgccatacgcccaagaccgagccgcctagatctgattgggttggctctcgtcgcgggggcgaaggggaaggcgaggaagaaccaggaggcatgcgttcgtccaagatgctgcaactcctgatggcgctggccttctcggcgaccccgctgacgctgtatgtgccgccggcgcgcagcctcagcctcttcgtggaggccatggaggccgtctgccgcgactgcgggccctactcccacggcgctgtcgcccgcttccgcctcggcctctcccgcgtcctcgccggcctagcgtgcgccctccgctaggcgggccggcaccccatcgccggcgccggttcctcctgcctacaggagtatactacacatggacacacacacgcacgttcggtgaccttgtgctctccctgctttctatttccttttgtactactagcgaggaagtggtttctagcgcagcacagcaatctacatgctggagcaggactagcggtcagtttcaagatctttcctgcttcgtttctccctttttgtgctcggtgcgacgtcacgcccagatcccgtgctcacctccccgcaatcaaggtcgtcacgcccgacgaggatggccgccagtcgtcgcacatgttcagataggttgatgatactgaagtcatctgttttttgctgcaaactgaaataattcatctgtgcttgcgaaccatggagatgggtagtgagctatccaaaactgcatagaagcaggagctcgcacggcagttggatctcatcgccaggcaggttcatatcgtcttctgcgtgtatgtagttgtttcttcttcaattctctttgtggggaaaacgttaattgggattttcccagcaatcagcttgataggcgacatcgtcattgtgggggtgagtgagtctaccgctattattcagtctgagtccactaaaccagaattccacaggatatgattgtacctatatttcctgaaaagacaaatgaaacaaacatcaaaagcaagtcactgcctattatttttgacctcctaatcttctacttcattggatttgcattgttctggctggaggcttttctgagcatgtgggtcattcaggtgaagttactgcctaccgcttcactattcatccgtcttgatactttcagttggttgtgaactataagctttgcgtcccgcggcgtggaaggaaatccacattacaatggttttggaaggtggtgcagttgtcaggactcttagagatcatagtattccttctaatggggatatcaatgaaagtaaagtttcttatttgttattattatattcttgttggtgcaacctgaaaatgaaaagccaattactgaaagcggagatgaaatctcttatgaaggagcaaaggcaaaaagtccaatatatttattatcgggactacgaaggagatcaacgtaagttcagtttggtccattttatctattttcctttcttatggtatggagtcaacaaatggaattaaatagagcccatgctaagtttggaccaagtcatcacgagagaaaggaatctattggagcacctataaaattggatgtggaagctcatgctcatattcagaagcataggtatgccaatctataaaattggatgtggaagctcatgctcacattcagaagcatagcgtaatcttacatattcagaaccaaaggctgatgaactggcagcatcagaaatggcagttgcatatagctcctcgaattgggtattattagttgagggatgacatccatctactgctgattccaagaacggaagcatttatctgatgtcctgttaagtgtgtgcaaggtcattggatgactgcattccatttggcttatcgattggttttattttgcacaaaatcggatgtcattccatttggcttattgagagccctgaagcaagattctggtatttcaacttctggaccaatcagctcagtctcttgttcgtgagcaaaataaccttcagttggcacatcttccagcactacaagattatcagaatatgcatactcatggaatatagcttcaatcctttgccttttctaacaagataatgcatttgcttataccctaacttgtaatcaatactggcaacattgtcatctgggcggcatgaattagtgatccttccagagaaacgaactatgcaaaacaaatgtcatattaataatctagaaacatgtttgagatgggttttatctattgatgaggagcctgttaagaaatgtttggttcgcctgtagctgcaaggaatgctaacttttttttgggttcgtctctgcggaggatgccattgttagttgtaaatattggcggcatattaggaaacaaattatccctatttgagttgcacacacatttcatgttattagtgtgaatttgtgagatattgaggttgatgatatatatgttgttcattt

SEQ ID NO: 61448 - DNA, 3064 bp, Zea Mays
ctgccgccccgcatcccgtccgcctcgccctctggccctccccgcggcaatctcggcgctcgccctccccagcggcaatctcggtgtcccccgcagcaagctcggcctcccctgcggcaatctcggcgtcccccacaatcacggtgtctatccctcccatctcaccgctgcctcataacactcccgtgtcccacgccatacgcccaagaccgagccgcctagatctgattgggttggctctcgtcgcgggggcgaaggggaaggcgaggaagaaccaggaggcatgcgttcgtccaagatgctgcaactcctgatggcgctggccttctcggcgaccccgctgacgctgtatgtgccgccggcgcgcagcctcagcctcttcgtggaggccatggaggccgtctgccgcgactgcgggccctactcccacggcgctgtcgcccgcttccgcctcggcctctcccgcgtcctcgccggcctagcgtgcgccctccgctaggcgggccggcaccccatcgccggcgccggttcctcctgcctacaggagtatactacacatggacacacacacgcacgttcggtgaccttgtgctctccctgctttctatttccttttgtactactagcgaggaagtggtttctagcgcagcacagcaatctacatgctggagcaggactagcggtcagtttcaagatctttcctgcttcgtttctccctttttgtgctcggtgcgacgtcacgcccagatcccgtgctcacctccccgcaatcaaggtcgtcacgcccgacgaggatggccgccagtcgtcgcacatgttcagataggttgatgatactgaagtcatctgttttttgctgcaaactgaaataattcatctgtgcttgcgaaccatggagatgggtagtgagctatccaaaactgcatagaagcaggagctcgcacggcagttggatctcatcgccaggcaggttcatatcgtcttctgcgtgtatgtagttgtttcttcttcaattctctttgtggggaaaacgttaattgggattttcccagcaatcagcttgataggcgacatcgtcattgtgggggtgagtgagtctaccgctattattcagtctgagtccactaaaccagaattccacaggatatgattgtacctatatttcctgaaaagacaaatgaaacaaacatcaaaagcaagtcactgcctattatttttgacctcctaatcttctacttcattggatttgcattgttctggctggaggcttttctgagcatgtgggtcattcaggttttggaaggtggtgcagttgtcaggactcttagagatcatagtattccttctaatggggatatcaatgaaagtaaagtttcttatttgttattattatattcttgttggtgcaacctgaaaatgaaaagccaattactgaaagcggagatgaaatctcttatgaaggagcaaaggcaaaaagtccaatatatttattatcgggactacgaaggagatcaacgtaagttcagtttggtccattttatctattttcctttcttatggtatggagtcaacaaatggaattaaatagagcccatgctaagtttggaccaagtcatcacgagagaaaggaatctattggagcacctataaaattggatgtggaagctcatgctcatattcagaagcataggtatgccaatctataaaattggatgtggaagctcatgctcacattcagaagcataggtatgccaaattttttttcttaatatgtgagaagttatcttaggctccagatcaatgcccacattattcttatccacaacttctttattgcacatgcacaatctatttataggaccaattatttgcctggtgttagtaaattgatgtgttgtaagctataattgttgtggtgcctattagcttcattgttgttctaattgtttgaggatttgtgcgtcattttttgtgtcatcaaatgaaggttgtggtcttgttgttacttgaacttcttaccacatagaaagcttcaagaagatttaactgacgaaatggtcaagttaacacgttgatagaaggaagttaacctgatgatggtgtttcctgatttaaatgtaggattgtgatgcgtaatcttacatattcagaaccaaaggctgatgaactggcagcatcagaaatggcagttgcatatagctcctcgaattgggtattattagttgagggatgacatccatctactgctgattccaagaacggaagcatttatctgatgtcctgttaagtgtgtgcaaggtcattggatgactgcattccatttggcttatcgagtaagcaatccccatttaacttttcaaacttgtcatataatacatcccagcctgaggtctgtgccttcaagttggttttattttgcacaaaatcggatgtcattccatttggcttattgagagccctgaagcaagattctggtatttcaacttctggaccaatcagctcagtctcttgttcgtgagcaaaataaccttcagttggcacatcttccagcactacaagattatcagaatatgcatactcatggaatatagcttcaatcctttgccttttctaacaagttgggttaacacttgagatatcatcatttaactgggaagggccatcgtctaaccacttataactgccattttcaggataatgcatttgcttataccctaacttgtaatcaatactggcaacattgtcatctgggcggcatgaattagtgatccttccagagaaacgaactatgcaaaacaaatgtcatattaataatctagaaacatgtttgagatgggttttatctattgatgaggagcctgttaagaaatgtttggttcgcctgtagctgcaaggaatgctaacttttttttgggttcgtctctgcggaggatgccattgttagttgtaaatattggcggcatattaggaaacaaattatccctatttgagttgcacacacatttcatgttattagtgtgaatttgtgagatattgaggttgatgatatatatgttgttcattt

SEQ ID NO: 61449 - DNA, 2714 bp, Zea Mays
ctgccgccccgcatcccgtccgcctcgccctctggccctccccgcggcaatctcggcgctcgccctccccagcggcaatctcggtgtcccccgcagcaagctcggcctcccctgcggcaatctcggcgtcccccacaatcacggtgtctatccctcccatctcaccgctgcctcataacactcccgtgtcccacgccatacgcccaagaccgagccgcctagatctgattgggttggctctcgtcgcgggggcgaaggggaaggcgaggaagaaccaggaggcatgcgttcgtccaagatgctgcaactcctgatggcgctggccttctcggcgaccccgctgacgctgtatgtgccgccggcgcgcagcctcagcctcttcgtggaggccatggaggccgtctgccgcgactgcgggccctactcccacggcgctgtcgcccgcttccgcctcggcctctcccgcgtcctcgccggcctagcgtgcgccctccgctaggcgggccggcaccccatcgccggcgccggttcctcctgcctacaggagtatactacacatggacacacacacgcacgttcggtgaccttgtgctctccctgctttctatttccttttgtactactagcgaggaagtggtttctagcgcagcacagcaatctacatgctggagcaggactagcggtcagtttcaagatctttcctgcttcgtttctccctttttgtgctcggtgcgacgtcacgcccagatcccgtgctcacctccccgcaatcaaggtcgtcacgcccgacgaggatggccgccagtcgtcgcacatgttcagataggttgatgatactgaagtcatctgttttttgctgcaaactgaaataattcatctgtgcttgcgaaccatggagatgggtagtgagctatccaaaactgcatagaagcaggagctcgcacggcagttggatctcatcgccaggcaggttcatatcgtcttctgcgtgtatgtagttgtttcttcttcaattctctttgtggggaaaacgttaatgttttggaaggtggtgcagttgtcaggactcttagagatcatagtattccttctaatggggatatcaatgaaagagcaaaggcaaaaagtccaatatatttattatcgggactacgaaggagatcaacgtaagttcagtttggtccattttatctattttcctttcttatggtatggagtcaacaaatggaattaaatagagcccatgctaagtttggaccaagtcatcacgagagaaaggaatctattggagcacctataaaattggatgtggaagctcatgctcatattcagaagcataggtatgccaatctataaaattggatgtggaagctcatgctcacattcagaagcataggtatgccaaattttttttcttaatatgtgagaagttatcttaggctccagatcaatgcccacattattcttatccacaacttctttattgcacatgcacaatctatttataggaccaattatttgcctggtgttagtaaattgatgtgttgtaagctataattgttgtggtgcctattagcttcattgttgttctaattgtttgaggatttgtgcgtcattttttgtgtcatcaaatgaaggttgtggtcttgttgttacttgaacttcttaccacatagaaagcttcaagaagatttaactgacgaaatggtcaagttaacacgttgatagaaggaagttaacctgatgatggtgtttcctgatttaaatgtaggattgtgatgcgtaatcttacatattcagaaccaaaggctgatgaactggcagcatcagaaatggcagttgcatatagctcctcgaattgggtattattagttgagggatgacatccatctactgctgattccaagaacggaagcatttatctgatgtcctgttaagtgtgtgcaaggtcattggatgactgcattccatttggcttatcgagtaagcaatccccatttaacttttcaaacttgtcatataatacatcccagcctgaggtctgtgccttcaagttggttttattttgcacaaaatcggatgtcattccatttggcttattgagagccctgaagcaagattctggtatttcaacttctggaccaatcagctcagtctcttgttcgtgagcaaaataaccttcagttggcacatcttccagcactacaagattatcagaatatgcatactcatggaatatagcttcaatcctttgccttttctaacaagttgggttaacacttgagatatcatcatttaactgggaagggccatcgtctaaccacttataactgccattttcaggataatgcatttgcttataccctaacttgtaatcaatactggcaacattgtcatctgggcggcatgaattagtgatccttccagagaaacgaactatgcaaaacaaatgtcatattaataatctagaaacatgtttgagatgggttttatctattgatgaggagcctgttaagaaatgtttggttcgcctgtagctgcaaggaatgctaacttttttttgggttcgtctctgcggaggatgccattgttagttgtaaatattggcggcatattaggaaacaaattatccctatttgagttgcacacacatttcatgttattagtgtgaatttgtgagatattgaggttgatgatatatatgttgttcattt

SEQ ID NO: 61450 - DNA, 2677 bp, Zea Mays
ctgccgccccgcatcccgtccgcctcgccctctggccctccccgcggcaatctcggcgctcgccctccccagcggcaatctcggtgtcccccgcagcaagctcggcctcccctgcggcaatctcggcgtcccccacaatcacggtgtctatccctcccatctcaccgctgcctcataacactcccgtgtcccacgccatacgcccaagaccgagccgcctagatctgattgggttggctctcgtcgcgggggcgaaggggaaggcgaggaagaaccaggaggcatgcgttcgtccaagatgctgcaactcctgatggcgctggccttctcggcgaccccgctgacgctgtatgtgccgccggcgcgcagcctcagcctcttcgtggaggccatggaggccgtctgccgcgactgcgggccctactcccacggcgctgtcgcccgcttccgcctcggcctctcccgcgtcctcgccggcctagcgtgcgccctccgctaggcgggccggcaccccatcgccggcgccggttcctcctgcctacaggagtatactacacatggacacacacacgcacgttcggtgaccttgtgctctccctgctttctatttccttttgtactactagcgaggaagtggtttctagcgcagcacagcaatctacatgctggagcaggactagcggtcagtttcaagatctttcctgcttcgtttctccctttttgtgctcggtgcgacgtcacgcccagatcccgtgctcacctccccgcaatcaaggtcgtcacgcccgacgaggatggccgccagtcgtcgcacatgttcagataggcatagaagcaggagctcgcacggcagttggatctcatcgccaggcaggttcatatcgtcttctgcgtgtatgtagttgtttcttcttcaattctctttgtggggaaaacgttaattgggattttcccagcaatcagcttgataggcgacatcgtcattgtgggggttttggaaggtggtgcagttgtcaggactcttagagatcatagtattccttctaatggggatatcaatgaaagtaaagtttcttatttgttattattatattcttgttggtgcaacctgaaaatgaaaagccaattactgaaagcggagatgaaatctcttatgaaggagcaaaggcaaaaagtccaatatatttattatcgggactacgaaggagatcaactttggaccaagtcatcacgagagaaaggaatctattggagcacctataaaattggatgtggaagctcatgctcatattcagaagcataggtatgccaatctataaaattggatgtggaagctcatgctcacattcagaagcataggtatgccaaattttttttcttaatatgtgagaagttatcttaggctccagatcaatgcccacattattcttatccacaacttctttattgcacatgcacaatctatttataggaccaattatttgcctggtgttagtaaattgatgtgttgtaagctataattgttgtggtgcctattagcttcattgttgttctaattgtttgaggatttgtgcgtcattttttgtgtcatcaaatgaaggttgtggtcttgttgttacttgaacttcttaccacatagaaagcttcaagaagatttaactgacgaaatggtcaagttaacacgttgatagaaggaagttaacctgatgatggtgtttcctgatttaaatgtaggattgtgatgcgtaatcttacatattcagaaccaaaggctgatgaactggcagcatcagaaatggcagttgcatatagctcctcgaattgggtattattagttgagggatgacatccatctactgctgattccaagaacggaagcatttatctgatgtcctgttaagtgtgtgcaaggtcattggatgactgcattccatttggcttatcgagtaagcaatccccatttaacttttcaaacttgtcatataatacatcccagcctgaggtctgtgccttcaagttggttttattttgcacaaaatcggatgtcattccatttggcttattgagagccctgaagcaagattctggtatttcaacttctggaccaatcagctcagtctcttgttcgtgagcaaaataaccttcagttggcacatcttccagcactacaagattatcagaatatgcatactcatggaatatagcttcaatcctttgccttttctaacaagttgggttaacacttgagatatcatcatttaactgggaagggccatcgtctaaccacttataactgccattttcaggataatgcatttgcttataccctaacttgtaatcaatactggcaacattgtcatctgggcggcatgaattagtgatccttccagagaaacgaactatgcaaaacaaatgtcatattaataatctagaaacatgtttgagatgggttttatctattgatgaggagcctgttaagaaatgtttggttcgcctgtagctgcaaggaatgctaacttttttttgggttcgtctctgcggaggatgccattgttagttgtaaatattggcggcatattaggaaacaaattatccctatttgagttgcacacacatttcatgttattagtgtgaatttgtgagatattgaggttgatgatatatatgttgttcattt

SEQ ID NO: 61451 - DNA, 3717 bp, Zea Mays
gttctgccgccccgcatcccgtccgcctcgccctctggccctccccgcggcaatctcggcgctcgccctccccagcggcaatctcggtgtcccccgcagcaagctcggcctcccctgcggcaatctcggcgtcccccacaatcacggtgtctatccctcccatctcaccgctgcctcataacactcccgtgtcccacgccatacgcccaagaccgagccgcctagatctgattgggttggctctcgtcgcgggggcgaaggggaaggcgaggaagaaccaggaggcatgcgttcgtccaagatgctgcaactcctgatggcgctggccttctcggcgaccccgctgacgctgtatgtgccgccggcgcgcagcctcagcctcttcgtggaggccatggaggccgtctgccgcgactgcgggccctactcccacggcgctgtcgcccgcttccgcctcggcctctcccgcgtcctcgccggcctagcgtgcgccctccgctaggcgggccggcaccccatcgccggcgccggttcctcctgcctacaggagtatactacacatggacacacacacgcacgttcggtgaccttgtgctctccctgctttctatttccttttgtactactagcgaggaagtggtttctagcgcagcacagcaatctacatgctggagcaggactagcggtcagtttcaagatctttcctgcttcgtttctccctttttgtgctcggtgcgacgtcacgcccagatcccgtgctcacctccccgcaatcaaggtcgtcacgcccgacgaggatggccgccagtcgtcgcacatgttcagataggttgatgatactgaagtcatctgttttttgctgcaaactgaaataattcatctgtgcttgcgaaccatggagatgggtagtgagctatccaaaactgcatagaagcaggagctcgcacggcagttggatctcatcgccaggcaggtggaagtgtggttccagaacacacatgttcagataacacacatgttcatgcttatgctgaccccacacaggttcatatcgtcttctgcgtgtatgtagttgtttcttcttcaattctctttgtggggaaaacgttaatgtaagttatatttttactttttgcacctctcactattgtttctacatctttctttcttgaaaactcgtgaatctgaattgtaatgggatttccttccaccaatctacccatcatgcagtgggattttcccagcaatcagcttgataggcgacatcgtcattgtgggggtgagtgagtctaccgctattattcagtctgagtccactaaaccagaattccacaggatatgattgtacctatatttcctgaaaagacaaatgaaacaaacatcaaaagcaagtcactgcctattatttttgacctcctaatcttctacttcattggatttgcattgttctggctggaggcttttctgagcatgtgggtcattcaggtgaagttactgcctaccgcttcactattcatccgtcttgatactttcagttggttgtgaactataagctttgcgtcccgcggcgtggaaggaaatccacattacaatggtagtggcattttatagatttatagattggcataccactattcaatggtagtggtgaattatctagaagcaacaaagcaacagatttaaaatgccagttatagagttaggcttagttttagttaaaatattagtggtgaattatctaggcatacatccagtccacaccctcaacataccgagttaggctcagttttagttaaacaacgtcttggtttcttgtgcctactgatggcttttcttaatattatatcaatgacatcttaggttttggaaggtggtgcagttgtcaggactcttagagatcatagtattccttctaatggggatatcaatgaaagtaaagtttcttatttgttattattatattcttgttggtgcaacctgaaaatgaaaagccaattactgaaagcggagatgaaatctcttatgaaggagcaaaggcaaaaagtccaatatatttattatcgggactacgaaggagatcaacgtaagttcagtttggtccattttatctattttcctttcttatggtatggagtcaacaaatggaattaaatagagcccatgctaagtttggaccaagtcatcacgagagaaaggaatctattggagcacctataaaattggatgtggaagctcatgctcatattcagaagcatagcgtaatcttacatattcagaaccaaaggctgatgaactggcagcatcagaaatggcagttgcatatagctcctcgaattgggtattattagttgagggatgacatccatctactgctgagtaagtcacagaaagtgctctgttcaggctgactagatagggtaattgttattggtgtgttctgttcagttttttatagcatttttggcggggtaatatgaacttctattcatttttcaaatatattctagaccctaactaactgatccaaaatgtcacattgattgatatgtggattttgatacttctgactccatgcaactacttggaatgttgcttgtcgcgttggctcattttttattccttttactgtgcacattaatagcatttttacctataatgaacagtcttgtggttttattttcatttctggcgttaaatgtatgtctttctttctattgtatgagtttatttaggcataacctttatcactttctatcaatgctacaacagtagatatactaccatttatcattgaagtaattaagcggttgtatttcattttttatgttatcaaaatttttagttcttcaaatataatagatgaatcattgctaaatctaacattgctgtcaatgttttcatagttccaagaacggaagcatttatctgatgtcctgttaagtgtgtgcaaggtcattggatgactgcattccatttggcttatcgagtaagcaatccccatttaacttttcaaacttgtcatataatacatcccagcctgaggtctgtgccttcaagttggttttattttgcacaaaatcggatgtcattccatttggcttattgagagccctgaagcaagattctggtatttcaacttctggaccaatcagctcagtctcttgttcgtgagcaaaataaccttcagttggcacatcttccagcactacaagattatcagaatatgcatactcatggaatatagcttcaatcctttgccttttctaacaagttgggttaacacttgagatatcatcatttaactgggaagggccatcgtctaaccacttataactgccattttcaggataatgcatttgcttataccctaacttgtaatcaatactggcaacattgtcatctgggcggcatgaattagtgatccttccagagaaacgaactatgcaaaacaaatgtcatattaataatctagaaacatgtttgagatgggttttatctattgatgaggagcctgttaagaaatgtttggttcgcctgtagctgcaaggaatgctaacttttttttgggttcgtctctgcggaggatgccattgttagttgtaaatattggcggcatattaggaaacaaattatccctatttgagttgcacacacatttcatgttattagtgtgaatttgtgagatattgaggttgatgatatatatgttgttcattt

SEQ ID NO: 61452 - DNA, 3841 bp, Zea Mays
atcgagtaaactaatgctagaagaaaaagccagtatgtaaggacaacttgaatgtcatatctctactactacttaagtgcctactgtaggcgttcacagccatagtggtgcacgttctgccgccccgcatcccgtccgcctcgccctctggccctccccgcggcaatctcggcgctcgccctccccagcggcaatctcggtgtcccccgcagcaagctcggcctcccctgcggcaatctcggcgtcccccacaatcacggtgtctatccctcccatctcaccgctgcctcataacactcccgtgtcccacgccatacgcccaagaccgagccgcctagatctgattgggttggctctcgtcgcgggggcgaaggggaaggcgaggaagaaccaggaggcatgcgttcgtccaagatgctgcaactcctgatggcgctggccttctcggcgaccccgctgacgctgtatgtgccgccggcgcgcagcctcagcctcttcgtggaggccatggaggccgtctgccgcgactgcgggccctactcccacggcgctgtcgcccgcttccgcctcggcctctcccgcgtcctcgccggcctagcgtgcgccctccgctaggcgggccggcaccccatcgccggcgccggttcctcctgcctacaggagtatactacacatggacacacacacgcacgttcggtgaccttgtgctctccctgctttctatttccttttgtactactagcgaggaagtggtttctagcgcagcacagcaatctacatgctggagcaggactagcggtcagtttcaagatctttcctgcttcgtttctccctttttgtgctcggtgcgacgtcacgcccagatcccgtgctcacctccccgcaatcaaggtcgtcacgcccgacgaggatggccgccagtcgtcgcacatgttcagataggttgatgatactgaagtcatctgttttttgctgcaaactgaaataattcatctgtgcttgcgaaccatggagatgggtagtgagctatccaaaactgcatagaagcaggagctcgcacggcagttggatctcatcgccaggcaggtggaagtgtggttccagaacacacatgttcagataacacacatgttcatgcttatgctgaccccacacaggttcatatcgtcttctgcgtgtatgtagttgtttcttcttcaattctctttgtggggaaaacgttaattgggattttcccagcaatcagcttgataggcgacatcgtcattgtgggggtgagtgagtctaccgctattattcagtctgagtccactaaaccagaattccacaggatatgattgtacctatatttcctgaaaagacaaatgaaacaaacatcaaaagcaagtcactgcctattatttttgacctcctaatcttctacttcattggatttgcattgttctggctggaggcttttctgagcatgtgggtcattcaggtgaagttactgcctaccgcttcactattcatccgtcttgatactttcagttggttgtgaactataagctttgcgtcccgcggcgtggaaggaaatccacattacaatggtagtggcattttatagatttatagattggcataccactattcaatggtagtggtgaattatctagaagcaacaaagcaacagatttaaaatgccagttatagagttaggcttagttttagttaaaatattagtggtgaattatctaggcatacatccagtccacaccctcaacataccgagttaggctcagttttagttaaacaacgtcttggtttcttgtgcctactgatggcttttcttaatattatatcaatgacatcttaggttttggaaggtggtgcagttgtcaggactcttagagatcatagtattccttctaatggggatatcaatgaaagtaaagtttcttatttgttattattatattcttgttggtgcaacctgaaaatgaaaagccaattactgaaagcggagatgaaatctcttatgaaggagcaaaggcaaaaagtccaatatatttattatcgggactacgaaggagatcaacgtaagttcagtttggtccattttatctattttcctttcttatggtatggagtcaacaaatggaattaaatagagcccatgctaagtttggaccaagtcatcacgagagaaaggaatctattggagcacctataaaattggatgtggaagctcatgctcatattcagaagcataggtatgccaatctataaaattggatgtggaagctcatgctcacattcagaagcataggttgtggtcttgttgttacttgaacttcttaccacatagaaagcttcaagaagatttaactgacgaaatggtcaagttaacacgttgatagaaggaagttaacctgatgatggtgtttcctgatttaaatgtaggattgtgatgcgtaatcttacatattcagaaccaaaggctgatgaactggcagcatcagaaatggcagttgcatatagctcctcgaattgggtattattagttgagggatgacatccatctactgctgagtaagtcacagaaagtgctctgttcaggctgactagatagggtaattgttattggtgtgttctgttcagttttttatagcatttttggcggggtaatatgaacttctattcatttttcaaatatattctagaccctaactaactgatccaaaatgtcacattgattgatatgtggattttgatacttctgactccatgcaactacttggaatgttgcttgtcgcgttggctcattttttattccttttactgtgcacattaatagcatttttacctataatgaacagtcttgtggttttattttcatttctggcgttaaatgtatgtctttctttctattgtatgagtttatttaggcataacctttatcactttctatcaatgctacaacagtagatatactaccatttatcattgaagtaattaagcggttgtatttcattttttatgttatcaaaatttttagttcttcaaatataatagatgaatcattgctaaatctaacattgctgtcaatgttttcatagttccaagaacggaagcatttatctgatgtcctgttaagtgtgtgcaaggtcattggatgactgcattccatttggcttatcgattggttttattttgcacaaaatcggatgtcattccatttggcttattgagagccctgaagcaagattctggtatttcaacttctggaccaatcagctcagtctcttgttcgtgagcaaaataaccttcagttggcacatcttccagcactacaagattatcagaatatgcatactcatggaatatagcttcaatcctttgccttttctaacaagttgggttaacacttgagatatcatcatttaactgggaagggccatcgtctaaccacttataactgccattttcaggataatgcatttgcttataccctaacttgtaatcaatactggcaacattgtcatctgggcggcatgaattagtgatccttccagagaaacgaactatgcaaaacaaatgtcatattaataatctagaaacatgtttgagatgggttttatctattgatgaggagcctgttaagaaatgtttggttcgcctgtagctgcaaggaatgctaacttttttttgggttcgtctctgcggaggatgccattgttagttgtaaatattggcggcatattaggaaacaaattatccctatttgagttgcacacacatttcatgttattagtgtgaatttgtgagatattgaggttgatgatatatatgttgttcattt

SEQ ID NO: 61453 - DNA, 3394 bp, Zea Mays
attgcatataggcataaggcaaaaccaaaccctaatcctgtgaaatacccaatcataaaaaacaaaaacatgtgaccataatataatccatatgatcgagtaaactaatgctagaagaaaaagccagtatgtaaggacaacttgaatgtcatatctctactactacttaagtgcctactgtaggcgttcacagccatagtggtgcacgttctgccgccccgcatcccgtccgcctcgccctctggccctccccgcggcaatctcggcgctcgccctccccagcggcaatctcggtgtcccccgcagcaagctcggcctcccctgcggcaatctcggcgtcccccacaatcacggtgtctatccctcccatctcaccgctgcctcataacactcccgtgtcccacgccatacgcccaagaccgagccgcctagatctgattgggttggctctcgtcgcgggggcgaaggggaaggcgaggaagaaccaggaggcatgcgttcgtccaagatgctgcaactcctgatggcgctggccttctcggcgaccccgctgacgctgtatgtgccgccggcgcgcagcctcagcctcttcgtggaggccatggaggccgtctgccgcgactgcgggccctactcccacggcgctgtcgcccgcttccgcctcggcctctcccgcgtcctcgccggcctagcgtgcgccctccgctaggcgggccggcaccccatcgccggcgccggttcctcctgcctacaggagtatactacacatggacacacacacgcacgttcggtgaccttgtgctctccctgctttctatttccttttgtactactagcgaggaagtggtttctagcgcagcacagcaatctacatgctggagcaggactagcggtcagtttcaagatctttcctgcttcgtttctccctttttgtgctcggtgcgacgtcacgcccagatcccgtgctcacctccccgcaatcaaggtcgtcacgcccgacgaggatggccgccagtcgtcgcacatgttcagataggttgatgatactgaagtcatctgttttttgctgcaaactgaaataattcatctgtgcttgcgaaccatggagatgggtagtgagctatccaaaactgcatagaagcaggagctcgcacggcagttggatctcatcgccaggcaggtggaagtgtggttccagaacacacatgttcagataacacacatgttcatgcttatgctgaccccacacaggttcatatcgtcttctgcgtgtatgtagttgtttcttcttcaattctctttgtggggaaaacgttaattgggattttcccagcaatcagcttgataggcgacatcgtcattgtgggggtgagtgagtctaccgctattattcagtctgagtccactaaaccagaattccacaggatatgattgtacctatatttcctgaaaagacaaatgaaacaaacatcaaaagcaagtcactgcctattatttttgacctcctaatcttctacttcattggatttgcattgttctggctggaggcttttctgagcatgtgggtcattcaggtgaagttactgcctaccgcttcactattcatccgtcttgatactttcagttggttgtgaactataagctttgcgtcccgcggcgtggaaggaaatccacattacaatggtagtggcattttatagatttatagattggcataccactattcaatggtagtggtgaattatctagaagcaacaaagcaacagatttaaaatgccagttatagagttaggcttagttttagttaaaatattagtggtgaattatctaggcatacatccagtccacaccctcaacataccgagttaggctcagttttagttaaacaacgtcttggtttcttgtgcctactgatggcttttcttaatattatatcaatgacatcttaggttttggaaggtggtgcagttgtcaggactcttagagatcatagtattccttctaatggggatatcaatgaaagtaaagtttcttatttgttattattatattcttgttggtgcaacctgaaaatgaaaagccaattactgaaagcggagatgaaatctcttatgaaggagcaaaggcaaaaagtccaatatatttattatcgggactacgaaggagatcaactttggaccaagtcatcacgagagaaaggaatctattggagcacctataaaattggatgtggaagctcatgctcatattcagaagcataggtatgccaatctataaaattggatgtggaagctcatgctcacattcagaagcataggttgtggtcttgttgttacttgaacttcttaccacatagaaagcttcaagaagatttaactgacgaaatggtcaagttaacacgttgatagaaggaagttaacctgatgatggtgtttcctgatttaaatgtaggattgtgatgcgtaatcttacatattcagaaccaaaggctgatgaactggcagcatcagaaatggcagttgcatatagctcctcgaattgggtattattagttgagggatgacatccatctactgctgattccaagaacggaagcatttatctgatgtcctgttaagtgtgtgcaaggtcattggatgactgcattccatttggcttatcgagtaagcaatccccatttaacttttcaaacttgtcatataatacatcccagcctgaggtctgtgccttcaagttggttttattttgcacaaaatcggatgtcattccatttggcttattgagagccctgaagcaagattctggtatttcaacttctggaccaatcagctcagtctcttgttcgtgagcaaaataaccttcagttggcacatcttccagcactacaagattatcagaatatgcatactcatggaatatagcttcaatcctttgccttttctaacaagttgggttaacacttgagatatcatcatttaactgggaagggccatcgtctaaccacttataactgccattttcaggataatgcatttgcttataccctaacttgtaatcaatactggcaacattgtcatctgggcggcatgaattagtgatccttccagagaaacgaactatgcaaaacaaatgtcatattaataatctagaaacatgtttgagatgggttttatctattgatgaggagcctgttaagaaatgtttggttcgcctgtagctgcaaggaatgctaacttttttttgggttcgtctctgcggaggatgccattgttagttgtaaatattggcggcatattaggaaacaaattatccctatttgagttgcacacacatttcatgttattagtgtgaatttgtgagatattgaggttgatgatatatatgttgttcattt

SEQ ID NO: 61454 - DNA, 3465 bp, Zea Mays
attgcatataggcataaggcaaaaccaaaccctaatcctgtgaaatacccaatcataaaaaacaaaaacatgtgaccataatataatccatatgatcgagtaaactaatgctagaagaaaaagccagtatgtaaggacaacttgaatgtcatatctctactactacttaagtgcctactgtaggcgttcacagccatagtggtgcacgttctgccgccccgcatcccgtccgcctcgccctctggccctccccgcggcaatctcggcgctcgccctccccagcggcaatctcggtgtcccccgcagcaagctcggcctcccctgcggcaatctcggcgtcccccacaatcacggtgtctatccctcccatctcaccgctgcctcataacactcccgtgtcccacgccatacgcccaagaccgagccgcctagatctgattgggttggctctcgtcgcgggggcgaaggggaaggcgaggaagaaccaggaggcatgcgttcgtccaagatgctgcaactcctgatggcgctggccttctcggcgaccccgctgacgctgtatgtgccgccggcgcgcagcctcagcctcttcgtggaggccatggaggccgtctgccgcgactgcgggccctactcccacggcgctgtcgcccgcttccgcctcggcctctcccgcgtcctcgccggcctagcgtgcgccctccgctaggcgggccggcaccccatcgccggcgccggttcctcctgcctacaggagtatactacacatggacacacacacgcacgttcggtgaccttgtgctctccctgctttctatttccttttgtactactagcgaggaagtggtttctagcgcagcacagcaatctacatgctggagcaggactagcggtcagtttcaagatctttcctgcttcgtttctccctttttgtgctcggtgcgacgtcacgcccagatcccgtgctcacctccccgcaatcaaggtcgtcacgcccgacgaggatggccgccagtcgtcgcacatgttcagataggttgatgatactgaagtcatctgttttttgctgcaaactgaaataattcatctgtgcttgcgaaccatggagatgggtagtgagctatccaaaactgcatagaagcaggagctcgcacggcagttggatctcatcgccaggcagttgtttcttcttcaattctctttgtggggaaaacgttaattgggattttcccagcaatcagcttgataggcgacatcgtcattgtgggggtgagtgagtctaccgctattattcagtctgagtccactaaaccagaattccacaggatatgattgtacctatatttcctgaaaagacaaatgaaacaaacatcaaaagcaagtcactgcctattatttttgacctcctaatcttctacttcattggatttgcattgttctggctggaggcttttctgagcatgtgggtcattcaggtgaagttactgcctaccgcttcactattcatccgtcttgatactttcagttggttgtgaactataagctttgcgtcccgcggcgtggaaggaaatccacattacaatggtagtggcattttatagatttatagattggcataccactattcaatggtagtggtgaattatctagaagcaacaaagcaacagatttaaaatgccagttatagagttaggcttagttttagttaaaatattagtggtgaattatctaggcatacatccagtccacaccctcaacataccgagttaggctcagttttagttaaacaacgtcttggtttcttgtgcctactgatggcttttcttaatattatatcaatgacatcttaggttttggaaggtggtgcagttgtcaggactcttagagatcatagtattccttctaatggggatatcaatgaaagtaaagtttcttatttgttattattatattcttgttggtgcaacctgaaaatgaaaagccaattactgaaagcggagatgaaatctcttatgaaggagcaaaggcaaaaagtccaatatatttattatcgggactacgaaggagatcaactttggaccaagtcatcacgagagaaaggaatctattggagcacctataaaattggatgtggaagctcatgctcatattcagaagcataggtatgccaatctataaaattggatgtggaagctcatgctcacattcagaagcataggtatgccaaattttttttcttaatatgtgagaagttatcttaggctccagatcaatgcccacattattcttatccacaacttctttattgcacatgcacaatctatttataggaccaattatttgcctggtgttagtaaattgatgtgttgtaagctataattgttgtggtgcctattagcttcattgttgttctaattgtttgaggatttgtgcgtcattttttgtgtcatcaaatgaaggttgtggtcttgttgttacttgaacttcttaccacatagaaagcttcaagaagatttaactgacgaaatggtcaagttaacacgttgatagaaggaagttaacctgatgatggtgtttcctgatttaaatgtaggattgtgatgcgtaatcttacatattcagaaccaaaggctgatgaactggcagcatcagaaatggcagttgcatatagctcctcgaattgggtattattagttgagggatgacatccatctactgctgattccaagaacggaagcatttatctgatgtcctgttaagtgtgtgcaaggtcattggatgactgcattccatttggcttatcgattggttttattttgcacaaaatcggatgtcattccatttggcttattgagagccctgaagcaagattctggtatttcaacttctggaccaatcagctcagtctcttgttcgtgagcaaaataaccttcagttggcacatcttccagcactacaagattatcagaatatgcatactcatggaatatagcttcaatcctttgccttttctaacaagttgggttaacacttgagatatcatcatttaactgggaagggccatcgtctaaccacttataactgccattttcaggataatgcatttgcttataccctaacttgtaatcaatactggcaacattgtcatctgggcggcatgaattagtgatccttccagagaaacgaactatgcaaaacaaatgtcatattaataatctagaaacatgtttgagatgggttttatctattgatgaggagcctgttaagaaatgtttggttcgcctgtagctgcaaggaatgctaacttttttttgggttcgtctctgcggaggatgccattgttagttgtaaatattggcggcatattaggaaacaaattatccctatttgagttgcacacacatttcatgttattagtgtgaatttgtgagatattgaggttgatgatatatatgttgttcattt

SEQ ID NO: 61455 - DNA, 2926 bp, Zea Mays
ctttttttcatcagtatttaattatatcacagtgtacatattgcatataggcataaggcaaaaccaaaccctaatcctgtgaaatacccaatcataaaaaacaaaaacatgtgaccataatataatccatatgatcgagtaaactaatgctagaagaaaaagccagtatgtaaggacaacttgaatgtcatatctctactactacttaagtgcctactgtaggcgttcacagccatagtggtgcacgttctgccgccccgcatcccgtccgcctcgccctctggccctccccgcggcaatctcggcgctcgccctccccagcggcaatctcggtgtcccccgcagcaagctcggcctcccctgcggcaatctcggcgtcccccacaatcacggtgtctatccctcccatctcaccgctgcctcataacactcccgtgtcccacgccatacgcccaagaccgagccgcctagatctgattgggttggctctcgtcgcgggggcgaaggggaaggcgaggaagaaccaggaggcatgcgttcgtccaagatgctgcaactcctgatggcgctggccttctcggcgaccccgctgacgctgtatgtgccgccggcgcgcagcctcagcctcttcgtggaggccatggaggccgtctgccgcgactgcgggccctactcccacggcgctgtcgcccgcttccgcctcggcctctcccgcgtcctcgccggcctagcgtgcgccctccgctaggcgggccggcaccccatcgccggcgccggttcctcctgcctacaggagtatactacacatggacacacacacgcacgttcggtgaccttgtgctctccctgctttctatttccttttgtactactagcgaggaagtggtttctagcgcagcacagcaatctacatgctggagcaggactagcggtcagtttcaagatctttcctgcttcgtttctccctttttgtgctcggtgcgacgtcacgcccagatcccgtgctcacctccccgcaatcaaggtcgtcacgcccgacgaggatggccgccagtcgtcgcacatgttcagataggttgatgatactgaagtcatctgttttttgctgcaaactgaaataattcatctgtgcttgcgaaccatggagatgggtagtgagctatccaaaactgcatagaagcaggagctcgcacggcagttggatctcatcgccaggcaggttcatatcgtcttctgcgtgtatgtagttgtttcttcttcaattctctttgtggggaaaacgttaattgggattttcccagcaatcagcttgataggcgacatcgtcattgtgggggtgagtgagtctaccgctattattcagtctgagtccactaaaccagaattccacaggatatgattgtacctatatttcctgaaaagacaaatgaaacaaacatcaaaagcaagtcactgcctattatttttgacctcctaatcttctacttcattggatttgcattgttctggctggaggcttttctgagcatgtgggtcattcaggtgaagttactgcctaccgcttcactattcatccgtcttgatactttcagttggttgtgaactataagctttgcgtcccgcggcgtggaaggaaatccacattacaatggtagtggcattttatagatttatagattggcataccactattcaatggtagtggtgaattatctagaagcaacaaagcaacagatttaaaatgccagttatagagttaggcttagttttagttaaaatattagtggtgaattatctaggcatacatccagtccacaccctcaacataccgagttaggctcagttttagttaaacaacgtcttggtttcttgtgcctactgatggcttttcttaatattatatcaatgacatcttaggttttggaaggtggtgcagttgtcaggactcttagagatcatagtattccttctaatggggatatcaatgaaagagcaaaggcaaaaagtccaatatatttattatcgggactacgaaggagatcaactttggaccaagtcatcacgagagaaaggaatctattggagcacctataaaattggatgtggaagctcatgctcatattcagaagcataggtatgccaatctataaaattggatgtggaagctcatgctcacattcagaagcatagcgtaatcttacatattcagaaccaaaggctgatgaactggcagcatcagaaatggcagttgcatatagctcctcgaattgggtattattagttgagggatgacatccatctactgctgattccaagaacggaagcatttatctgatgtcctgttaagtgtgtgcaaggtcattggatgactgcattccatttggcttatcgaagccctgaagcaagattctggtatttcaacttctggaccaatcagctcagtctcttgttcgtgagcaaaataaccttcagttggcacatcttccagcactacaagattatcagaatatgcatactcatggaatatagcttcaatcctttgccttttctaacaagataatgcatttgcttataccctaacttgtaatcaatactggcaacattgtcatctgggcggcatgaattagtgatccttccagagaaacgaactatgcaaaacaaatgtcatattaataatctagaaacatgtttgagatgggttttatctattgatgaggagcctgttaagaaatgtttggttcgcctgtagctgcaaggaatgctaacttttttttgggttcgtctctgcggaggatgccattgttagttgtaaatattggcggcatattaggaaacaaattatccctatttgagttgcacacacatttcatgttattagtgtgaatttgtgagatattgaggttgatgatatatatgttgttcattt

SEQ ID NO: 61456 - DNA, 3398 bp, Zea Mays
aaactttttttcatcagtatttaattatatcacagtgtacatattgcatataggcataaggcaaaaccaaaccctaatcctgtgaaatacccaatcataaaaaacaaaaacatgtgaccataatataatccatatgatcgagtaaactaatgctagaagaaaaagccagtatgtaaggacaacttgaatgtcatatctctactactacttaagtgcctactgtaggcgttcacagccatagtggtgcacgttctgccgccccgcatcccgtccgcctcgccctctggccctccccgcggcaatctcggcgctcgccctccccagcggcaatctcggtgtcccccgcagcaagctcggcctcccctgcggcaatctcggcgtcccccacaatcacggtgtctatccctcccatctcaccgctgcctcataacactcccgtgtcccacgccatacgcccaagaccgagccgcctagatctgattgggttggctctcgtcgcgggggcgaaggggaaggcgaggaagaaccaggaggcatgcgttcgtccaagatgctgcaactcctgatggcgctggccttctcggcgaccccgctgacgctgtatgtgccgccggcgcgcagcctcagcctcttcgtggaggccatggaggccgtctgccgcgactgcgggccctactcccacggcgctgtcgcccgcttccgcctcggcctctcccgcgtcctcgccggcctagcgtgcgccctccgctaggcgggccggcaccccatcgccggcgccggttcctcctgcctacaggagtatactacacatggacacacacacgcacgttcggtgaccttgtgctctccctgctttctatttccttttgtactactagcgaggaagtggtttctagcgcagcacagcaatctacatgctggagcaggactagcggtcagtttcaagatctttcctgcttcgtttctccctttttgtgctcggtgcgacgtcacgcccagatcccgtgctcacctccccgcaatcaaggtcgtcacgcccgacgaggatggccgccagtcgtcgcacatgttcagataggttgatgatactgaagtcatctgttttttgctgcaaactgaaataattcatctgtgcttgcgaaccatggagatgggtagtgagctatccaaaactgcatagaagcaggagctcgcacggcagttggatctcatcgccaggcaggtggaagtgtggttccagaacacacatgttcagataacacacatgttcatgcttatgctgaccccacacaggttcatatcgtcttctgcgtgtatgtagttgtttcttcttcaattctctttgtggggaaaacgttaattgggattttcccagcaatcagcttgataggcgacatcgtcattgtgggggtgagtgagtctaccgctattattcagtctgagtccactaaaccagaattccacaggatatgattgtacctatatttcctgaaaagacaaatgaaacaaacatcaaaagcaagtcactgcctattatttttgacctcctaatcttctacttcattggatttgcattgttctggctggaggcttttctgagcatgtgggtcattcaggtgaagttactgcctaccgcttcactattcatccgtcttgatactttcagttggttgtgaactataagctttgcgtcccgcggcgtggaaggaaatccacattacaatggtagtggcattttatagatttatagattggcataccactattcaatggtagtggtgaattatctagaagcaacaaagcaacagatttaaaatgccagttatagagttaggcttagttttagttaaaatattagtggtgaattatctaggcatacatccagtccacaccctcaacataccgagttaggctcagttttagttaaacaacgtcttggtttcttgtgcctactgatggcttttcttaatattatatcaatgacatcttaggttttggaaggtggtgcagttgtcaggactcttagagatcatagtattccttctaatggggatatcaatgaaagagcaaaggcaaaaagtccaatatatttattatcgggactacgaaggagatcaacagcccatgctaagtttggaccaagtcatcacgagagaaaggaatctattggagcacctataaaattggatgtggaagctcatgctcatattcagaagcataggtatgccaatctataaaattggatgtggaagctcatgctcacattcagaagcataggtatgccaaattttttttcttaatatgtgagaagttatcttaggctccagatcaatgcccacattattcttatccacaacttctttattgcacatgcacaatctatttataggaccaattatttgcctggtgttagtaaattgatgtgttgtaagctataattgttgtggtgcctattagcttcattgttgttctaattgtttgaggatttgtgcgtcattttttgtgtcatcaaatgaaggttgtggtcttgttgttacttgaacttcttaccacatagaaagcttcaagaagatttaactgacgaaatggtcaagttaacacgttgatagaaggaagttaacctgatgatggtgtttcctgatttaaatgtaggattgtgatgcgtaatcttacatattcagaaccaaaggctgatgaactggcagcatcagaaatggcagttgcatatagctcctcgaattgggtattattagttgagggatgacatccatctactgctgattccaagaacggaagcatttatctgatgtcctgttaagtgtgtgcaaggtcattggatgactgcattccatttggcttatcgaagccctgaagcaagattctggtatttcaacttctggaccaatcagctcagtctcttgttcgtgagcaaaataaccttcagttggcacatcttccagcactacaagattatcagaatatgcatactcatggaatatagcttcaatcctttgccttttctaacaagataatgcatttgcttataccctaacttgtaatcaatactggcaacattgtcatctgggcggcatgaattagtgatccttccagagaaacgaactatgcaaaacaaatgtcatattaataatctagaaacatgtttgagatgggttttatctattgatgaggagcctgttaagaaatgtttggttcgcctgtagctgcaaggaatgctaacttttttttgggttcgtctctgcggaggatgccattgttagttgtaaatattggcggcatattaggaaacaaattatccctatttgagttgcacacacatttcatgttattagtgtgaatttgtgagatattgaggttgatgatatatatgttgttcattt

SEQ ID NO: 61457 - DNA, 2836 bp, Zea Mays
cgttgaaactttttttcatcagtatttaattatatcacagtgtacatattgcatataggcataaggcaaaaccaaaccctaatcctgtgaaatacccaatcataaaaaacaaaaacatgtgaccataatataatccatatgatcgagtaaactaatgctagaagaaaaagccagtatgtaaggacaacttgaatgtcatatctctactactacttaagtgcctactgtaggcgttcacagccatagtggtgcacgttctgccgccccgcatcccgtccgcctcgccctctggccctccccgcggcaatctcggcgctcgccctccccagcggcaatctcggtgtcccccgcagcaagctcggcctcccctgcggcaatctcggcgtcccccacaatcacggtgtctatccctcccatctcaccgctgcctcataacactcccgtgtcccacgccatacgcccaagaccgagccgcctagatctgattgggttggctctcgtcgcgggggcgaaggggaaggcgaggaagaaccaggaggcatgcgttcgtccaagatgctgcaactcctgatggcgctggccttctcggcgaccccgctgacgctgtatgtgccgccggcgcgcagcctcagcctcttcgtggaggccatggaggccgtctgccgcgactgcgggccctactcccacggcgctgtcgcccgcttccgcctcggcctctcccgcgtcctcgccggcctagcgtgcgccctccgctaggcgggccggcaccccatcgccggcgccggttcctcctgcctacaggagtatactacacatggacacacacacgcacgttcggtgaccttgtgctctccctgctttctatttccttttgtactactagcgaggaagtggtttctagcgcagcacagcaatctacatgctggagcaggactagcggtcagtttcaagatctttcctgcttcgtttctccctttttgtgctcggtgcgacgtcacgcccagatcccgtgctcacctccccgcaatcaaggtcgtcacgcccgacgaggatggccgccagtcgtcgcacatgttcagataggttgatgatactgaagtcatctgttttttgctgcaaactgaaataattcatctgtgcttgcgaaccatggagatgggtagtgagctatccaaaactgcatagaagcaggagctcgcacggcagttggatctcatcgccaggcaggtggaagtgtggttccagaacacacatgttcagataacacacatgttcatgcttatgctgaccccacacaggttcatatcgtcttctgcgtgtatgtagttgtttcttcttcaattctctttgtggggaaaacgttaattgggattttcccagcaatcagcttgataggcgacatcgtcattgtgggggtgagtgagtctaccgctattattcagtctgagtccactaaaccagaattccacaggatatgattgtacctatatttcctgaaaagacaaatgaaacaaacatcaaaagcaagtcactgcctattatttttgacctcctaatcttctacttcattggatttgcattgttctggctggaggcttttctgagcatgtgggtcattcaggttttggaaggtggtgcagttgtcaggactcttagagatcatagtattccttctaatggggatatcaatgaaagagcaaaggcaaaaagtccaatatatttattatcgggactacgaaggagatcaacgtaagttcagtttggtccattttatctattttcctttcttatggtatggagtcaacaaatggaattaaatagagcccatgctaagtttggaccaagtcatcacgagagaaaggaatctattggagcacctataaaattggatgtggaagctcatgctcatattcagaagcataggtatgccaatctataaaattggatgtggaagctcatgctcacattcagaagcatagcgtaatcttacatattcagaaccaaaggctgatgaactggcagcatcagaaatggcagttgcatatagctcctcgaattgggtattattagttgagggatgacatccatctactgctgattccaagaacggaagcatttatctgatgtcctgttaagtgtgtgcaaggtcattggatgactgcattccatttggcttatcgagtaagcaatccccatttaacttttcaaacttgtcatataatacatcccagcctgaggtctgtgccttcaagttggttttattttgcacaaaatcggatgtcattccatttggcttattgagagccctgaagcaagattctggtatttcaacttctggaccaatcagctcagtctcttgttcgtgagcaaaataaccttcagttggcacatcttccagcactacaagattatcagaatatgcatactcatggaatatagcttcaatcctttgccttttctaacaagataatgcatttgcttataccctaacttgtaatcaatactggcaacattgtcatctgggcggcatgaattagtgatccttccagagaaacgaactatgcaaaacaaatgtcatattaataatctagaaacatgtttgagatgggttttatctattgatgaggagcctgttaagaaatgtttggttcgcctgtagctgcaaggaatgctaacttttttttgggttcgtctctgcggaggatgccattgttagttgtaaatattggcggcatattaggaaacaaattatccctatttgagttgcacacacatttcatgttattagtgtgaatttgtgagatattgaggttgatgatatatatgttgttcattt

SEQ ID NO: 61458 - DNA, 216 bp, Zea Mays
atggagggggcggggatcggcgacggtagcgtcctcctggcggcggcggcggcggcgggtcgcggccccgaatgcgggacctcggctgcatggattctgtccggcccctggcccggaggagctgcgcgttcggtgtgtccggttaaatccggcgggctctccctttttttcccgggcggtgcgatcgagcagccaagccccgcgtccgttcagtag

SEQ ID NO: 61459 - DNA, 316 bp, Zea Mays
tatgcacttgacagttgacagttccactgaaaagcaggagagctctgaagcaggcgcagcacaaaacgcccatcaaatcatttctagttaaaaaaatatatgacatattcagctactgagacatactgacatcgcagctatatctcgggaaggcagaagtgtcactaaaccgacttgtcaatgaaaagctctggaaaaaaaaaagagagtgagcactaggaatccaaaagaaactactattgcacaacatactccgtacataacaacgaccagtcgactaactagctccagcgatcggtccggtgcagacctccca

SEQ ID NO: 61460 - DNA, 423 bp, Zea Mays
tagtccattttccgtccatattcgaatgaatgataataaatatcgacatacatacaacctacaatcataaatatagttctttatattcatttttgtttgctgctacataaaaagggtcctacttttctcgttcgcattcaaacaggaccttgactaaataaaattttagtgcctaccatatttaaatctagcagattgctcgttaccatcgtgatcgatctcctgcgctcaatcggcagccgtgctggtcctctctgtgcttctgtagagcaaggcgaatctgccgtgcttgcaaccttgcatcacgacaaacctcgctggccccgtcattattgtaatctaatggtaacgccgaatgcgatgttcttctggagctgacacgcgtagaaaaaaaagggaaaacgggcaggcatatcaaagtag

SEQ ID NO: 61461 - DNA, 1637 bp, Zea Mays
gtcgactagtgtggttgagcactgcagctgcagcctgagctagctgctagcaaggagccgaggcagagagaaagagggatcggaggaggagctgataaggctagcctcgctcttttggtggtggtggtggcggtggactggtggcgcacactctccctctcgctcgtcttgatggtggtgggtggcggcagcggctgcctcgcatggctgggttctctctgaggagcggcggagccggaggaggcggaggcgggaggggcggggaccggggcggcgatcactcgatcggcgccgacagcctgttcctgtacgcgcgaggggcggccgccgcggccgccgacacggcggccagcggcggcgggatagggttccagctctggcacccgcaccaggtccagcaggcggcggccgcgccgcacacgtcgcagttcttctcctccggcgccgtggccacgggcgtcgtgctcggcttctcgtctcatgacgggggcgccgccgggatcgccggcgccgggggcggcagggccggcaccagctgccaggactgcggcaacaacgccaagaaggactgcccccacatgcgctgccgcacctgctgccggagccgcggcttcagctgccccacgcacgtcaagagcacctgggtccccgccgccaagcgccgggagcgccagcagcagctcgccgcgctcttccgcggcgccgccaacagcaacagcgccgccgccgccgcgagcaagcgcccgcgcgagctcgtccggtcccttggccgtttgccgtccgccaactccgccatggtcaccacgaccacctcctcaggcgacggcggcggcggtaggttcccgccggagctgagcgtggaggcggtgttccgctgcgtgcggatcgggccggtggacgagccagacgcggagctggcgtaccagacggcggtgaacatcggcgggcacactttcaaggggatcctgcgtgaccacgggccggcggacgacgcgggccatctgccgccgccctcggcggagtaccaccaccaccagctgacggcggggcaagcgagggaagcgccgtcgccggcggggagcagcgaggcggcggccacggcagcgacgtcggcggcggtgctgatggatccgtacccgacgccgatcggcgccttcgccgcaggcacccagttcttccctcataaccctagaacctagctcactactactagtatctacatattagctagctttgctgcttccattattatggctttcgatcgatcctagtagtagcttaattccttgatggttccatttacttcctccaagttccaaattaaagatgatgatgatgatgagcatgaactaagttgtcgtcatcgtcgtcctcgggattagcaaacaaattcgagacaaacgggaagatatttttattgttactatttcttcttccactactactgcatacgcgcatgcgtttttcgagccgttgatcgatgaacactactaatgcatgatcaatggaacacatataatgtccttattattaattgagctagtgcactaccgctacctgtttgagcaatcttatttcgagttcattaataactaattggccaattcttaatgcaatgcaaagacaagagtttcaat

SEQ ID NO: 61462 - DNA, 2801 bp, Zea Mays
aggaggtaaaaaacaaacatggcctaaataaataaatactcttgttacccggtctgcagccaagtgcaaatgtgccatgcatgcgagttggggccctggaagacgacgacgaccacacccacaccacacacacactgcaaagcctctgtttctcatgtcagtaaaaattcctccctgtcctctgccggcatgtagttatcgacaagaaagccatggctggcagaggcaaggacagctcggtcgccaaagcgcaaggtgcaaatcgtgaaaagggagcaaaggcaaaggcaaacaactcgatcccactgcgcggccatattattcactttctccatttcttccctagctggctagctctctccgatcctcctgcgcccattctctttcgtctggttgggtggagataagctggagagactggagaggtgcgccgagctgtgggatcggagaccgagcgagcaataaatagaaagtaaggtcggggccggcctccatggcggcggttgcaggcgccctcgaatccctcccctgaagtccactgactccgcgcgtctctctctctctctctccttcttcttccttcctcgtcctcctgctgcgcctctttatatagcctccaattccggaaagcagcttgcttgcgttctctcccacccctccttccctcctccagatactacttattgtagacggcgcgggtgagggagaaagcgagaattagcctgcttagaccccaagacgcgaagagaggaaaaggattacgcaagaagagaggtggattagaggcgagctgcttcctattttcagcgaaggcaaggtgagtaacactgatgagtctgagagtcgactagtgtggttgagcactgcagctgcagcctgtaggcttatctttctcctctctcgctctctcgcatcgcacatgcatgccatatgcatactgatacggccactcatcagcggcaaggctatacccatcctcatctcatcccatctcctacgcggctacgcctagcttgcttgcgcaaatctctctctctctctctctctatgtctaggagctcctcgctgcagatctaccgccgatccgcctgctgctgagctatgccgatcaattatctatacatgcagctcatgcatctaacctacatgtcgtcacacaacgcagccccaccccaccccatgcctgctgcttctgtgcctgagctagctgctagcaaggagccgaggcagagagaaagagggatcggaggaggagctgataaggctagcctcgctcttttggtggtggtggtggcggtggactggtggcgcacactctccctctcgctcgtcttgatggtggtgggtggcggcagcggctgcctcgcatggctgggttctctctgaggagcggcggagccggaggaggcggaggcgggaggggcggggaccggggcggcgatcactcgatcggcgccgacagcctgttcctgtacgcgcgaggggcggccgccgcggccgccgacacggcggccagcggcggcgggatagggttccagctctggcacccgcaccaggtccagcaggcggcggccgcgccgcacacgtcgcagttcttctcctccggcgccgtggccacgggcgtcgtgctcggcttctcgtctcatgacgggggcgccgccgggatcgccggcgccgggggcggcagggccggcaccagctgccaggactgcggcaacaacgccaagaaggactgcccccacatgcgctgccgcacctgctgccggagccgcggcttcagctgccccacgcacgtcaagagcacctgggtccccgccgccaagcgccgggagcgccagcagcagctcgccgcgctcttccgcggcgccgccaacagcaacagcgccgccgccgccgcgagcaagcgcccgcgcgagctcgtccggtcccttggccgtttgccgtccgccaactccgccatggtcaccacgaccacctcctcaggcgacggcggcggcggtaggttcccgccggagctgagcgtggaggcggtgttccgctgcgtgcggatcgggccggtggacgagccagacgcggagctggcgtaccagacggcggtgaacatcggcgggcacactttcaaggggatcctgcgtgaccacgggccggcggacgacgcgggccatctgccgccgccctcggcggagtaccaccaccaccagctgacggcggggcaagcgagggaagcgccgtcgccggcggggagcagcgaggcggcggccacggcagcgacgtcggcggcggtgctgatggatccgtacccgacgccgatcggcgccttcgccgcaggcacccagttcttccctcataaccctagaacctagctcactactactagtatctacatattagctagctttgctgcttccattattatggctttcgatcgatcctagtagtagcttaattccttgatggttccatttacttcctccaagttccaaattaaagatgatgatgatgatgagcatgaactaagttgtcgtcatcgtcgtcctcgggattagcaaacaaattcgagacaaacgggaagatatttttattgttactatttcttcttccactactactgcatacgcgcatgcgtttttcgagccgttgatcgatgaacactactaatgcatgatcaatggaacacatataatgtccttattattaattgagctagtgcactaccgctacctgtttgagcaatcttatttcgagttcattaataactaattggccaattcttaatgcaatgcaaagacaagagtttcaat

SEQ ID NO: 61463 - DNA, 921 bp, Zea Mays
tatgcaaatgctgctgttgtcaaaatccatcaggtttacggtataagcacagcagaagtgatggaactattggaacatttcctggctatgaatccagataacgatggacgtgtgaaagctgaagatttctgggctcattttggtctggattgcagtcctctgtgcaagaagatatttcactatttcgatttagacattaaggggttgattacgttccgtcagttcttggttgggtgcgcgcacctgaggaagcaaccactgttccagggttcctgcgagaccgcctttgagaagtgccggggtcctgaaacgtctgagatctccagggcacagctagctgatctcttgcggttaagcatggtgccaccttctgatgataagatgctggagctgttcaagacgttcgatgtagatggcgacgagaagatcagcagggacgacttcatggcgtgtcttgggaggttcccgttcctgatcgcgttctttgctgccctgatcaatggggaagtgtacatcgagatagtctgaatgaatgcctgaggcaaagcgatgccgcgtaaaaggctggagctgccagtgccaggcgtaggcaggggatccctccgtttatgcaatgtggatacccaccgggtgctcctccactttgagaccaaagcaactgtagtattgggtattgggttgcatcaagtggctgaccagtgtagtgcgtcgattttgtttagttgcttcgttcgaattattattggccatttaccgaatctgttgagatacgcgctggactagtagattgtcgatggaactcagaacgcaaatagaaagcatctgtaatctgaactaactgagaaaacatttttttttggctctctaacctgctgaagttgtgttttcttgctagctgtagcacttcggccagttgtccgc

SEQ ID NO: 61464 - DNA, 1540 bp, Zea Mays
caaaacttcagcatgtataacgagtgccatcttgtcttgctaacatgtaccattggatcagaaagaaaggaaggcccgctcctagggaactcgcacctattgttgtttccaaccatatctcgtacatagaacccatattcttcttctatgaattattcccaaccatagtttcgtccgactctcatgatgccctaccatttgttggaacaattattcgagcgatgcaggttatatatgttgatagattctcacctgcttctcggaaggctgctgtaaatgaaataaagagaaaggcagcttgcaatagcttcccgcgggtcctgttattccctgaaggcaccacaacaaatgggagattcctgatttcgttccaacatggggaaatatatcgttattaaagctcatgttcaagatgttcacacagtttcataatttcatggaggtagagtaccttcctgttgtctaccctcctgagatcaagcaagagaatgcccttcattttgcagaggataccagctatgctatggcacgtgccctgaatgccttgccgacttattattcatatggcgattctatgattatggcacgagcagtagaagctggaaaggtgaactgctcaaattatatggtagaaatggcttgggttaaagatgtttacggtataagcacagcagaagtgatggaactattggaacatttcctggctatgaatccagataacgatggacgtgtgaaagctgaagatttctgggctcattttggtctggattgcagtcctctgtgcaagaagatatttcactatttcgatttagacattaaggggttgattacgttccgtcagttcttggttgggtgcgcgcacctgaggaagcaaccactgttccagggttcctgcgagaccgcctttgagaagtgccggggtcctgaaacgtctgagatctccagggcacagctagctgatctcttgcggttaagcatggtgccaccttctgatgataagatgctggagctgttcaagacgttcgatgtagatggcgacgagaagatcagcagggacgacttcatggcgtgtcttgggaggttcccgttcctgatcgcgttctttgctgccctgatcaatggggaagtgtacatcgagatagtctgaatgaatgcctgaggcaaagcgatgccgcgtaaaaggctggagctgccagtgccaggcgtaggcaggggatccctccgtttatgcaatgtggatacccaccgggtgctcctccactttgagaccaaagcaactgtagtattgggtattgggttgcatcaagtggctgaccagtgtagtgcgtcgattttgtttagttgcttcgttcgaattattattggccatttaccgaatctgttgagatacgcgctggactagtagattgtcgatggaactcagaacgcaaatagaaagcatctgtaatctgaactaactgagaaaacatttttttttggctctctaacctgctgaagttgtgttttcttgctagctgtagcacttcggccagttgtccgc

SEQ ID NO: 61465 - DNA, 2229 bp, Zea Mays
taacacatggagacacgtggatttttttaaaggagggaaatagagacccgtgaaaacgactccgaaactgcaagggccaataagcaaaaacgaaacgacgaccacaaacaaaacagcgtctctcacttgttgctgcctatcgcttttgctttgataaaagccattactcccggccgtccattgctcgccgccgccgccgtctccggcgaccgaccgccagcttcgtcgtccatggcctctacaagccctaacccggcctctctctccgcgcccttgctctccgactccatctcgcccgcccacgccgccaacgggcacgcagccaaccatcggcaccaccacgacggcgccgtcgcggcctccgtgtgcggcgacgcgggggacccgttcgcgttcctctcggaggatcggccgccgcgggaccgtgggccgtccccggccgacccgttccgcaacggcacgccggcgtggtgcggcggcgcgtacgcgtgggcgaggacgctgctgctcctgccggtcgcggcggtgcggctggcgctgttcgggctcgccatcgccatcggttacgcggccacgtgggtggctctccgcggatgggcggacacgcacgtgaggccgcgggagggcggcgggcctatgccggcgtggcgccgccggctcatgtggatcacgcggatctccgcccgctgcatcctcttctcattcgggtaccattggatcagaaagaaaggaaggcccgctcctagggaactcgcacctattgttgtttccaaccatatctcgtacatagaacccatattcttcttctatgaattattcccaaccatagtttcgtccgactctcatgatgccctaccatttgttggaacaattattcgagcgatgcaggttatatatgttgatagattctcacctgcttctcggaaggctgctgtaaatgaaataaagagaaaggcagcttgcaatagcttcccgcgggtcctgttattccctgaaggcaccacaacaaatgggagattcctgatttcgttccaacatggtgcgttcatacctggctaccctgttcaacctgttgttgtccattatccacatgtgcactttgatcaatcatggggaaatatatcgttattaaagctcatgttcaagatgttcacacagtttcataatttcatggaggtagagtaccttcctgttgtctaccctcctgagatcaagcaagagaatgcccttcattttgcagaggataccagctatgctatggcacgtgccctgaatgccttgccgacttattattcatatggcgattctatgattatggcacgagcagtagaagctggaaaggtttacggtataagcacagcagaagtgatggaactattggaacatttcctggctatgaatccagataacgatggacgtgtgaaagctgaagatttctgggctcattttggtctggattgcagtcctctgtgcaagaagatatttcactatttcgatttagacattaaggggttgattacgttccgtcagttcttggttgggtgcgcgcacctgaggaagcaaccactgttccagggttcctgcgagaccgcctttgagaagtgccggggtcctgaaacgtctgagatctccagggcacagctagctgatctcttgcggttaagcatggtgccaccttctgatgataagatgctggagctgttcaagacgttcgatgtagatggcgacgagaagatcagcagggacgacttcatggcgtgtcttgggaggttcccgttcctgatcgcgttctttgctgccctgatcaatggggaagtgtacatcgagatagtctgaatgaatgcctgaggcaaagcgatgccgcgtaaaaggctggagctgccagtgccaggcgtaggcaggggatccctccgtttatgcaatgtggatacccaccgggtgctcctccactttgagaccaaagcaactgtagtattgggtattgggttgcatcaagtggctgaccagtgtagtgcgtcgattttgtttagttgcttcgttcgaattattattggccatttaccgaatctgttgagatacgcgctggactagtagattgtcgatggaactcagaacgcaaatagaaagcatctgtaatctgaactaactgagaaaacatttttttttggctctctaacctgctgaagttgtgttttcttgctagctgtagcacttcggccagttgtccgc

SEQ ID NO: 61466 - DNA, 2269 bp, Zea Mays
taacacatggagacacgtggatttttttaaaggagggaaatagagacccgtgaaaacgactccgaaactgcaagggccaataagcaaaaacgaaacgacgaccacaaacaaaacagcgtctctcacttgttgctgcctatcgcttttgctttgataaaagccattactcccggccgtccattgctcgccgccgccgccgtctccggcgaccgaccgccagcttcgtcgtccatggcctctacaagccctaacccggcctctctctccgcgcccttgctctccgactccatctcgcccgcccacgccgccaacgggcacgcagccaaccatcggcaccaccacgacggcgccgtcgcggcctccgtgtgcggcgacgcgggggacccgttcgcgttcctctcggaggatcggccgccgcgggaccgtgggccgtccccggccgacccgttccgcaacggcacgccggcgtggtgcggcggcgcgtacgcgtgggcgaggacgctgctgctcctgccggtcgcggcggtgcggctggcgctgttcgggctcgccatcgccatcggttacgcggccacgtgggtggctctccgcggatgggcggacacgcacgtgaggccgcgggagggcggcgggcctatgccggcgtggcgccgccggctcatgtggatcacgcggatctccgcccgctgcatcctcttctcattcgggtaccattggatcagaaagaaaggaaggcccgctcctagggaactcgcacctattgttgtttccaaccatatctcgtacatagaacccatattcttcttctatgaattattcccaaccatagtttcgtccgactctcatgatgccctaccatttgttggaacaattattcgagcgatgcaggttatatatgttgatagattctcacctgcttctcggaaggctgctgtaaatgaaataaagagaaaggcagcttgcaatagcttcccgcgggtcctgttattccctgaaggcaccacaacaaatgggagattcctgatttcgttccaacatggtgcgttcatacctggctaccctgttcaacctgttgttgtccattatccacatgtgcactttgatcaatcatggggaaatatatcgttattaaagctcatgttcaagatgttcacacagtttcataatttcatggaggtagagtaccttcctgttgtctaccctcctgagatcaagcaagagaatgcccttcattttgcagaggatctatgctatggcacgtgccctgaatgccttgccgacttattattcatatggcgattctatgattatggcacgagcagtagaagctggaaaggtgaactgctcaaattatatggtagaaatggcttgggttaaagatgtttacggtataagcacagcagaagtgatggaactattggaacatttcctggctatgaatccagataacgatggacgtgtgaaagctgaagatttctgggctcattttggtctggattgcagtcctctgtgcaagaagatatttcactatttcgatttagacattaaggggttgattacgttccgtcagttcttggttgggtgcgcgcacctgaggaagcaaccactgttccagggttcctgcgagaccgcctttgagaagtgccggggtcctgaaacgtctgagatctccagggcacagctagctgatctcttgcggttaagcatggtgccaccttctgatgataagatgctggagctgttcaagacgttcgatgtagatggcgacgagaagatcagcagggacgacttcatggcgtgtcttgggaggttcccgttcctgatcgcgttctttgctgccctgatcaatggggaagtgtacatcgagatagtctgaatgaatgcctgaggcaaagcgatgccgcgtaaaaggctggagctgccagtgccaggcgtaggcaggggatccctccgtttatgcaatgtggatacccaccgggtgctcctccactttgagaccaaagcaactgtagtattgggtattgggttgcatcaagtggctgaccagtgtagtgcgtcgattttgtttagttgcttcgttcgaattattattggccatttaccgaatctgttgagatacgcgctggactagtagattgtcgatggaactcagaacgcaaatagaaagcatctgtaatctgaactaactgagaaaacatttttttttggctctctaacctgctgaagttgtgttttcttgctagctgtagcacttcggccagttgtccgc

SEQ ID NO: 61467 - DNA, 2270 bp, Zea Mays
taacacatggagacacgtggatttttttaaaggagggaaatagagacccgtgaaaacgactccgaaactgcaagggccaataagcaaaaacgaaacgacgaccacaaacaaaacagcgtctctcacttgttgctgcctatcgcttttgctttgataaaagccattactcccggccgtccattgctcgccgccgccgccgtctccggcgaccgaccgccagcttcgtcgtccatggcctctacaagccctaacccggcctctctctccgcgcccttgctctccgactccatctcgcccgcccacgccgccaacgggcacgcagccaaccatcggcaccaccacgacggcgccgtcgcggcctccgtgtgcggcgacgcgggggacccgttcgcgttcctctcggaggatcggccgccgcgggaccgtgggccgtccccggccgacccgttccgcaacggcacgccggcgtggtgcggcggcgcgtacgcgtgggcgaggacgctgctgctcctgccggtcgcggcggtgcggctggcgctgttcgggctcgccatcgccatcggttacgcggccacgtgggtggctctccgcggatgggcggacacgcacgtgaggccgcgggagggcggcgggcctatgccggcgtggcgccgccggctcatgtggatcacgcggatctccgcccgctgcatcctcttctcattcgggtaccattggatcagaaagaaaggaaggcccgctcctagggaactcgcacctattgttgtttccaaccatatctcgtacatagaacccatattcttcttctatgaattattcccaaccatagtttcgtccgactctcatgatgccctaccatttgttggaacaattattcgagcgatgcaggttatatatgttgatagattctcacctgcttctcggaaggctgctgtaaatgaaataaagagaaaggcagcttgcaatagcttcccgcgggtcctgttattccctgaaggcaccacaacaaatgggagattcctgatttcgttccaacatggtgcgttcatacctggctaccctgttcaacctgttgttgtccattatccacatgtgcactttgatcaatcatggggaaatatatcgttattaaagctcatgttcaagatgttcacacagtttcataatttcatggagagtaccttcctgttgtctaccctcctgagatcaagcaagagaatgcccttcattttgcagaggataccagctatgctatggcacgtgccctgaatgccttgccgacttattattcatatggcgattctatgattatggcacgagcagtagaagctggaaaggtgaactgctcaaattatatggtagaaatggcttgggttaaagatgtttacggtataagcacagcagaagtgatggaactattggaacatttcctggctatgaatccagataacgatggacgtgtgaaagctgaagatttctgggctcattttggtctggattgcagtcctctgtgcaagaagatatttcactatttcgatttagacattaaggggttgattacgttccgtcagttcttggttgggtgcgcgcacctgaggaagcaaccactgttccagggttcctgcgagaccgcctttgagaagtgccggggtcctgaaacgtctgagatctccagggcacagctagctgatctcttgcggttaagcatggtgccaccttctgatgataagatgctggagctgttcaagacgttcgatgtagatggcgacgagaagatcagcagggacgacttcatggcgtgtcttgggaggttcccgttcctgatcgcgttctttgctgccctgatcaatggggaagtgtacatcgagatagtctgaatgaatgcctgaggcaaagcgatgccgcgtaaaaggctggagctgccagtgccaggcgtaggcaggggatccctccgtttatgcaatgtggatacccaccgggtgctcctccactttgagaccaaagcaactgtagtattgggtattgggttgcatcaagtggctgaccagtgtagtgcgtcgattttgtttagttgcttcgttcgaattattattggccatttaccgaatctgttgagatacgcgctggactagtagattgtcgatggaactcagaacgcaaatagaaagcatctgtaatctgaactaactgagaaaacatttttttttggctctctaacctgctgaagttgtgttttcttgctagctgtagcacttcggccagttgtccgc

SEQ ID NO: 61468 - DNA, 2648 bp, Zea Mays
taacacatggagacacgtggatttttttaaaggagggaaatagagacccgtgaaaacgactccgaaactgcaagggccaataagcaaaaacgaaacgacgaccacaaacaaaacagcgtctctcacttgttgctgcctatcgcttttgctttgataaaagccattactcccggccgtccattgctcgccgccgccgccgtctccggcgaccgaccgccagcttcgtcgtccatggcctctacaagccctaacccggcctctctctccgcgcccttgctctccgactccatctcgcccgcccacgccgccaacgggcacgcagccaaccatcggcaccaccacgacggcgccgtcgcggcctccgtgtgcggcgacgcgggggacccgttcgcgttcctctcggaggatcggccgccgcgggaccgtgggccgtccccggccgacccgttccgcaacggcacgccggcgtggtgcggcggcgcgtacgcgtgggcgaggacgctgctgctcctgccggtcgcggcggtgcggctggcgctgttcgggctcgccatcgccatcggttacgcggccacgtgggtggctctccgcggatgggcggacacgcacgtgaggccgcgggagggcggcgggcctatgccggcgtggcgccgccggctcatgtggatcacgcggatctccgcccgctgcatcctcttctcattcgggtaccattggatcagaaagaaaggaaggcccgctcctagggaactcgcacctattgttgtttccaaccatatctcgtacatagaacccatattcttcttctatgaattattcccaaccatagtttcgtccgactctcatgatgccctaccatttgttggaacaattattcgagcgatgcaggttatatatgttgatagattctcacctgcttctcggaaggctgctgtaaatgaaataaaggtaagaacagttcctctcattcccatagcttctcatccttttattaattgtatattgtgatcccttggttggctttaaaagtgttgcattgtattttgtcacatgttttagccaccccattgctttatgtaacctttaagttattgaatatcgctgctctacactgacttactatgtgggaaaagtaacaagcagaaaaagacatctacaagctactccttgcagttgactgtttcacagatccttttaatttcgtttgcagcaaacatcataattgattctaaaatcaacaccaaccaacttgtcctagaataacttgattgtcttttagttatttgttcatatggtacatactctctaggatgtcctttcagagaaaggcagcttgcaatagcttcccgcgggtcctgttattccctgaaggcaccacaacaaatgggagattcctgatttcgttccaacatggtgcgttcatacctggctaccctgttcaacctgttgttgtccattatccacatgtgcactttgatcaatcatggggaaatatatcgttattaaagctcatgttcaagatgttcacacagtttcataatttcatggaggtagagtaccttcctgttgtctaccctcctgagatcaagcaagagaatgcccttcattttgcagaggataccagctatgctatggcacgtgccctgaatgccttgccgacttattattcatatggcgattctatgattatggcacgagcagtagaagctggaaaggtgaactgctcaaattatatggtagaaatggcttgggttaaagatgtttacggtataagcacagcagaagtgatggaactattggaacatttcctggctatgaatccagataacgatggacgtgtgaaagctgaagatttctgggctcattttggtctggattgcagtcctctgtgcaagaagatatttcactatttcgatttagacattaaggggttgattacgttccgtcagttcttggttgggtgcgcgcacctgaggaagcaaccactgttccagggttcctgcgagaccgcctttgagaagtgccggggtcctgaaacgtctgagatctccagggcacagctagctgatctcttgcggttaagcatggtgccaccttctgatgataagatgctggagctgttcaagacgttcgatgtagatggcgacgagaagatcagcagggacgacttcatggcgtgtcttgggaggttcccgttcctgatcgcgttctttgctgccctgatcaatggggaagtgtacatcgagatagtctgaatgaatgcctgaggcaaagcgatgccgcgtaaaaggctggagctgccagtgccaggcgtaggcaggggatccctccgtttatgcaatgtggatacccaccgggtgctcctccactttgagaccaaagcaactgtagtattgggtattgggttgcatcaagtggctgaccagtgtagtgcgtcgattttgtttagttgcttcgttcgaattattattggccatttaccgaatctgttgagatacgcgctggactagtagattgtcgatggaactcagaacgcaaatagaaagcatctgtaatctgaactaactgagaaaacatttttttttggctctctaacctgctgaagttgtgttttcttgctagctgtagcacttcggccagttgtccgc

SEQ ID NO: 61469 - DNA, 1525 bp, Zea Mays
acccctaaaatccgggtgtgacaatctacggctaacctagggttcccgtcccgtccggatccgtcgatggggaaggagggcgtggtggcagggccggcggcggatgggagtaaatcgcggccggagtgcatcaactcgtccaacccgtaccacgagtgcactgactactgcctccgcaagatcgccgaggccaggcagcgcctcgacgacgagctccccgactcgtggaagcgcccgcccgagcaccgcaccgtccaccgggactgcatcaacgcctgcaacccctaccacgagtgctccgactactgcttcaagcgcatcgccgacgccaagtcagggcttgagcgtggggagcaacagccaccagctgacgtggccaccgctgccggcacgtctgatgccgtggagcagcagcaacttgaagataacgatgccgacggacaggagggcgcagccgcggatgacggctacccgcagatgacggaaaagcagaagaagctgttcgagctgcgccttaagatgaatgaagcgcggaaagcgaatcagcaggcaatggttgccgagaagaaaaggatggaaccgcggggcgagagccgaggtgtttctaagcagaagtggctggacgacaggaagaagaagatcgggaagctgctggactcaaatggccttgatatgtccaaggcgtacatgctcgatacgcaggagactgcagaagccaagtacaagaaatgggagaaggaacctgctccatatgggtgggatgttttcaatcaaaagaccttgtatgatgcatacaaaaagaggaccaaggatatagaagttgacatggaggcgtacaataaagccaaggaagctgatcctgaattctaccgtgacgcctccagtctccagtacgggaaggtgtccaatgtccctgaagaaaacattgacaagatggtcaaggaactcaaggagcgggaagagaagcggaaatcgttcagcaggaggcgcaagtttaacgaagacaaggacattgattcgatcaacgaccggaatgagcacttcaacaagaaggttgagcgcgcgttcggcaagtacacgctcgagatcaagaacaacctcgaaagaggtactggcttgccggactaaggaccttacacagcagctatcttatggcgctcaagctaaccactcgcctagaggcgtgtgtccctggtgttttccttttcgcatggttacttcttgcctgtatgctcggaactcgtggccatggttccattttgatttgtaagaaaccggggactgggttgtcatgacgttaggttgaagtaatgtacagaccaagttgtgcctgaatggaatggttgatttgtaattgtgtatatgccgcgacgaggtttatgtaatttaaaatcaattctgagacattgagaccaatctgtgtgtctctacatatataactaactgttgatgcactcttccataaacaaaccatccgtccctacaacaaacacctgagaagaggagacgagaaaaaaaaaacgaa

SEQ ID NO: 61470 - DNA, 376 bp, Zea Mays
atcaaaccctcacagcgaaggacacaaaaacacaggtagggttaggcgacgcggcagcctcaagaagtagctggctggcttgcctgcctgactgcctgggcgatgtacagattttaaggcttccaagcctcaagcttacagttaccccctcaatgtaactgcatttgttcattttcttggcaaatttagtgcttccgtgatcaggattcactcaggatttacttgtataacactacttcatgcaagcaagcttagccttctgtaaagtgaccattcaattttaggcaataatgcagtagtatggtaactatggttggtggtatttgagacattgggggtatgacaagaattgcactcttttagtttgttggatgtc

SEQ ID NO: 61471 - DNA, 835 bp, Zea Mays
gaagacttctatggttgaagaggcactgcgctaaggatggcttatgtatgccgtcacaaaagccttttgcattgcctttgtcatgaccttcttctctgtattcgacgttcctgtcttttggccaatacttctctgttattggattgtgctttttgtcctgacaatgaagcgacaaattgtgcatatgatcaagtacaagtatgtcccattcagcataggaaagcagaggtatggcggaaagaaaggccctgccgccagtgcatctaaggagtaaagacggagggagggtgtgggacctcgagagcagtgcatgtgctatctttgaggcatcctgctggcatggtggtattttgagtaccagggctactgatagtgaacgcacaccatattcgctagtggagagtggagattgcagagaagctgaccagacttttgcattggttgatgatttctgttttacgtgtcggtagtttatgtacaatggcatggagcatagctagtagatcaaatttccggatcctctgttgtactgtccctttgtggacaagttgtggacctgttggatccttgcaaacgcattgtgatccaggacctagaggacaaaatcaaactgtccagcgattgttacttggaccttccaacattgactgcatactagtaccagcgattcgtagctgctactgcctttctcatggttaccggcgaacgtttcagccattgtttatttgcatctagcaggcagttgtaagggagttattcgctattatattactcgtttgaagtggcttcttcgtaatagtattaacaactaaggctaactgtaacttgttttgtc

SEQ ID NO: 61472 - DNA, 695 bp, Zea Mays
gtgatgaatactggaagaaaaatacaaagcgacaaattgtgcatatgatcaagtacaagtatgtcccattcagcataggaaagcagaggtatggcggaaagaaaggccctgccgccagtgcatctaaggagtaaagacggagggagggtgtgggacctcgagagcagtgcatgtgctatctttgaggcatcctgctggcatggtggtattttgagtaccagggctactgatagtgaacgcacaccatattcgctagtggagagtggagattgcagagaagctgaccagacttttgcattggttgatgatttctgttttacgtgtcggtagtttatgtacaatggcatggagcatagctagtagatcaaatttccggatcctctgttgtactgtccctttgtggacaagttgtggacctgttggatccttgcaaacgcattgtgatccaggacctagaggacaaaatcaaactgtccagcgattgttacttggaccttccaacattgactgcatactagtaccagcgattcgtagctgctactgcctttctcatggttaccggcgaacgtttcagccattgtttatttgcatctagcaggcagttgtaagggagttattcgctattatattactcgtttgaagtggcttcttcgtaatagtattaacaactaaggctaactgtaacttgttttgtc

SEQ ID NO: 61473 - DNA, 866 bp, Zea Mays
catcgatttaaatgctcaaggtcgggaagatgatgaaccaattgaagttgaagctgaaattactgcaaataattcggtatgccgtcacaaaagccttttgcattgcctttgtcatgaccttcttctctgtattcgacgttcctgtcttttggccaatacttctctgttattggattgtgctttttgtcctgacaatgaagcgacaaattgtgcatatgatcaagtacaagtatgtcccattcagcataggaaagcagaggtatggcggaaagaaaggccctgccgccagtgcatctaaggagtaaagacggagggagggtgtgggacctcgagagcagtgcatgtgctatctttgaggcatcctgctggcatggtggtattttgagtaccagggctactgatagtgaacgcacaccatattcgctagtggagagtggagattgcagagaagctgaccagacttttgcattggttgatgatttctgttttacgtgtcggtagtttatgtacaatggcatggagcatagctagtagatcaaatttccggatcctctgttgtactgtccctttgtggacaagttgtggacctgttggatccttgcaaacgcattgtgatccaggacctagaggacaaaatcaaactgtccagcgattgttacttggaccttccaacattgactgcatactagtaccagcgattcgtagctgctactgcctttctcatggttaccggcgaacgtttcagccattgtttatttgcatctagcaggcagttgtaagggagttattcgctattatattactcgtttgaagtggcttcttcgtaatagtattaacaactaaggctaactgtaacttgttttgtc

SEQ ID NO: 61474 - DNA, 2284 bp, Zea Mays
caacaaaggttgtggtggtcatatcacccttgtaagtctaattcatgatcagtgcttgaaacatgcaaatcacaggttatctgcatgcttccttggatcagggcaacctgatagtcgcgttgaagctaaagcgatagctggcatgtataagattgtttatgtttgccacgagacaatattaagattaatggattcgttgaagaaacttgcaaaaaagctagggattgcactttttgccattgatgaggaatggtgaggtttaacaaactgcaaagaaggggaagaaaggaggtacatggaaggtttcaatatatctgtcaacctgtatcagcatggtcactaggaataaacttataaagaaggggaagaaacatgaaggaaatctaaaataagtcgtgagataacttaaggtgcttttgcagagaaggcaatttgcatctcccagcagcgatggttagagcatctcagagcataaatctaaacctgtcgcaagatctattcatgacaatatgagcagatattcttctcttagtagttagttttaagacacaactgaattcagtaggataagctttcgatacaaaacattctttagttcctcatgagaatggtcatggcaaatcattgggcactaagttgcacacgcttggcagtctgccttcacgtgtactacttaatggcaccgatggggatgatcatagtgaccatttgaagcaaggtttcattttgtccagtttattctttgtggtgttgttggtcttgaaccaccatgatgactgccagcaacttccttcaatgctgaagcacctcaattggggacaattgataatattgttccatagtatctgattcctctgttgctgattttagtgacatatgtcaagaatctgatgtcttttgtacttcaaaaaaacaattaatttatgcccgtcgcaacgcacgggcacctaactagtagacaaaaaaatgttatgacttctgtacaggacattttttctcttgttgcaaaaaataactttttgtggaaagatatttattacgtcttctaatttgtttattttaacacgtgagctctttttgcagtctgctcgctggcgattgcgattcccaccagtcccccagccccaggcacgaaacctaacccacccaagcggcaaccatggagccctcccccgtcggcgccagcggctcggcggagcggtggcgcgcggaggcggcgcgggcgttccagcactacctggaccgctcggcgccgcacacggcggggcggtgggcgggcacgctcgtggccgcggcggtgtacgcgctgcgggtctactacgtgcggggcttctacgtcgtcacctacgggctgggcatctacctgatcaacctcctcatcggcttcctctcccccatggtcgaaccggagctcgaggccgggcccgggctcccaaccagcggctccgacgagttcaagcccttcatccgtcgcctccccgagttcaagttctggtatgccgtcacaaaagccttttgcattgcctttgtcatgaccttcttctctgtattcgacgttcctgtcttttggccaatacttctctgttattggattgtgctttttgtcctgacaatgaagcgacaaattgtgcatatgatcaagtacaagtatgtcccattcagcataggaaagcagaggtatggcggaaagaaaggccctgccgccagtgcatctaaggagtaaagacggagggagggtgtgggacctcgagagcagtgcatgtgctatctttgaggcatcctgctggcatggtggtattttgagtaccagggctactgatagtgaacgcacaccatattcgctagtggagagtggagattgcagagaagctgaccagacttttgcattggttgatgatttctgttttacgtgtcggtagtttatgtacaatggcatggagcatagctagtagatcaaatttccggatcctctgttgtactgtccctttgtggacaagttgtggacctgttggatccttgcaaacgcattgtgatccaggacctagaggacaaaatcaaactgtccagcgattgttacttggaccttccaacattgactgcatactagtaccagcgattcgtagctgctactgcctttctcatggttaccggcgaacgtttcagccattgtttatttgcatctagcaggcagttgtaagggagttattcgctattatattactcgtttgaagtggcttcttcgtaatagtattaacaactaaggctaactgtaacttgttttgtc

SEQ ID NO: 61475 - DNA, 2398 bp, Zea Mays
cgctgctgatacaagcagcctaaccagactgcttttgtgaagcacattgctttctgagaagccatttgcagtacaaggatgaaacttggtcagagtgtttaccatatggactggcagtgaaaccaaaaaaggaggcgcgctactgttcttctgtattcatatcaatgtaacagcatattactgatatagctatgcctggagagtggagataagtggaggtggcaccaccaattccttgatgtaccaggaatgtttggattgttgtattttgacattgtttagttcaacatattcaagattaatggattcgttgaagaaacttgcaaaaaagctagggattgcactttttgccattgatgaggaatggtgaggtttaacaaactgcaaagaaggggaagaaaggaggtacatggaaggtttcaatatatctgtcaacctgtatcagcatggtcactaggaataaacttataaagaaggggaagaaacatgaaggaaatctaaaataagtcgtgagataacttaaggtgcttttgcagagaaggcaatttgcatctcccagcagcgatggttagagcatctcagagcataaatctaaacctgtcgcaagatctattcatgacaatatgagcagatattcttctcttagtagttagttttaagacacaactgaattcagtaggataagctttcgatacaaaacattctttagttcctcatgagaatggtcatggcaaatcattgggcactaagttgcacacgcttggcagtctgccttcacgtgtactacttaatggcaccgatggggatgatcatagtgaccatttgaagcaaggtttcattttgtccagtttattctttgtggtgttgttggtcttgaaccaccatgatgactgccagcaacttccttcaatgctgaagcacctcaattggggacaattgataatattgttccatagtatctgattcctctgttgctgattttagtgacatatgtcaagaatctgatgtcttttgtacttcaaaaaaacaattaatttatgcccgtcgcaacgcacgggcacctaactagtagacaaaaaaatgttatgacttctgtacaggacattttttctcttgttgcaaaaaataactttttgtggaaagatatttattacgtcttctaatttgtttattttaacacgtgagctctttttgcagtctgctcgctggcgattgcgattcccaccagtcccccagccccaggcacgaaacctaacccacccaagcggcaaccatggagccctcccccgtcggcgccagcggctcggcggagcggtggcgcgcggaggcggcgcgggcgttccagcactacctggaccgctcggcgccgcacacggcggggcggtgggcgggcacgctcgtggccgcggcggtgtacgcgctgcgggtctactacgtgcggggcttctacgtcgtcacctacgggctgggcatctacctgatcaacctcctcatcggcttcctctcccccatggtcgaaccggagctcgaggccgggcccgggctcccaaccagcggctccgacgagttcaagcccttcatccgtcgcctccccgagttcaagttctggtatgccgtcacaaaagccttttgcattgcctttgtcatgaccttcttctctgtattcgacgttcctgtcttttggccaatacttctctgttattggattgtgctttttgtcctgacaatgaagcgacaaattgtgcatatgatcaagtacaagtatgtcccattcagcataggaaagcagaggtatggcggaaagaaaggccctgccgccagtgcatctaaggagtaaagacggagggagggtgtgggacctcgagagcagtgcatgtgctatctttgaggcatcctgctggcatggtggtattttgagtaccagggctactgatagtgaacgcacaccatattcgctagtggagagtggagattgcagagaagctgaccagacttttgcattggttgatgatttctgttttacgtgtcggtagtttatgtacaatggcatggagcatagctagtagatcaaatttccggatcctctgttgtactgtccctttgtggacaagttgtggacctgttggatccttgcaaacgcattgtgatccaggacctagaggacaaaatcaaactgtccagcgattgttacttggaccttccaacattgactgcatactagtaccagcgattcgtagctgctactgcctttctcatggttaccggcgaacgtttcagccattgtttatttgcatctagcaggcagttgtaagggagttattcgctattatattactcgtttgaagtggcttcttcgtaatagtattaacaactaaggctaactgtaacttgttttgtc

SEQ ID NO: 61476 - DNA, 2253 bp, Zea Mays
atggagagccctatcgccgtgtcgcgaggggccgagcggcggctggaccgtggataccgcgttggggctgagctgacctatttttcgtgggccgtttttactgggtcgcgaccggggctgcagatccgcccctgctgccggatgtcggagtcaccgtgccggcttatccgcttatggtctcccgcaagcacccagccgaacgagttttttgctattatatttcggatacgtgggtggggagcaaactggaaggagttcctggagcttgatgccctggcgcgtgagactccagtagagaaatggggtatgtgatattgtgatgctcccctgctcttccagattgccttaaaaagttcggttctgatgcttgaaaaaacatctcagttactagtaggaagttggatttgttggtgtggatgtatgtccaaaacacccaggttaagtcaggcaaatttggtcgcatgttttcttcttaatgttaagataaagccacatagttcatcctaggttggtctagttttttttttcaaacgatgagtagtcacctttaagttttctgatggtaaggtggtcaaatttgtttataataatattaatacatccggaattaaaggttgtctgatggtaaggtggtcaaatgttcttcactgacactaccaactttggtttgacaatgacttggacaacagaaatggaatagttattgttttctgttcatcttcctctgtcttatgtggtttctatctgcttgcagatggcacactcttaatcacaactactggtacgttttctgtttcactgcatggtatacttcagtgttctgtttgtgttatggtcttatggataccgattgatgagaagtactgactttgctaggagttcattagttttagctattcgaaattgcttgcttggttgtgctggtcctcttctcaacagagcaagttggtatcttgagaattcatctgacaaaaaactgtggaacttgatagcgatggtaacaaacagatatattgaatcatataaagatgggagcattctatgttcggactctcaccatgattctctcaaatttgctcttatcttgatttcctcactactttcatttgttattcatgctttttttcctctttctctttgtctgttttcttcttttgtagtgtagttttgtttacattttctcttactttgcaagtgctaaatggcaaaacacaaagaattatacagtagaatagtacatcatagtttctactacctacttatatctatttagatgaaggaattattagcagttgagcacattgttttgggtgtacaagtcgctaccatagtctctatcaattgcatattgcaatgcatgcaaatggcaaaaatgcatctgagaaggttgtttttgtttcatttgtgatattgtgaatagtcattgatgatttcttgcctatatctgtaggaatcaatgatgaagccatttatcgttatcgaattaatcttcaagaagagatatcaagtgcaagattgagcaagctggctaccacatacagaaatcatgcacgattcagtggaactgaagtctgcctttgtctctcaaatgatgcagatgttgatgattttatattatggttggttggcttcttcagaaagatacaagtgataaaagcagcaagcacaccagaaaacagggacaagctaagctctgaatctggattctggagaccgtacctgcaggccggctgctggcgccgccgcgccggggatggaggaggggccgagggggacgatgccgccgtatcccccgtcaccggtagcgcgccgccgtcacctgttccgctagggttcctccctcggcagctggttgcctggttcgtgtcgtttgtgcctgggcgttgctctgttggctcttggttgtgctgcttctgctcacgtggtgggaattgggaaaaaggaacctggactgggccgctggaatcaatcgctgggctaatctggtcgtccaccaatgaagagttccaagacgaatgcatcgggcttcttgggctaggctcggaatatgacgtgtcggaaggaccagttcgatcgtcgatctgtgagaagatgatccatatcatcgagatgaatgataccaaagagaacgcagaggacaacgtgccgtatctgttcgagtgcgagaagctggatggaggtagcgagctggacgccaaacatagccgtaggcagttagccacactccagttagccaaactagtctatatttag

SEQ ID NO: 61477 - DNA, 2150 bp, Zea Mays
atgccatttgctttgctgacgaatagctttcgatgatacactagtgttcagttaaccgtaggttgtttcgccacaggactcggtggaaatggagttcttcaccgagtacggagaggcaagccagtaccagatccaagaagtcattggtaaaggcagctacggggtagttgctgcagctgtagatacccgcaccggtgagcgggttgctatcaagaagatcaacgatgtgtttgagcatgtctcggacgccacacgcatactgcgggagatcaagctccttcggttgcttcgtcacccagacatagttgagattaagcacatcatgctccctccatctcggagggagttccaagatatttatgttgtttttgagctcatggagtctgatctccatcaagtgatcaaggccaatgatgacctcacccctgaacatcaccagtttttcctgtaccaacttcttcgtgctctcaagtacatccatgctgctaatgtatttcatcgtgacctaaagcccaagaatatactggctaactcggactgcaaactgaaaatatgtgactttggtcttgcccgtgcatcatttaatgatgccccttcagctatattttggacagattatgtggcaacgaggtggtaccgggcacctgaactatgtggttcttttttctccaaatacactcctgcaattgatatttggagcattgggtgcatatttgctgaacttctcactggaaggccactatttcctgggaagaatgttgtacaccaattagatattataacagatcttcttggaactccatcatctgagaccttatctcggatccgaaatgagaaggccaggagatacttaagctgcatgcggaaaaaatatcccgtgccctttactcataaatttcgaaatgccgatcctttggctcttcgtcttttagagcgtttacttgcatttgatcctaaagatcggcctactgcagaagaggctctagctgatccatactttgcatcccttgctaatgtggaacgtgagccatcaagacacccaatttctaaacttgagtttgaatttgaaagaaggaagctggccaaagatgatgttagagaattgatctatcgagagattttggagtatcatccacagatgctggaggagcacatgcaaggtggagaacagattagcttcctctacccgagtttgcacatcttgaggagcattatagcaagggagaaagaggttctccactgcaaagaaagcatgcttctttaccaagggaaagagtggttgtatcgaaggacggtgatactgatcaacatattaatgaccaggagagaagtgcagattctgtcgcccgcaccactgtgagccctccaaggtcagaagacgacgacatgagcgatgtgaaatccacaagcttaagctctcggagctacctgaagagtgcgagcataagtgcttccaagtgtgtcgttgccacgaagaaacacccggaggacgatggaatcgctgaggaaatggaaggcgccgtcaatggattgtctgaaaaggtctccaggatgcactcgtaagcaggactgcccctggcaacagcaaccttgttgcaaggtttctgtctctggtacactgtattccgacgacagccttggaaaggcaaacactgtatgtcacacagcagtacagcacactgtgctgcgaggttgggttttgcttgcgtacatccatccacagctagttcgactttacctgggtggaagaggaacacaccaccgcctgatggccctttcttcatcgtctgcatttccaccgtgtcatgccagcgctgcgtggcacctctagaaggtagaagccctgcatggattcatgaagaattcctaagatgtagcactagtcagtgcatggaggaaacatagtcggcctgtcgaccatgagatgttttcttgcaaatggagtctggacctatggttttcagttttattacaacggcttctgccgtaggaagtgtcagcagtgtatcatccctgtaatacccaatttataagagaccatataaaaggagaaaaatcatttgctttatgtatgtgtataacatatccacttatcatcacatgtgaatgccatatttaaagataaataactaataaaaagttataccact

SEQ ID NO: 61478 - DNA, 2134 bp, Zea Mays
tgcatgttatgcggccatgccatttgctttgctgacgaatagctttcgatgatacactagtgttcagttaaccgtaggttgtttcgccacaggactcggtggaaatggagttcttcaccgagtacggagaggcaagccagtaccagatccaagaagtcattggtaaaggcagctacggggtagttgctgcagctgtagatacccgcaccggtgagcgggttgctatcaagaagatcaacgatgtgtttgagcatgtctcggacgccacacgcatactgcgggagatcaagctccttcggttgcttcgtcacccagacatagttgagattaagcacatcatgctccctccatctcggagggagttccaagatatttatgttgtttttgagctcatggagtctgatctccatcaagtgatcaaggccaatgatgacctcacccctgaacatcaccagtttttcctgtaccaacttcttcgtgctctcaagtacatccatgctgctaatgtatttcatcgtgacctaaagcccaagaatatactggctaactcggactgcaaactgaaaatatgtgactttggtcttgcccgtgcatcatttaatgatgccccttcagctatattttggacagattatgtggcaacgaggtggtaccgggcacctgaactatgtggttcttttttctccaaatacactcctgcaattgatatttggagcattgggtgcatatttgctgaacttctcactggaaggccactatttcctgggaagaatgttgtacaccaattagatattataacagatcttcttggaactccatcatctgagaccttatctcggatccgaaatgagaaggccaggagatacttaagctgcatgcggaaaaaatatcccgtgccctttactcataaatttcgaaatgccgatcctttggctcttcgtcttttagagcgtttacttgcatttgatcctaaagatcggcctactgcagaagaggctctagctgatccatactttgcatcccttgctaatgtggaacgtgagccatcaagacacccaatttctaaacttgagtttgaatttgaaagaaggaagctggccaaagatgatgttagagaattgatctatcgagagattttggagtatcatccacagatgctggaggagcacatgcaaggtggagaacagattagcttcctctacccgagtggagttgatcggttcaaacggcagtttgcacatcttgaggagcattatagcaagggagaaagaggttctccactgcaaagaaagcatgcttctttaccaagggaaagagtggttgtatcgaaggacggtgatactgatcaacatattaatgaccaggagagaagtgcagattctgtcgcccgcaccactgtgagccctccaaggtcagaagacgacgacatgagcgatgtgaaatccacaagcttaagctctcggagctacctgaagagtgcgagcataagtgcttccaagtgtgtcgttgccacgaagaaacacccggaggacgatggaatcgctgaggaaatggaaggcgccgtcaatggattgtctgaaaaggtctccaggatgcactcgtaagcaggactgcccctggcaacagcaaccttgttgcaaggtttctgtctctggtacactgtattccgacgacagccttggaaaggcaaacactgtatgtcacacactagttcgactttacctgggtggaagaggaacacaccaccgcctgatggccctttcttcatcgtctgcatttccaccgtgtcatgccagcgctgcgtggcacctctagaaggtagaagccctgcatggattcatgaagaattcctaagatgtagcactagtcagtgcatggaggaaacatagtcggcctgtcgaccatgagatgttttcttgcaaatggagtctggacctatggttttcagttttattacaacggcttctgccgtaggaagtgtcagcagtgtatcatccctgtaatacccaatttataagagaccatataaaaggagaaaaatcatttgctttatgtatgtgtataacatatccacttatcatcacatgtgaatgccatatttaaagataaataactaataaaaagttataccact

SEQ ID NO: 61479 - DNA, 2331 bp, Zea Mays
aacgctacaacccagctatagtgctaacagagcctggagggaagggagtaggcgatgctactgcctctttcaagcaacgcgtgcgcagtctctcttgttctgagcagctatgccaattcggtgcagccttttccatcagtctgaagtctaaacagtgaacactcattcagcgcattatcaggaggcgatatagaggggagaaaaggaaaatcgtccatccaatcccaacttggactcggtggaaatggagttcttcaccgagtacggagaggcaagccagtaccagatccaagaagtcattggtaaaggcagctacggggtagttgctgcagctgtagatacccgcaccggtgagcgggttgctatcaagaagatcaacgatgtgtttgagcatgtctcggacgccacacgcatactgcgggagatcaagctccttcggttgcttcgtcacccagacatagttgagattaagcacatcatgctccctccatctcggagggagttccaagatatttatgttgtttttgagctcatggagtctgatctccatcaagtgatcaaggccaatgatgacctcacccctgaacatcaccagtttttcctgtaccaacttcttcgtgctctcaagtacatccatgctgctaatgtatttcatcgtgacctaaagcccaagaatatactggctaactcggactgcaaactgaaaatatgtgactttggtcttgcccgtgcatcatttaatgatgccccttcagctatattttggacagattatgtggcaacgaggtggtaccgggcacctgaactatgtggttcttttttctccaaatacactcctgcaattgatatttggagcattgggtgcatatttgctgaacttctcactggaaggccactatttcctgggaagaatgttgtacaccaattagatattataacagatcttcttggaactccatcatctgagaccttatctcggatccgaaatgagaaggccaggagatacttaagctgcatgcggaaaaaatatcccgtgccctttactcataaatttcgaaatgccgatcctttggctcttcgtcttttagagcgtttacttgcatttgatcctaaagatcggcctactgcagaagaggctctagctgatccatactttgcatcccttgctaatgtggaacgtgagccatcaagacacccaatttctaaacttgagtttgaatttgaaagaaggaagctggccaaagatgatgttagagaattgatctatcgagagattttggagtatcatccacagatgctggaggagcacatgcaaggtggagaacagattagcttcctctacccgagtggagttgatcggttcaaacggcagtttgcacatcttgaggagcattatagcaagggagaaagaggttctccactgcaaagaaagcatgcttctttaccaagggaaagagtggttgtatcgaaggacggtgatactgatcaacatattaatgaccaggagagaagtgcagattctgtcgcccgcaccactgtgagccctccaaggtcagaagacgacgacatgagcgatgtgaaatccacaagcttaagctctcggagctacctgaagagtgcgagcataagtgcttccaagtgtgtcgttgccacgaagaaacacccggaggacgatggaatcgctgaggaaatggaaggcgccgtcaatggattgtctgaaaaggtctccaggatgcactcgtaagcaggactgcccctggcaacagcaaccttgttgcaaggtttctgtctctggtacactgtattccgacgacagccttggaaaggcaaacactgtatgtcacacagcagtacagcacactgtgctgcgaggttgggttttgcttgcgtacatccatccacagctagttcgactttacctgggtggaagaggaacacaccaccgcctgatggccctttcttcatcgtctgcatttccaccgtgtcatgccagcgctgcgtggcacctctagaaggtagaagccctgcatggattcatgaagaattcctaagatgtagcactagtcagtgcatggaggaaacatagtcggcctgtcgaccatgagatgttttcttgcaaatggagtctggacctatggttttcagttttattacaacggcttctgccgtaggaagtgtcagcagtgtatcatccctgtaatacccaatttataagagaccatataaaaggagaaaaatcatttgctttatgtatgtgtataacatatccacttatcatcacatgtgaatgccatatttaaagataaataactaataaaaagttataccact

SEQ ID NO: 61480 - DNA, 2170 bp, Zea Mays
caccattccggtcatcaccgtcggtgaacgctacaacccagctatagtgctaacagagcctggagggaagggagtaggcgatgctactgcctctttcaagcaacgcgtgcgcagtctctcttgttctggactcggtggaaatggagttcttcaccgagtacggagaggcaagccagtaccagatccaagaagtcattggtaaaggcagctacggggtagttgctgcagctgtagatacccgcaccggtgagcgggttgctatcaagaagatcaacgatgtgtttgagcatgtctcggacgccacacgcatactgcgggagatcaagctccttcggttgcttcgtcacccagacatagttgagattaagcacatcatgctccctccatctcggagggagttccaagatatttatgttgtttttgagctcatggagtctgatctccatcaagtgatcaaggccaatgatgacctcacccctgaacatcaccagtttttcctgtaccaacttcttcgtgctctcaagtacatccatgctgctaatgtatttcatcgtgacctaaagcccaagaatatactggctaactcggactgcaaactgaaaatatgtgactttggtcttgcccgtgcatcatttaatgatgccccttcagctatattttggacagattatgtggcaacgaggtggtaccgggcacctgaactatgtggttcttttttctccaaatacactcctgcaattgatatttggagcattgggtgcatatttgctgaacttctcactggaaggccactatttcctgggaagaatgttgtacaccaattagatattataacagatcttcttggaactccatcatctgagaccttatctcggatccgaaatgagaaggccaggagatacttaagctgcatgcggaaaaaatatcccgtgccctttactcataaatttcgaaatgccgatcctttggctcttcgtcttttagagcgtttacttgcatttgatcctaaagatcggcctactgcagaagaggctctagctgatccatactttgcatcccttgctaatgtggaacgtgagccatcaagacacccaatttctaaacttgagtttgaatttgaaagaaggaagctggccaaagatgatgttagagaattgatctatcgagagattttggagtatcatccacagatgctggaggagcacatgcaaggtggagaacagattagcttcctctacccgagtggagttgatcggttcaaacggcagtttgcacatcttgaggagcattatagcaagggagaaagaggttctccactgcaaagaaagcatgcttctttaccaagggaaagagtggttgtatcgaaggacggtgatactgatcaacatattaatgaccaggagagaagtgcagattctgtcgcccgcaccactgtgagccctccaaggtcagaagacgacgacatgagcgatgtgaaatccacaagcttaagctctcggagctacctgaagagtgcgagcataagtgcttccaagtgtgtcgttgccacgaagaaacacccggaggacgatggaatcgctgaggaaatggaaggcgccgtcaatggattgtctgaaaaggtctccaggatgcactcgtaagcaggactgcccctggcaacagcaaccttgttgcaaggtttctgtctctggtacactgtattccgacgacagccttggaaaggcaaacactgtatgtcacacactagttcgactttacctgggtggaagaggaacacaccaccgcctgatggccctttcttcatcgtctgcatttccaccgtgtcatgccagcgctgcgtggcacctctagaaggtagaagccctgcatggattcatgaagaattcctaagatgtagcactagtcagtgcatggaggaaacatagtcggcctgtcgaccatgagatgttttcttgcaaatggagtctggacctatggttttcagttttattacaacggcttctgccgtaggaagtgtcagcagtgtatcatccctgtaatacccaatttataagagaccatataaaaggagaaaaatcatttgctttatgtatgtgtataacatatccacttatcatcacatgtgaatgccatatttaaagataaataactaataaaaagttataccact

SEQ ID NO: 61481 - DNA, 2384 bp, Zea Mays
cttcgttctcgtcttccttcctaccaccattccggtcatcaccgtcggtgaacgctacaacccagctatagtgctaacagagcctggagggaagggagtaggcgatgctactgcctctttcaagcaacgcgtgcgcagtctctcttgttctgcagagcagctatgccaattcggtgcagccttttccatcagtctgaagtctaaacagtgaacactcattcagcgcattatcaggaggcgatatagaggggagaaaaggaaaatcgtccatccaatcccaacttggactcggtggaaatggagttcttcaccgagtacggagaggcaagccagtaccagatccaagaagtcattggtaaaggcagctacggggtagttgctgcagctgtagatacccgcaccggtgagcgggttgctatcaagaagatcaacgatgtgtttgagcatgtctcggacgccacacgcatactgcgggagatcaagctccttcggttgcttcgtcacccagacatagttgagattaagcacatcatgctccctccatctcggagggagttccaagatatttatgttgtttttgagctcatggagtctgatctccatcaagtgatcaaggccaatgatgacctcacccctgaacatcaccagtttttcctgtaccaacttcttcgtgctctcaagtacatccatgctgctaatgtatttcatcgtgacctaaagcccaagaatatactggctaactcggactgcaaactgaaaatatgtgactttggtcttgcccgtgcatcatttaatgatgccccttcagctatattttggacagattatgtggcaacgaggtggtaccgggcacctgaactatgtggttcttttttctccaaatacactcctgcaattgatatttggagcattgggtgcatatttgctgaacttctcactggaaggccactatttcctgggaagaatgttgtacaccaattagatattataacagatcttcttggaactccatcatctgagaccttatctcggatccgaaatgagaaggccaggagatacttaagctgcatgcggaaaaaatatcccgtgccctttactcataaatttcgaaatgccgatcctttggctcttcgtcttttagagcgtttacttgcatttgatcctaaagatcggcctactgcagaagaggctctagctgatccatactttgcatcccttgctaatgtggaacgtgagccatcaagacacccaatttctaaacttgagtttgaatttgaaagaaggaagctggccaaagatgatgttagagaattgatctatcgagagattttggagtatcatccacagatgctggaggagcacatgcaaggtggagaacagattagcttcctctacccgagtggagttgatcggttcaaacggcagtttgcacatcttgaggagcattatagcaagggagaaagaggttctccactgcaaagaaagcatgcttctttaccaagggaaagagtggttgtatcgaaggacggtgatactgatcaacatattaatgaccaggagagaagtgcagattctgtcgcccgcaccactgtgagccctccaaggtcagaagacgacgacatgagcgatgtgaaatccacaagcttaagctctcggagctacctgaagagtgcgagcataagtgcttccaagtgtgtcgttgccacgaagaaacacccggaggacgatggaatcgctgaggaaatggaaggcgccgtcaatggattgtctgaaaaggtctccaggatgcactcgtaagcaggactgcccctggcaacagcaaccttgttgcaaggtttctgtctctggtacactgtattccgacgacagccttggaaaggcaaacactgtatgtcacacagcagtacagcacactgtgctgcgaggttgggttttgcttgcgtacatccatccacagctagttcgactttacctgggtggaagaggaacacaccaccgcctgatggccctttcttcatcgtctgcatttccaccgtgtcatgccagcgctgcgtggcacctctagaaggtagaagccctgcatggattcatgaagaattcctaagatgtagcactagtcagtgcatggaggaaacatagtcggcctgtcgaccatgagatgttttcttgcaaatggagtctggacctatggttttcagttttattacaacggcttctgccgtaggaagtgtcagcagtgtatcatccctgtaatacccaatttataagagaccatataaaaggagaaaaatcatttgctttatgtatgtgtataacatatccacttatcatcacatgtgaatgccatatttaaagataaataactaataaaaagttataccact

SEQ ID NO: 61482 - DNA, 857 bp, Zea Mays
gcagccgtaggtgtggatgcatgcatcatgcatgtgtgtgggagttccaggaatggctgcctgcctgcccatgcacgcccacgacgcagagcgtggctgcccatgcactgcaccacggcgatctcgatccagtcccagctcatccccatccctgcccgtctccccggccggccactcgaccagaagcaccggagcgagcggagaccgatcggaggccgacggctatgggcaagcaagcgatggcgctggcgctgctgtgcgccgtcctgctggcggcgacggcggacgacgcggcggcggcggcgtcgtcgtgcaacccgtcggcgctgagcgcgtgcgcgcccgcgttgttcggcagggcggtcacgctggggtgctgcgcgtcgctgcgcgcgcagcagccgtgcctctgccagtacaagcgcgaccccgcgaaccgcgcctacgtcaacggccccgccgcgcagcgcttcacccgcgcctgcggcctcacccagatgaagtgctgatggaccgagagcctgcatgcgctccgccggccgctggagatgttgtagtatgcgcggctacgtgtatgtactactactacgagtccacggcgggtccatggacatacatacgtgccgtctaaataaaaacgcggtcgcggcgagctcgtacgtcgtgctccggcaaatcgtggtcatctacgatacctcgttcagcaggagtaaggctgtgcatggcgccggtggattcggctgttcccgtgaatcgtgatgctcttcagctgtttcgtacgaataaaatcatgttgccgaactgtgtccgtgtctctaatttcaacaaataaaatttcaaatttaatttatattaat

SEQ ID NO: 61483 - DNA, 318 bp, Zea Mays
taccgtttggcagcatcctccattcttctcctccaccgtagaggcctggtggctgcagcctgcaaccttgggcgaagagtgctctcgtaggggaggggcggagcggcgcttaggcagagatgcgcgcggcggggggaggcgtgtctgactccggcgagggaggcgctcttgaggggaggtgctcgggtagaggcgaggggaggtgctcgggcattggtttgcgggccgcgggccgcggcccaccggacagagacgcacggtggctgccatgcgccggtcgctcggacaacagccggccgccggcagattgatttggta

SEQ ID NO: 61484 - DNA, 207 bp, Zea Mays
cggagacagaggtgatacttggggaattccccgctggcacgtgcaacttgcagggtgaggtcaccaactcaccatgcaaatttgtgggattgtcaagttggtgcagagggaagggtccaagcagcaggcatctctccaatttccatcagactgcagtgagctacccattgcagagaaaccgtggagactgtcttgtgaagcggagtc

SEQ ID NO: 61485 - DNA, 300 bp, Zea Mays
cccgaaagcagcatgttccttgacgcggagtcggtacggtaccagcaggcagcagcaaggccccggagcaaagcaaaaccgcaaggagcagcgacaattaaatccgcgcgaagcgacaattaaagctggtaggtaggcgagggagcccgcgcggggtagactgggaatggatgcagcggcaaaggcgacggagtagaagtagaggcgagagtagcgagaccggccttgtggagtacttcctcgctagccatggcggacgcgcccgccgccttcctcttcgcccctctctcgctgccctag

SEQ ID NO: 61486 - DNA, 768 bp, Zea Mays
cctacttggccgccatcttcaatcgtcttccacagtgatggcggtgcactgcccgtggctgcagctcaatatccggaggcgctcgattctccttgcccttgtgcacattcgcttcaagctcttcgccttatctccagcagcagcagcagttccagggttctctcaattagcagggtcttatgaacgcccccctccaatgctatgttgtcaggtcactaccaagcttgtctactaaaccagcatcaagttcatcttgcgagctttggcgtttggggttctgttactgttactgttaggttcaggtgaagccttctttttttcctctacccttcatgatggatcatggatgcacaatggcattcattttattttccaattaatcagtatagctctatgtgcaataagataaggtagcttcgagggaaagtgggcacaaaataaggctcaactccattattggttatccaagctaagtgtcaggggtttccttaaaatcttgatcatctgtcaataaaaaactatgaccataaagcaacttggtaatatgtatgcttcctcgtaaagcaacttggcttccactgtaaagagaacaaaattcgtacaccgttttgtaattagcatggttgcttacggatgttttcacttggattcagatatcagtgatgctatttctagatgattatatattgttccttatatatgaatctatttcccgactttgtaagattgaccaagagacattgtaactgcattactcacatctttttc

SEQ ID NO: 61487 - DNA, 1068 bp, Zea Mays
gaattatttttcactttgatcaagtcaataacaaatggtgctgatatttatgtcaccaactaagcttagtatgaaaatacatctcatgatcaatctgatgggaaggaatcttgcatcatcgcctgctaatataatctactccacttggactgtgcttgttgcaagcttcagagcaaggacgcatcggtcgaggcattactagctcagcgggcggcggcaatggaggagtaccagcaggtgcatcagcagcagcagcagcagggtggccgtgggagcaacaagatccgggacatcgtgcggctgcagcagctgctgaagaagtggaagaagctggccacggtgacgccctcggcggcctccagcggcgggaggagcagcgtgccgaggggctccttcgcggtgtacgtcggcgaggagatgcggcgcttcgtcatccccaccgagtacctgggccactgggcgttcgcggacctgctccgcgaggccgaggaggagttcgggttccggcacgagggcgcgctccggatcccctgcgacgtcgactccttccagggcatcctccgcctcgtgcagcaggggcagggcggcaggaggaatgagcccgccgccatgtgcgactgcgactgctcctgctcctccgagaccgagatcctctgcagatgagatgacgactcgacgacggccgccacgaatcgaggcctcgctctcgtcgtctcgtctcagtgccctgctctgcatttctttctttgtttttttttccctctctcctttctcgggttggttctttctttcttcgcggtttttttctgaagaaaggaggagaggttgcattgctctgcagtctgcaccgataagatctgtaatctgtacaacaactatgggaggagataaagatctctttttttttggtctcctggtcagaacaaggatctaatgtaagacaaaccaaacaaagctttgatcttgcaacttgtgatggcttctgtcgcatgcaattcttgtatctgtatttttttagcttacccgtactatcttttgttacatctcttatttcaaatttcatccctg

SEQ ID NO: 61488 - DNA, 1184 bp, Zea Mays
ttaaaaatgcaactacacaatttgcgtgagagaattatttttcactttgatcaagtcaataacaaatggtgctgatatttatgtcaccaactaagcttagtatgaaaatacatctcatgatcaatctgatgggaaggaatcttgcatcatcgcctgctaatataatctactccacttggactgtgcttgttgcaagcttcagaagcaaatggataagactagttaagcagcactcctctcctcctctagcgttggcgcggatctcgtcggtgatgaacatacgacagagcaaggacgcatcggtcgaggcattactagctcagcgggcggcggcaatggaggagtaccagcaggtgcatcagcagcagcagcagcagggtggccgtgggagcaacaagatccgggacatcgtgcggctgcagcagctgctgaagaagtggaagaagctggccacggtgacgccctcggcggcctccagcggcgggaggagcagcgtgccgaggggctccttcgcggtgtacgtcggcgaggagatgcggcgcttcgtcatccccaccgagtacctgggccactgggcgttcgcggacctgctccgcgaggccgaggaggagttcgggttccggcacgagggcgcgctccggatcccctgcgacgtcgactccttccagggcatcctccgcctcgtgcagcaggggcagggcggcaggaggaatgagcccgccgccatgtgcgactgcgactgctcctgctcctccgagaccgagatcctctgcagatgagatgacgactcgacgacggccgccacgaatcgaggcctcgctctcgtcgtctcgtctcagtgccctgctctgcatttctttctttgtttttttttccctctctcctttctcgggttggttctttctttcttcgcggtttttttctgaagaaaggaggagaggttgcattgctctgcagtctgcaccgataagatctgtaatctgtacaacaactatgggaggagataaagatctctttttttttggtctcctggtcagaacaaggatctaatgtaagacaaaccaaacaaagctttgatcttgcaacttgtgatggcttctgtcgcatgcaattcttgtatctgtatttttttagcttacccgtactatcttttgttacatctcttatttcaaatttcatccctg

SEQ ID NO: 61489 - DNA, 411 bp, Zea Mays
ggcgtgaagggcgactgttaccagggaaggaatcttgcatcatcgcctgctaatataatctactccacttggactgtgcttgttgcaagcttcaggttcagctccactccagtgaggtcactcgaccagctgtaatgggtgccgtagcaagcagcaagttcatatgcagagttgttctagtcgccaatacacaagtgcagcgaagggtaaacaatatcaagacacagagttagacgattcctagtcttcatgtcaaaatgcacatctctaacagggcttggtagtagctttacttcagcagttcagctcacgctagtggtaaaggtttcgagaatattagtacccttccgtcttaaaatagaagtagttttagctcttggtttatatatacaagtgtttgatgaatatttt

SEQ ID NO: 61490 - DNA, 5604 bp, Zea Mays
gtttactgtatcgtgcaactcatcgcgcgatcgtcgctttggctcggccaggacgcaacctgcgacaaattttacaaccgccttccacatcctctcttttctacaaatactactctagccatcgcaaaacctcctgacttcccccagatccagatcgtttccccagatccagatcgcaggcgtgaagggcgactgttaccagggaaggaatcttgcatcatcgcctgctaatataatctactccacttggactgtgcttgttgcaagcttcaggtgagttgttcacatagactgaactggaagaatatatatcgagagaaaacagatatctagtacatatacgtacgtatgcgaatacaataatcttgcattagttgttgtttggccacttcatcaacccattcattttccctctgttattcaacgcactgctttagcttcttttttcgacattttttaaaaaatgaaccgtacgtaccataccaggatcagaactagtgtaaagcttgatgccgatcgatatcatcgccatgcacgtgaagtggagcctccccacgccccacatcaagagcagctgagtactcccggttccatcccctagttttcagtcctgccatccgtgtgttaatatgcacacggactgaaacacaggagagatcgagagattcttgaaccagatgagaaagctggtaaaagatgcagtcagagagcaaaagtacatgaatatacatacacccatctgcatgtggatgcatcctgctgccaaaagtttgggggcgctcaagattctgtttgcgtttgtgcagtgcaggccacctggtgaactaggaatcccctggtcgatcgagatcgagctgctgcaatgcaagcctgttgttggctttcgcgttggctcccacccggccgttgtttaattttactcatcctgcctcgtcggcagtttgtttttggcgcctgctgcactcgccttagtacagtaggatacacgtaaggcaaaacggctcggagagcggtcgaggtgtctcagaaaaatgagaactgccgctcacagtttggagaagaacagctcgaactcaacaacaaaatgacaacatttataatgcgtagaagtgggatacattttcagcttcgtcgagctggaagaatccggtgcagaattcacgagggcctgtttggttaactcgtccgaattgaagaactaaccttagatcaactccagtagatgaccaaaagaagctctaagccaatatttttgagggttacatggaaaatcattccttcagcagctccccaaaatattttggaaaagtagcacagcccgaaaatatcccttgacgaccctcatttgtgcgggaggtgggaaggccccaatcttttttcccgcgcacacagcttctcccgggctgctattttggtgtgtgacttcttttttctcgcgcacaaatctagcttctcccgggctgctattttggtctgtgactttcctggcttcttgctcctctgccatcctactttctatctgtcatctctacctcttgacgctgtcagttgctgcttgtcctccctgcgtgcagaagcaaatggataagactagttaagcagcactcctctcctcctctagcgttggcgcggatctcgtcggtgatgaacatacgacagcaggatactataccagcctcctaagtgaaggcacaaatccacaagactatgacgatttagttgacttgtatcctgaggaacaaccacaaagggtcgaagtaaacacttatgcaccctctgctagaccgaaccataagaggtcaaagaatttcagtgacgtggaagacgagcttttggtgtctgcatggcttaacataagtttggatccaattattggttataatcaaactcgcagttcatattggactagaatttatgactactttcatgccaataagaccttctcctcaacccgtagccagaactctattatgcaccgttggaccagcatacaagaaggtgtaaacaggtttactggatgccttgctcaggttgagagaagaaggcaaagtggtgctacaatgcaagacaagcttacacaggcgtgtgctttatataagtctgaagataagcaacataaagcttttccatatatgcattgttggaataagttgcggacacagcgtaaatgggagatgaaacttgaagaattggctgttggcaagtcatctaataagaagcaaaagatgaactcaaatgaaacctcacctccacatttaccaagtgccaccgaaacaagcgagcctacaactccaaatgagactgtcacaacaagaccacctggaaagaagaaggccaaagcagcagcatttcaagctgaaaagaaaggctacacagaaactttaaacaaattatttgaaaagaagaaagaaacagatgaatttaaagaaatgaaaaaagacgagaggtttagattagcattagcagttgaacaagagagggctgcgaatgagaaattaaatatgcagttaaggagtaaagagctagaattgaggcagcaagaagttgaacaacataagaagagggaagaagagaggattatgacactagaccttagtgtcatgcctgctgatcagaagcaatattacatgagactacgatctaagatattgtctgaaaatgcctaatgttacatggtacattaggtgttgattagtctttagctaaactgtttgctttttatcactatagatttaggtttctttcttttggtgctatgtaattggataatacacaactagctttgcttattttttagctaaaatgtttgctgtttttatcactgcgattttaggtttctttcttttggcaatatgtaattggatactgcacaactagcttgtcatatataattcaaacatcaggtgtttgtttacatttagaaatactagtcgttcacattttcttatgggaaatcatctcaatactggacaacaaaaacaggtcagtgtactattatctgtaaaacaacgtcttgctctgtggaaagcaggccagtgtacagatgaattcaaacatcaggtgttttttatcacagctattgttcaatgtcttgctctgcagaaagcatgacttgaattctagacgtcttgctacagaaatgtcgcccacacattttttttattttctattcctttgtatttctcacaggagtaagagtttcctttgtagtacagtagctgaaacaaatcgtatggatctcatgaagtacagtagctttaggagagctagctgtagtacaatagctgaaacagatcatgcagatatcttgaatcaagtaggcatttggttttttcattgttttcaaataaaaataataatgctaaatacaactaagtctatccctcaattctgatctccatagtgtttccataggtgctcaacaaggtcatcctgaagttgtgtgtgcgttgatcgatctttaattgtctggtaatttgcaataaactcatccagatcaggtgtggattcatgggaaattttaacattttcacccatagtgtcataattgaagtcatcgtgttcatctcgctcatcctcaactatcatgttgtgcataattatacaagatgtcatgattttattaagtgtctcttcatcccaaaaacgagctagcccacgaactatagcaaaacgagattgtagcacaccaaatgcacgttccacatccttcctacaggcttcttggacttcagcaaaatattttttcttcataccttgtggctctggtatggtcttcacaaacgtcgcccatgaaggatatataccatctgcaagataataacccattgtgtactcatgaccattgataatataattcacctttggagcttgcccttctgctagccttgcaaaaatcgaagatcgttgcaatacgttgatgtcattatgcgacccaggcattccaaagaaagcatgtcaaatccaaagatctttagaagccactgcttctagtataattgtgggttcatgcacatgtccactatactccctccggtgcagtaaaagaagtcatcctgcgcgtgaccgagcgtgcacaaaaagaagtcatagcgcgcgtgggtctgggatttggacgttgttgcccctagtaattgcacaaaaaaagatgcatttaagaggaatcgaacttgagacctccagtctagaatgccttgaagctgctgcagcaaccaatcaagcctgattgttttagtgacgttaatgcacccatatccctatttaataggggcaaacagggaaaactctatgataattaatcactccttggtatgcacaatcatgtcctaaacgactacctttactgcactggagggagtacataccttgcaatgcagacgggcaatttttccacctccggtgcatgcagtctatggacccaagcatacctggaaaacctctactctcattaactgcaagtaatctagcagtgtcatattcgtcgggctctctcaagtactcatctccaaaaacttgaacaatagctgtgacaaaccttcgtagactctcaatagcagtactctcaccaatacgaatgtaatcatctgtagcatcagctgccattccataagttagcatccgtaaagcagcagtaaccttctgcaaactagataacccaagctttccggctgcgtttcttttttgaacaaaatattcatcatgatgttcgacagcattgagaatgcgtataaaaagtgtacgccgcattcgaaacctatatatatatattaatcaaactcaaatcaaattattacaactcaagataaccaacgtggaataattgattccttaccgtcgcctaaaataacttgggccataggtttgataatctgcaagataatcttgatatagcctcacgtgtccttcctctctattacgtcgaaccgtttgacggccatgaacagaaccgcggcgtctcgattcttcatcaaactgatcttcatcaatgatcaaatgcgcggcattgaaaaagaattcttcttcgtcatctgaggatgatgaatccaacacctgcttaacaagtctgctttgtccactcatcaattattctttttctaattgccctacttttttctgtcggcggcgcacacaacaaataatgaatctgccctagtttttctagcggtggtggtcgtttctccgatcacgtggacaaagtagcactaatttgggccatggcgtagatcagctaatttgacgcctttttcctggtggcgtagcatcaactcatttgggccatagccttgacgtggcatattttaaatattgggctattagtttattagggagctgctgtgcgcgtacatacttttagcctatgaaaaaattatagtatccctcaaaactggtttttcgggccgacttttttcacaatctactggagttgctcttatgctaagaaaaagttagacaaaatatgttaagttagacagcaaaccaaaacaaactgagtgacgaggactcgagtggcggcgttgccgaaaatcaagggaggaaaactgaacatccgttcacattttcccccacaccagctacataggagaggagaagagaggagaggaggcc

SEQ ID NO: 61491 - DNA, 162 bp, Zea Mays
atggtgctgatatttatgtcaccaactaagcttagtatgaaaatacatctcatgatcaatctgatgggaaggaatcttgcatcatcgcctgctaatataatctactccacttggactgtgcttgttgcaagcttcaggatcagaactagtgtaaagcttgat

SEQ ID NO: 61492 - DNA, 1652 bp, Zea Mays
cccagatccagatcgtttccccagatccagatcgcaggcgtgaagggcgactgttaccagattatgatccgttttcgagcttcgaggaatcgacggtcaagcttcggtgaccaagtgacctggttcttcgagttctgcaaggttgaagaccctgagcatctatttggtgaaggcaagtgtcctctgacccattatgtcctattcacttataattcactatcccgcattacttaattgaaacctaaggatttactagctttctattcaccttgtccttgatttaccttttgggttactatggttagctacatgctagcgctttactttaatcaatgaacattatgagatacaatgatgatactatgattttattctggatatgatgatgtacttgtggcatttaggggactcgagcagtttctcgagtacctctccataaggacctgttcgttgagagaccacccgggataacagtgcaaccatgagggtggaatggggtgcccttagctaattaattagaggaactagaagtgtagttgcttcgccgtcgtgcccgtcaatggggtccaggcacagtgcttgctctaccgaggctgagtgccgaggttctttcgttttgctttttagtcaccttcctgcggggagaggtactgtgtttatcaaactggagaaacctaacgggcagctatgacctctagggaatctttgtaaaggcttcgtagtgaatccctggccattcaccttgggagtgaataagggtcttgcaagcccgggctagagagggaatcacggctcatgggtaaagtgtgcgacctctgcagagggtagtgaaactagtatatcagccgtgctcacggttaagagcagccttgggatcctctttgattagagatactccggatacacttcagatggtgactttaattatgttttctagtatttcttctctgaggaagtactttttgggattataacttgggttttatgataaaacctggctcctactaataataaatacctgaccaactaaaagcaactgcttgagcctagccccacataaagctagtccacttcagccaaacgggacatttgctgagtacgttgatgtgtactcatccttgctttaccaccaaacaccaggttgtccacattgcaaccactgctcaggagaagacgaagtcgtggaaggagacttccaggagtttcaagactacgacgaattctaggtgtgggttggcggcaacccccagtcagctgcctgtgaaggccttatctttactgtgtttcgctagcactttgatttaactgttaagttgatgactatgtggatgtctatgactctgtgatgtaataagttaataccctttcatgtttttattcgagcactgtgcgatgatgttcatttatgtaatcgctgtgtacgtgaattctgatcctggcacgtacatagttcgcattcggtttgccttccaaaaccgggtgtgacaaccttcctccagaaacccatctggattccccacgggtccagctttctgataggttcatccaggaatgaccacagccaaaggcggggcctccttcgtcaaatgcagatgggaacccagggtcgggacctaatcctacaaaggtaccagaccaaattagggctccgt

SEQ ID NO: 61493 - DNA, 914 bp, Zea Mays
gtgtattgcaggcagctgactggcaatcaagtttttctaatccaccaaggaagatcatagtactgatatcacgccttctcagtgatgcacatcggtatattttgcgatgcctgagcaaccatggaaccgtctcacattgtactgtactaacagctatttcagagattggacactcagcatatgttgattctccactcgggccagatgcgtttcgggaatatgaaaccttacttattcaggaccatgatgagcttcttaagaagtctgagaatttagacagacataaagaaagcattcataaagaggcgagtgattttacctctaacgttgataattattctaagtggggttctggggtgcattatggctctaattctgaatccagcccaacgaaaagggattttttgatgacgaaatgggccagggtttttgttttgccctctgaaggcataattgctgactcaagcctgtcgaatcatcatgaggattcccttggctctggtttaccctccatatctactagtaaaccttttgatagtgacgaggtaccaccaggagtgacattgactacccagtttctgtaccatttggccaataagatggacctaaagcttgatatattttcacttggtgatacatcaaagccagcaaatggtgaagcagcaagccccaagaagcagagcccatctggctcacgctctcctgattctcttgagctatctgcactacaggaacgtaaagcattttcagcgggaaattggtttgcagaagataagccggagggaagcagtgcagaagataatcacccgagttgttgcagtgctgagcgccaacgaagaaaagtaaacaagcgacgcaaaaaaaggatctgtggatgtccagctgcgtcgggaggtggctacatcaacaaatga

SEQ ID NO: 61494 - DNA, 943 bp, Zea Mays
ctcaataaaatatgtactcggaatcggaagaacctaccttacttttccatccgcggaacgacgcacgcggacgcctccttgttccgggtcctactcccgccgccttcgcctaaagaggcctcgccctcccccctccggcgaaaaccgattcccttccccgattccctccggcgtttcctggtcccttagtgcaagcaaggacaccgctcctctagcgagctctgttctgaagcggcaagaaagatgattaatcttttcaaaataaagggtcaaaagaaagaagaggcagcaagtgctgctggaaaggcccctgttaagaaacagtctgctggggagctccgtcttcataaagatattagtgagctcaacctgccgaagaccacatcaatttcttttcccaatggcaaggatgatctgatgaattttgagaccaccatccgacctgatgaaggatattacatgggcggcactttcgttttcacctttcaagtgtccccatcttatcctcatgatcctccgaaggtcaaatgcaagaccaaggtgtaccatccaaatattgatctggaaggcaatgtctgtctgaacattctgcgcgaagattggaagcctgttctcaacatcaacactgttatttatggcctgaatcttctttttacgcaaccaaacgacgaggatcctctgaaccacgaagctgcagttgtccttcgcgacaatccaaagatgtttgaggcaaatgtgagaagagccatggctggaggctacgtcggccaacactatttccaaagatgtgcttgacttgatgtggtggtggcttgaaaacgatcaacagagcccctccccctgtatcagcaccagcgcgcccagctttgtgtgcggaaagtgcttctggaagcaaaatccaaaccgttcatggtgatttgcgtgtcatttcattagaaagaag

SEQ ID NO: 61495 - DNA, 1059 bp, Zea Mays
ctcaataaaatatgtactcggaatcggaagaacctaccttacttttccatccgcggaacgacgcacgcggacgcctccttgttccgggtcctactcccgccgccttcgcctaaagaggcctcgccctcccccctccggcgaaaaccgattcccttccccgattccctccggcgtttcctgaaagatgattaatcttttcaaaataaagggtcaaaagaaagaagaggcagcaagtgctgctggaaaggcccctgttaagaaacagtctgctggggagctccgtcttcataaagatattagtgagctcaacctgccgaagaccacatcaatttcttttcccaatggcaaggatgatctgatgaattttgagaccaccatccgacctgatgaaggatattacatgggcggcactttcgttttcacctttcaagtgtccccatcttatcctcatgatcctccgaaggtcaaatgcaagaccaaggtgtaccatccaaatattgatctggaaggcaatgtctgtctgaacattctgcgcgaagattggaagcctgttctcaacatcaacactgttatttatggcctgaatcttctttttacgcaaccaaacgacgaggatcctctgaaccacgaagctgcagttgtccttcgcgacaatccaaagatgtttgaggcaaatgtgagaagagccatggctggaggctacgtcggccaacactatttccaaagatgtgcttgacttgatgtggtggtggcttgaaaacgatcaacagagcccctccccctgtatcagcaccagcgcgcccagctttgtgtgcggaaagtgcttctggaagcaaaatccaaaccgttcatggtgtgacatctgtttgcccgcctttgtgatgtgtggtatagtggtggtgcataatgacagggaaatgcttctctaactgtatcattcattccataaatcctaaacgaggaatgggaagtggattgttaagcagattccttctgcagatgttgatgtcgtattcggcgtgtattcattgtcgcatcttccaggtcgacgttgacatg

SEQ ID NO: 61496 - DNA, 1566 bp, Zea Mays
ctcaataaaatatgtactcggaatcggaagaacctaccttacttttccatccgcggaacgacgcacgcggacgcctccttgttccgggtcctactcccgccgccttcgcctaaagaggcctcgccctcccccctccggcgaaaaccgattcccttccccgattccctccggcgtttcctgggtccctctccatcctcaccgctttcttcctctgcaggtcccttagtgcaagcaaggacaccgctcctctagcgagctctgttctgaagcggcaaggtttggccttacctgtttgcctcaagcttgccggcttggctgcctgggcaagcaaatccttgccaatttaggcgagccaaattttctctcctgcatggacaaggtttgctcacgcgctcgcatggccagctgagccgtcactaaattggccactccatgctgttgctggatcgggatttgttattgctgaattgatggccatcactggactcagatagtcaggtttgccagcacggcagcaccaaatcgacctctgctaccatcagattgatgttcctaggcactgaattgaccctcatcactgttgaatcgagctctgttattgttggatcaagctacagtttgaggcaaggcgagcgatggcaagggaagaaaacacctttggaagattaccttcctttgcctagcaagaaagatgattaatcttttcaaaataaagggtcaaaagaaagaagaggcagcaagtgctgctggaaaggcccctgttaagaaacagtctgctggggagctccgtcttcataaagatattagtgagctcaacctgccgaagaccacatcaatttcttttcccaatggcaaggatgatctgatgaattttgagaccaccatccgacctgatgaaggatattacatgggcggcactttcgttttcacctttcaagtgtccccatcttatcctcatgatcctccgaaggtcaaatgcaagaccaaggtgtaccatccaaatattgatctggaaggcaatgtctgtctgaacattctgcgcgaagattggaagcctgttctcaacatcaacactgttatttatggcctgaatcttctttttacgcaaccaaacgacgaggatcctctgaaccacgaagctgcagttgtccttcgcgacaatccaaagatgtttgaggcaaatgtgagaagagccatggctggaggctacgtcggccaacactatttccaaagatgtgcttgacttgatgtggtggtggcttgaaaacgatcaacagagcccctccccctgtatcagcaccagcgcgcccagctttgtgtgcggaaagtgcttctggaagcaaaatccaaaccgttcatggtgtgacatctgtttgcccgcctttgtgatgtgtggtatagtggtggtgcataatgacagggaaatgcttctctaactgtatcattcattccataaatcctaaacgaggaatgggaagtggattgttaagcagattccttctgcagatgttgatgtcgtattcggcgtgtattcattgtcgcatcttccaggtcgacgttgacatg

SEQ ID NO: 61497 - DNA, 3003 bp, Zea Mays
aagctttcgactgactgcagttctgcggtgctgacatcggtgaaagatgaggaggatcaggcttgcctgtttgcttgttatctttgtgcaagtgcaatgggcggcccttggaacgcatgatgtgtacatcgtgaccatggaaggggatccggtcgttagctacagaggcggtgtccaaggatttccagcaaccgctgtggattcggacgaggaaattgatctaaccagcgaggctgtcaaatcgtatgccctccacctccgaggacaccatgacaagctgctagactcgcttttagtagaaggaacttacgagaagctttatagctaccatcatctcatcaatggcttcgcagttcacatgtcgccactgcaggctgagttcttgaagaaagccccaggagttaagcatgttgagagagacatgaaggtacagaaattgactacacacacacctcagtttcttggattgccaactggggtatggtcaacaggaggtgggcttgatagagctggtgaagatgttgtgatcggtttcgtggattctggaatttaccctgaacatccgagcttcgctgcgcacaagactgatccatatggacctgcccctcgttataaagggaaatgtgagatggatccagtaacacaaagaagtttctgtaatgggaagatagttggggctcagcattttgcaaaagctgcaatggctgctgtcacacagctgcaattgctgctggaaacaatggggtcccagtgcgaatgcatggtcacgaatttggcaaggcaagtggtatggccccacgtgctagggtagctgtctacaaggttctttacaggctttttggtggttacatagctgatgttgtggcagctattgatcaggctgttcaggatggtgttgacattctcaacctttctgttgggcccaatagcccaccaacagctacacggactacttttttgaatccttttgacgctgcacttctttctgctgtgaaagctggggtatttgttgcccaagctgcaggaaatggtggaccatttccaaaaacactggtgtctttcagcccatggataactactgttgctgctggagttgatgaccgcagatacaagaatcatttaacactaggaaatggaaaacttctctctgggcttggagtatcacctgcaacacatgggaatatgtcgttcagcttgatttctgcagctgatgctctattgggttcatctgcaaccaagtacagtgcattagattgccagaggcctgaactattgaataagaggaaagttcaggggagaattcttttgtgtggctattcgttcaattacatttctgggacagcttcaataaagaaagtgtctcagacggccaggaatcttggagcagctggctttgttgttgctgtggagaataattacccaggaacaaaatttgaccctgtaccattcagcatccctggaattctcatcacagatgtcagcaaaacggaggatcttatagactactacaattcttccaccataagagattgggctggaagggctacagccttcaaagcaacagcaggtattgcagatggtttggcaccaacactatacaattctgccccccaggttgcactgttctcttctcgaggacccgatgttaaagattttagctttcaagatgctgatgtccttaaaccagacatacttgctcctggcaatctcatatgggctgcatgggcgcctaatggaacggatgaatcaaactatgctggtgaaggatttgcaatggtttctggaactagcatggccgcaccgcatatcgctggcattgcggcactgataaagcagaagaacccaaagtggagcccctcagcaataaaatctgccatgatgacaacggccaatacactggacaaagggagccgtcctctcagagcgcagcagtacactgcatcggaaatgatgacactttctcgggccacaccgtttgattgtggtagtggcgctgttaacccaaaagctgcccttgatcctggtcttgttctagatgcaacccacgaagagtacatcgcatttttgtgctcgatccctgacgtcaaccagagcgaagtgtcaaacatcgccggttcagcttgcaactccagctccaaggggcgtcaacgccccttcgacctcaacctcccctcgatcgccatctctcagcttcgaggcaccgtgacggtgacgcggaccgtcacaagcgtgtccgaggagaccgagacctacaccatcatgacgagaatgccgccggaggttgccctggaggtgacgcctccggcggtgacggtgctgcccggagcatcgagagagctagctgtgaccctgacggcgaggtccgtgaccggcacctacagtttcggagagatcgccatgaaaggcgaccgcggccacctcgtcagaatcccagtggtagctatgggattcaagtagatagaagacgaccgcgaccggcgctagagagagtaagtacgaggagcgagttgtgcctctgagatccgaggtcttgagctgcagaggaatgctgtaatttttccatagtttgtagagaataagagttagggtctgtttggttgggctgtggctgtgaaaaaagttgctgtgggctgtgagctgtggaaaaagctgctgtaggctgcaagctgttaaaaagctaaaaactgtttggtggaaaccactaaaagtcgttaaaaattcttcgatatatgttttcacagtttcatctaaaaagccactaaaagcaggtccaggggtgctttcagatttgcactgcgagaaagtcggcttttagaaaaagctgcttcctggatctagccttttggttgacttttggcttttaggggggcaaaagccaaagccaaaagtcaaaccaaacacacccttagaatgccctcctggttgtaaaaatatgtatttgggtgtttaaatttaagcctatgttcagccttgctcttaaggcaaagtatcatgtgcacatca

SEQ ID NO: 61498 - DNA, 3069 bp, Zea Mays
atatgcagtgcatccaaggcgcaggcggttctgcggtgctgacatcggtgaaagatgaggaggatcaggcttgcctgtttgcttgttatctttgtgcaagtgcaatgggcggcccttggaacgcatgatgtgtacatcgtgaccatggaaggggatccggtcgttagctacagaggcggtgtccaaggatttccagcaaccgctgtggattcggacgaggaaattgatctaaccagcgaggctgtcaaatcgtatgccctccacctccgaggacaccatgacaagctgctagactcgcttttagtagaaggaacttacgagaagctttatagctaccatcatctcatcaatggcttcgcagttcacatgtcgccactgcaggctgagttcttgaagaaagccccaggagttaagcatgttgagagagacatgaaggtacagaaattgactacacacacacctcagtttcttggattgccaactggggtatggtcaacaggaggtgggcttgatagagctggtgaagatgttgtgatcggtttcgtggattctggaatttaccctgaacatccgagcttcgctgcgcacaagactgatccatatggacctgcccctcgttataaagggaaatgtgagatggatccagtaacacaaagaagtttctgtaatgggaagatagttggggctcagcattttgcaaaagctgcaatggctgctggcgcgtttaatcccgatgttgaatttgcatctccattagatggtgatggtcatggaagtcacacagctgcaattgctgctggaaacaatggggtcccagtgcgaatgcatggtcacgaatttggcaaggcaagtggtatggccccacgtgctagggtagctgtctacaaggttctttacaggctttttggtggttacatagctgatgttgtggcagctattgatcaggctgttcaggatggtgttgacattctcaacctttctgttgggcccaatagcccaccaacagctacacggactacttttttgaatccttttgacgctgcacttctttctgctgtgaaagctggggtatttgttgcccaagctgcaggaaatggtggaccatttccaaaaacactggtgtctttcagcccatggataactactgttgctgctggagttgatgaccgcagatacaagaatcatttaacactaggaaatggaaaacttctctctgggcttggagtatcacctgcaacacatgggaatatgtcgttcagcttgatttctgcagctgatgctctattgggttcatctgcaaccaagtacagtgcattagattgccagaggcctgaactattgaataagaggaaagttcaggggagaattcttttgtgtggctattcgttcaattacatttctgggacagcttcaataaagaaagtgtctcagacggccaggaatcttggagcagctggctttgttgttgctgtggagaataattacccaggaacaaaatttgaccctgtaccattcagcatccctggaattctcatcacagatgtcagcaaaacggaggatcttatagactactacaattcttccaccataagagattgggctggaagggctacagccttcaaagcaacagcaggtattgcagatggtttggcaccaacactatacaattctgccccccaggttgcactgttctcttctcgaggacccgatgttaaagattttagctttcaagatgctgatgtccttaaaccagacatacttgctcctggcaatctcatatgggctgcatgggcgcctaatggaacggatgaatcaaactatgctggtgaaggatttgcaatggtttctggaactagcatggccgcaccgcatatcgctggcattgcggcactgataaagcagaagaacccaaagtggagcccctcagcaataaaatctgccatgatgacaacggccaatacactggacaaagggagccgtcctctcagagcgcagcagtacactgcatcggaaatgatgacactttctcgggccacaccgtttgattgtggtagtggcgctgttaacccaaaagctgcccttgatcctggtcttgttctagatgcaacccacgaagagtacatcgcatttttgtgctcgatccctgacgtcaaccagagcgaagtgtcaaacatcgccggttcagcttgcaactccagctccaaggggcgtcaacgccccttcgacctcaacctcccctcgatcgccatctctcagcttcgaggcaccgtgacggtgacgcggaccgtcacaagcgtgtccgaggagaccgagacctacaccatcatgacgagaatgccgccggaggttgccctggaggtgacgcctccggcggtgacggtgctgcccggagcatcgagagagctagctgtgaccctgacggcgaggtccgtgaccggcacctacagtttcggagagatcgccatgaaaggcgaccgcggccacctcgtcagaatcccagtggtagctatgggattcaagtagatagaagacgaccgcgaccggcgctagagagagtaagtacgaggagcgagttgtgcctctgagatccgaggtcttgagctgcagaggaatgctgtaatttttccatagtttgtagagaataagagttagggtctgtttggttgggctgtggctgtgaaaaaagttgctgtgggctgtgagctgtggaaaaagctgctgtaggctgcaagctgttaaaaagctaaaaactgtttggtggaaaccactaaaagtcgttaaaaattcttcgatatatgttttcacagtttcatctaaaaagccactaaaagcaggtccaggggtgctttcagatttgcactgcgagaaagtcggcttttagaaaaagctgcttcctggatctagccttttggttgacttttggcttttaggggggcaaaagccaaagccaaaagtcaaaccaaacacacccttagaatgccctcctggttgtaaaaatatgtatttgggtgtttaaatttaagcctatgttcagccttgctcttaaggcaaagtatcatgtgcacatca

SEQ ID NO: 61499 - DNA, 3177 bp, Zea Mays
accattagccaagccagtaccatcgcaagcacgcacctttgcctcccttccgctccccgcctcccccctcactcactgcccactgccactccactccccgctccccaaaccctaccccaacggcccaaccccccggagcggagcggagcgattcgctggtcccgccagcgccgcgcccgggcatgccgccgccattgggtggcgcgaccgacgacgcccactgagccgtgcgccggggagccgccgctgttccttcctcggtgtccagtggattggagtggagatcccgccggaagcggaggcaggaaccgcccctgctgtcgcgagttctgcggtgctgacatcggtgaaagatgaggaggatcaggcttgcctgtttgcttgttatctttgtgcaagtgcaatgggcggcccttggaacgcatgatgtgtacatcgtgaccatggaaggggatccggtcgttagctacagaggcggtgtccaaggatttccagcaaccgctgtggattcggacgaggaaattgatctaaccagcgaggctgtcaaatcgtatgccctccacctccgaggacaccatgacaagctgctagactcgcttttagtagaaggaacttacgagaagctttatagctaccatcatctcatcaatggcttcgcagttcacatgtcgccactgcaggctgagttcttgaagaaagccccaggagttaagcatgttgagagagacatgaaggtacagaaattgactacacacacacctcagtttcttggattgccaactggggtatggtcaacaggaggtgggcttgatagagctggtgaagatgttgtgatcggtttcgtggattctggaatttaccctgaacatccgagcttcgctgcgcacaagactgatccatatggacctgcccctcgttataaagggaaatgtgagatggatccagtaacacaaagaagtttctgtaatgggaagatagttggggctcagcattttgcaaaagctgcaatggctgctggcgcgtttaatcccgatgttgaatttgcatctccattagatggtgatggtcatggaagtcacacagctgcaattgctgctggaaacaatggggtcccagtgcgaatgcatggtcacgaatttggcaaggcaagtggtatggccccacgtgctagctggggtatttgttgcccaagctgcaggaaatggtggaccatttccaaaaacactggtgtctttcagcccatggataactactgttgctgctggagttgatgaccgcagatacaagaatcatttaacactaggaaatggaaaacttctctctgggcttggagtatcacctgcaacacatgggaatatgtcgttcagcttgatttctgcagctgatgctctattgggttcatctgcaaccaagtacagtgcattagattgccagaggcctgaactattgaataagaggaaagttcaggggagaattcttttgtgtggctattcgttcaattacatttctgggacagcttcaataaagaaagtgtctcagacggccaggaatcttggagcagctggctttgttgttgctgtggagaataattacccaggaacaaaatttgaccctgtaccattcagcatccctggaattctcatcacagatgtcagcaaaacggaggatcttatagactactacaattcttccaccataagagattgggctggaagggctacagccttcaaagcaacagcaggtattgcagatggtttggcaccaacactatacaattctgccccccaggttgcactgttctcttctcgaggacccgatgttaaagattttagctttcaagatgctgatgtccttaaaccagacatacttgctcctggcaatctcatatgggctgcatgggcgcctaatggaacggatgaatcaaactatgctggtgaaggatttgcaatggtttctggaactagcatggccgcaccgcatatcgctggcattgcggcactgataaagcagaagaacccaaagtggagcccctcagcaataaaatctgccatgatgacaacggccaatacactggacaaagggagccgtcctctcagagcgcagcagtacactgcatcggaaatgatgacactttctcgggccacaccgtttgattgtggtagtggcgctgttaacccaaaagctgcccttgatcctggtcttgttctagatgcaacccacgaagagtacatcgcatttttgtgctcgatccctgacgtcaaccagagcgaagtgtcaaacatcgccggttcagcttgcaactccagctccaaggggcgtcaacgccccttcgacctcaacctcccctcgatcgccatctctcagcttcgaggcaccgtgacggtgacgcggaccgtcacaagcgtgtccgaggagaccgagacctacaccatcatgacgagaatgccgccggaggttgccctggaggtgacgcctccggcggtgacggtgctgcccggagcatcgagagagctagctgtgaccctgacggcgaggtccgtgaccggcacctacagtttcggagagatcgccatgaaaggcgaccgcggccacctcgtcagaatcccagtggtagctatgggattcaagtagatagaagacgaccgcgaccggcgctagagagagtaagtacgaggagcgagttgtgcctctgagatccgaggtcttgagctgcagaggaatgctgtaatttttccatagtttgtagagaataagagttagggtctgtttggttgggctgtggctgtgaaaaaagttgctgtgggctgtgagctgtggaaaaagctgctgtaggctgcaagctgttaaaaagctaaaaactgtttggtggaaaccactaaaagtcgttaaaaattcttcgatatatgttttcacagtttcatctaaaaagccactaaaagcaggtccaggggtgctttcagatttgcactgcgagaaagtcggcttttagaaaaagctgcttcctggatctagccttttggttgacttttggcttttaggggggcaaaagccaaagccaaaagtcaaaccaaacacacccttagaatgccctcctggttgtaaaaatatgtatttgggtgtttaaatttaagcctatgttcagccttgctcttaaggcaaagtatcatgtgcacatca

SEQ ID NO: 61500 - DNA, 3076 bp, Zea Mays
cttgcctctccctccattaaagacaagggaggcagccaaaaggcgacgcaccattagccaagccagtaccatcgcaagcacgcacctttgcctcccttccgctccccgcctcccccctcactcactgcccactgccactccactccccgctccccaaaccctaccccaacggcccaaccccccggagcggagcggagcgattcgctggtcccgccagcgccgcgcccgggcatgccgccgccattgggtggcgcgaccgacgacgcccactgagccgtgcgccggggagccgccgctgttccttcctcggtgtccagtggattggagtggagatcccgccggaagcggaggcaggaaccgcccctgctgtcgcgagttctgcggtgctgacatcggtgaaagatgaggaggatcaggcttgcctgtttgcttgttatctttgtgcaagtgcaatgggcggcccttggaacgcatgatgtgtacatcgtgaccatggaaggggatccggtcgttagctacagaggcggtgtccaaggatttccagcaaccgctgtggattcggacgaggaaattgatctaaccagcgaggctgtcaaatcgtatgccctccacctccgaggacaccatgacaagctgctagactcgcttttagtagaaggaacttacgagaagctttatagctaccatcatctcatcaatggcttcgcagttcacatgtcgccactgcaggctgagttcttgaagaaagccccaggagttaagcatgttgagagagacatgaagtcacacagctgcaattgctgctggaaacaatggggtcccagtgcgaatgcatggtcacgaatttggcaaggcaagtggtatggccccacgtgctagggtagctgtctacaaggttctttacaggctttttggtggttacatagctgatgttgtggcagctattgatcaggctgttcaggatggtgttgacattctcaacctttctgttgggcccaatagcccaccaacagctacacggactacttttttgaatccttttgacgctgcacttctttctgctgtgaaagctggggtatttgttgcccaagctgcaggaaatggtggaccatttccaaaaacactggtgtctttcagcccatggataactactgttgctgctggagttgatgaccgcagatacaagaatcatttaacactaggaaatggaaaacttctctctgggcttggagtatcacctgcaacacatgggaatatgtcgttcagcttgatttctgcagctgatgctctattgggttcatctgcaaccaagtacagtgcattagattgccagaggcctgaactattgaataagaggaaagttcaggggagaattcttttgtgtggctattcgttcaattacatttctgggacagcttcaataaagaaagtgtctcagacggccaggaatcttggagcagctggctttgttgttgctgtggagaataattacccaggaacaaaatttgaccctgtaccattcagcatccctggaattctcatcacagatgtcagcaaaacggaggatcttatagactactacaattcttccaccataagagattgggctggaagggctacagccttcaaagcaacagcaggtattgcagatggtttggcaccaacactatacaattctgccccccaggttgcactgttctcttctcgaggacccgatgttaaagattttagctttcaagatgctgatgtccttaaaccagacatacttgctcctggcaatctcatatgggctgcatgggcgcctaatggaacggatgaatcaaactatgctggtgaaggatttgcaatggtttctggaactagcatggccgcaccgcatatcgctggcattgcggcactgataaagcagaagaacccaaagtggagcccctcagcaataaaatctgccatgatgacaacggccaatacactggacaaagggagccgtcctctcagagcgcagcagtacactgcatcggaaatgatgacactttctcgggccacaccgtttgattgtggtagtggcgctgttaacccaaaagctgcccttgatcctggtcttgttctagatgcaacccacgaagagtacatcgcatttttgtgctcgatccctgacgtcaaccagagcgaagtgtcaaacatcgccggttcagcttgcaactccagctccaaggggcgtcaacgccccttcgacctcaacctcccctcgatcgccatctctcagcttcgaggcaccgtgacggtgacgcggaccgtcacaagcgtgtccgaggagaccgagacctacaccatcatgacgagaatgccgccggaggttgccctggaggtgacgcctccggcggtgacggtgctgcccggagcatcgagagagctagctgtgaccctgacggcgaggtccgtgaccggcacctacagtttcggagagatcgccatgaaaggcgaccgcggccacctcgtcagaatcccagtggtagctatgggattcaagtagatagaagacgaccgcgaccggcgctagagagagtaagtacgaggagcgagttgtgcctctgagatccgaggtcttgagctgcagaggaatgctgtaatttttccatagtttgtagagaataagagttagggtctgtttggttgggctgtggctgtgaaaaaagttgctgtgggctgtgagctgtggaaaaagctgctgtaggctgcaagctgttaaaaagctaaaaactgtttggtggaaaccactaaaagtcgttaaaaattcttcgatatatgttttcacagtttcatctaaaaagccactaaaagcaggtccaggggtgctttcagatttgcactgcgagaaagtcggcttttagaaaaagctgcttcctggatctagccttttggttgacttttggcttttaggggggcaaaagccaaagccaaaagtcaaaccaaacacacccttagaatgccctcctggttgtaaaaatatgtatttgggtgtttaaatttaagcctatgttcagccttgctcttaaggcaaagtatcatgtgcacatca

SEQ ID NO: 61501 - DNA, 3474 bp, Zea Mays
cagcgagctgcaaagggagagagagagagagaaaaaaaaccccaaggatttgagatgcttgccttgcctctccctccattaaagacaagggaggcagccaaaaggcgacgcaccattagccaagccagtaccatcgcaagcacgcacctttgcctcccttccgctccccgcctcccccctcactcactgcccactgccactccactccccgctccccaaaccctaccccaacggcccaaccccccggagcggagcggagcgattcgctggtcccgccagcgccgcgcccgggcatgccgccgccattgggtggcgcgaccgacgacgcccactgagccgtgcgccggggagccgccgctgttccttcctcggtgtccagtggattggagtggagatcccgccggaagcggaggcaggaaccgcccctgctgtcgcgagttctgcggtgctgacatcggtgaaagatgaggaggatcaggcttgcctgtttgcttgttatctttgtgcaagtgcaatgggcggcccttggaacgcatgatgtgtacatcgtgaccatggaaggggatccggtcgttagctacagaggcggtgtccaaggatttccagcaaccgctgtggattcggacgaggaaattgatctaaccagcgaggctgtcaaatcgtatgccctccacctccgaggacaccatgacaagctgctagactcgcttttagtagaaggaacttacgagaagctttatagctaccatcatctcatcaatggcttcgcagttcacatgtcgccactgcaggctgagttcttgaagaaagccccaggagttaagcatgttgagagagacatgaaggtacagaaattgactacacacacacctcagtttcttggattgccaactggggtatggtcaacaggaggtgggcttgatagagctggtgaagatgttgtgatcggtttcgtggattctggaatttaccctgaacatccgagcttcgctgcgcacaagactgatccatatggacctgcccctcgttataaagggaaatgtgagatggatccagtaacacaaagaagtttctgtaatgggaagatagttggggctcagcattttgcaaaagctgcaatggctgctggcgcgtttaatcccgatgttgaatttgcatctccattagatggtgatggtcatggaagtcacacagctgcaattgctgctggaaacaatggggtcccagtgcgaatgcatggtcacgaatttggcaaggcaagtggtatggccccacgtgctagctgtctacaaggttctttacaggctttttggtggttacatagctgatgttgtggcagctattgatcaggctgttcaggatggtgttgacattctcaacctttctgttgggcccaatagcccaccaacagctacacggactacttttttgaatccttttgacgctgcacttctttctgctgtgaaagctggggtatttgttgcccaagctgcaggaaatggtggaccatttccaaaaacactggtgtctttcagcccatggataactactgttgctgctggagttgatgaccgcagatacaagaatcatttaacactaggaaatggaaaacttctctctgggcttggagtatcacctgcaacacatgggaatatgtcgttcagcttgatttctgcagctgatgctctattgggttcatctgcaaccaagtacagtgcattagattgccagaggcctgaactattgaataagaggaaagttcaggggagaattcttttgtgtggctattcgttcaattacatttctgggacagcttcaataaagaaagtgtctcagacggccaggaatcttggagcagctggctttgttgttgctgtggagaataattacccaggaacaaaatttgaccctgtaccattcagcatccctggaattctcatcacagatgtcagcaaaacggaggatcttatagactactacaattcttccaccataagagattgggctggaagggctacagccttcaaagcaacagcaggtattgcagatggtttggcaccaacactatacaattctgccccccaggttgcactgttctcttctcgaggacccgatgttaaagattttagctttcaagatgctgatgtccttaaaccagacatacttgctcctggcaatctcatatgggctgcatgggcgcctaatggaacggatgaatcaaactatgctggtgaaggatttgcaatggtttctggaactagcatggccgcaccgcatatcgctggcattgcggcactgataaagcagaagaacccaaagtggagcccctcagcaataaaatctgccatgatgacaacggccaatacactggacaaagggagccgtcctctcagagcgcagcagtacactgcatcggaaatgatgacactttctcgggccacaccgtttgattgtggtagtggcgctgttaacccaaaagctgcccttgatcctggtcttgttctagatgcaacccacgaagagtacatcgcatttttgtgctcgatccctgacgtcaaccagagcgaagtgtcaaacatcgccggttcagcttgcaactccagctccaaggggcgtcaacgccccttcgacctcaacctcccctcgatcgccatctctcagcttcgaggcaccgtgacggtgacgcggaccgtcacaagcgtgtccgaggagaccgagacctacaccatcatgacgagaatgccgccggaggttgccctggaggtgacgcctccggcggtgacggtgctgcccggagcatcgagagagctagctgtgaccctgacggcgaggtccgtgaccggcacctacagtttcggagagatcgccatgaaaggcgaccgcggccacctcgtcagaatcccagtggtagctatgggattcaagtagatagaagacgaccgcgaccggcgctagagagagtaagtacgaggagcgagttgtgcctctgagatccgaggtcttgagctgcagaggaatgctgtaatttttccatagtttgtagagaataagagttagggtctgtttggttgggctgtggctgtgaaaaaagttgctgtgggctgtgagctgtggaaaaagctgctgtaggctgcaagctgttaaaaagctaaaaactgtttggtggaaaccactaaaagtcgttaaaaattcttcgatatatgttttcacagtttcatctaaaaagccactaaaagcaggtccaggggtgctttcagatttgcactgcgagaaagtcggcttttagaaaaagctgcttcctggatctagccttttggttgacttttggcttttaggggggcaaaagccaaagccaaaagtcaaaccaaacacacccttagaatgccctcctggttgtaaaaatatgtatttgggtgtttaaatttaagcctatgttcagccttgctcttaaggcaaagtatcatgtgcacatca

SEQ ID NO: 61502 - DNA, 3982 bp, Zea Mays
ctcagcttgaagtgttggtggttactgacatactattgtatcgtgcatgttaacacgatcatcaataccttaggagattgagtccattcaatacaatgagaaggattacgaaggactgccctttgaattccatggtggcttcgttggatatcttgggtatggtcttaaagtggagtgtgatgcatcatcgaacaaggccaaatcaagtactcctgatgcatgcttcgtctttgctgataacactgtggtggttgatcacagcaatggtgatgtgtatattttgtcactgcatgatgaattttattctagtaatggagatgggatatgcaaaaattcaacgcatacttcatggttagtggagactgagaagaagcttctcaggttgggtggtatgccctcaggatcaccaattatccgaaagacacatgctagatcatccagtgtgcataagcagagttttgttgtagagaaatcaaaggaccaatatgttagagacgttcagaattgcttggattatatcagggacggagaaagctatgagttgtgcttaactactcagatgaagagaagagcagactgtataaatgcactccaactctaccttaaactgagaaaacaaaatccagcgccttatgcggcctggcttaacttctcctcagaaaacttgagcatatgttgctcttctccagaaaggtttctacgactagaccgagctggagttctagaagcgaaaccaattaaaggtactatagcacgtggcagaacaccagaggaagatgaatgcttacgtctgcagttgagatacagcgaaaaagaccaggccgagaacctgatgattgtcgacctcttaagaaacgatctcggcaaggtctgcgagccagggagcgtgcatgtcccacgcctcatggacgttgaatcatacagaagtgttcacaccatggttctgcggtgctgacatcggtgaaagatgaggaggatcaggcttgcctgtttgcttgttatctttgtgcaagtgcaatgggcggcccttggaacgcatgatgtgtacatcgtgaccatggaaggggatccggtcgttagctacagaggcggtgtccaaggatttccagcaaccgctgtggattcggacgaggaaattgatctaaccagcgaggctgtcaaatcgtatgccctccacctccgaggacaccatgacaagctgctagactcgcttttagtagaaggaacttacgagaagctttatagctaccatcatctcatcaatggcttcgcagttcacatgtcgccactgcaggctgagttcttgaagaaagccccaggagttaagcatgttgagagagacatgaaggtacagaaattgactacacacacacctcagtttcttggattgccaactggggtatggtcaacaggaggtgggcttgatagagctggtgaagatgttgtgatcggtttcgtggattctggaatttaccctgaacatccgagcttcgctgcgcacaagactgatccatatggacctgcccctcgttataaagggaaatgtgagatggatccagtaacacaaagaagtttctgtaatgggaagatagttggggctcagcattttgcaaaagctgcaatggctgctggcgcgtttaatcccgatgttgaatttgcatctccattagatggtgatggtcatggaagtcacacagctgcaattgctgctggaaacaatggggtcccagtgcgaatgcatggtcacgaatttggcaaggcaagtggtatggccccacgtgctagggtagctgtctacaaggttctttacaggctttttggtggttacatagctgatgttgtggcagctattgatcaggctgttcaggatggtgttgacattctcaacctttctgttgggcccaatagcccaccaacagctacacggactacttttttgaatccttttgacgctgcacttctttctgctgtgaaagctggggtatttgttgcccaagctgcaggaaatggtggaccatttccaaaaacactggtgtctttcagcccatggataactactgttgctgctggagttgatgaccgcagatacaagaatcatttaacactaggaaatggaaaacttctctctgggcttggagtatcacctgcaacacatgggaatatgtcgttcagcttgatttctgcagctgatgctctattgggttcatctgcaaccaagtacagtgcattagattgccagaggcctgaactattgaataagaggaaagttcaggggagaattcttttgtgtggctattcgttcaattacatttctgggacagcttcaataaagaaagtgtctcagacggccaggaatcttggagcagctggctttgttgttgctgtggagaataattacccaggaacaaaatttgaccctgtaccattcagcatccctggaattctcatcacagatgtcagcaaaacggaggatcttatagactactacaattcttccaccataagagattgggctggaagggctacagccttcaaagcaacagcaggtattgcagatggtttggcaccaacactatacaattctgccccccaggttgcactgttctcttctcgaggacccgatgttaaagattttagctttcaagatgctgatgtccttaaaccagacatacttgctcctggcaatctcatatgggctgcatgggcgcctaatggaacggatgaatcaaactatgctggtgaaggatttgcaatggtttctggaactagcatggccgcaccgcatatcgctggcattgcggcactgataaagcagaagaacccaaagtggagcccctcagcaataaaatctgccatgatgacaacggccaatacactggacaaagggagccgtcctctcagagcgcagcagtacactgcatcggaaatgatgacactttctcgggccacaccgtttgattgtggtagtggcgctgttaacccaaaagctgcccttgatcctggtcttgttctagatgcaacccacgaagagtacatcgcatttttgtgctcgatccctgacgtcaaccagagcgaagtgtcaaacatcgccggttcagcttgcaactccagctccaaggggcgtcaacgccccttcgacctcaacctcccctcgatcgccatctctcagcttcgaggcaccgtgacggtgacgcggaccgtcacaagcgtgtccgaggagaccgagacctacaccatcatgacgagaatgccgccggaggttgccctggaggtgacgcctccggcggtgacggtgctgcccggagcatcgagagagctagctgtgaccctgacggcgaggtccgtgaccggcacctacagtttcggagagatcgccatgaaaggcgaccgcggccacctcgtcagaatcccagtggtagctatgggattcaagtagatagaagacgaccgcgaccggcgctagagagagtaagtacgaggagcgagttgtgcctctgagatccgaggtcttgagctgcagaggaatgctgtaatttttccatagtttgtagagaataagagttagggtctgtttggttgggctgtggctgtgaaaaaagttgctgtgggctgtgagctgtggaaaaagctgctgtaggctgcaagctgttaaaaagctaaaaactgtttggtggaaaccactaaaagtcgttaaaaattcttcgatatatgttttcacagtttcatctaaaaagccactaaaagcaggtccaggggtgctttcagatttgcactgcgagaaagtcggcttttagaaaaagctgcttcctggatctagccttttggttgacttttggcttttaggggggcaaaagccaaagccaaaagtcaaaccaaacacacccttagaatgccctcctggttgtaaaaatatgtatttgggtgtttaaatttaagcctatgttcagccttgctcttaaggcaaagtatcatgtgcacatca

SEQ ID NO: 61503 - DNA, 5572 bp, Zea Mays
cacccggatcctccgcgcgcgccgccaggtccgtcgcgatggccgcactccgcctccccgcccagccggtggcgaggtggccccaccttccttccgcctacgccgccgccgccgccgcgcgtcgggtctcggcccctcgcggccatctcgcggcgcggcgggccaagggggaggagccgccggagccgccggtgaggacgctgctgatcgacaactatgacagctacacctacaacatcttccaggagctgtcggtcgtcaacggcgtgccgcccgtggtcgtgcgcaacgacgagtggacgtggggggacatctttaaccggttgtacaaggaccgcaccttcgacaacatcgtcatctcgcctggccctggatctccggcatgccccgccgacataggggtatgtctgcgcatacttttggagtgtggagatatacccatcttgggtgtctgccttggccaccaggccctgggatttgtacatggtgctgagattgttcatgctccagaagctatacacgggcgactcagtgaaattgagcacgatggatgccacctctttaatcgtgtcccctcaggtagaaattctggcttcaaggtagtgaggtatcattcccttgtaatagaatctggttctctacctgatgatcttacatcgatagcgtggactgcttctccaaatttgctttcttaccttgaaagtgatcgaaccaatgttagtaccttcttgggaacattggataacaatttaatgagaaaccctctagagtacagtaacaatggtggggaactatccaacataggacatgcttgtgagtcagatgatagccgagttatcatgggcatcaggcactctagcaggcctcattatggagtgcagtttcacccagagagcattgctactcatcacggaagacagattttccgaaactttaagaagataacaggaaattttggattgcgctcatcgtggattcaggaaagaaaggttcacagtattggtcaattctgcaagtcatcatgattctattcctaaggacttgttgcatactgaaagaatggaactttcagagtctgtacttggaaagagagggattgggaagaagtgtttacgattacaatggaagaagattgaaaattttgtctgtcccacagtaggctctgaagacatatttgcggtgctttttggccatcaaagcggtgaagacacattttggttggatagctcatcagttgaccaggtatgcagtaagcttactattaactaatcaccaaaattgaataaaaaaagaggatactattttctcttcaactcttgacctacatgaattgagctgcaacaccatctcagttgagtggtatagctggaaatttgctgaaacttacttggattacaacttcttttatttcctcatggaggtaggtgtattcgcctttatgtattacatgatcttttttgtctttgttgctatacatttctacttgcagaacagggcacgtttttcattcatgggtggtaaaggtgggtccctgtggaagcaaatgtcattccacctatctggtcaaagagccaattgtggaggaatgcttagtatccaagatgcttatggatttactgccaaaaaatttatcaaagacggcttcttggagttccttaacaaggagattgagtccattcaatacaatgagaaggattacgaaggactgccctttgaattccatggtggcttcgttggatatcttgggtatggtcttaaagtggagtgtgatgcatcatcgaacaaggccaaatcaagtactcctgatgcatgcttcgtctttgctgataacactgtggtggttgatcacagcaatggtgatgtgtatattttgtcactgcatgatgaattttattctagtaatggagatgggatatgcaaaaattcaacgcatacttcatggttagtggagactgagaagaagcttctcaggttgggtggtatgccctcaggatcaccaattatccgaaagacacatgctagatcatccagtgtgcataagcagagttttgttgtagagaaatcaaaggaccaatatgttagagacgttcagaattgcttggattatatcagggacggagaaagctatgagttgtgcttaactactcagatgaagagaagagcagactgtataaatgcactccaactctaccttaaactgagaaaacaaaatccagcgccttatgcggcctggcttaacttctcctcagaaaacttgagcatatgttgctcttctccagaaaggtttctacgactagaccgagctggagttctagaagcgaaaccaattaaaggtactatagcacgtggcagaacaccagaggaagatgaatgcttacgtctgcagttgagatacagcgaaaaagaccaggccgagaacctgatgattgtcgacctcttaagaaacgatctcggcaaggtctgcgagccagggagcgtgcatgtcccacgcctcatggacgttgaatcatacagaagtgttcacaccatggttctgcggtgctgacatcggtgaaagatgaggaggatcaggcttgcctgtttgcttgttatctttgtgcaagtgcaatgggcggcccttggaacgcatgatgtgtacatcgtgaccatggaaggggatccggtcgttagctacagaggcggtgtccaaggatttccagcaaccgctgtggattcggacgaggaaattgatctaaccagcgaggctgtcaaatcgtatgccctccacctccgaggacaccatgacaagctgctagactcgcttttagtagaaggaacttacgagaagctttatagctaccatcatctcatcaatggcttcgcagttcacatgtcgccactgcaggctgagttcttgaagaaagccccaggagttaagcatgttgagagagacatgaaggtacagaaattgactacacacacacctcagtttcttggattgccaactggggtatggtcaacaggaggtgggcttgatagagctggtgaagatgttgtgatcggtttcgtggattctggaatttaccctgaacatccgagcttcgctgcgcacaagactgatccatatggacctgcccctcgttataaagggaaatgtgagatggatccagtaacacaaagaagtttctgtaatgggaagatagttggggctcagcattttgcaaaagctgcaatggctgctggcgcgtttaatcccgatgttgaatttgcatctccattagatggtgatggtcatggaagtcacacagctgcaattgctgctggaaacaatggggtcccagtgcgaatgcatggtcacgaatttggcaaggcaagtggtatggccccacgtgctagggtagctgtctacaaggttctttacaggctttttggtggttacatagctgatgttgtggcagctattgatcaggctgttcaggatggtgttgacattctcaacctttctgttgggcccaatagcccaccaacagctacacggactacttttttgaatccttttgacgctgcacttctttctgctgtgaaagctggggtatttgttgcccaagctgcaggaaatggtggaccatttccaaaaacactggtgtctttcagcccatggataactactgttgctgctggagttgatgaccgcagatacaagaatcatttaacactaggaaatggaaaacttctctctgggcttggagtatcacctgcaacacatgggaatatgtcgttcagcttgatttctgcagctgatgctctattgggttcatctgcaaccaagtacagtgcattagattgccagaggcctgaactattgaataagaggaaagttcaggggagaattcttttgtgtggctattcgttcaattacatttctgggacagcttcaataaagaaagtgtctcagacggccaggaatcttggagcagctggctttgttgttgctgtggagaataattacccaggaacaaaatttgaccctgtaccattcagcatccctggaattctcatcacagatgtcagcaaaacggaggatcttatagactactacaattcttccaccataagagattgggctggaagggctacagccttcaaagcaacagcaggtattgcagatggtttggcaccaacactatacaattctgccccccaggttgcactgttctcttctcgaggacccgatgttaaagattttagctttcaagatgctgatgtccttaaaccagacatacttgctcctggcaatctcatatgggctgcatgggcgcctaatggaacggatgaatcaaactatgctggtgaaggatttgcaatggtttctggaactagcatggccgcaccgcatatcgctggcattgcggcactgataaagcagaagaacccaaagtggagcccctcagcaataaaatctgccatgatgacaacggccaatacactggacaaagggagccgtcctctcagagcgcagcagtacactgcatcggaaatgatgacactttctcgggccacaccgtttgattgtggtagtggcgctgttaacccaaaagctgcccttgatcctggtcttgttctagatgcaacccacgaagagtacatcgcatttttgtgctcgatccctgacgtcaaccagagcgaagtgtcaaacatcgccggttcagcttgcaactccagctccaaggggcgtcaacgccccttcgacctcaacctcccctcgatcgccatctctcagcttcgaggcaccgtgacggtgacgcggaccgtcacaagcgtgtccgaggagaccgagacctacaccatcatgacgagaatgccgccggaggttgccctggaggtgacgcctccggcggtgacggtgctgcccggagcatcgagagagctagctgtgaccctgacggcgaggtccgtgaccggcacctacagtttcggagagatcgccatgaaaggcgaccgcggccacctcgtcagaatcccagtggtagctatgggattcaagtagatagaagacgaccgcgaccggcgctagagagagtaagtacgaggagcgagttgtgcctctgagatccgaggtcttgagctgcagaggaatgctgtaatttttccatagtttgtagagaataagagttagggtctgtttggttgggctgtggctgtgaaaaaagttgctgtgggctgtgagctgtggaaaaagctgctgtaggctgcaagctgttaaaaagctaaaaactgtttggtggaaaccactaaaagtcgttaaaaattcttcgatatatgttttcacagtttcatctaaaaagccactaaaagcaggtccaggggtgctttcagatttgcactgcgagaaagtcggcttttagaaaaagctgcttcctggatctagccttttggttgacttttggcttttaggggggcaaaagccaaagccaaaagtcaaaccaaacacacccttagaatgccctcctggttgtaaaaatatgtatttgggtgtttaaatttaagcctatgttcagccttgctcttaaggcaaagtatcatgtgcacatca

SEQ ID NO: 61504 - DNA, 5375 bp, Zea Mays
aaaggagtcgcgttccattttcattctcccacccacccggatcctccgcgcgcgccgccaggtccgtcgcgatggccgcactccgcctccccgcccagccggtggcgaggtggccccaccttccttccgcctacgccgccgccgccgccgcgcgtcgggtctcggcccctcgcggccatctcgcggcgcggcgggccaagggggaggagccgccggagccgccggtgaggacgctgctgatcgacaactatgacagctacacctacaacatcttccaggagctgtcggtcgtcaacggcgtgccgcccgtggtcgtgcgcaacgacgagtggacgtggggggacatctttaaccggttgtacaaggaccgcaccttcgacaacatcgtcatctcgcctggccctggatctccggcatgccccgccgacataggggtatgtctgcgcatacttttggagtgtggagatatacccatcttgggtgtctgccttggccaccaggccctgggatttgtacatggtgctgagattgttcatgctccagaagctatacacgggcgactcagtgaaattgagcacgatggatgccacctctttaatcgtgtcccctcaggtagaaattctggcttcaaggtagtgaggtatcattcccttgtaatagaatctggttctctacctgatgatcttacatcgatagcgtggactgcttctccaaatttgctttcttaccttgaaagtgatcgaaccaatgttagtaccttcttgggaacattggataacaatttaatgagaaaccctctagagtacagtaacaatggtggggaactatccaacataggacatgcttgtgagtcagatgatagccgagttatcatgggcatcaggcactctagcaggcctcattatggagtgcagtttcacccagagagcattgctactcatcacggaagacagattttccgaaactttaagaagataacaggaaattttggattgcgctcatcgtggattcaggaaagaaaggttcacagtattgagagtcctgttctgcaggtcaattctgcaagtcatcatgattctattcctaaggacttgttgcatactgaaagaatggaactttcagagtctgtacttggaaagagagggattgggaagaagtgtttacgattacaatggaagaagattgaaaattttgtctgtcccacagtaggctctgaagacatatttgcggtgctttttggccatcaaagcggtgaagacacattttggttggatagctcatcagttgaccagaacagggcacgtttttcattcatgggtggtaaaggtgggtccctgtggaagcaaatgtcattccacctatctggtcaaagagccaattgtggaggaatgcttagtatccaagatgcttatggatttactgccaaaaaatttatcaaagacggcttcttggagttccttaacaaggagattgagtccattcaatacaatgagaaggattacgaaggactgccctttgaattccatggtggcttcgttggatatcttgggtatggtcttaaagtggagtgtgatgcatcatcgaacaaggccaaatcaagtactcctgatgcatgcttcgtctttgctgataacactgtggtggttgatcacagcaatggtgatgtgtatattttgtcactgcatgatgaattttattctagtaatggagatgggatatgcaaaaattcaacgcatacttcatggttagtggagactgagaagaagcttctcaggttgggtggtatgccctcaggatcaccaattatccgaaagacacatgctagatcatccagtgtgcataagcagagttttgttgtagagaaatcaaaggaccaatatgttagagacgttcagaattgcttggattatatcagggacggagaaagctatgagttgtgcttaactactcagatgaagagaagagcagactgtataaatgcactccaactctaccttaaactgagaaaacaaaatccagcgccttatgcggcctggcttaacttctcctcagaaaacttgagcatatgttgctcttctccagaaaggtttctacgactagaccgagctggagttctagaagcgaaaccaattaaaggtactatagcacgtggcagaacaccagaggaagatgaatgcttacgtctgcagttgagatacagcgaaaaagaccaggccgagaacctgatgattgtcgacctcttaagaaacgatctcggcaaggtctgcgagccagggagcgtgcatgtcccacgcctcatggacgttgaatcatacagaagtgttcacaccatggttctgcggtgctgacatcggtgaaagatgaggaggatcaggcttgcctgtttgcttgttatctttgtgcaagtgcaatgggcggcccttggaacgcatgatgtgtacatcgtgaccatggaaggggatccggtcgttagctacagaggcggtgtccaaggatttccagcaaccgctgtggattcggacgaggaaattgatctaaccagcgaggctgtcaaatcgtatgccctccacctccgaggacaccatgacaagctgctagactcgcttttagtagaaggaacttacgagaagctttatagctaccatcatctcatcaatggcttcgcagttcacatgtcgccactgcaggctgagttcttgaagaaagccccaggagttaagcatgttgagagagacatgaaggtacagaaattgactacacacacacctcagtttcttggattgccaactggggtatggtcaacaggaggtgggcttgatagagctggtgaagatgttgtgatcggtttcgtggattctggaatttaccctgaacatccgagcttcgctgcgcacaagactgatccatatggacctgcccctcgttataaagggaaatgtgagatggatccagtaacacaaagaagtttctgtaatgggaagatagttggggctcagcattttgcaaaagctgcaatggctgctggcgcgtttaatcccgatgttgaatttgcatctccattagatggtgatggtcatggaagtcacacagctgcaattgctgctggaaacaatggggtcccagtgcgaatgcatggtcacgaatttggcaaggcaagtggtatggccccacgtgctagggtagctgtctacaaggttctttacaggctttttggtggttacatagctgatgttgtggcagctattgatcaggctgttcaggatggtgttgacattctcaacctttctgttgggcccaatagcccaccaacagctacacggactacttttttgaatccttttgacgctgcacttctttctgctgtgaaagctggggtatttgttgcccaagctgcaggaaatggtggaccatttccaaaaacactggtgtctttcagcccatggataactactgttgctgctggagttgatgaccgcagatacaagaatcatttaacactaggaaatggaaaacttctctctgggcttggagtatcacctgcaacacatgggaatatgtcgttcagcttgatttctgcagctgatgctctattgggttcatctgcaaccaagtacagtgcattagattgccagaggcctgaactattgaataagaggaaagttcaggggagaattcttttgtgtggctattcgttcaattacatttctgggacagcttcaataaagaaagtgtctcagacggccaggaatcttggagcagctggctttgttgttgctgtggagaataattacccaggaacaaaatttgaccctgtaccattcagcatccctggaattctcatcacagatgtcagcaaaacggaggatcttatagactactacaattcttccaccataagagattgggctggaagggctacagccttcaaagcaacagcaggtattgcagatggtttggcaccaacactatacaattctgccccccaggttgcactgttctcttctcgaggacccgatgttaaagattttagctttcaagatgctgatgtccttaaaccagacatacttgctcctggcaatctcatatgggctgcatgggcgcctaatggaacggatgaatcaaactatgctggtgaaggatttgcaatggtttctggaactagcatggccgcaccgcatatcgctggcattgcggcactgataaagcagaagaacccaaagtggagcccctcagcaataaaatctgccatgatgacaacggccaatacactggacaaagggagccgtcctctcagagcgcagcagtacactgcatcggaaatgatgacactttctcgggccacaccgtttgattgtggtagtggcgctgttaacccaaaagctgcccttgatcctggtcttgttctagatgcaacccacgaagagtacatcgcatttttgtgctcgatccctgacgtcaaccagagcgaagtgtcaaacatcgccggttcagcttgcaactccagctccaaggggcgtcaacgccccttcgacctcaacctcccctcgatcgccatctctcagcttcgaggcaccgtgacggtgacgcggaccgtcacaagcgtgtccgaggagaccgagacctacaccatcatgacgagaatgccgccggaggttgccctggaggtgacgcctccggcggtgacggtgctgcccggagcatcgagagagctagctgtgaccctgacggcgaggtccgtgaccggcacctacagtttcggagagatcgccatgaaaggcgaccgcggccacctcgtcagaatcccagtggtagctatgggattcaagtagatagaagacgaccgcgaccggcgctagagagagtaagtacgaggagcgagttgtgcctctgagatccgaggtcttgagctgcagaggaatgctgtaatttttccatagtttgtagagaataagagttagggtctgtttggttgggctgtggctgtgaaaaaagttgctgtgggctgtgagctgtggaaaaagctgctgtaggctgcaagctgttaaaaagctaaaaactgtttggtggaaaccactaaaagtcgttaaaaattcttcgatatatgttttcacagtttcatctaaaaagccactaaaagcaggtccaggggtgctttcagatttgcactgcgagaaagtcggcttttagaaaaagctgcttcctggatctagccttttggttgacttttggcttttaggggggcaaaagccaaagccaaaagtcaaaccaaacacacccttagaatgccctcctggttgtaaaaatatgtatttgggtgtttaaatttaagcctatgttcagccttgctcttaaggcaaagtatcatgtgcacatca

SEQ ID NO: 61505 - DNA, 3118 bp, Zea Mays
cacccggatcctccgcgcgcgccgccaggtccgtcgcgatggccgcactccgcctccccgcccagccggtggcgaggtggccccaccttccttccgcctacgccgccgccgccgccgcgcgtcgggtctcggcccctcgcggccatctcgcggcgcggcgggccaagggggaggagccgccggagccgccggtgaggacgctgctgatcgacaactatgacagctacacctacaacatcttccaggagctgtcggtcgtcaacggcgtgccgcccgtggtcgtgcgcaacgacgagtggacgtggggggacatctttaaccggttgtacaaggaccgcaccttcgacaacatcgtcatctcgcctggccctggatctccggcatgccccgccgacataggggtatgtctgcgcatacttttggagtgtggagatatacccatcttgggtgtctgccttggccaccaggccctgggatttgtacatggtgctgagattgttcatgctccagaagctatacacgggcgactcagtgaaattgagcacgatggatgccacctctttaatcgtgtcccctcaggtagtgaggtatcattcccttgtaatagaatctggttctctacctgatgatcttacatcgatagcgtggactgcttctccaaatttgctttcttaccttgaaagtgatcgaaccaatgttagtaccttcttgggaacattggataacaatttaatgagaaaccctctagagtacagtaacaatggtggggaactatccaacataggacatgcttgtgagtcagatgatagccgagttatcatgggcatcaggcactctagcaggcctcattatggagtgcagagagcattgctactcatcacggaagacagattttccgaaactttaagaagataacaggaaattttggattgcgctcatcgtggattcaggaaagaaaggttcacagtattggtaaactggaaaaatctcaagtcaattctgcaagtcatcatgattctattcctaaggacttgttgcatactgaaagaatggaactttcagagtctgtacttggaaagagagggattgggaagaagtgtttacgattacaatggaagaagattgaaaattttgtctgtcccacagtaggctctgaagacatatttgcggtgctttttggccatcaaagcggtgaagacacattttggttggatagctcatcagttgaccagaacagggcacgtttttcattcatgggtggtaaaggtgggtccctgtggaagcaaatgtcattccacctatctggtcaaagagccaattgtggaggaatgcttagtatccaagatgcttatggatttactgccaaaaaatttatcaaagacggcttcttggagttccttaacaaggagattgagtccattcaatacaatgagaaggattacgaaggactgccctttgaattccatggtggcttcgttggatatcttgggtatggtcttaaagtggagtgtgatgcatcatcgaacaaggccaaatcaagtactcctgatgcatgcttcgtctttgctgataacactgtggtggttgatcacagcaatggtgatgtgtatattttgtcactgcatgatgaattttattctagtaatggagatgggatatgcaaaaattcaacgcatacttcatggttagtggagactgagaagaagcttctcaggttgggtggtatgccctcaggatcaccaattatccgaaagacacatgctagatcatccagtgtgcataagcagagttttgttgtagagaaatcaaaggaccaatatgttagagacgttcagaattgcttggattatatcagggacggagaaagctatgagttgtgcttaactactcagatgaagagaagagcagactgtataaatgcactccaactctaccttaaactgagaaaacaaaatccagcgccttatgcggcctggcttaacttctcctcagaaaacttgagcatatgttgctcttctccagaaaggtttctacgactagaccgagctggagttctagaagcgaaaccaattaaaggtactatagcacgtggcagaacaccagaggaagatgaatgcttacgtctgcagttgagatacagcgaaaaagaccaggccgagaacctgatgattgtcgacctcttaagaaacgatctcggcaaggtctgcgagccagggagcgtgcatgtcccacgcctcatggacgttgaatcatacagaagtgttcacaccatggtgagtaccgtctgcggaacaaagaagccagatctaagccccgttgattgtgtgaaagcggcctttccaggcggttcgatgaccggggctccaaaagtcagatcaatggagatccttgattcacttgagacaagcccaagaggagtgtactcaggatcgatcgggttcttctcgtacaaccacacattcgacctgaacattgtgatccgaactgttatcctgcacgacggagaagcctcggtcggggcgggtggggcgatcgtagcgctgtcgagcccagaagcagagtacgacgaaatgctgctgaaagcgaaagccccgactgaggtggttgaggatctcgttcagacgatctacagctcagaccggtcggattccatgcagacaactatcagctagatcagataggcaaaggaccattatttgtcgcgacaccaagcgcttacgatggacctcggcaaacaccatgtgtctcagaaatttggtatcagtgaccggtgcgtgctgatgaacattggcagtgggagaggggggggggggggggggtgaggtggcgtatcttctttgcgatggtcatccctttgccagaaggaaataaaggagacgcgaagaggatgtcgaggtcagtcggatccacggttagcatatagagtcaggtgacatggcctctctcaactatagtgtgtgtgtgtgtgtggcatatacggtgagcatatacaagaacaacagtgtgtgtgtggcagaagtgaaacaaactgatacggttgtgttgcactgtcgtaccagttcaatgttcctgaagtgatattattctttgacgttataaatacttcgagggtgggtgg

SEQ ID NO: 61506 - DNA, 3073 bp, Zea Mays
aaaggagtcgcgttccattttcattctcccacccacccggatcctccgcgcgcgccgccaggtccgtcgcgatggccgcactccgcctccccgcccagccggtggcgaggtggccccaccttccttccgcctacgccgccgccgccgccgcgcgtcgggtctcggcccctcgcggccatctcgcggcgcggcgggccaagggggaggagccgccggagccgccggtgaggacgctgctgatcgacaactatgacagctacacctacaacatcttccaggagctgtcggtcgtcaacggcgtgccgcccgtggtcgtgcgcaacgacgagtggacgtggggggacatctttaaccggttgtacaaggaccgcaccttcgacaacatcgtcatctcgcctggccctggatctccggcatgccccgccgacataggggtatgtctgcgcatacttttggagtgtggagatatacccatcttgggtgtctgccttggccaccaggccctgggatttgtacatggtgctgagattgttcatgctccagaagctatacacgggcgactcagtgaaattgagcacgatggatgccacctctttaatcgtgtcccctcaggtagaaattctggcttcaaggtagtgaggtatcattcccttgtaatagaatctggttctctacctgatgatcttacatcgatagcgtggactgcttctccaaatttgctttcttaccttgaaagtgatcgaaccaatgacatgcttgtgagtcagatgatagccgagttatcatgggcatcaggcactctagcaggcctcattatggagtgcagtttcacccagagagcattgctactcatcacggaagacagattttccgaaactttaagaagataacaggaaattttggattgcgctcatcgtggattcaggaaagaaaggttcacagtattggtcaattctgcaagtcatcatgattctattcctaaggacttgttgcatactgaaagaatggaactttcagagtctgtacttggaaagagagggattgggaagaagtgtttacgattacaatggaagaagattgaaaattttgtctgtcccacagtaggctctgaagacatatttgcggtgctttttggccatcaaagcggtgaagacacattttggttggatagctcatcagttgaccagaacagggcacgtttttcattcatgggtggtaaaggtgggtccctgtggaagcaaatgtcattccacctatctggtcaaagagccaattgtggaggaatgcttagtatccaagatgcttatggatttactgccaaaaaatttatcaaagacggcttcttggagttccttaacaaggagattgagtccattcaatacaatgagaaggattacgaaggactgccctttgaattccatggtggcttcgttggatatcttgggtatggtcttaaagtggagtgtgatgcatcatcgaacaaggccaaatcaagtactcctgatgcatgcttcgtctttgctgataacactgtggtggttgatcacagcaatggtgatgtgtatattttgtcactgcatgatgaattttattctagtaatggagatgggatatgcaaaaattcaacgcatacttcatggttagtggagactgagaagaagcttctcaggttgggtggtatgccctcaggatcaccaattatccgaaagacacatgctagatcatccagtgtgcataagcagagttttgttgtagagaaatcaaaggaccaatatgttagagacgttcagaattgcttggattatatcagggacggagaaagctatgagttgtgcttaactactcagatgaagagaagagcagactgtataaatgcactccaactctaccttaaactgagaaaacaaaatccagcgccttatgcggcctggcttaacttctcctcagaaaacttgagcatatgttgctcttctccagaaaggtttctacgactagaccgagctggagttctagaagcgaaaccaattaaaggtactatagcacgtggcagaacaccagaggaagatgaatgcttacgtctgcagttgagatacagcgaaaaagaccaggccgagaacctgatgattgtcgacctcttaagaaacgatctcggcaaggtctgcgagccagggagcgtgcatgtcccacgcctcatggacgttgaatcatacagaagtgttcacaccatggtgagtaccgtctgcggaacaaagaagccagatctaagccccgttgattgtgtgaaagcggcctttccaggcggttcgatgaccggggctccaaaagtcagatcaatggagatccttgattcacttgagacaagcccaagaggagtgtactcaggatcgatcgggttcttctcgtacaaccacacattcgacctgaacattgtgatccgaactgttatcctgcacgacggagaagcctcggtcggggcgggtggggcgatcgtagcgctgtcgagcccagaagcagagtacgacgaaatgctgctgaaagcgaaagccccgactgaggtggttgaggatctcgttcagacgatctacagctcagaccggtcggattccatgcagacaactatcagctagatcagataggcaaaggaccattatttgtcgcgacaccaagcgcttacgatggacctcggcaaacaccatgtgtctcagaaatttggtatcagtgaccggtgcgtgctgatgaacattggcagtgggagaggggggggggggggggggtgaggtggcgtatcttctttgcgatggtcatccctttgccagaaggaaataaaggagacgcgaagaggatgtcgaggtcagtcggatccacggttagcatatagagtcaggtgacatggcctctctcaactatagtgtgtgtgtgtgtgtggcatatacggtgagcatatacaagaacaacagtgtgtgtgtggcagaagtgaaacaaactgatacggttgtgttgcactgtcgtaccagttcaatgttcctgaagtgatattattctttgacgttataaatacttcgagggtgggtgg

SEQ ID NO: 61507 - DNA, 3371 bp, Zea Mays
cacacatatgcgatgcacccggttctacccgttggaaacgggtgtgacacagtccggcgcacccaccgagacgatagggtaggacgtcggcaaaaaaagcgcactccgattgacgtataaaaaacgacgtgcccgaaccgtattttgcagtccaaattaccacggccccagaaaaaggagtcgcgttccattttcattctcccacccacccggatcctccgcgcgcgccgccaggtccgtcgcgatggccgcactccgcctccccgcccagccggtggcgaggtggccccaccttccttccgcctacgccgccgccgccgccgcgcgtcgggtctcggcccctcgcggccatctcgcggcgcggcgggccaagggggaggagccgccggagccgccggtgaggacgctgctgatcgacaactatgacagctacacctacaacatcttccaggagctgtcggtcgtcaacggcgtgccgcccgtggtcgtgcgcaacgacgagtggacgtggggggacatctttaaccggttgtacaaggaccgcaccttcgacaacatcgtcatctcgcctggccctggatctccggcatgccccgccgacataggggtatgtctgcgcatacttttggagtgtggagatatacccatcttgggtgtctgccttggccaccaggccctgggatttgtacatggtgctgagattgttcatgctccagaagctatacacgggcgactcagtgaaattgagcacgatggatgccacctctttaatcgtgtcccctcaggtagtgaggtatcattcccttgtaatagaatctggttctctacctgatgatcttacatcgatagcgtggactgcttctccaaatttgctttcttaccttgaaagtgatcgaaccaatgttagtaccttcttgggaacattggataacaatttaatgagaaaccctctagagtacagtaacaatggtggggaactatccaacataggacatgcttgtgagtcagatgatagccgagttatcatgggcatcaggcactctagcaggcctcattatggagtgcagtttcacccagagagcattgctactcatcacggaagacagattttccgaaactttaagaagataacaggaaattttggattgcgctcatcgtggattcaggaaagaaaggttcacagtattggtcaattctgcaagtcatcatgattctattcctaaggacttgttgcatactgaaagaatggaactttcagagtctgtacttggaaagagagggattgggaagaagtgtttacgattacaatggaagaagattgaaaattttgtctgtcccacagtaggctctgaagacatatttgcggtgctttttggccatcaaagcggtgaagacacattttggttggatagctcatcagttgaccagaacagggcacgtttttcattcatgggtggtaaaggtgggtccctgtggaagcaaatgtcattccacctatctggtcaaagagccaattgtggaggaatgcttagtatccaagatgcttatggatttactgccaaaaaatttatcaaagacggcttcttggagttccttaacaaggagattgagtccattcaatacaatgagaaggattacgaaggactgccctttgaattccatggtggcttcgttggatatcttgggtatggtcttaaagtggagtgtgatgcatcatcgaacaaggccaaatcaagtactcctgatgcatgcttcgtctttgctgataacactgtggtggttgatcacagcaatggtgatgtgtatattttgtcactgcatgatgaattttattctagtaatggagatgggatatgcaaaaattcaacgcatacttcatggttagtggagactgagaagaagcttctcaggttgggtggtatgccctcaggatcaccaattatccgaaagacacatgctagatcatccagtgtgcataagcaggcaggatcaccaattaatggaaagacatatgttagatcatccagtgcgctgaagcagagttttgttgtagagaaatcaaaggaccaatatgttagagacgttcagaattgcttggattatatcagggacggagaaagctatgagttgtgcttaactactcagatgaagagaagagcagactgtataaatgcactccaactctaccttaaactgagaaaacaaaatccagcgccttatgcggcctggcttaacttctcctcagaaaacttgagcatatgttgctcttctccagaaaggtttctacgactagaccgagctggagttctagaagcgaaaccaattaaaggtactatagcacgtggcagaacaccagaggaagatgaatgcttacgtctgcagttgagatacagcgaaaaagaccaggccgagaacctgatgattgtcgacctcttaagaaacgatctcggcaaggtctgcgagccagggagcgtgcatgtcccacgcctcatggacgttgaatcatacagaagtgttcacaccatggtgagtaccgtctgcggaacaaagaagccagatctaagccccgttgattgtgtgaaagcggcctttccaggcggttcgatgaccggggctccaaaagtcagatcaatggagatccttgattcacttgagacaagcccaagaggagtgtactcaggatcgatcgggttcttctcgtacaaccacacattcgacctgaacattgtgatccgaactgttatcctgcacgacggagaagcctcggtcggggcgggtggggcgatcgtagcgctgtcgagcccagaagcagagtacgacgaaatgctgctgaaagcgaaagccccgactgaggtggttgaggatctcgttcagacgatctacagctcagaccggtcggattccatgcagacaactatcagctagatcagataggcaaaggaccattatttgtcgcgacaccaagcgcttacgatggacctcggcaaacaccatgtgtctcagaaatttggtatcagtgaccggtgcgtgctgatgaacattggcagtgggagaggggggggggggggggggtgaggtggcgtatcttctttgcgatggtcatccctttgccagaaggaaataaaggagacgcgaagaggatgtcgaggtcagtcggatccacggttagcatatagagtcaggtgacatggcctctctcaactatagtgtgtgtgtgtgtgtggcatatacggtgagcatatacaagaacaacagtgtgtgtgtggcagaagtgaaacaaactgatacggttgtgttgcactgtcgtaccagttcaatgttcctgaagtgatattattctttgacgttataaatacttcgagggtgggtgg

SEQ ID NO: 61508 - DNA, 3482 bp, Zea Mays
gatgctggactccatggatgctagtctagtgatacccccggtcatcttcctgtggatggatgtccttgtttcgctatactttgatgaataaaggttaagacatattgtccgttcgaagtgtaatatgttaatataatcgttatttacgcttttatgcattgttcttttgatatattacacttgtgacgtcaacatatgtgtggaaatagattctggcacacatatgcgatgcacccggttctacccgttggaaacgggtgtgacacagtccggcgcacccaccgagacgatagggtaggacgtcggcaaaaaaagcgcactccgattgacgtataaaaaacgacgtgcccgaaccgtattttgcagtccaaattaccacggccccagaaaaaggagtcgcgttccattttcattctcccacccacccggatcctccgcgcgcgccgccaggtccgtcgcgatggccgcactccgcctccccgcccagccggtggcgaggtggccccaccttccttccgcctacgccgccgccgccgccgcgcgtcgggtctcggcccctcgcggccatctcgcggcgcggcgggccaagggggaggagccgccggagccgccggtgaggacgctgctgatcgacaactatgacagctacacctacaacatcttccaggagctgtcggtcgtcaacggcgtgccgcccgtggtcgtgcgcaacgacgagtggacgtggggggacatctttaaccggttgtacaaggaccgcaccttcgacaacatcgtcatctcgcctggccctggatctccggcatgccccgccgacataggggtatgtctgcgcatacttttggagtgtggagatatacccatcttgggtgtctgccttggccaccaggccctgggatttgtacatggtgctgagattgttcatgctccagaagctatacacgggcgactcagtgaaattgagcacgatggatgccacctctttaatcgtgtcccctcaggtagaaattctggcttcaaggtagtgaggtatcattcccttgtaatagaatctggttctctacctgatgatcttacatcgatagcgtggactgcttctccaaatttgctttcttaccttgaaagtgatcgaaccaatgacatgcttgtgagtcagatgatagccgagttatcatgggcatcaggcactctagcaggcctcattatggagtgcagtttcacccagagagcattgctactcatcacggaagacagattttccgaaactttaagaagataacaggaaattttggattgcgctcatcgtggattcaggaaagaaaggttcacagtattggtaaactggaaaaatctcaagtcaattctgcaagtcatcatgattctattcctaaggacttgttgcatactgaaagaatggaactttcagagtctgtacttggaaagagagggattgggaagaagtgtttacgattacaatggaagaagattgaaaattttgtctgtcccacagtaggctctgaagacatatttgcggtgctttttggccatcaaagcggtgaagacacattttggttggatagctcatcagttgaccagaacagggcacgtttttcattcatgggtggtaaaggtgggtccctgtggaagcaaatgtcattccacctatctggtcaaagagccaattgtggaggaatgcttagtatccaagatgcttatggatttactgccaaaaaatttatcaaagacggcttcttggagttccttaacaaggagattgagtccattcaatacaatgagaaggattacgaaggactgccctttgaattccatggtggcttcgttggatatcttgggtatggtcttaaagtggagtgtgatgcatcatcgaacaaggccaaatcaagtactcctgatgcatgcttcgtctttgctgataacactgtggtggttgatcacagcaatggtgatgtgtatattttgtcactgcatgatgaattttattctagtaatggagatgggatatgcaaaaattcaacgcatacttcatggttagtggagactgagaagaagcttctcaggttgggtggtatgccctcaggatcaccaattatccgaaagacacatgctagatcatccagtgtgcataagcagagttttgttgtagagaaatcaaaggaccaatatgttagagacgttcagaattgcttggattatatcagggacggagaaagctatgagttgtgcttaactactcagatgaagagaagagcagactgtataaatgcactccaactctaccttaaactgagaaaacaaaatccagcgccttatgcggcctggcttaacttctcctcagaaaacttgagcatatgttgctcttctccagaaaggtttctacgactagaccgagctggagttctagaagcgaaaccaattaaaggtactatagcacgtggcagaacaccagaggaagatgaatgcttacgtctgcagttgagatacagcgaaaaagaccaggccgagaacctgatgattgtcgacctcttaagaaacgatctcggcaaggtctgcgagccagggagcgtgcatgtcccacgcctcatggacgttgaatcatacagaagtgttcacaccatggtgagtaccgtctgcggaacaaagaagccagatctaagccccgttgattgtgtgaaagcggcctttccaggcggttcgatgaccggggctccaaaagtcagatcaatggagatccttgattcacttgagacaagcccaagaggagtgtactcaggatcgatcgggttcttctcgtacaaccacacattcgacctgaacattgtgatccgaactgttatcctgcacgacggagaagcctcggtcggggcgggtggggcgatcgtagcgctgtcgagcccagaagcagagtacgacgaaatgctgctgaaagcgaaagccccgactgaggtggttgaggatctcgttcagacgatctacagctcagaccggtcggattccatgcagacaactatcagctagatcagataggcaaaggaccattatttgtcgcgacaccaagcgcttacgatggacctcggcaaacaccatgtgtctcagaaatttggtatcagtgaccggtgcgtgctgatgaacattggcagtgggagaggggggggggggggggggtgaggtggcgtatcttctttgcgatggtcatccctttgccagaaggaaataaaggagacgcgaagaggatgtcgaggtcagtcggatccacggttagcatatagagtcaggtgacatggcctctctcaactatagtgtgtgtgtgtgtgtggcatatacggtgagcatatacaagaacaacagtgtgtgtgtggcagaagtgaaacaaactgatacggttgtgttgcactgtcgtaccagttcaatgttcctgaagtgatattattctttgacgttataaatacttcgagggtgggtgg

SEQ ID NO: 61509 - DNA, 660 bp, Zea Mays
ctcgaggaggcattagctagctgcaagcggctggctcaccggtgacggtgagagaaaccgtgaagcaaaccaaagcaaggcaatgccggaccttcgtgcaaggtcaggttaaacatgaagacagtgatagtgatatcttcccaaagaacggtatcagcgctgttatcagggaaggcaacattctgaagatgcagcgcaagcagaagccgtgcgctcccctcccttctaataagcagagtcggtactaccggcctcgggtcaaggggaggtttgtcagcaaggcttatttcctccagcagcagcaggtattggagaaggagagctaaagaaaatgggtcttgcgggcatttctggggctttactcttgctctctaggagaagcagcagagcttctcaattttcatttctgcagcgttacagcacggcagatgtagagatgcatgtagagttgcatgtaagttgtgaccatggtttccttgcaacttctctagctccagatggcttaatggccatgaagtgatatcccaaccagttaactgaatcgtgttctcactctgtttctgcaaatcctattctttgtttgctggggttccgccccagagctgtcatgtgagtgaaggctgcagcagtaccaaaaaactgagaagagttgacctgcaa

SEQ ID NO: 61510 - DNA, 3802 bp, Zea Mays
ttcctcaatcaggtcaagcctcttccttcctcgaatccatgtcatctttgacgaatccaagcactaggaatctaggatcttgcttggtctcggagttggaggcggctctaattcctccgcccgatcctcggttcggtccaaccacacacctccgctgtcagtccctactgctattctctccttcactcctcgccgaaactgccacgcaggagcacgaggacctcgtgagcccaagcttgaacgctcgtttacttttcgaggttggtgcggttctcgcagctgctgatgccgccgccgccgctttgtttaagcagcaaaccaccgcacctgctgtttcttctcggtccgctttgatcaatcgcctccctttctttctcggtgatcgccttttcctgagattgaaattttatttgtcggtggtccggcactttggctccgtctccgtggccggccgaacaggcggcagacgcaggcagcagcagcagcaggcgctggtggtggcgctggccgttggcgttggcgttgtgaacaagaaattcctcgggtttcacgcggctcccgtcgctttggcgttttggtcccttccttttcttcctttccgctagttttctggtgacggggggtttttgcgctctggttcgtgttgggtttataggacggcacggcaccagctgagttcgcttccccatccccatccccatcccgctcccgcttgctccgtgccgtggtctccgagatcggggttcctttccttgccgatttgatccgcccagctggaaaacgaaaatcgctgatgggttttggaaggaaagttgtcatttcttggtgaggtttccgtttctggatcgactagctgatcgatcgtagtatcgtactagccaccatggcgtcgtcgtgcatcccggccggcggcatccggctgccggacctggatatggtcaagaccgcaccgccgccggcgccgcaccgcccggcggcgtcctccacgctctcggaggcgtcccactcgtccccagcctcctcctcgtcggtggcgtcgctgtcgctcaagcgcccgcgcacgcgcacgccgcggaagcggcccagccagacgtacaacgaggcggcggcgttgctcgcgtccatgtacccctccgtattccccgtcgccaggggctggggggcccccgaggcggcgccaccccgcctcctcggcctcgcctccgcgcttggcgacgacccgtcctgctccgacctcctccctccgttccccgttcccggaggccacgccgccttcctcctccgcgacctgccgccgccgccgccgcagagccctgccggcgtcgccaagagctgcccgtcgcccgcggccgtcagcagcgtcttcagcgagttccgcgacccggcaccgtcccctgcaacccctgacgatgctgctgcggcacctgacgagcccggagagctccacttcgacgttgacgacggtttcgacgctgactctattctgtgcggcgtcgaccagagcgcggccgagggcatcgacggcatcatgggtaagctctctatggaaaacagcgggacgtccgtgtcaagctcaagcgtcaactccaacctgcccatatccaagatacacccttacctcaggaaccttatggtcctcgggctgagcttccggcacgatcagaatatcttcaaccaagcgctcaagcgccatagcgtcgatcatgaatggtggatgtgccctgccatacctgtaaaagacattacccctgcgccgccaccttcagtagcaatgtcgaaagtgacagacaagaagactaagaagtcactggggacaatgtacgaggagggggttcctgagtctgtcaatggcgacgctggaactttggcactgccagagacaggattggggctgagcttgaacactgacggggtgctcaaggcgtggtgcggcagaggctctgtgttcgctgatagcaatggctctgacttgccgttgtcttctgctcatgtggtgcttttgaatgggtctcctggtattcctattaaacaccggagagggcttcgccagggggatcctctttctcctatgttgttcgtcttggttatggatgtgctcaacagtttattcttgctggctgaaaacagggggctgctgcatagattggagggcgctaatattcgaaacaggctgtccatttatgctgatgatgtagtcctttttgttcaacctgttgaggaagatcttcactgcgtcagaacaattttggattgctttggctcagcttctgggttggtgtctaacttgcaaaaaagctatgtcattccaattaagtgtaatcagcaggcggtgctggtgggctgcaatattcttcaatgctcttcttcttctttcccttgcacttatttgggattgccaatatcagacaagaagctcagaaggaatgatctcatggtttgggtcgacaaaattgctgatcggcttcctaattggaaggcccggctgcttaatctggctggcaggacagctatagtgcgcttcgtgctttcggccatcccggtataccttctcattgccatgaatattcccaagtgggtgataaattctatagataagattcgaagaggatttctttggaaaggaagaaaggaggtaactggaggttgttgtcttgtctcttgggatataattacaaggcctttgtatcttggtggccttgggatttctaacttactttaccaaagctgggcgctgcagactaaatggttatggttggaaaaaacagatccaaataggccttgggttgggctgaatttccctattcagcagcatgtcaggagattctttgcttcttcaattattaccttggttggagacgggtctactactttattctggacagataggtggttggatgggtcttgtatccaggatcttgcccctgatgtagttgcttgtgttgggaaaagggctagttcttccagaacggtggcccatgctcttgagaactggcagtgggtcagcgacttagaaacccctcttaatttgattgggttgcagcagtacctacagctttgggacactttaagaggagtggtgctgacacaagaggctgatagacatgtgtggattcattcttcctctgggcagttctcttctagatcatgctataaggcttttttcatgggttcgattacctttgaaccttggaagaggttatggaaatcttgggctccacccaaatgcaaattcttcctatggttggcaataaggaataaatgttggacagctgatagacttcagaagagagggctggatcatcctgaggtctgtcctctatgtgatcaggagccggagaatatccaacatctcctttgcagttgcatctttgctagacaattttggcattgcattcttgcaccgttggggcttgctgatctttctcctgtttctattgagatatcttttgctgagtggtggaggaaggtgtgtaagcaagtgcacaaatccaaaagaagaggcattaacagcgtcatcatcttgggggcttggtgtctatggattcatcgtaataaggcagtttttgagggtgtcagtccttccataagcagaattaaaaaagttttcttggaagagttagaatgttggggtctagccggtgccaagcatcttgagggcttaggcctaggtgctgccattattaggtccaggaattttctgggtgagtagtgcaggtgtgtgtggggagcctgttgtgggctttgtactttggtccattttggacctttttcttctcttaatataatgatgcgcagctctcct

SEQ ID NO: 61511 - DNA, 1333 bp, Zea Mays
cgacctccaggaaggaccgcactccttagtccttacacccaccaccaccagacccctgtcgcactcgtgtgccggccggcgacggcgatgatggcgactggccgatcgctcgccggggtatactccgccagagccacccgccccatgcctctacgcgccggcgcacgggcgccctgcgccggtgccgccgcggccgagcctgcggccgagcacgtgcggaggctcgtggcggagttcgacccggcggtcccgctggactccgcggtcacgccgccgagcgggtggtacaccgacccggattttctccagctcgagatcgacagcgtcttcttccgcgggtggcaggctgtcggtcacatatggcaagtgaagaacccaaatgatttcttcacaggaaggctgggaaatgtggaatttgtcgtatgtcgggatgcaaatgggaaacttcatgctttccacaatgtgtgccgacatcatgcttcactccttgcatgtggaagtggtcataagacttgcttccagtgcccttaccatggatggacatatggattggatggcacccttctgaaggctacaagaatatcaggaattaaaaacttcaataagaatgattttggtctcataccaatcaaggtggctacttggggaccttttgtgttgatcagatttgatgatgagtccactgaagataatgtttatgacacagttggaaatgaatggttgggtagtgcttcagatctgttgggtacaaatggcattgacacttcactgccgcatatttgcaggcgagaatatattatcaactgtaactggaaggtcttctgtgacaattacctagacggtggatatcatgttccatacgcacatggggatcttgcatcgggtctgcagcttcaatcctatgaaacacttacatatgaaagagttagtgttcaaagatgtgaaagtgcaccagcagaaccagatgacttcgatcgcttagggacaaaagctctatatgcctttgtttatccaaactttatgatcaacagatatggtccatggatggacactaatctagctgtcccattagattcaaccagatgcaaggtggtatttgattattttcttgacaagtctctgctggatgaccagtgctttatcaagaaaagcctcgaagacagtgagcaagtacagatagaagacattgcactgtgtgagggggttcagcgtggcctggaatcgccggcctacagtgttggaagatacgctccgtctgtggagatggccatgcaccacttccaccgcctcatgcatgctaaccttaggagtactacagcgttgtgtcaaagaa

SEQ ID NO: 61512 - DNA, 888 bp, Zea Mays
tgagttccttgatggaaaacctgtagagacgggatggacatatggattggatggcacccttctgaaggctacaagaatatcaggaattaaaaacttcaataagaatgattttggtctcataccaatcaaggtggctacttggggaccttttgtgttgatcagatttgatgatgagtccactgaagataatgtttatgacacagttggaaatgaatggttgggtagtgcttcagatctgttgggtacaaatggcattgacacttcactgccgcatatttgcaggtcttctgtgacaattacctagacggtggatatcatgttccatacgcacatggggatcttgcatcgggtctgcagcttcaatcctatgaaacacttacatatgaaagagttagtgttcaaagatgtgaaagtgcaccagcagaaccagatgacttcgatcgcttagggacaaaagctctatatgcctttgtttatccaaactttatgatcaacagatatggtccatggatggacactaatctagctgtcccattagattcaaccagatgcaaggtggtatttgattattttcttgacaagtctctgctggatgaccagtgctttatcaagaaaagcctcgaagacagtgagcaagtacagatagaagacattgcactgtgtgagggggttcagcgtggcctggaatcgccggcctacagtgttggaagatacgctccgtctgtggagatggccatgcaccacttccaccgcctcatgcatgctaaccttagacactgcatgaacactgttctctattgcaatcttgtgaattcagccacatttcagttacacaaaaaacatgtttgctggttatgaattttttagatgcataaaatactttctgaa

SEQ ID NO: 61513 - DNA, 1448 bp, Zea Mays
cgacctccaggaaggaccgcactccttagtccttacacccaccaccaccagacccctgtcgcactcgtgtgccggccggcgacggcgatgatggcgactggccgatcgctcgccggggtatactccgccagagccacccgccccatgcctctacgcgccggcgcacgggcgccctgcgccggtgccgccgcggccgagcctgcggccgagcacgtgcggaggctcgtggcggagttcgacccggcggtcccgctggactccgcggtcacgccgccgagcgggtggtacaccgacccggattttctccagctcgagatcgacagcgtcttcttccgcgggtggcaggctgtcggtcacatatggcaagtgaagaacccaaatgatttcttcacaggaagatgaagcaacaggctgggaaatgtggaatttgtcgtatgtcgggatgcaaatgggaaacttcatgctttccacaatgtgtgccgacatcatgcttcactccttgcatgtggaagtggtcataagacttgcttccagtgcccttaccatggatggacatatggattggatggcacccttctgaaggctacaagaatatcaggaattaaaaacttcaataagaatgattttggtctcataccaatcaaggtggctacttggggaccttttgtgttgatcagatttgatgatgagtccactgaagataatgtttatgacacagttggaaatgaatggttgggtagtgcttcagatctgttgggtacaaatggcattgacacttcactgccgcatatttgcaggtcttctgtgacaattacctagacggtggatatcatgttccatacgcacatggggatcttgcatcggacatatgaaagagttagtgttcaaagatgtgaaagtgcaccagcagaaccagatgacttcgatcgcttagggacaaaagctctatatgcctttgtttatccaaactttatgatcaacagatatggtccatggatggacactaatctagctgtcccattagattcaaccagatgcaaggtggtatttgattattttcttgacaagtctctgctggatgaccagtgctttatcaagaaaagcctcgaagacagtgagcaagtacagatagaagacattgcactgtgtgagggggttcagcgtggcctggaatcgccggcctacagtgttggaagatacgctccgtctgtggagatggccatgcaccacttccaccgcctcatgcatgctaaccttagtgagtactgagtaattattctcatggacgcatcttgcaaagttgtacagaaccaaacgctttttttttggcaggacactgcatgaacactgttctctattgcaatcttgtgaattcagccacatttcagttacacaaaaaacatgtttgctggttatgaattttttagatgcataaaatactttctgaa

SEQ ID NO: 61514 - DNA, 1686 bp, Zea Mays
cgacctccaggaaggaccgcactccttagtccttacacccaccaccaccagacccctgtcgcactcgtgtgccggccggcgacggcgatgatggcgactggccgatcgctcgccggggtatactccgccagagccacccgccccatgcctctacgcgccggcgcacgggcgccctgcgccggtgccgccgcggccgagcctgcggccgagcacgtgcggaggctcgtggcggagttcgacccggcggtcccgctggactccgcggtcacgccgccgagcgggtggtacaccgacccggattttctccagctcgagatcgacagcgtcttcttccgcgggtggcaggctgtcggtcacatatggcaagtgaagaacccaaatgatttcttcacaggaaggtgcttacgtcttgtttcgatgcctcagtagttccagttagtagtaattttgctacgcctttcgtacatatataaataattttgctacctcaaaatgcttctaaatatggtgatttatgctggagactgctaaccttcactcatctaataagatgaagcaacaggctgggaaatgtggaatttgtcgtatgtcgggatgcaaatgggaaacttcatgctttccacaatgtgtgccgacatcatgcttcactccttgcatgtggaagtggtcataagacttgcttccagtgcccttaccatggatggacatatggattggatggcacccttctgaaggctacaagaatatcaggaattaaaaacttcaataagaatgattttggtctcataccaatcaaggtggctacttggggaccttttgtgttgatcagatttgatgatgagtccactgaagataatgtttatgacacagttggaaatgaatggttgggtagtgcttcagatctgttgggtacaaatggcattgacacttcactgccgcatatttgcaggcgagaatatattatcaactgtaactggaaggtcttctgtgacaattacctagacggtggatatcatgttccatacgcacatggggatcttgcatcgggtctgcagcttcaatcctatgaaacacttgtattgtccgtaaatcccttttctcgacatatgaaagagttagtgttcaaagatgtgaaagtgcaccagcagaaccagatgacttcgatcgcttagggacaaaagctctatatgcctttgtttatccaaactttatgatcaacagatatggtccatggatggacactaatctagctgtcccattagattcaaccagatgcaaggtggtatttgattattttcttgacaagtctctgctggatgaccagtgctttatcaagaaaagcctcgaagacagtgagcaagtacagatagaagacattgcactgtgtgagggggttcagcgtggcctggaatcgccggcctacagtgttggaagatacgctccgtctgtggagatggccatgcaccacttccaccgcctcatgcatgctaaccttagtgagtactgagtaattattctcatggacgcatcttgcaaagttgtacagaaccaaacgctttttttttggcaggacactgcatgaacactgttctctattgcaatcttgtgaattcagccacatttcagttacacaaaaaacatgtttgctggttatgaattttttagatgcataaaatactttctgaa

SEQ ID NO: 61515 - DNA, 1403 bp, Zea Mays
cgacctccaggaaggaccgcactccttagtccttacacccaccaccaccagacccctgtcgcactcgtgtgccggccggcgacggcgatgatggcgactggccgatcgctcgccggggtatactccgccagagccacccgccccatgcctctacgcgccggcgcacgggcgccctgcgccggtgccgccgcggccgagcctgcggccgagcacgtgcggaggctcgtggcggagttcgacccggcggtcccgctggactccgcggtcacgccgccgagcgggtggtacaccgacccggattttctccagctcgagatcgacagcgtcttcttccgcgggtggcaggctgtcggtcacatatggcaagtgaagaacccaaatgatttcttcacaggaagatgaagcaacaggctgggaaatgtggaatttgtcgtatgtcgggatgcaaatgggaaacttcatgctttccacaatgtgtgccgacatcatgcttcactccttgcatgtggaagtggtcataagacttgcttccagtgcccttaccatggatggacatatggattggatggcacccttctgaaggctacaagaatatcaggaattaaaaacttcaataagaatgattttggtctcataccaatcaaggtggctacttggggaccttttgtgttgatcagatttgatgatgagtccactgaagataatgtttatgacacagttggaaatgaatggttgggtagtgcttcagatctgttgggtacaaatggcattgacacttcactgccgcatatttgcaggtcttctgtgacaattacctagacggtggatatcatgttccatacgcacatggggatcttgcatcgggtctgcagcttcaatcctatgaaacacttacatatgaaagagttagtgttcaaagatgtgaaagtgcaccagcagaaccagatgacttcgatcgcttagggacaaaagctctatatgcctttgtttatccaaactttatgatcaacagatatggtccatggatggacactaatctagctgtcccattagattcaaccagatgcaaggtggtatttgattattttcttgacaagtctctgctggatgaccagtgctttatcaagaaaagcctcgaagacagtgagcaagtacagatagaagacattgcactgtgtgagggggttcagcgtggcctggaatcgccggcctacagtgttggaagatacgctccgtctgtggagatggccatgcaccacttccaccgcctcatgcatgctaaccttagacactgcatgaacactgttctctattgcaatcttgtgaattcagccacatttcagttacacaaaaaacatgtttgctggttatgaattttttagatgcataaaatactttctgaa

SEQ ID NO: 61516 - DNA, 1318 bp, Zea Mays
cgacctccaggaaggaccgcactccttagtccttacacccaccaccaccagacccctgtcgcactcgtgtgccggccggcgacggcgatgatggcgactggccgatcgctcgccggggtatactccgccagagccacccgccccatgcctctacgcgccggcgcacgggcgccctgcgccggtgccgccgcggccgagcctgcggccgagcacgtgcggaggctcgtggcggagttcgacccggcggtcccgctggactccgcggtcacgccgccgagcgggtggtacaccgacccggattttctccagctcgagatcgacagcgtcttcttccgcgggtggcaggctgtcggtcacatatggcaagtgaagaacccaaatgatttcttcacaggaaggctgggaaatgtggaatttgtcgtatgtcgggatgcaaatgggaaacttcatgctttccacaatgtgtgccgacatcatgcttcactccttgcatgtggaagtggtcataagacttgcttccagtgcccttaccatggatggacatatggattggatggcacccttctgaaggctacaagaatatcaggaattaaaaacttcaataagaatgattttggtctcataccaatcaaggtggctacttggggaccttttgtgttgatcagatttgatgatgagtccactgaagataatgtttatgacacagttggaaatgaatggttgggtagtgcttcagatctgttgggtacaaatggcattgacacttcactgccgcatatttgcaggtcttctgtgacaattacctagacggtggatatcatgttccatacgcacatggggatcttgcatcgggtctgcagcttcaatcctatgaaacacttacatatgaaagagttagtgttcaaagatgtgaaagtgcaccagcagaaccagatgacttcgatcgcttagggacaaaagctctatatgcctttgtttatccaaactttatgatcaacagatatggtccatggatggacactaatctagctgtcccattagattcaaccagatgcaaggtggtatttgattattttcttgacaagtctctgctggatgaccagtgctttatcaagaaaagcctcgaagacagtgagcaagtacaggtcgcaggcaatggcatcatgttctctatggggcatattgctaatactatggtcctacagatacatagcaatgtttatgtaggatacatatcatgcagaggccgggagagagtttttaaagactttgtatcaactctgtttggtcattaaaaacaacatattcttaattgtca

SEQ ID NO: 61517 - DNA, 1805 bp, Zea Mays
cgacctccaggaaggaccgcactccttagtccttacacccaccaccaccagacccctgtcgcactcgtgtgccggccggcgacggcgatgatggcgactggccgatcgctcgccggggtatactccgccagagccacccgccccatgcctctacgcgccggcgcacgggcgccctgcgccggtgccgccgcggccgagcctgcggccgagcacgtgcggaggctcgtggcggagttcgacccggcggtcccgctggactccgcggtcacgccgccgagcgggtggtacaccgacccggattttctccagctcgagatcgacagcgtcttcttccgcgggtggcaggctgtcggtcacatatggcaagtgaagaacccaaatgatttcttcacaggaaggtgcttacgtcttgtttcgatgcctcagtagttccagttagtagtaattttgctacgcctttcgtacatatataaataattttgctacctcaaaatgcttctaaatatggtgatttatgctggagactgctaaccttcactcatctaataagatgaagcaacaggctgggaaatgtggaatttgtcgtatgtcgggatgcaaatgggaaacttcatgctttccacaatgtgtgccgacatcatgcttcactccttgcatgtggaagtggtcataagacttgcttccagtgcccttaccatggatggacatatggattggatggcacccttctgaaggctacaagaatatcaggaattaaaaacttcaataagaatgattttggtctcataccaatcaaggtggctacttggggaccttttgtgttgatcagatttgatgatgagtccactgaagataatgtttatgacacagttggaaatgaatggttgggtagtgcttcagatctgttgggtacaaatggcattgacacttcactgccgcatatttgcaggtcttctgtgacaattacctagacggtggatatcatgttccatacgcacatggggatcttgcatcgggtctgcagcttcaatcctatgaaacacttgtattgtccgtaaatcccttttctcggtttgtcttccttcatccatggtcccagttctaatcctagtacagtgtgttatgaattgcactatattcaatatgagggcactaggcccgaatatatatacaccgatacaggaagaacaaggactctgtatatgagacgaatacaacatggacatatgcatagacatctaaccaagactctatatatgagatcgaatgtgaagtaccacgttatttttttctgtagcagactagcagtttcagtcgctgttccttgtaagggtggataattaagcaccatctacgaatttctcgcagacatatgaaagagttagtgttcaaagatgtgaaagtgcaccagcagaaccagatgacttcgatcgcttagggacaaaagctctatatgcctttgtttatccaaactttatgatcaacagatatggtccatggatggacactaatctagctgtcccattagattcaaccagatgcaaggtggtatttgattattttcttgacaagtctctgctggatgaccagtgctttatcaagaaaagcctcgaagacagtgagcaagtacaggtcgcaggcaatggcatcatgttctctatggggcatattgctaatactatggtcctacagatacatagcaatgtttatgtaggatacatatcatgcagaggccgggagagagtttttaaagactttgtatcaactctgtttggtcattaaaaacaacatattcttaattgtca

SEQ ID NO: 61518 - DNA, 3414 bp, Zea Mays
attatacatatattttattatacaaacttaagtattaaaacataatatttaggcacatttatacctttgccttggcaaagaacaataattccagtgtgatgcgtcgatgattacaagattgcgtgaacagtaaaggagtattgtttatctatttataggcacaggacgcagcctgtgagaaattacaatcatgccctttacaaaagattacaattatgactcatacccttatggactaagaagtcatttcatctttaagtcggttcgaaccttcgtcttcagatacgttatagtaccgaagtttcatgagtggtagcttcggcactacgtttaaacggatttaccgaaggtgtttcttcctgcaggaccttcggcgacgaagcatggccccaacaaaaactatatttggatttttactaagctccagaaccttgacgtctttggatgataatgagtggacaaattgctgcaataaatttgataaaacatttacttttgataattcatacgatatggacttgaatgatctaatatttgaattgaagattttacagttgactttaacagagagacaaatgtcagccatggagatttttgagtttgttaaggaagtggacagttatcctaatgttgtcattgcttatcgaatcttgtttacaatgcctgtgaatgccgcatcagcggagagaagtttttcaaagttgaagctactgaagaactatttgaggtcagtaatgtcctaagaaagattaaatggtttggcaacattgtgtatcgagaagcaactgctggatgatattgatactgactatcatcatcgactttgcatctaggagtgttagaagaaacatttttaagtgaatttcatattgtgatgtattatagttacaattgaaatataatcttcttatatttgacgtcaatggggcatcagtttttatctcgcaccaggccaccagattctcagggtcggccctcgcagcgccttagcctttaagaattttagcccgttaagtccacttgattcccctcgctgccaaacaagacctaagtctataacctcgcaccccttctccttctcctccctagtttttttttttttttttttgctattatagcactcatttaagttggcttctctcttctattatcctcaaatctaacttctctacaatagtatttataagttaatatcttctctaaaataggattaagtgtctttttactccttttcttttcttttcttttcttatttttcctagcaatgaatgattgaaatgtctctagcagttttggtttctagagcagcacggaggccattcagaatagcagtgttgtctaggagatctggctaacgattgaatgtagactttgcttgacgctttcgaaactgagagatccaaggtttgagttaaaatcattttggccgatgtggattgtatactgagtctgagcgttgcccaagatatccaagcgagggagttagcctgcaaatcgactaagcatctcaacaagtgatatttttgtaagcagacactgtcctgcatatgaactgtgaagttagttagagttttatcccatctctgagcttccgggtctgaagttcatagcatgtttctagtatagtcttcggtcactcatcaacgcacgccttgaccgatctggaaacccaaactgctaggaacaatttagtcattcagtgctgagaaaaataagaaaagaaaagaaaataaaaagacacttagttttattttagagaagagattaacttataagtactattttagtgaatttagatttgaggacactgaacgagataagccagcttgatataatagaaaaaaaaaactccctcctccgtttcgtcggtctcttttctctctctttctcagaatacagacgacagtcgacagcgtctctttgtctccttttctatctcgggacgagttatatttacacaaaataaatactcgatctcgcgtcgatcggtgatgcggtggccatgggcgtctgaggctcggagccattgatgagagcagcaccgctggctgcggcggccggacgcgatgtccgttgtggcggccgtggggcccggcgccgcggtggcggcgtacgggcacgggcacgggcacgggcagccgctgtgcggcggcggggcgaggaagaggaaggacgtccgggaccatgaggttggattgccgggtagcgacggccgcgcggcggcgcggcgtggggccgggctgttcgtgctggagacggtggaggaggaggaggaggaagaaggggcggacgcggagaggtcgtcgtccgtcggcgcggcgtccgaggacgacgcggaggaggaggaggacggggacggggacgaggtggacagcggcgggacgaggtggacagcagggaggaggaggaggagggagggcggcgcgctcgaggccgccatggacatgggcgccctcgacgacgcgctccccatcaagaggggcctgtccagcttcttctccggcaggtcgcggtcgttcgcgaaccttctggacgcggcgtcggcggtgggcagcgcccgcgacctggcgaagccggagaacccgttcaacaagcggcggcgggtgctccggtgctgctccgtcgtccggagggccgcgtcgaccacctcgctcgccgcgctgccgcccatagccggcgacgacgacaacgacgacgatggccgcagtgtgcctagctgaggaaccggccggggcggccgccgggtacgagtgcaacccaaggaggacgtacggccgggttactacactacagagcaaggcatacagcttgcaagagctgcaagacggatgagagatcctttccctttgtaatatgttttgggatctcatttcatctttcaacaccaagcacggcatatatatatatatatatatacgctagtggtaatgtaggcgttaatctcttcttttagcaggctatataaacgaacactcacgtactccatcgtagctagctagtttatttttcgagcgagtttcatcacattttgtttgatgctctagctgatggtgtttacatattctagtgcattgggctgttatcgtaatggataacagaatggaaggatgcatgcataaccgtactactcatcatgtcatggatgcgtgcgccaagacgacatgtgcctgtgcctgcccagctagcggtgacgtgtaggtgtagcagttccggtacgagacagagagggacggacgagaggaagcggccgtctccgtcccgctcgggtcacgtcacatcacatcacaggtggaagtgggacacgtacggaaatagacgacgtccgccgcgccgcgtatgcatggacgtcgcgtgtcgcgctgcccgatcttatccgcttctgtagtattttgcaattattatcactagcttgcc

SEQ ID NO: 61519 - DNA, 4726 bp, Zea Mays
atggccctggaattcaggtcagctgtttcggtccctttgcatgtgctgccattgttgcgtggttggcatcttgggttccctgttgctcgagttgaagggtgtgggcttggtggaactattggagaggaggaacatatggctaacaatgttgccagagctatgtaccttgatcatggtatcctggctcctgagtgttgcggtgttgccacggtttatctggatgtgtcttatgggtgtgcaacatttttcactgggcctatgcctgctactaaagaaattggatcacaacacagggttttgcacattaatgaagacttaaaagttccagaacaaagcactaagggtgctcgaaggaaaaatgctttagatcccagaaacattgctatgtctcgtccgcttgattttgctgtgcttaattacaaaaatcaaaggcttgcggaacaactggaagtccacaaatttgagttccgtgctcttgagagtagatttaatgatttaaaagagaaacagaggacacataatgagacacttatcctagtagaaaattattgggagcgagtgtttgtagttctctgctcctttcgaaattatatttatgatgacaagagatttacatgcatatctccagaactagctgtttaccaattgatgattgttaaagggcaggctttgtgccggatgctcccacacaagtgggatggtatatgctttcgcctaggagcaggctttttaaatggacttttagaggctggtgccagtgccacagaaagttcaggtttttccaattgtcaactaggaaatgacgtctcttcagaagaatcaacaacaattgatattctgcagaagatgttccttccatcaagtggtccatggcatgcgaataacgagttagcagggaactatcaaaaacaaagagattcgagtgcctggaacagagctgaacagaaacgtctgaaagaggagttgactagtgttgttgccaagttggaagaaagcaaacaaaaactggcagtactgaaagcacagggagacaataagcaagcaacaccgatccttgttcctatgctgggaaagaaaactgcagaaaaggtgggagataaacaaacagaactgcaagatcttgaagctacccacaaggagttaatggaatcgatttcaaagcgtctggaggaaattagaagactgcatacagagagaattggaattttgaacaatttagcgacttttcagaatatactgacggatttcaaaagcattcactcttccaaagcttttcaacttgtcaatgaccaacttcagaagtcacaagcagaactggatggtcaccaaacattgttagagaaattacaggttgacatggatacctttgtttggagagaaaggcaatttaatcaaaaagttgatttggctgaaatctcccagaaggtttctgcatactatgtatctagaattgctgatcttgaaaaggatgtccagaaactatgtaatgaaaagaatatgcttgtgctgaaacttgaaggggctttgagagaacctggtcggaatcaggttatctcagaatttaaagctctggtgtcatcgctaccgagggaaatgggtgctgtgcaaactgaactgtccaaacacaaggatgcttccttacagttgcattctttgcgagcagaagttcattcactttctagtatccgaaccagaaaggaacaagaaattgaagaaacatcaagatctgctcatgctggatctgatataagccaacttcaatctctggtccatgagctgagggaaaatacacaggagcttaaactatttgtggagttgtataagcatgactccgctgattccagacagctgatggaatcgagagacagggaacttgctgaattggctggagtccatgttctcagatattctcttaatgaaagtaaattagagcagcgtgtaattgcagccaatgaagctgaagcaatctctcagcagagactggcaactgccgaagctgaggttgctgaattagggcagaagctagaaacttctaggagaaatctagtgaaacaatctgatatactgaagtctaaacatgaagaatgtgaagcgtacatggtggagatcgagagcattggccatgcctatgaagacataatgtcacaaaatcaacaattgctacagcagattattgaaagagatgatcataataccaaggtatggcgacatggcgttgagattttcagtgggcttttaaaagtgtgttgttgtagcttaggatcactggttaaggagctttttatatttggtgccttaaaataagcaaaagaagaaatgtatggcatggaagccataggaaggattactgccagaccattaagatgtgagagcatgccaaccaaataaaaaaaggttatatattaaaaatacatatattagaagcatactggaatccaaagttggcagtgtttcaacttctcctgactgtagaactagatactcctgatgggtgatggctattatttcgaaccaaactaggaagcaaaacctaatactgagtacatgagtggtgagtctttaagccctggtgaataaacaatggtggtttcctggatttgtagtactttatgacaatggagataggttctttcccaaaggaatttgaagttgaatgctccctctgttccaaaatgtaggttgttttagttttctcctatgtcaaacatttatttttgaccaagttcataggaaatgtattaacatctacataccaaataaatgcacgatcaagaattcatgcgtttttctgtgcccttggtggcttaagacaaaattaaaatgacctacatttttaatgaagtaataatggaaaaggttgacttcctgaaaacgggcatgctattttgcatcttgattttacactgtagcattgtgcaaagaaagagtgcgttgtacttgtaccctgtgctggttcttttttttattgattgcacaggagaactgtgtgccattgtattgaaagagcaaagccaacatcttctatttccctttgttttatcttattttcctttttttgtaacttgtgctagtcatcttgcacttagttttaccaatggcccagagaaagctaatatggattatgcttaattttttttacaaataatctgtttaagatgtcttagcataatgtaatgatatgcttagggcattctaatttagttaattttgttgtgatcatgaagtgagtgtgattttgttggggtttcactggtagtgaagcttgattacttagttaagttagacctaggttgttttgaatgtatgaaagtgtaaaaaccatacctttttttcagtggatgttgacgtagcatctgagttacctaactgctactgcagcttttcatggagggtgttaaagcaaaacagtcacacgatgctttgcatttggaagtgtgctcgttgcaaagaaatttgcagcatgcaagcactttgatggatctgtgcaaccagaaacttatccacctggaggacaagctaagaggttggtcagagcggttgaggagactgtcagaggatggaatgcagcaatctatttcattgggcatttctcaaacaaagcttaccggtatgcatggggaagctccaaagctcgggcaggcattgaatgttctacaagcgaaggttgggagcaatcggctggaagttgctgagctgcttatagaactagagacggagaggtggttcatacacacatttgctttttattctggcaactggtttcttaacacttggtctaacaagttcagtttttcctccaggtttagtaaaaagagattagacgatgatttggatctaatgtcaagcaaagctagttctctaagagagaaggcggataattctcaagtccttcaaaaacttctccatgaggctaaggagtacaggggaatactgaagtgtggtatttgtcatgacaggcagaaagaggttgtgattgccaaatgctaccatctcttctgcaaccagtgcatacagaagtcgcttggtagccgtcagaagagaaggttggcgcctgtgtcgcacacaccagaactgcctggtgctctactgattcccggtatatgtgcagcatctcagaggctacgttaccaaaaggttcttaggtctactgagaagcattcacagttcagtagtagatcacagttgccagagacattttccaacaagcagagatagaggccgagatgtcagggcaaccttattaaatgacgggctctttaaatgacgggctctgggataactgaaaaaaaaatacaagacacgagcacgagcccttcctgagcagcccatctccatacatattccatctccatatatattggtttctaactatatttatggtctagagtcttagaattaatattatttcttaattatatttatagtgtaaagtctcgtagttatatcagtttcttaactgtcttttatatttagaaaaccgaaccaccgtcttagagctatacatgccctcatgtatgtggatggctgcagctgagctgctcaagccaagccggggtcgacgagtacttcgtgaacgaggtgtgccattcgtggtaatggcaccagcttgagcgccttatgtgtcgggttacccggccttttctcgccaccgctctcgctcccaccggtggatggtttctttctgcactgcacccgcgtactttgcacctatttctctggaaaaaag

SEQ ID NO: 61520 - DNA, 3699 bp, Zea Mays
atggccctggaattcaggtcagctgtttcggtccctttgcatgtgctgccattgttgcgtggttggcatcttgggttccctgttgctcgagttgaagggtgtgggcttggtggaactattggagaggaggaacatatggctaacaatgttgccagagctatgtaccttgatcatggtatcctggctcctgagtgttgcggtgttgccacggtttatctggatgtgtcttatgggtgtgcaacatttttcactgggcctatgcctgctactaaagaaattggatcacaacacagggttttgcacattaatgaagacttaaaagttccagaacaaagcactaagggtgctcgaaggaaaaatgctttagatcccagaaacattgctatgtctcgtccgcttgattttgctgtgcttaattacaaaaatcaaaggcttgcggaacaactggaagtccacaaatttgagttccgtgctcttgagagtagatttaatgatttaaaagagaaacagaggacacataatgagacacttatcctagtagaaaattattgggagcgactcgtagcagagctgggtatagtccctgtttgcaaaagtgaatcttcacattcaagctgcagtacaggaaacaacaatatacggaagggtatggaattacgaatatattggatattgcattgttgtagaaccatacatggaaggattctatgatgtagctggctgctgttggcttatacttctatctactaatggattgaagtagtaataatttgaaacattttttatttgaggtgtttgtagttctctgctcctttcgaaattatatttatgatgacaagagatttacatgcatatctccagaactagctgtttaccaattgatgattgttaaagggcaggctttgtgccggatgctcccacacaagtgggatggtatatgctttcgcctaggagcaggctttttaaatggacttttagaggctggtgccagtgccacagaaagttcaggtttttccaattgtcaactaggaaatgacgtctcttcagaagaatcaacaacaattgatattctgcagaagatgttccttccatcaagtggtccatggcatgcgaataacgagttagcagggaactatcaaaaacaaagagattcgagtgcctggaacagagctgaacagaaacgtctgaaagaggagttgactagtgttgttgccaagttggaagaaagcaaacaaaaactggcagtactgaaagcacagggagacaataagcaagcaacaccgatccttgttcctatgctgggaaagaaaactgcagaaaaggtgggagataaacaaacagaactgcaagatcttgaagctacccacaaggagttaatggaatcgatttcaaagcgtctggaggaaattagaagactgcatacagagagaattggaattttgaacaatttagcgacttttcagaatatactgacggatttcaaaagcattcactcttccaaagcttttcaacttgtcaatgaccaacttcagaagtcacaagcagaactggatggtcaccaaacattgttagagaaattacaggttgacatggatacctttgtttggagagaaaggcaatttaatcaaaaagttgatttggctgaaatctcccagaaggtttctgcatactatgtatctagaattgctgatcttgaaaaggatgtccagaaactatgtaatgaaaagaatatgcttgtgctgaaacttgaaggggctttgagagaacctggtcggaatcaggttatctcagaatttaaagctctggtgtcatcgctaccgagggaaatgggtgctgtgcaaactgaactgtccaaacacaaggatgcttccttacagttgcattctttgcgagcagaagttcattcactttctagtatccgaaccagaaaggaacaagaaattgaagaaacatcaagatctgctcatgctggatctgatataagccaacttcaatctctggtccatgagctgagggaaaatacacaggagcttaaactatttgtggagttgtataagcatgactccgctgattccagacagctgatggaatcgagagacagggaacttgctgaattggctggagtccatgttctcagatattctcttaatgaaagtaaattagagcagcgtgtaattgcagccaatgaagctgaagcaatctctcagcagagactggcaactgccgaagctgaggttgctgaattagggcagaagctagaaacttctaggagaaatctagtgaaacaatctgatatactgaagtctaaacatgaagaatgtgaagcgtacatggtggagatcgagagcattggccatgcctatgaagacataatgtcacaaaatcaacaattgctacagcagattattgaaagagatgatcataataccaagcttttcatggagggtgttaaagcaaaacagtcacacgatgctttgcatttggaagtgtgctcgttgcaaagaaatttgcagcatgcaagcactttgatggatctgtgcaaccagaaacttatccacctggaggacaagctaagaggttggtcagagcggttgaggagactgtcagaggatggaatgcagcaatctatttcattgggcatttctcaaacaaagcttaccggtatgcatggggaagctccaaagctcgggcaggcattgaatgttctacaagcgaaggttgggagcaatcggctggaagttgctgagctgcttatagaactagagacggagaggtttagtaaaaagagattagacgatgatttggatctaatgtcaagcaaagctagttctctaagagagaaggcggataattctcaagtccttcaaaaacttctccatgaggctaaggagtacaggggaatactgaagtgtggtatttgtcatgacaggcagaaagaggttgtgattgccaaatgctaccatctcttctgcaaccagtgcatacagaagtcgcttggtagccgtcagaagagaaggttggcgcctgtgtcgcacacaccagaactgcctggtgctctactgattcccggtatatgtgcagcatctcagaggctacgttaccaaaaggttcttaggtctactgagaagcattcacagttcagtagtagatcacagttgccagagacattttccaacaagcagagatagaggccgagatgtcagggcaaccttattaaatgacgggctctttaaatgacgggctctgggataactgaaaaaaaaatacaagacacgagcacgagcccttcctgagcagcccatctccatacatattccatctccatatatattggtttctaactatatttatggtctagagtcttagaattaatattatttcttaattatatttatagtgtaaagtctcgtagttatatcagtttcttaactgtcttttatatttagaaaaccgaaccaccgtcttagagctatacatgccctcatgtatgtggatggctgcagctgagctgctcaagccaagccggggtcgacgagtacttcgtgaacgaggtgtgccattcgtggtaatggcaccagcttgagcgccttatgtgtcgggttacccggccttttctcgccaccgctctcgctcccaccggtggatggtttctttctgcactgcacccgcgtactttgcacctatttctctggaaaaaag

SEQ ID NO: 61521 - DNA, 4510 bp, Zea Mays
atggccctggaattcaggtcagctgtttcggtccctttgcatgtgctgccattgttgcgtggttggcatcttgggttccctgttgctcgagttgaagggtgtgggcttggtggaactattggagaggaggaacatatggctaacaatgttgccagagctatgtaccttgatcatggtatcctggctcctgagtgttgcggtgttgccacggtttatctggatgtgtcttatgggtgtgcaacatttttcactgggcctatgcctgctactaaagaaattggatcacaacacagggttttgcacattaatgaagacttaaaagttccagaacaaagcactaagggtgctcgaaggaaaaatgctttagatcccagaaacattgctatgtctcgtccgcttgattttgctgtgcttaattacaaaaatcaaaggcttgcggaacaactggaagtccacaaatttgagttccgtgctcttgagagtagatttaatgatttaaaagagaaacagaggacacataatgagacacttatcctagtagaaaattattgggagcgagtgtttgtagttctctgctcctttcgaaattatatttatgatgacaagagatttacatgcatatctccagaactagctgtttaccaattgatgattgttaaagggcaggctttgtgccggatgctcccacacaagtgggatggtatatgctttcgcctaggagcaggctttttaaatggacttttagaggctggtgccagtgccacagaaagttcaggtttttccaattgtcaactaggaaatgacgtctcttcagaagaatcaacaacaattgatattctgcagaagatgttccttccatcaagtggtccatggcatgcgaataacgagttagcagggaactatcaaaaacaaagagattcgagtgcctggaacagagctgaacagaaacgtctgaaagaggagttgactagtgttgttgccaagttggaagaaagcaaacaaaaactggcagtactgaaagcacagggagacaataagcaagcaacaccgatccttgttcctatgctgggaaagaaaactgcagaaaaggtgggagataaacaaacagaactgcaagatcttgaagctacccacaaggagttaatggaatcgatttcaaagcgtctggaggaaattagaagactgcatacagagagaattggaattttgaacaatttagcgacttttcagaatatactgacggatttcaaaagcattcactcttccaaagcttttcaacttgtcaatgaccaacttcagaagtcacaagcagaactggatggtcaccaaacattgttagagaaattacaggttgacatggatacctttgtttggagagaaaggcaatttaatcaaaaagttgatttggctgaaatctcccagaaggtttctgcatactatgtatctagaattgctgatcttgaaaaggatgtccagaaactatgtaatgaaaagaatatgcttgtgctgaaacttgaaggggctttgagagaacctggtcggaatcaggttatctcagaatttaaagctctggtgtcatcgctaccgagggaaatgggtgctgtgcaaactgaactgtccaaacacaaggatgcttccttacagttgcattctttgcgagcagaagttcattcactttctagtatccgaaccagaaaggaacaagaaattgaagaaacatcaagatctgctcatgctggatctgatataagccaacttcaatctctggtccatgagctgagggaaaatacacaggagcttaaactatttgtggagttgtataagcatgactccgctgattccagacagctgatggaatcgagagacagggaacttgctgaattggctggagtccatgttctcagatattctcttaatgaaagtaaattagagcagcgtgtaattgcagccaatgaagctgaagcaatctctcagcagagactggcaactgccgaagctgaggttgctgaattagggcagaagctagaaacttctaggagaaatctagtgaaacaatctgatatactgaagtctaaacatgaagaatgtgaagcgtacatggtggagatcgagagcattggccatgcctatgaagacataatgtcacaaaatcaacaattgctacagcagattattgaaagagatgatcataataccaaggtcatgattcaaagaaccaatttgagcaattaatttgttctctccgtgttagcttttatgtcttctgcataattttactttaattctttactcaagaagaggttctgttttccaccaccattaaatcactttgtgtgaattattttttcgttgttactctgactaatgcgtcaaattatttttgatgcatcgacacacattcctatgggctatggctatgctactatccaattcaattcctatcctcctaaaaacaggtgaggaacaatttagaagatggtttggcggaatgaaatgatctaaaggaagaataagtagttagggatattgaggacaagcgatcactattgctagggacatcaggtggggataagggtggtaatggatcgcgatccaaatgctttttcacaaaatggtagggccctaaataaattttagttaaaaatgaatagaaatagggcacgatcctaatccgatcctacccttaaatcttatagtgtaaaatttagagcccattgtcacccctaggtggggatggatggtcaccaacgagttcagcggaaaagggaccacttttctgggctgactggtgtgtctgggtggtcaaagagacttgggttacgggttacttctaagttgaagtacggaactacggatcatgcagttggctcactcttttctgtctgttgttcatagtatttgtcaaaagtgaggccatgttgaccccccctcttttgctaaccaacttttagtgtctcaactgcgctgtgccatgtttgatacagtaccttgtacaaaaatgtcaccttggtggtgtggcatcctaaagttcatgcattcattctgccatccatgttttttgaatttctagtggtgtttcttgttgcagccttttggattttgaatttgctgcatactcaggtatggcgacatggcgttgagattttcagtgggcttttaaaacttttcatggagggtgttaaagcaaaacagtcacacgatgctttgcatttggaagtgtgctcgttgcaaagaaatttgcagcatgcaagcactttgatggatctgtgcaaccagaaacttatccacctggaggacaagctaagaggttggtcagagcggttgaggagactgtcagaggatggaatgcagcaatctatttcattgggcatttctcaaacaaagcttaccggtatgcatggggaagctccaaagctcgggcaggcattgaatgttctacaagcgaaggttgggagcaatcggctggaagttgctgagctgcttatagaactagagacggagaggtggttcatacacacatttgctttttattctggcaactggtttcttaacacttggtctaacaagttcagtttttcctccaggtttagtaaaaagagattagacgatgatttggatctaatgtcaagcaaagctagttctctaagagagaaggcggataattctcaagtccttcaaaaacttctccatgaggctaaggagtacaggggaatactgaagtgtggtatttgtcatgacaggcagaaagaggttgtgattgccaaatgctaccatctcttctgcaaccagtgcatacagaagtcgcttggtagccgtcagaagagaaggttggcgcctgtgtcgcacacaccagaactgcctggtgctctactgattcccggtatatgtgcagcatctcagaggctacgttaccaaaaggttcttaggtctactgagaagcattcacagttcagtagtagatcacagttgccagagacattttccaacaagcagagatagaggccgagatgtcagggcaaccttattaaatgacgggctctttaaatgacgggctctgggataactgaaaaaaaaatacaagacacgagcacgagcccttcctgagcagcccatctccatacatattccatctccatatatattggtttctaactatatttatggtctagagtcttagaattaatattatttcttaattatatttatagtgtaaagtctcgtagttatatcagtttcttaactgtcttttatatttagaaaaccgaaccaccgtcttagagctatacatgccctcatgtatgtggatggctgcagctgagctgctcaagccaagccggggtcgacgagtacttcgtgaacgaggtgtgccattcgtggtaatggcaccagcttgagcgccttatgtgtcgggttacccggccttttctcgccaccgctctcgctcccaccggtggatggtttctttctgcactgcacccgcgtactttgcacctatttctctggaaaaaag

SEQ ID NO: 61522 - DNA, 2945 bp, Zea Mays
tcgctgttgctctctccagtagtcccgttgagtgacctcccctgcgcgacaactagggcgaccgccgccgccccacgcctgctggccaggtcttcggcggaccctttgccgtcgacgggcatccaccacaccagatggtatatgctttcgcctaggagcaggctttttaaatggacttttagaggctggtgccagtgccacagaaagttcaggtttttccaattgtcaactaggaaatgacgtctcttcagaagaatcaacaacaattgatattctgcagaagatgttccttccatcaagtggtccatggcatgcgaataacgagttagcagggaactatcaaaaacaaagagattcgagtgcctggaacagagctgaacagaaacgtctgaaagaggagttgactagtgttgttgccaagttggaagaaagcaaacaaaaactggcagtactgaaagcacagggagacaataagcaagcaacaccgatccttgttcctatgctgggaaagaaaactgcagaaaaggtgggagataaacaaacagaactgcaagatcttgaagctacccacaaggagttaatggaatcgatttcaaagcgtctggaggaaattagaagactgcatacagagagaattggaattttgaacaatttagcgacttttcagaatatactgacggatttcaaaagcattcactcttccaaagcttttcaacttgtcaatgaccaacttcagaagtcacaagcagaactggatggtcaccaaacattgttagagaaattacaggttgacatggatacctttgtttggagagaaaggcaatttaatcaaaaagttgatttggctgaaatctcccagaaggtttctgcatactatgtatctagaattgctgatcttgaaaaggatgtccagaaactatgtaatgaaaagaatatgcttgtgctgaaacttgaaggggctttgagagaacctggtcggaatcaggttatctcagaatttaaagctctggtgtcatcgctaccgagggaaatgggtgctgtgcaaactgaactgtccaaacacaaggatgcttccttacagttgcattctttgcgagcagaagttcattcactttctagtatccgaaccagaaaggaacaagaaattgaagaaacatcaagatctgctcatgctggatctgatataagccaacttcaatctctggtccatgagctgagggaaaatacacaggagcttaaactatttgtggagttgtataagcatgactccgctgattccagacagctgatggaatcgagagacagggaacttgctgaattggctggagtccatgttctcagatattctcttaatgaaagtaaattagagcagcgtgtaattgcagccaatgaagctgaagcaatctctcagcagagactggcaactgccgaagctgaggttgctgaattagggcagaagctagaaacttctaggagaaatctagtgaaacaatctgatatactgaagtctaaacatgaagaatgtgaagcgtacatggtggagatcgagagcattggccatgcctatgaagacataatgtcacaaaatcaacaattgctacagcagattattgaaagagatgatcataataccaaggtatggcgacatggcgttgagattttcagtgggcttttaaaacttttcatggagggtgttaaagcaaaacagtcacacgatgctttgcatttggaagtgtgctcgttgcaaagaaatttgcagcatgcaagcactttgatggatctgtgcaaccagaaacttatccacctggaggacaagctaagaggttggtcagagcggttgaggagactgtcagaggatggaatgcagcaatctatttcattgggcatttctcaaacaaagcttaccggtatgcatggggaagctccaaagctcgggcaggcattgaatgttctacaagcgaaggttgggagcaatcggctggaagttgctgagctgcttatagaactagagacggagaggtttagtaaaaagagattagacgatgatttggatctaatgtcaagcaaagctagttctctaagagagaaggcggataattctcaagtccttcaaaaacttctccatgaggctaaggagtacaggggaatactgaagtgtggtatttgtcatgacaggcagaaagaggttgtgattgccaaatgctaccatctcttctgcaaccagtgcatacagaagtcgcttggtagccgtcagaagagaaggttggcgcctgtgtcgcacacaccagaactgcctggtgctctactgattcccggtatatgtgcagcatctcagaggctacgttaccaaaaggttcttaggtctactgagaagcattcacagttcagtagtagatcacagttgccagagacattttccaacaagcagagatagaggccgagatgtcagggcaaccttattaaatgacgggctctttaaatgacgggctctgggataactgaaaaaaaaatacaagacacgagcacgagcccttcctgagcagcccatctccatacatattccatctccatatatattggtttctaactatatttatggtctagagtcttagaattaatattatttcttaattatatttatagtgtaaagtctcgtagttatatcagtttcttaactgtcttttatatttagaaaaccgaaccaccgtcttagagctatacatgccctcatgtatgtggatggctgcagctgagctgctcaagccaagccggggtcgacgagtacttcgtgaacgaggtgtgccattcgtggtaatggcaccagcttgagcgccttatgtgtcgggttacccggccttttctcgccaccgctctcgctcccaccggtggatggtttctttctgcactgcacccgcgtactttgcacctatttctctggaaaaaag

SEQ ID NO: 61523 - DNA, 3440 bp, Zea Mays
ctggtgttcacagctgttcgctgttgctctctccagtagtcccgttgagtgacctcccctgcgcgacaactagggcgaccgccgccgccccacgcctgctggccaggtcttcggcggaccctttgccgtcgacgggcatccaccacaccaggcactggttgaaaacagattttgttggcgctcctggagttcatacttatgtactttcctttctcaaatcataacatatcttaggcagttaaagcttagctgaatgccaacttgcctccacgtgcaagatcccagaaacattgctatgtctcgtccgcttgattttgctgtgcttaattacaaaaatcaaaggcttgcggaacaactggaagtccacaaatttgagttccgtgctcttgagagtagatttaatgatttaaaagagaaacagaggacacataatgagacacttatcctagtagaaaattattgggagcgagtgtttgtagttctctgctcctttcgaaattatatttatgatgacaagagatttacatgcatatctccagaactagctgtttaccaattgatgattgttaaagggcaggctttgtgccggatgctcccacacaagtgggatggtatatgctttcgcctaggagcaggctttttaaatggacttttagaggctggtgccagtgccacagaaagttcaggtttttccaattgtcaactaggaaatgacgtctcttcagaagaatcaacaacaattgatattctgcagaagatgttccttccatcaagtggtccatggcatgcgaataacgagttagcagggaactatcaaaaacaaagagattcgagtgcctggaacagagctgaacagaaacgtctgaaagaggagttgactagtgttgttgccaagttggaagaaagcaaacaaaaactggcagtactgaaagcacagggagacaataagcaagcaacaccgatccttgttcctatgctgggaaagaaaactgcagaaaaggtgggagataaacaaacagaactgcaagatcttgaagctacccacaaggagttaatggaatcgatttcaaagcgtctggaggaaattagaagactgcatacagagagaattggaattttgaacaatttagcgacttttcagaatatactgacggatttcaaaagcattcactcttccaaagcttttcaacttgtcaatgaccaacttcagaagtcacaagcagaactggatggtcaccaaacattgttagagaaattacaggttgacatggatacctttgtttggagagaaaggcaatttaatcaaaaagttgatttggctgaaatctcccagaaggtttctgcatactatgtatctagaattgctgatcttgaaaaggatgtccagaaactatgtaatgaaaagaatatgcttgtgctgaaacttgaaggggctttgagagaacctggtcggaatcaggttatctcagaatttaaagctctggtgtcatcgctaccgagggaaatgggtgctgtgcaaactgaactgtccaaacacaaggatgcttccttacagttgcattctttgcgagcagaagttcattcactttctagtatccgaaccagaaaggaacaagaaattgaagaaacatcaagatctgctcatgctggatctgatataagccaacttcaatctctggtccatgagctgagggaaaatacacaggagcttaaactatttgtggagttgtataagcatgactccgctgattccagacagctgatggaatcgagagacagggaacttgctgaattggctggagtccatgttctcagatattctcttaatgaaagtaaattagagcagcgtgtaattgcagccaatgaagctgaagcaatctctcagcagagactggcaactgccgaagctgaggttgctgaattagggcagaagctagaaacttctaggagaaatctagtgaaacaatctgatatactgaagtctaaacatgaagaatgtgaagcgtacatggtggagatcgagagcattggccatgcctatgaagacataatgtcacaaaatcaacaattgctacagcagattattgaaagagatgatcataataccaagcttttcatggagggtgttaaagcaaaacagtcacacgatgctttgcatttggaagtgtgctcgttgcaaagaaatttgcagcatgcaagcactttgatggatctgtgcaaccagaaacttatccacctggaggacaagctaagaggttggtcagagcggttgaggagactgtcagaggatggaatgcagcaatctatttcattgggcatttctcaaacaaagcttaccggtatgcatggggaagctccaaagctcgggcaggcattgaatgttctacaagcgaaggttgggagcaatcggctggaagttgctgagctgcttatagaactagagacggagaggtttagtaaaaagagattagacgatgatttggatctaatgtcaagcaaagctagttctctaagagagaaggcggataattctcaagtccttcaaaaacttctccatgaggctaaggagtacaggggaatactgaagtgtggtatttgtcatgacaggcagaaagaggttgtgattgccaaatgctaccatctcttctgcaaccagtgcatacagaagtcgcttggtagccgtcagaagaggtgcccgtcttgtggactaagcttcggtgttaacgatgtgaaacctatctatatatgaaacagaaggttggcgcctgtgtcgcacacaccagaactgcctggtgctctactgattcccggtatatgtgcagcatctcagaggctacgttaccaaaaggttcttaggtctactgagaagcattcacagttcagtagtagatcacagttgccagagacattttccaacaagcagagatagaggccgagatgtcagggcaaccttattaaatgacgggctctttaaatgacgggctctgggataactgaaaaaaaaatacaagacacgagcacgagcccttcctgagcagcccatctccatacatattccatctccatatatattggtttctaactatatttatggtctagagtcttagaattaatattatttcttaattatatttatagtgtaaagtctcgtagttatatcagtttcttaactgtcttttatatttagaaaaccgaaccaccgtcttagagctatacatgccctcatgtatgtggatggctgcagctgagctgctcaagccaagccggggtcgacgagtacttcgtgaacgaggtgtgccattcgtggtaatggcaccagcttgagcgccttatgtgtcgggttacccggccttttctcgccaccgctctcgctcccaccggtggatggtttctttctgcactgcacccgcgtactttgcacctatttctctggaaaaaag

SEQ ID NO: 61524 - DNA, 4086 bp, Zea Mays
ggaatttgccctcctggtgttcacagctgttcgctgttgctctctccagtagtcccgttgagtgacctcccctgcgcgacaactagggcgaccgccgccgccccacgcctgctggccaggtcttcggcggaccctttgccgtcgacgggcatccaccacaccagggttttgcacattaatgaagacttaaaagttccagaacaaagcactaagggtgctcgaaggaaaaatgctttaggttaggcagttaaagcttagctgaatgccaacttgcctccacgtgcaagatcccagaaacattgctatgtctcgtccgcttgattttgctgtgcttaattacaaaaatcaaaggcttgcggaacaactggaagtccacaaatttgagttccgtgctcttgagagtagatttaatgatttaaaagagaaacagaggacacataatgagacacttatcctagtagaaaattattgggagcgactcgtagcagagctgggtatagtccctgtttgcaaaagtgaatcttcacattcaagctgcagtacaggaaacaacaatatacggaaggatggtatatgctttcgcctaggagcaggctttttaaatggacttttagaggctggtgccagtgccacagaaagttcaggtttttccaattgtcaactaggaaatgacgtctcttcagaagaatcaacaacaattgatattctgcagaagatgttccttccatcaagtggtccatggcatgcgaataacgagttagcagggaactatcaaaaacaaagagattcgagtgcctggaacagagctgaacagaaacgtctgaaagaggagttgactagtgttgttgccaagttggaagaaagcaaacaaaaactggcagtactgaaagcacagggagacaataagcaagcaacaccgatccttgttcctatgctgggaaagaaaactgcagaaaaggtgggagataaacaaacagaactgcaagatcttgaagctacccacaaggagttaatggaatcgatttcaaagcgtctggaggaaattagaagactgcatacagagagaattggaattttgaacaatttagcgacttttcagaatatactgacggatttcaaaagcattcactcttccaaagcttttcaacttgtcaatgaccaacttcagaagtcacaagcagaactggatggtcaccaaacattgttagagaaattacaggtggttcctggttgacatggatacctttgtttggagagaaaggcaatttaatcaaaaagttgatttggctgaaatctcccagaaggtttctgcatactatgtatctagaattgctgatcttgaaaaggatgtccagaaactatgtaatgaaaagaatatgcttgtgctgaaacttgaaggggctttgagagaacctggtcggaatcaggttatctcagaatttaaagctctggtgtcatcgctaccgagggaaatgggtgctgtgcaaactgaactgtccaaacacaaggatgcttccttacagttgcattctttgcgagcagaagttcattcactttctagtatccgaaccagaaaggaacaagaaattgaagaaacatcaagatctgctcatgctggatctgatataagccaacttcaatctctggtccatgagctgagggaaaatacacaggagcttaaactatttgtggagttgtataagcatgactccgctgattccagacagctgatggaatcgagagacagggaacttgctgaattggctggagtccatgttctcagatattctcttaatgaaagtaaattagagcagcgtgtaattgcagccaatgaagctgaagcaatctctcagcagagactggcaactgccgaagctgaggttgctgaattagggcagaagctagaaacttctaggagaaatctagtgaaacaatctgatatactgaagtctaaacatgaagaatgtgaagcgtacatggtggagatcgagagcattggccatgcctatgaagacataatgtcacaaaatcaacaattgctacagcagattattgaaagagatgatcataataccaagcttttcatggagggtgttaaagcaaaacagtcacacgatgctttgcatttggaagtgtgctcgttgcaaagaaatttgcagcatgcaagcactttgatggatctgtgcaaccagaaacttatccacctggaggacaagctaagaggttggtcagagcggttgaggagactgtcagaggatggaatgcagcaatctatttcattgggcatttctcaaacaaagcttaccggtatgcatggggaagctccaaagctcgggcaggcattgaatgttctacaagcgaaggttgggagcaatcggctggaagttgctgagctgcttatagaactagagacggagaggtttagtaaaaagagattagacgatgatttggatctaatgtcaagcaaagctagttctctaagagagaaggcggataattctcaagtccttcaaaaacttctccatgaggctaaggagtacaggggaatactgaagtgtggtatttgtcatgacaggcagaaagaggttgtgattgccaaatgctaccatctcttctgcaaccagtgcatacagaagtcgcttggtagccgtcagaagaggtgcccgtcttgtggactaagcttcggtgttaacgatgtgaaacctatctatatatgaaacagaaggttggcgcctgtgtcgcacacaccagaactgcctggtgctctactgattcccggtatatggtaggccgccatggcggcggttcagttggtgatgtagcataagcttctctaggtacattgcacaccccccaaaaaaaaagtaagacgctgcatgtgattgctggtacccgctggcatatatgatgctggtgttacctcaagcgtctctcgcaaagtatgccttgcctttgcccagtctggtagaatagcctgacctcttcaaccattgcttattttttattcattgggagaaaaagacccaacaagtgaggatattgatgcttcccgcaatagtgagcaatgtttatatttgtagctttagttagttccattggtgtagccgacagtaaggatatagtttcatttcattttttatttttcctttttgaaatatactggttagccagtttgtatgtttcaggagattgacaatagtgagattccgttaataaaaaagaagtgagattccagattcatgacttgcttctgtgtgggcttcaaccaggaaagaaaacactgctgtttctaccacagtgagctgtttctgcagatcctgacgagacggtgtgccggccgagcctttagcgagccagcctttccttgccgcaacagggtcgccttcctgactcatgtggtcggcaaccaagacttttctactagcatcagctccagtacatctacgttgccatgcctgtgcagtgcagcatctcagaggctacgttaccaaaaggttcttaggtctactgagaagcattcacagttcagtagtagatcacagttgccagagacattttccaacaagcagagatagaggccgagatgtcagggcaaccttattaaatgacgggctctttaaatgacgggctctgggataactgaaaaaaaaatacaagacacgagcacgagcccttcctgagcagcccatctccatacatattccatctccatatatattggtttctaactatatttatggtctagagtcttagaattaatattatttcttaattatatttatagtgtaaagtctcgtagttatatcagtttcttaactgtcttttatatttagaaaaccgaaccaccgtcttagagctatacatgccctcatgtatgtggatggctgcagctgagctgctcaagccaagccggggtcgacgagtacttcgtgaacgaggtgtgccattcgtggtaatggcaccagcttgagcgccttatgtgtcgggttacccggccttttctcgccaccgctctcgctcccaccggtggatggtttctttctgcactgcacccgcgtactttgcacctatttctctggaaaaaag

SEQ ID NO: 61525 - DNA, 1054 bp, Zea Mays
ggctgtggttgctacaaaagcaaggtttttaccttcgtaagaaaaaaaaagtactaatagtgaggcatggggcccaaaagtttcggcccaacgaggcctcggcctcggcctcggcgacggcgaaccacatccatccaggaaacgaatgaatcagagcaacggacaaccaactccccccctccaccatctacgaacgggggccgggaaaagatcggctacagacagatgaggctctgtctccggcaagcggcggccaccagctcacccctcgcagctaccctccgcggcaagacttctacgagcaccctcgccccccatggccggctcagcttcagccacaccacgtcgctgcagacggcgcccgggcaccgcgggctccgagcagggtgggcggtgcgcgtgctcccgctgacggaggagaacgtggagaaggtgctggacgaggtgcggccgagcctgatggcggacggcggcaacgtggcgctgcacgagatcgacggcctcgtcgtcgtgctcaagctgcagggcgcgtgcggctcctgccccagctccaccatgacgctcaagatgggcatcgagacgcgcctccgcgacaagatccccgacatcctcgaggtcgagcagatcgtcgacaccgagaccggcctcgacctcaccgccgacaacgtcgacaaggtgcttgatgagatcagaccgtacctctccggcactggaggtggaagcctcgagcttctccagattgacggatacgtcgtcaagatccggatcggcggacctgcagccggtgtaatgacagtacgagtagccgtgacacagaaactgagggagaaaataccttccatcttggctgttcagctcacagaatagaaatgcgagagctcacttgtgcatcatcacgacgaaactctggctttcaggcgaatgtgcagtgttcatcagtcttatatttctgtccttacaaacttcgctggagctgaacattgggctttaaaccttcctcaatcattagcttgctgtttttggatcgggcggatggacgagaggtggagcatta

SEQ ID NO: 61526 - DNA, 1679 bp, Zea Mays
atgggcacatccatccacgctgagattcaagccgccctagtagatgacaaaggctcactaatccaaattgacaaagtctatgagctcaaacgctttcgtgttgctccatccagaaactattacaaacctgttgacaacagtatgatgatacaattcactctttacactcaagcaaaggtagtcgaagatccaccacccacctttccaagatacgcctacaaactcacatctttcgaaaatataggcaacaatgttgacaataaaacgtacttgattgatgttctaggaatcttgacagaaattggctctctatatcatgttggttacaacaactcaaacatcatcagagacatatttctcaaggacataaacaatacctctacaaaagtgacgctttggggacaccaagcatctagcttctctgtcgacaacatctgcgatgagaatgacaacaaacctattgtcgtactatttgttggatgccttgctaagcgattcaaaggagaagcatatctaagtgccacgacagcatgtacatggtacttcaacccagacattcctgaagcccaggtgtattacaacaagttgctaaacactaagctacaaatgatacgccctcaagcaactaagaaagaattgcaggcttctcaaacactcaacatcgaagacaagaccattgaagaactacttcagctagatccggatatgttccctgaacaaggtttcaaatgcaccgtcattatatcacgcctcgtacaagatggtagatggtggttcccatcctgtatcaagtgcaacaagtcttcatcccagacatctactgggtaccaatgcacattgtgcaatgggacagaaactgagttcagatataaacttagcttcattgccactgatggaacatccgaagcagaattcttttgctttgatactatagctaaacgaatagtaggaaaatcttgtcaaaccctttttagcacatcaggtgtttctcggggtcctcctccagacctagctgccattgtctccctcaaattcacatttgcagttaccatcaacatgtctgcattctctgtcacaaatcgagtcttttctatcctttctgtcctaacaaatcatggaagacaagcatcgataccatgtgccacacaaaacctttcccaacaacagatgttaacacaagacatcataattgatgtcataaccacacaagaatctccagcaacatcgattgccaaactatccacttctaccaaacaagaaagtgtgccacgacgcagacttacgtattctgagacgctacaggacacaaatgttgatgaacaggtttcagctgagctcaataaagacagcctcacatcacctcctaagaagatcaagagtacacagctaggttctacataccctcacaaccttaatcattagatcatcaacgatctgacgatgttctcatgaaggtactatgacgagaatcatcacttttgggacgaatcatcacttttggagcatgaatgcttttgtgtatatataaccaacctgctgaaactttagcggtgctgtatatatttaacagatctcccgtcgttgaaccgctaatgatgtaatatataagtttgtacaaacctacgaacaagtcggttgactatgcaactaccgtacctgttataattatcacctctgca

SEQ ID NO: 61527 - DNA, 786 bp, Zea Mays
tagggacacaagatacggacgttgatgcatagaatctgcagtaaaaaaagaaaagaaaggaaatagctgttacgcgatgtaccgatcatcataaccattgtaccccgccacgccccgcccatttgaattccttttccgccgttcctcggtaggtgccgccgccgcagtttaaacttatctgtgcataaaaaaaaaaagtagtagcaacagaagcccgccctggtcgtttgaaacaggcctcatcaccctagtttctattttgtatatatttagcacccatccatataggatgttggtgacagtttattttttccttttaattttttttggaatgcgtcttggatttggatgtagcgcacgcagctttacataaaaacctggaaacaaacttcttcccgctcagctcagctctaaaggatttgtttggagacgacctgtgtctctgggcagtgcttcagatataagggcttctgagccgtgcatcacattcacagatgcatgcgttgtctggaaagctacatgccccccatccaacgatccagtggtgcttcaccggcatagcctctggtttcttccacgctatctccattacttcggtcgattggatccatggcgatgctgttcaatttgtttacgatgacaccgctcggagacgttacgaactgagatgagcagggaaggaaggtacgttacgtgttacgtccctctttgacgtttctttttgaccctaccacctgtgctattctattctaaaccaagtacgcttcagaaacgcatgcctggtac

SEQ ID NO: 61528 - DNA, 964 bp, Zea Mays
atttagtgcatgttgtttaggtaggcatcacctaaaaatgctggaattttgtttacatcctcgagggagtgtttagagttgctctatataatcagtatattatctgttggatattatatttatcttttaacggaactctgacaaaatccaatccctcatatgcttctgtggatgtagggacacaagatacggacgttgatgcatagaatctgcagtaaaaaaagaaaagaaaggaaatagctgttacgcgatgtaccgatcatcataaccattgtaccccgccacgccccgcccatttgaattccttttccgccgttcctcggtaggtgccgccgccgcagtttaaacttatctgtgcataaaaaaaaaaagtagtagcaacagaagcccgccctggtcgtttgaaacaggcctcatcaccctagtttctattttgtatatatttagcacccatccatataggatgttggtgacagtttattttttccttttaattttttttggaatgcgtcttggatttggatgtagcgcacgcagctttacataaaaacctggaaacaaacttcttcccgctcagctcagctctaaaggatttgtttggagacgacctgtgtctctgggcagtgcttcagatataagggcttctgagccgtgcatcacattcacagatgcatgcgacagttgtctggaaagctacatgccccccatccaacgatccagtggtgcttcaccggcatagcctctggtttcttccacgctatctccattacttcggtcgattggatccatggcgatgctgttcaatttgtttacgatgacaccgctcggagacgttacgaactgagatgagcagggaaggaaggtacgttacgtgttacgtccctctttgacgtttctttttgaccctaccacctgtgctattctattctaaaccaagtacgcttcagaaacgcatgcctggtac

SEQ ID NO: 61529 - DNA, 2845 bp, Zea Mays
aaccaggaaacgaacgaagggtgcctgcctgcttttggcacccagcttctgaactcaaaagaagaagaagaagaaaaaatcagttgtccccccgccattagctcgacaaaacttcaggtaacagaactggaccatcttggaggagacagaaacagcctgtcaaacacggactggcttagtcaaagccggctttcagacatataatcgcgctcgccgtcgtgcgcacggcagtcggcaggcagtaccggagcagcgtgccaggccccatggacagctcgagcggcatgtgggccgtgctcggccaggcctcgaacgtggcgcagctggtcggcgtggacgcgctcgggctggtgtccatggtcgtgcaggccgcgctggcggcgcgccgccaccgcgacgcgtgccgccgcctggcgcagcacgtggaggtcgtcggcggcctgctgcgggagctggagctcgccgagctgatgcggcgggaggccacgcggcggccgctcgaccagctccgggccgcgctgcggcggtgctacgcgctcgtcacggcgtgccaggactgcgggtacctccgcagcctgctcctcggcgcccggatggccgacgagctccgcgcggcggagaaggaggtcgacttgttcatccgcttagtcccacttatcgccctcgtcgacagcacgcatggtcgcagtggcaagactgccgagggagtaccaggtctactcacgaacggttcaaaccatcatgtcaggttttcaagaagtgtttccgcctccatcaaaatacacattcaacgaactactcaaatctgcagtattgcagaacagccattagcaggtagacagtcgccactgtaagtttcctagttctcagggatgtagaatcaaccaaaataataatagtaaaataaatcaaaactcaaatactaaaatctcgtggttgtgtttttttgcaccaagaaccaccgaactattttggtatgcataactcttaatactctgctgctcacgcttttaaatatactgcaacaggaataatgaataagagtggcatgtcactaatttaatatcttttgtaccatttctgtatgccacacagaattttatactgtatgtatatagaaaaagaaactagcatgagtcatgggaagggtattagctactattgttactaacatatcttttgatacagattacatactgttgcataaagctctacacttaatagttcctttcagagtacaatagtcttccaatatgttggttcagtgatctaccaaagagacttgaacattttcatagcattttttgtttttgtctagccattattcaataagtgttgcgattctacagttaacatgggtaacttagccattattcaggagcactggacttgggagaacataaaaatctggactttgaagaattgttggagctttgcatccgtactcaagagagttgctcaggattcagaagggtcagttacctgatggatccatggtcgccatcaaaaggatggatgaaggtgccacaatgtttgatttcagcagtgaatttctggctgcgaggcttcagcataccaatctaattagacttttggggtggtgtatccatgggaaagaaaggattctagtgtatgagttcatgcacaagggtaccctgcacagtttaatctttgacaaaagaatggggttgttgctagactggtctaaacgaatcgatataatcagaggggtagctgaaggacttctttaccttcacaagcaggccaagttatggattgttcatagggatttgaagctccagaacgtcctattagatcatgacatgaagccaaagcttgctgattttggatcggctagaagtctgagttcagattccgccgaagagtgtacaagcagggttgtggggactagtggttacaaagctcctgagtacacgtctcgaggtgtctattcactgaagacagatgtgttcagcttcggggtggtggttctagtgaccatcagcgggcgagagaacaccgtactggagaagcaaggagactctgttggcgcccttgtacgagatgcctggcagctatggaacgatggaaggctgcatgagcttgtagatccagtgctgggtgacggattcgaacttgctgaggtggtgcagtacgctcaagtggcactgctctgcgcgcaggaggagccagcagatcgtcccaccatgtccgacgtcgtgtcgctcctgaactttgaaagcataggtctgctgccagatcctaagcagccgtctgagctttgtaagggaggtggtggtacttctggtgacaggttgccgacatgtggtagccagtcgagcaggaccatagacatcacaatcacaagttcggctcctgtgtcaactagaactagggtccgcatcattgtggacccagagacctaaaatgtagacataaaccgatattaatatgtaaaagaacatggacaacttttagagctagtttggatacactaattattctctatggtgattggggctatctgagggccaaggggaaaattagtccatttctctctcaattccctccattctccataaaaactcatggatccaaactagcccaaaatgtgatgggccttgggctggttcatgcagaaatgtcaagtgttaggagcacactgtgtgtgatatattacatcattcttacagttcttttttttggctgaacaacagcttggtctccccatttctttccctccccagcttcacgttcaaccattgagtagggccggaagccagggtcccaagctggcagaaggtaatggaggcagactctgtttgaacagcagagtgtcgcttcg

SEQ ID NO: 61530 - DNA, 2661 bp, Zea Mays
aaccaggaaacgaacgaagggtgcctgcctgcttttggcacccagcttctgaactcaaaagaagaagaagaagaaaaaatcagttgtccccccgccattagctcgacaaaacttcaggtaacagaactggaccatcttggaggagacagaaacaggtcgttagcctcactcttagaatttggacttcgtttccagcctcacagctgttctagggttagcctctcttttttttctcccttttaaagtcagcaagtctatcctctcccgtcaacagaaagtttggtcggagaacacacgtgtccgcaaaatgccacacaggagctcccaagtgctcggcctccggcactgtagcgctagcgcagagcgggaggagctggaaaaaaaaacgtggccttcttctctcgccagttcatcggtttctcggaagcctgtcaaacacggactggcttagtcaaagccggctttcagacatataatcgcgctcgccgtcgtgcgcacggcagtcggcaggcagtaccggagcagcgtgccaggccccatggacagctcgagcggcatgtgggccgtgctcggccaggcctcgaacgtggcgcagctggtcggcgtggacgcgctcgggctggtgtccatggtcgtgcaggccgcgctggcggcgcgccgccaccgcgacgcgtgccgccgcctggcgcagcacgtggaggtcgtcggcggcctgctgcgggagctggagctcgccgagctgatgcggcgggaggccacgcggcggccgctcgaccagctccgggccgcgctgcggcggtgctacgcgctcgtcacggcgtgccaggactgcgggtacctccgcagcctgctcctcggcgcccggatggccgacgagctccgcgcggcggagaaggaggtcgacttgttcatccgcttagtcccacttatcgccctcgtcgacagcacgcatggtcgcagtggcaagactgccgagggagtaccaggtctactcacgaacggttcaaaccatcatgtcaggttttcaagaagtgtttccgcctccatcaaaatacacattcaacgaactactcaaatctgcagtattgcagaacagccattagcaggagcactggacttgggagaacataaaaatctggactttgaagaattgttggagctttgcatccgtactcaagagagttgctcaggattcagaaggtttgaattatttcagatcattgacgctacaggcaatttcccggaaagtagaatcatcgggtcgggtggttttgctatagtttacaagggtcagttacctgatggatccatggtcgccatcaaaaggatggatgaaggtgccacaatgtttgatttcagcagtgaatttctggctgcgaggcttcagcataccaatctaattagacttttggggtggtgtatccatgggaaagaaaggattctagtgtatgagttcatgcacaagggtaccctgcacagtttaatctttgacaaaagaatggggttgttgctagactggtctaaacgaatcgatataatcagaggggtagctgaaggacttctttaccttcacaagcaggccaagttatggattgttcatagggatttgaagctccagaacgtcctattagatcatgacatgaagccaaagcttgctgattttggatcggctagaagtctgagttcagattccgccgaagagtgtacaagcagggttgtggggactagtggttacaaagctcctgagtacacgtctcgaggtgtctattcactgaagacagatgtgttcagcttcggggtggtggttctagtgaccatcagcgggcgagagaacaccgtactggagaagcaaggagactctgttggcgcccttgtacgagatgcctggcagctatggaacgatggaaggctgcatgagcttgtagatccagtgctgggtgacggattcgaacttgctgaggtggtgcagtacgctcaagtggcactgctctgcgcgcaggaggagccagcagatcgtcccaccatgtccgacgtcgtgtcgctcctgaactttgaaagcataggtctgctgccagatcctaagcagccgtctgagctttgtaagggaggtggtggtacttctggtgacaggttgccgacatgtggtagccagtcgagcaggaccatagacatcacaatcacaagttcggctcctgtgtcaactagaactagggtccgcatcattgtggacccagagacctaaaatgtagacataaaccgatattaatatgtaaaagaacatggacaacttttagagctagtttggatacactaattattctctatggtgattggggctatctgagggccaaggggaaaattagtccatttctctctcaattccctccattctccataaaaactcatggatccaaactagcccaaaatgtgatgggccttgggctggttcatgcagaaatgtcaagtgttaggagcacactgtgtgtgatatattacatcattcttacagttcttttttttggctgaacaacagcttggtctccccatttctttccctccccagcttcacgttcaaccattgagtagggccggaagccagggtcccaagctggcagaaggtaatggaggcagactctgtttgaacagcagagtgtcgcttcg

SEQ ID NO: 61531 - DNA, 2977 bp, Zea Mays
ccgaaagaaaaccaaaccaaagagcagcaaaactactactgaagaaccaggaaacgaacgaagggtgcctgcctgcttttggcacccagcttctgaactcaaaagaagaagaagaagaaaaaatcagttgtccccccgccattagctcgacaaaacttcaggtaacagaactggaccatcttggaggagacagaaacagcctgtcaaacacggactggcttagtcaaagccggctttcagacatataatcgcgctcgccgtcgtgcgcacggcagtcggcaggcagtaccggagcagcgtgccaggccccatggacagctcgagcggcatgtgggccgtgctcggccaggcctcgaacgtggcgcagctggtcggcgtggacgcgctcgggctggtgtccatggtcgtgcaggccgcgctggcggcgcgccgccaccgcgacgcgtgccgccgcctggcgcagcacgtggaggtcgtcggcggcctgctgcgggagctggagctcgccgagctgatgcggcgggaggccacgcggcggccgctcgaccagctccgggccgcgctgcggcggtgctacgcgctcgtcacggcgtgccaggactgcgggtacctccgcagcctgctcctcggcgcccggatggccgacgagctccgcgcggcggagaaggaggtcgacttgttcatccgcttagtcccacttatcgccctcgtcgacagcacgcatggtcgcagtggcaagactgccgagggagtaccaggtctactcacgaacggttcaaaccatcatgtcaggttttcaagaagtgtttccgcctccatcaaaatacacattcaacgaactactcaaatctgcagtattgcagaacagccattagcaggtagacagtcgccactgtaagtttcctagttctcagggatgtagaatcaaccaaaataataatagtaaaataaatcaaaactcaaatactaaaatctcgtggttgtgtttttttgcaccaagaaccaccgaactattttggtatgcataactcttaatactctgctgctcacgcttttaaatatactgcaacaggaataatgaataagagtggcatgtcactaatttaatatcttttgtaccatttctgtatgccacacagaattttatactgtatgtatatagaaaaagaaactagcatgagtcatgggaagggtattagctactattgttactaacatatcttttgatacagattacatactgttgcataaagctctacacttaatagttcctttcagagtacaatagtcttccaatatgttggttcagtgatctaccaaagagacttgaacattttcatagcattttttgtttttgtctagccattattcaataagtgttgcgattctacagttaacatgggtaacttagccattattcaggagcactggacttgggagaacataaaaatctggactttgaagaattgttggagctttgcatccgtactcaagagagttgctcaggattcagaaggtttgaattatttcagatcattgacgctacaggcaatttcccggaaagtagaatcatcgggtcgggtggttttgctatagtttacaagggtcagttacctgatggatccatggtcgccatcaaaaggatggatgaaggtgccacaatgtttgatttcagcagtgaatttctggctgcgaggcttcagcataccaatctaattagacttttggggtggtgtatccatgggaaagaaaggattctagtgtatgagttcatgcacaagggtaccctgcacagtttaatctttgacaaaagaatggggttgttgctagactggtctaaacgaatcgatataatcagaggggtagctgaaggacttctttaccttcacaagcaggccaagttatggattgttcatagggatttgaagctccagaacgtcctattagatcatgacatgaagccaaagcttgctgattttggatcggctagaagtctgagttcagattccgccgaagagtgtacaagcagggttgtggggactagtggttacaaagctcctgagtacacgtctcgaggtgtctattcactgaagacagatgtgttcagcttcggggtggtggttctagtgaccatcagcgggcgagagaacaccgtactggagaagcaaggagactctgttggcgcccttgtacgagatgcctggcagctatggaacgatggaaggctgcatgagcttgtagatccagtgctgggtgacggattcgaacttgctgaggtggtgcagtacgctcaagtggcactgctctgcgcgcaggaggagccagcagatcgtcccaccatgtccgacgtcgtgtcgctcctgaactttgaaagcataggtctgctgccagatcctaagcagccgtctgagctttgtaagggaggtggtggtacttctggtgacaggttgccgacatgtggtagccagtcgagcaggaccatagacatcacaatcacaagttcggctcctgtgtcaactagaactagggtccgcatcattgtggacccagagacctaaaatgtagacataaaccgatattaatatgtaaaagaacatggacaacttttagagctagtttggatacactaattattctctatggtgattggggctatctgagggccaaggggaaaattagtccatttctctctcaattccctccattctccataaaaactcatggatccaaactagcccaaaatgtgatgggccttgggctggttcatgcagaaatgtcaagtgttaggagcacactgtgtgtgatatattacatcattcttacagttcttttttttggctgaacaacagcttggtctccccatttctttccctccccagcttcacgttcaaccattgagtagggccggaagccagggtcccaagctggcagaaggtaatggaggcagactctgtttgaacagcagagtgtcgcttcg

SEQ ID NO: 61532 - DNA, 892 bp, Zea Mays
cccgtcgctctcttctccaactcgaagatgtcggccgccaccgccctgcttcatcgaggcccaagacccgatctctgtttttgataaagaaaccaaacaacaacctagcagtcttccttcacttctctgcttccgacctcgtagcgaatcagatcggggggctagggttccggtgcgcctctacaactggacgcgaggctaggctgggcatggagggaatcgtcacggcctgaaagaggtcccggccggagacgacgaacggggttgcagccgccgggaagcgctacaaagacacagagtcatttcaaactggtctatcaagcaaatcgaagccttgcaccaagtttttcagtgtggacgcctctctggccggttgcataatcgacaagggtggggtcaacactaagcagagttacaggcgtcaagctatccatccgcgaccacgagtctaaccccaacctaaagaacatcgagctggaaggcaattttgaccagatcaagcaagccagcgacttgttgcgtgatctcatcgcaaccatcagcgcaagcatgccagcgaaaaatccatcttctgctgtggcgccagcaggaggaggccaaggcagtggtccggggggcacgagcagcaactacaagacaaagctgtgcgagaacttcttgaagctatgcgagaacttccaacacgactatacaaagtaaagggatcattgctagattggtctaaaagggtttagcagagggacttgcttgcttacacaagcactccatgttctgcattgtccatagggaccggctccaacaagactctctaaagggtcctgtaccctaaatttagaggacgaggacgtcctctactccccagtggcggagccagcaaccgagtgaagggggg

SEQ ID NO: 61533 - DNA, 831 bp, Zea Mays
cccgtcgctctcttctccaactcgaagatgtcggccgccaccgccctgcttcatcgaggcccaagacccgatctctgtttttgataaagaaaccaaacaacaacctagcagtcttccttcacttctctgcttccgacctcgtagcgaatcagatcggggggctagggttccggtgcgcctctacaactggacgcgaggctaggctgggcatggagggaatcgtcacggcctgaaagaggtcccggccggagacgacgaacggggttgcagccgccgggaagcgctacaaagtgtggacgcctctctggccggttgcataatcgacaagggtggggtcaacactaagcagagttacaggcgtcaagctatccatccgcgaccacgagtctaaccccaacctaaagaacatcgagctggaaggcaattttgaccagatcaagcaagccagcgacttgttgcgtgatctcatcgcaaccatcagcgcaagcatgccagcgaaaaatccatcttctgctgtggcgccagcaggaggaggccaaggcagtggtccggggggcacgagcagcaactacaagacaaagctgtgcgagaacttcttgaagctatgcgagaacttccaacacgactatacaaagtaaagggatcattgctagattggtctaaaagggtttagcagagggacttgcttgcttacacaagcactccatgttctgcattgtccatagggaccggctccaacaagactctctaaagggtcctgtaccctaaatttagaggacgaggacgtcctctactccccagtggcggagccagcaaccgagtgaagggggg

SEQ ID NO: 61534 - DNA, 698 bp, Zea Mays
gtcgctctcttctccaactcgaagatgtcggccgccaccgccctgcttcatcgaggcccaagacccgatctctgtttttgataaagaaaccaaacaacaacctagcagtcttccttcacttctctgcttccgacctcgtagcgaatcagatcggggggctagggttccggtgcgcctctacaactggacgcgaggctaggctgggcatggagggaatcgtcacggcctgaaagaggtcccggccggagacgacgaacggggttgcagccgccgggaagcgctacaaagacacagagtcatttcaaactggtctatcaagcaaatcgaagccttgcaccaagtttttcagatcagtgtggacgcctctctggccggttgcataatcgacaagggtggggtcaacactaagcagagttacaggcgtcaagctatccatccgcgaccacgagtctaaccccaacctaaagaacatcgagctggaaggcaattttgaccagatcaagcaagccagcgacttgttgcgtgatctcatcgcaaccatcagcgcaagcatgccagcgaaaaatccatcttctgctgtggcgccagcaggaggaggccaaggcagtggtccggggggcacgagcagcaactacaagacaaagctgtgcgagaacttcttgaagctatgcgagaacttccaacacgactatgtatga

SEQ ID NO: 61535 - DNA, 659 bp, Zea Mays
cccgtcgctctcttctccaactcgaagatgtcggccgccaccgccctgcttcatcgaggcccaagacccgatctctgtttttgataaagaaaccaaacaacaacctagcagtcttccttcacttctctgcttccgacctcgtagcgaatcagatcggggggctagggttccggtgcgcctctacaactggacgcgaggctaggctgggcatggagggaatcgtcacggcctgaaagaggtcccggccggagacgacgaacggggttgcagccgccgggaagcgctacaaagacacagagtcatttcaaactggtctatcaagcaaatcgaagccttgcaccaagtttttcagggtggggtcaacactaagcagagttacaggcgtcaagctatccatccgcgaccacgagtctaaccccaacctaaagaacatcgagctggaaggcaattttgaccagatcaagcaagccagcgacttgttgcgtgatctcatcgcaaccatcagcgcaagcatgccagcgaaaaatccatcttctgctgtggcgccagcaggaggaggccaaggcagtggtccggggggcacgagcagcaactacaagacaaagctgtgcgagaacttcttgaagctatgcgagaacttccaacacgactatgtatga

SEQ ID NO: 61536 - DNA, 5523 bp, Zea Mays
atccatcatcaatccgtaccacatagatgcatatataggtcatggatggatacaatcccaagcaaagaatacaattacagaacaagaccaagtaagactagactaaatttatatagaaaaaaatactaatatttatcataataactacatctgccacgagacatattcttattacacatttatgtaaagccatatatattgataatagttttttttacacttttggcccaaaattaaaacaacttgagtttgagtggacataaaattgtgtgctatttttttttttggtggacagagacactacgccgtagggccgaggcaaacagcgacgcagacgtacacatcgcccgacgctctccaacgcaccaaaagtaaacggggggcacagccgtgcccactcacccacacccacccaccccggccgcgccagcgccattatcctcttcctcacctcctcctccatccagttgctcccctcaatcagccacagactacgcgcgcattgaccacgacgttaatgatatcttcgtcttcgatgcaccagccacttcctccagtccagaacacaacacacaagcgcccactgcaaaaacgcgaatcttcgcccgttgctgtcgcctcctttttcttgtcccagttctgcagaaaccgtcccagaaaaggggctcacaactgccaggagaacgatgcaatgaacattgcaaagaaatggagcggtgtcattttttgtcaaagaacaacaaacacaataatatatatatatatatatatatatatatatatatatatatatatatatatatatatatgtatatgtatatattttgacagtcaagtgacttcttctcaaggtttacatgttccatgcacagccatgcccggagcagaaactttcatttggcattaggttggtgaaagaagcatggttcggtttcttaccagttaagactagagtagcgtaattgactcagaagatatatgcacgaataggtgcaactatatctcagcatggtgcaatattcaagaccaacctgggctcctccaaaaaaattaaaaaaaaaatattctgtggcaacttccaaagtttgatgacgacctagagaaggatatcaactaagaaggcttcgtacagggaagttggacttttgcacgtagagtagtttgtagcgaccccaagcaaaacgtcaaacatgtgacccgggaggcaagaaaagtatttctgattttcttcccccctttcctctctggagcgtgtattgaacagagagagagagagagagagagagagagagattgctggaggcaaacgtggtgtaagtaactgacctggatggttctgcaacatatacctttgccattctccctcggggaacaagacgaagaagaaagatcaacgccacctgagactcagagagagcaaacagcttcttcttctcctgcccccaatactgtcgtagggaaaggaaaaaaaaaacctctggttctttagctagccacggcagcccagaatccaaaccgagcgtctctgcgagcggcaggacgtttcatctttcatgagagcgaatcatgcagccactgaatttgctacgcagcagcagtacagcctccaagttacccgcgcctttctttggtactgcctcggtcgtcctcgtgctcctctcctgcgcgcgcctcgccagctcctgcacagagcgagagaagagctcgctcatcgacttccgggacggtctctcgcgggagggcaatggcggcctcaacacgtcgtgggccagcgccacggactgctgccagtgggaaggaataacctgccgcggcggcgacggcgtggtcactgacgtctcgctgccttcgaaaggcctcagggggaggatcccggcgtccctcggcaaccttacggggctgctgcgcctcaacctgtcctgcaactcactctacggcgaccttccggcggaactggtgctctccggcagcatcgtcgtcctggatgtcagcttcaaccgcctatccggccctctgcaggagcgtcagtccccagtttctggcctccctctcgaggtactgaatatctcaagcaacttctttacaggacagctaccatccacaacgctgcaagcgatgaatagtctcgtcgctcttaatgcaagcaacaacagctttacgggacccctgccgtcttctatctgcatccacgcaccatcgcttgccacaattgacctttgcttaaatgacttcagtgggcctgtttcctcagagtttggcagttgctccaagctgacagtactcaaggctggccacaacaaccttaccggatctctaccccacgaactgttcaatgctacctcactggagcacctctcttttccaaacaataatctgcagggggtgcttgatggttccggcctagccaaactcagcaatcttgttttccttgaccttggatcgaatgggctcgaacgagagctgccagattctattgggcagctggggagattggaggagctccacttggacaacaacctgatgacaggagagctgccatcgaccctaagtaactgcaggagtctcaagtacatcaccctcagaaacaatagcttcatgggagatcttagcagagttaacttcacccagatggatctgaggactgcggatttttctctgaacaaattcaacggaacaattcctgaaagcatatatgcatgcagcaatctagttgctttgcggttggcttacaacaattttcatggccagttctcaccaagaatagccaatctcagatccctctccttcctttcagttaccagcaactcgtttacaaatatcacagatgcacttcagaacctcaacagatgcaagaaccttacctccctgctaattggaagcaacttcaaaggtgagaccataccgcaggatgcagcaattgatggttttgagaatctccgggccctaaccatagacctatgtccattggttgggaaaatccctatttggttatcaaaactcacaaaactggagatattagatctatcatacaatcaccttactggaacaataccatcctggattaacaggctggaactcctcttctttctggacatatcaagtaacaggctcacaggggatatcccacctgaattgatggagatgccaatgctacaatctgagaagaatgctgccaagttggacccgaagttccttgagttacctgtattttggacacaatcacggcaataccgtttgctcaatgctttccccaatgtattgaatctatgtaacaatagcttgacaggcataattccccaagggattggtcagttgaaagtgctcaatgtcctcaactttagcaccaacagcttgtctggagaaataccgcaacaaatttgcaacctcacaaacctgcaaactctagacttgtcaaataaccagctcacaggtggactcccatctgcactgagtaatcttcacttcctttcttggttcaatgtgtctaacaacgacctagaagggccagttccaagtggaggacagtttaatacctttacaaattctagctacattgggaattccaagttatgtgctcctatgctcagtgtccattgcggctcagtagaagaacctccagacgtaatgaaaagaaggcacaagaagacggtcttggcagttgccttaagtgtgttctttggaggttttgccatccttttctcgctgggacgacttattttgtccatcagaagcacaaaatccgctgacagaaataagagcagcaacaacagggacattgaaacagcttcattcaactctgtttcagagcacctgcgtgatatgataaagggaagcattttagtgatggtacctcgaggcaagggtcaaccaaacaatctcacattcaatgatatcttgaaggccacaaataattttgatcagcagaacattattggttgtggaggtaatggtctagtctataaagctgagctaccttgtggatccaagcttgcgatcaagaaactcaatggtgaaatgtgtctgatggaaagagaattcacagcagaggtcgaagcactctctatggcacaacatgagaatcttgtgccactatggggttattgtatccagggaaactcgaggctcctcatatattctttcatggagaacgggagccttgatgattggcttcacaacaaggacaatgccgactcatttcttgattggccaacaaggctcaagattgcaaaaggagcaggccggggcctttcttatatccacaacacctgcaaccctagcattgttcaccgtgacgtcaagtccagcaacatcttacttgacagagaattcaatgcttacgtcgccgattttggccttgcaagactgatccttccttacaacacacatgtcacgactgagctggtaggcactctgggttacattcctcccgagtatggccaggcctgggtggccacgctgagaggtgatatatatagcttcggagtggtcttgcttgagctgctcacagggaagaggccagtccaggttttgaccaagtccaaagaacttgtccaatgggtacgagagatgaggtcccaaggaaaggacattgaggtcttggatcctgctctcagaggaagaggacatgacgagcaaatgctgaatgtgcttgaagtagcatgtaagtgcatcaaccacaatcctggcttgaggccaaccatccaagaggtggtgtactgcctggagaccatagttgagccgctacatgtgcaggagcaggtgcatgtgtagttaaaggagaacatattgtaggtggcaatcttgtactctaccagactaggtgtaacttcagtaaaggaagagtttctaacaaagagcgcagtagtgtacatttctgaaagaaaagtctcgctgtcatgaggccctgtatacggttttccttattccttccgtggaaatattgcacctcctagctcaaacaactgaacatggaaagtgcataaaaagagcactgggatcttgcttagtatgcctacgtttctatcctagcgaagttgtacagttgcgtatgtaaatctgtgaaaagaaaaggcttatgtatataattttccctcttcttatctaaaacctatagcactcaagttcaattgcaggaacagtgaaagcatgttgaggtatcaattaattcacgaacatttctggaaccgtgaaacatgtacagatccccgagttaaaaaatatggatagcatagttgaggaagaagggtggacttcactgttcttttttttaatctaggaaggtgacacgatatgaagtaccattgtccagaacttaggttgtctccagcaagagacgctaaagcgtccgctaccctatatatagcatttttcgtcgctcgctacggctccaacaagaaacggtaaacgatccgctaaaatatagcgtctgtccggccaccgctaaatatagtgttttgctgttcacccgctatccatcggcgcgcatgggtgtcctcgtctccgagcaacgtccgtgcagttgag

SEQ ID NO: 61537 - DNA, 1088 bp, Zea Mays
cggggaacgctagcgcgccaaccaaaccgtggcggggggcaacgtctccagccagagaaaccggagcgacccaaccaaccacccacccgcggccatccccaaccaagcgagcacggtgcacggctacaccggggcagacggacgggaccggaggagaaaccgaagcacaaaagaaaaagaccaaaaaaccaagcagaaactagggtgggggagccctgagcaggggaggaaaaataaactagtggccaaaccctagcccgccgagctcccgcgtgcgctctccgccgcccgcctactcctctctgtccgcgatgcgccgggcgaagccgcagcagccctcgccgtcgcccgagatccggtaccgcggcgtgcggaggcggccgtcggggcgctacgccgccgagatccgggacccggccaagaagaccccgatctggctcggcaccttcgactccgccgaggccgccgcgcgcgcctacgacgccgccgcccgatccctccgtgggcccaccgcccgcaccaacttccccggcgccgcggcttccgcgccgcggcacagggcccgctccgcctccgcctccgccgccgccgcagcccccgcggcggtgccggccacgtctagccacagcagcaccgtcgagtcgtggagcggcggcgcgccccgcgtcgccgccccgccgcggagcgccgccgcgcccatggaggaggacgacgacgaggactgccacagctactgcggatcctcgtcgtccgtgctctgcgaagacgcccgcggggacgacgacgacgacgcggcggcgtcccacgcgcccctgccgttcgatctgaacctgccgccgccgatcgacgcggctgctgaggccgatcagatgggtgcccgctacgacacgctactccacctctagctcgcgacgacggccaggaattagaggaaggaatcgagaccgtctgtccttcttcggctgctgatccggtggtgttctatcgctagatggataattcttgcctttttcccccttcttttcttctgctacttttttttaaaaaagcgacagcccgaatttgcattaacaagtacattacataca

SEQ ID NO: 61538 - DNA, 1957 bp, Zea Mays
cggggaacgctagcgcgccaaccaaaccgtggcggggggcaacgtctccagccagagaaaccggagcgacccaaccaaccacccacccgcggccatccccaaccaagcgagcacggtgcacggctacaccggggcagacggacgggaccggaggagaaaccgaagcacaaaagaaaaagaccaaaaaaccaagcagaaactagggtgggggagccctgagcaggggaggaaaaataaactagtggccaaaccctagcccgccgagctcccgcgtgcgctctccgccgcccgcctactcctctctgtccgcgatgcgccgggcgaagccgcagcagccctcgccgtcgcccgagatccggtaccgcggcgtgcggaggcggccgtcggggcgctacgccgccgagatccgggacccggccaagaagaccccgatctggctcggcaccttcgactccgccgaggccgccgcgcgcgcctacgacgccgccgcccgatccctccgtgggcccaccgcccgcaccaacttccccggcgccgcggcttccgcgccgcggcacagggcccgctccgcctccgcctccgccgccgccgcagcccccgcggcggtgccggccacgtctagccacagcagcaccgtcgagtcgtggagcggcggcgcgccccgcgtcgccgccccgccgcggagcgccgccgcgcccatggaggaggacgacgacgaggactgccacagctactgcggatcctcgtcgtccgtgctctgcgaagacgcccgcggggacgacgacgacgacgcggcggcgtcccacgcgcccctgccgttcgatctgaacctgccgccgccgatcgacgcggctgctgaggccgatcagatgggtgcccgctacgacacgctactccacctctagctcgcgacgacggccaggaattagaggaaggaatcgagaccgtctgtccttcttcggctgctgatccggtggtgttctatcgctagatggataattcttgcctttttcccccttcttttcttctgctactttttttgttttcttctcttaccaccacgatgatgatgattcgatattatgtgaataattcagttatgtccatgtaagctgtgaggaaggaaatctgagcttttccttatcttcctatggtgtttctgctggtgctgctctttcatttgttggaaagataatggaagaaatcaagagaaattatttacacagatcatttgctgccgctttaccatgttgcgacttggaggcgcaatgggagtgtcatctgaaaggtcttttcctcattcgggtctgcgactggccccattgatcatacggattcgtgaagacttgcgttgtgaccccgaaacaaattcttgaagcctcttcttggacagcgaatgaatggagttgacgactagaggtgttctgcttaattaattgcttgcccgtcgcgatggttactgtttctttcaggatgactcgttctggtgtgtaagatcaggtgatgtgcagctcccccttcctgtgcatgattagcccccctccttgagtgcaagtgtagacataggatgctatctgtttgtttggttacctcaatttaagctgaactgtacaatgctgatatagtttcctggttctgaagcattctcttcttgattgttcttggttgaaagggaaagcgatgggggttgcacccttctttgttgttcctggttgaaagggggaggaagcgttggatcaaatcaacgggaggaaagttcttgctgtgttgaatactagtatactatactatatacaagtcagttgtggctggaaaaaaacgactaaatcctaaagcgcctgtggacttcagttatggagatttttttttagtggattgttttgctgtgactctatgggaatttagcggagtaaaaaagcgacagcccgaatttgcattaacaagtacattacataca

SEQ ID NO: 61539 - DNA, 2101 bp, Zea Mays
aaaaggctggcggacgggtaggccgacacgccgacgccgacgccgacggcgaccccgacctgccggggaacgctagcgcgccaaccaaaccgtggcggggggcaacgtctccagccagagaaaccggagcgacccaaccaaccacccacccgcggccatccccaaccaagcgagcacggtgcacggctacaccggggcagacggacgggaccggaggagaaaccgaagcacaaaagaaaaagaccaaaaaaccaagcagaaactagggtgggggagccctgagcaggggaggaaaaataaactagtggccaaaccctagcccgccgagctcccgcgtgcgctctccgccgcccgcctactcctctctgtccgcgatgcgccgggcgaagccgcagcagccctcgccgtcgcccgagatccggtaccgcggcgtgcggaggcggccgtcggggcgctacgccgccgagatccgggacccggccaagaagaccccgatctggctcggcaccttcgactccgccgaggccgccgcgcgcgcctacgacgccgccgcccgatccctccgtgggcccaccgcccgcaccaacttccccggcgccgcggcttccgcgccgcggcacagggcccgctccgcctccgcctccgccgccgccgcagcccccgcggcggtgccggccacgtctagccacagcagcaccgtcgagtcgtggagcggcggcgcgccccgcgtcgccgccccgccgcggagcgccgccgcgcccatggaggaggacgacgacgaggactgccacagctactgcggatcctcgtcgtccgtgctctgcgaagacgcccgcggggacgacgacgacgacgcggcggcgtcccacgcgcccctgccgttcgatctgaacctgccgccgccgatcgacgcggctgctgaggccgatcagatgggtgcccgctacgacacgctactccacctctagctcgcgacgacggccaggaattagaggaaggaatcgagaccgtctgtccttcttcggctgctgatccggtggtgttctatcgctagatggataattcttgcctttttcccccttcttttcttctgctactttttttgttttcttctcttaccaccacgatgatgatgattcgatattatgtgaataattcagttatgtccatgtaagctgtgaggaaggaaatctgagcttttccttatcttcctatggtgtttctgctggtgctgctctttcatttgttggaaagataatggaagaaatcaagagaaattatttacacagatcatttgctgccgctttaccatgtcagagttggactgagctgaacatgattaccttataatgcactaacaaaaattcatctactgatgttcaaattgtagtgtcaatgcatgcgttgcaagttatggcagggctgcaacctgcaagagcagtgcgcagtgtcatctgaaagttctattctaatacttggatttggtaacatcaaatctgaactagaatactagatgaaggcaacacttggattagtattcgtctacttatgtgcagatcatagtaccaaagtccactcgcattgcaggttgcgacttggaggcgcaatgggagtgtcatctgaaagcgactggccccattgatcatacggattcgtgaagacttgcgttgtgaccccgaaacaaattcttgaagcctcttcttggacagcgaatgaatggagttgacgactagaggtgttctgcttaattaattgcttgcccgtcgcgatggttactgtttctttcaggatgactcgttctggtgtgtaagatcagggaaagcgatgggggttgcacccttctttgttgttcctggttgaaagggggaggaagcgttggatcaaatcaacgggaggaaagttcttgctgtgttgaatactagtatactatactatatacaagtcagttgtggctggaaaaaaacgactaaatcctaaagcgcctgtggacttcagttatggagatttttttttagtggattgttttgctgtgactctatgggaatttagcggagtaaaaaagcgacagcccgaatttgcattaacaagtacattacataca

SEQ ID NO: 61540 - DNA, 2295 bp, Zea Mays
aaaaggctggcggacgggtaggccgacacgccgacgccgacgccgacggcgaccccgacctgccggggaacgctagcgcgccaaccaaaccgtggcggggggcaacgtctccagccagagaaaccggagcgacccaaccaaccacccacccgcggccatccccaaccaagcgagcacggtgcacggctacaccggggcagacggacgggaccggaggagaaaccgaagcacaaaagaaaaagaccaaaaaaccaagcagaaactagggtgggggagccctgagcaggggaggaaaaataaactagtggccaaaccctagcccgccgagctcccgcgtgcgctctccgccgcccgcctactcctctctgtccgcgatgcgccgggcgaagccgcagcagccctcgccgtcgcccgagatccggtaccgcggcgtgcggaggcggccgtcggggcgctacgccgccgagatccgggacccggccaagaagaccccgatctggctcggcaccttcgactccgccgaggccgccgcgcgcgcctacgacgccgccgcccgatccctccgtgggcccaccgcccgcaccaacttccccggcgccgcggcttccgcgccgcggcacagggcccgctccgcctccgcctccgccgccgccgcagcccccgcggcggtgccggccacgtctagccacagcagcaccgtcgagtcgtggagcggcggcgcgccccgcgtcgccgccccgccgcggagcgccgccgcgcccatggaggaggacgacgacgaggactgccacagctactgcggatcctcgtcgtccgtgctctgcgaagacgcccgcggggacgacgacgacgacgcggcggcgtcccacgcgcccctgccgttcgatctgaacctgccgccgccgatcgacgcggctgctgaggccgatcagatgggtgcccgctacgacacgctactccacctctagctcgcgacgacggccaggaattagaggaaggaatcgagaccgtctgtccttcttcggctgctgatccggtggtgttctatcgctagatggataattcttgcctttttcccccttcttttcttctgctactttttttgttttcttctcttaccaccacgatgatgatgattcgatattatgtgaataattcagttatgtccatgtaagctgtgaggaaggaaatctgagcttttccttatcttcctatggtgtttctgctggtgctgctctttcatttgttggaaagataatggaagaaatcaagagaaattatttacacagatcatttgctgccgctttaccatgtcagagttggactgagctgaacatgattaccttataatgcactaacaaaaattcatctactgatgttcaaattgtagtgtcaatgcatgcgttgcaagttatggcagggctgcaacctgcaagagcagtgcgcagtgtcatctgaaagttctattctaatacttggatttggtaacatcaaatctgaactagaatactagatgaaggcaacacttggattagtattcgtctacttatgtgcagatcatagtaccaaagtccactcgcattgcaggttgcgacttggaggcgcaatgggagtgtcatctgaaaggtcttttcctcattcgggtctgcgactggccccattgatcatacggattcgtgaagacttgcgttgtgaccccgaaacaaattcttgaagcctcttcttggacagcgaatgaatggagttgacgactagaggtgttctgcttaattaattgcttgcccgtcgcgatggttactgtttctttcaggatgactcgttctggtgtgtaagatcaggtgatgtgcagctcccccttcctgtgcatgattagcccccctccttgagtgcaagtgtagacataggatgctatctgtttgtttggttacctcaatttaagctgaactgtacaatgctgatatagtttcctggttctgaagcattctcttcttgattgttcttggttgaaagggaaagcgatgggggttgcacccttctttgttgttcctggttgaaagggggaggaagcgttggatcaaatcaacgggaggaaagttcttgctgtgttgaatactagtatactatactatatacaagtcagttgtggctggaaaaaaacgactaaatcctaaagcgcctgtggacttcagttatggagatttttttttagtggattgttttgctgtgactctatgggaatttagcggagtaaaaaagcgacagcccgaatttgcattaacaagtacattacataca

SEQ ID NO: 61541 - DNA, 2147 bp, Zea Mays
aaaaggctggcggacgggtaggccgacacgccgacgccgacgccgacggcgaccccgacctgccggggaacgctagcgcgccaaccaaaccgtggcggggggcaacgtctccagccagagaaaccggagcgacccaaccaaccacccacccgcggccatccccaaccaagcgagcacggtgcacggctacaccggggcagacggacgggaccggaggagaaaccgaagcacaaaagaaaaagaccaaaaaaccaagcagaaactagggtgggggagccctgagcaggggaggaaaaataaactagtggccaaaccctagcccgccgagctcccgcgtgcgctctccgccgcccgcctactcctctctgtccgcgatgcgccgggcgaagccgcagcagccctcgccgtcgcccgagatccggtaccgcggcgtgcggaggcggccgtcggggcgctacgccgccgagatccgggacccggccaagaagaccccgatctggctcggcaccttcgactccgccgaggccgccgcgcgcgcctacgacgccgccgcccgatccctccgtgggcccaccgcccgcaccaacttccccggcgccgcggcttccgcgccgcggcacagggcccgctccgcctccgcctccgccgccgccgcagcccccgcggcggtgccggccacgtctagccacagcagcaccgtcgagtcgtggagcggcggcgcgccccgcgtcgccgccccgccgcggagcgccgccgcgcccatggaggaggacgacgacgaggactgccacagctactgcggatcctcgtcgtccgtgctctgcgaagacgcccgcggggacgacgacgacgacgcggcggcgtcccacgcgcccctgccgttcgatctgaacctgccgccgccgatcgacgcggctgctgaggccgatcagatgggtgcccgctacgacacgctactccacctctagctcgcgacgacggccaggaattagaggaaggaatcgagaccgtctgtccttcttcggctgctgatccggtggtgttctatcgctagatggataattcttgcctttttcccccttcttttcttctgctactttttttgttttcttctcttaccaccacgatgatgatgattcgatattatgtgaataattcagttatgtccatgtaagctgtgaggaaggaaatctgagcttttccttatcttcctatggtgtttctgctggtgctgctctttcatttgttggaaagataatggaagaaatcaagagaaattatttacacagatcatttgctgccgctttaccatgtcagagttggactgagctgaacatgattaccttataatgcactaacaaaaattcatctactgatgttcaaattgtagtgtcaatgcatgcgttgcaagttatggcagggctgcaacctgcaagagcagtgcgcagtgtcatctgaaagttctattctaatacttggatttggtaacatcaaatctgaactagaatactagatgaaggcaacacttggattagtattcgtctacttatgtgcagatcatagtaccaaagtccactcgcattgcaggttgcgacttggaggcgcaatgggagtgtcatctgaaaggtcttttcctcattcgggtctggtaaaatcatctcaatattctaagcgactggccccattgatcatacggattcgtgaagacttgcgttgtgaccccgaaacaaattcttgaagcctcttcttggacagcgaatgaatggagttgacgactagaggtgttctgcttaattaattgcttgcccgtcgcgatggttactgtttctttcaggatgactcgttctggtgtgtaagatcagggaaagcgatgggggttgcacccttctttgttgttcctggttgaaagggggaggaagcgttggatcaaatcaacgggaggaaagttcttgctgtgttgaatactagtatactatactatatacaagtcagttgtggctggaaaaaaacgactaaatcctaaagcgcctgtggacttcagttatggagatttttttttagtggattgttttgctgtgactctatgggaatttagcggagtaaaaaagcgacagcccgaatttgcattaacaagtacattacataca

SEQ ID NO: 61542 - DNA, 2174 bp, Zea Mays
gaaaaggctggcggacgggtaggccgacacgccgacgccgacgccgacggcgaccccgacctgccggggaacgctagcgcgccaaccaaaccgtggcggggggcaacgtctccagccagagaaaccggagcgacccaaccaaccacccacccgcggccatccccaaccaagcgagcacggtgcacggctacaccggggcagacggacgggaccggaggagaaaccgaagcacaaaagaaaaagaccaaaaaaccaagcagaaactagggtgggggagccctgagcaggggaggaaaaataaactagtggccaaaccctagcccgccgagctcccgcgtgcgctctccgccgcccgcctactcctctctgtccgcgatgcgccgggcgaagccgcagcagccctcgccgtcgcccgagatccggtaccgcggcgtgcggaggcggccgtcggggcgctacgccgccgagatccgggacccggccaagaagaccccgatctggctcggcaccttcgactccgccgaggccgccgcgcgcgcctacgacgccgccgcccgatccctccgtgggcccaccgcccgcaccaacttccccggcgccgcggcttccgcgccgcggcacagggcccgctccgcctccgcctccgccgccgccgcagcccccgcggcggtgccggccacgtctagccacagcagcaccgtcgagtcgtggagcggcggcgcgccccgcgtcgccgccccgccgcggagcgccgccgcgcccatggaggaggacgacgacgaggactgccacagctactgcggatcctcgtcgtccgtgctctgcgaagacgcccgcggggacgacgacgacgacgcggcggcgtcccacgcgcccctgccgttcgatctgaacctgccgccgccgatcgacgcggctgctgaggccgatcagatgggtgcccgctacgacacgctactccacctctagctcgcgacgacggccaggaattagaggaaggaatcgagaccgtctgtccttcttcggctgctgatccggtggtgttctatcgctagatggataattcttgcctttttcccccttcttttcttctgctactttttttgttttcttctcttaccaccacgatgatgatgattcgatattatgtgaataattcagttatgtccatgtaagctgtgaggaaggaaatctgagcttttccttatcttcctatggtgtttctgctggtgctgctctttcatttgttggaaagataatggaagaaatcaagagaaattatttacacagatcatttgctgccgctttaccatgtcagagttggactgagctgaacatgattaccttataatgcactaacaaaaattcatctactgatgttcaaattgtagtgtcaatgcatgcgttgcaagttatggcagggctgcaacctgcaagagcagtgcgcagtgtcatctgaaagttctattctaatacttggatttggtaacatcaaatctgaactagaatactagatgaaggcaacacttggattagtattcgtctacttatgtgcagatcatagtaccaaagtccactcgcattgcaggttgcgacttggaggcgcaatgggagtgtcatctgaaagcgcttcttccctcaagctggctgattctaattctgttggttttgctatttcttgtaagcactggattaacagcgactggccccattgatcatacggattcgtgaagacttgcgttgtgaccccgaaacaaattcttgaagcctcttcttggacagcgaatgaatggagttgacgactagaggtgttctgcttaattaattgcttgcccgtcgcgatggttactgtttctttcaggatgactcgttctggtgtgtaagatcagggaaagcgatgggggttgcacccttctttgttgttcctggttgaaagggggaggaagcgttggatcaaatcaacgggaggaaagttcttgctgtgttgaatactagtatactatactatatacaagtcagttgtggctggaaaaaaacgactaaatcctaaagcgcctgtggacttcagttatggagatttttttttagtggattgttttgctgtgactctatgggaatttagcggagtaaaaaagcgacagcccgaatttgcattaacaagtacattacataca

SEQ ID NO: 61543 - DNA, 2119 bp, Zea Mays
gaaaaggctggcggacgggtaggccgacacgccgacgccgacgccgacggcgaccccgacctgccggggaacgctagcgcgccaaccaaaccgtggcggggggcaacgtctccagccagagaaaccggagcgacccaaccaaccacccacccgcggccatccccaaccaagcgagcacggtgcacggctacaccggggcagacggacgggaccggaggagaaaccgaagcacaaaagaaaaagaccaaaaaaccaagcagaaactagggtgggggagccctgagcaggggaggaaaaataaactagtggccaaaccctagcccgccgagctcccgcgtgcgctctccgccgcccgcctactcctctctgtccgcgatgcgccgggcgaagccgcagcagccctcgccgtcgcccgagatccggtaccgcggcgtgcggaggcggccgtcggggcgctacgccgccgagatccgggacccggccaagaagaccccgatctggctcggcaccttcgactccgccgaggccgccgcgcgcgcctacgacgccgccgcccgatccctccgtgggcccaccgcccgcaccaacttccccggcgccgcggcttccgcgccgcggcacagggcccgctccgcctccgcctccgccgccgccgcagcccccgcggcggtgccggccacgtctagccacagcagcaccgtcgagtcgtggagcggcggcgcgccccgcgtcgccgccccgccgcggagcgccgccgcgcccatggaggaggacgacgacgaggactgccacagctactgcggatcctcgtcgtccgtgctctgcgaagacgcccgcggggacgacgacgacgacgcggcggcgtcccacgcgcccctgccgttcgatctgaacctgccgccgccgatcgacgcggctgctgaggccgatcagatgggtgcccgctacgacacgctactccacctctagctcgcgacgacggccaggaattagaggaaggaatcgagaccgtctgtccttcttcggctgctgatccggtggtgttctatcgctagatggataattcttgcctttttcccccttcttttcttctgctactttttttgttttcttctcttaccaccacgatgatgatgattcgatattatgtgaataattcagttatgtccatgtaagctgtgaggaaggaaatctgagcttttccttatcttcctatggtgtttctgctggtgctgctctttcatttgttggaaagataatggaagaaatcaagagaaattatttacacagatcatttgctgccgctttaccatgtcagagttggactgagctgaacatgattaccttataatgcactaacaaaaattcatctactgatgttcaaattgtagtgtcaatgcatgcgttgcaagttatggcagggctgcaacctgcaagagcagtgcgcagtgtcatctgaaagttctattctaatacttggatttggtaacatcaaatctgaactagaatactagatgaaggcaacacttggattagtattcgtctacttatgtgcagatcatagtaccaaagtccactcgcattgcaggttgcgacttggaggcgcaatgggagtgtcatctgaaaggtcttttcctcattcggcgactggccccattgatcatacggattcgtgaagacttgcgttgtgaccccgaaacaaattcttgaagcctcttcttggacagcgaatgaatggagttgacgactagaggtgttctgcttaattaattgcttgcccgtcgcgatggttactgtttctttcaggatgactcgttctggtgtgtaagatcagggaaagcgatgggggttgcacccttctttgttgttcctggttgaaagggggaggaagcgttggatcaaatcaacgggaggaaagttcttgctgtgttgaatactagtatactatactatatacaagtcagttgtggctggaaaaaaacgactaaatcctaaagcgcctgtggacttcagttatggagatttttttttagtggattgttttgctgtgactctatgggaatttagcggagtaaaaaagcgacagcccgaatttgcattaacaagtacattacataca

SEQ ID NO: 61544 - DNA, 2205 bp, Zea Mays
gaaaaggctggcggacgggtaggccgacacgccgacgccgacgccgacggcgaccccgacctgccggggaacgctagcgcgccaaccaaaccgtggcggggggcaacgtctccagccagagaaaccggagcgacccaaccaaccacccacccgcggccatccccaaccaagcgagcacggtgcacggctacaccggggcagacggacgggaccggaggagaaaccgaagcacaaaagaaaaagaccaaaaaaccaagcagaaactagggtgggggagccctgagcaggggaggaaaaataaactagtggccaaaccctagcccgccgagctcccgcgtgcgctctccgccgcccgcctactcctctctgtccgcgatgcgccgggcgaagccgcagcagccctcgccgtcgcccgagatccggtaccgcggcgtgcggaggcggccgtcggggcgctacgccgccgagatccgggacccggccaagaagaccccgatctggctcggcaccttcgactccgccgaggccgccgcgcgcgcctacgacgccgccgcccgatccctccgtgggcccaccgcccgcaccaacttccccggcgccgcggcttccgcgccgcggcacagggcccgctccgcctccgcctccgccgccgccgcagcccccgcggcggtgccggccacgtctagccacagcagcaccgtcgagtcgtggagcggcggcgcgccccgcgtcgccgccccgccgcggagcgccgccgcgcccatggaggaggacgacgacgaggactgccacagctactgcggatcctcgtcgtccgtgctctgcgaagacgcccgcggggacgacgacgacgacgcggcggcgtcccacgcgcccctgccgttcgatctgaacctgccgccgccgatcgacgcggctgctgaggccgatcagatgggtgcccgctacgacacgctactccacctctagctcgcgacgacggccaggaattagaggaaggaatcgagaccgtctgtccttcttcggctgctgatccggtggtgttctatcgctagatggataattcttgcctttttcccccttcttttcttctgctactttttttgttttcttctcttaccaccacgatgatgatgattcgatattatgtgaataattcagttatgtccatgtaagctgtgaggaaggaaatctgagcttttccttatcttcctatggtgtttctgctggtgctgctctttcatttgttggaaagataatggaagaaatcaagagaaattatttacacagatcatttgctgccgctttaccatgtcagagttggactgagctgaacatgattaccttataatgcactaacaaaaattcatctactgatgttcaaattgtagtgtcaatgcatgcgttgcaagttatggcagggctgcaacctgcaagagcagtgcgcagtgtcatctgaaagttctattctaatacttggatttggtaacatcaaatctgaactagaatactagatgaaggcaacacttggattagtattcgtctacttatgtgcagatcatagtaccaaagtccactcgcattgcaggttgcgacttggaggcgcaatgggagtgtcatctgaaagcgcttcttccctcaagctggctgattctaattctgttggttttgctatttcttgtaagcactggattaacagcgactggccccattgatcatacggattcgtgaagacttgcgttgtgaccccgaaacaaattcttgaagcctcttcttggacagcgaatgaatggagttgacgactagaggtgttctgcttaattaattgcttgcccgtcgcgatggttactgtttctttcaggatgactcgttctggtgtgtaagatcagcattctcttcttgattgttcttggttgaaagggaaagcgatgggggttgcacccttctttgttgttcctggttgaaagggggaggaagcgttggatcaaatcaacgggaggaaagttcttgctgtgttgaatactagtatactatactatatacaagtcagttgtggctggaaaaaaacgactaaatcctaaagcgcctgtggacttcagttatggagatttttttttagtggattgttttgctgtgactctatgggaatttagcggagtaaaaaagcgacagcccgaatttgcattaacaagtacattacataca

SEQ ID NO: 61545 - DNA, 1216 bp, Zea Mays
tcctctgatgatatggaccatggctacacgatatctccacaagatactcctcaatttcttcgtgccatttgacattccttttttgtgcttcggaccatggcttcggttcttcatcggcggtgtgctctttacaaagccttagagctgcctctcctgcaaagtctgaacttgcagagatagtcccacaagagaaatcaccaaaagattccattcaaccaatgtcaccgagtccaaggtattctacctcaagatgaagggcgactaccacagtcaggtgcatagaggaaggatgctgcggggagcaccatgaatccctacaaagctgctcgagtttcctctgactgttcaccattattggaagcaggtcaggcagagagccttggaaccgaactcttggagatggtgcctagcagggaagaggagattaagttgaaagaataaagggaggatgctttgtcgacttttgtagttaatgattatgtgagacttcagtttaagggctcaacttttactggttcttggaagtcatttagtagccctaagatttcatcagcattcttagtagtaattgctatagtatcaaatgggattgtggtatgagttgctcgagtactaagtactaacgttgttgtacattgtgaagctaagtgggtaatatcaaaagggattaagatttatgtgtggtgcttactgtatttgtttttattattttattgtgctttgtacatgtaccgtcattcttactctggtgttcttttaatgcaaagtttgacacaatatatttttatacgagagaccgaaggttacttagtattgttttctgtttcttttatcgtctttgcagatctatgtttggatgatgaaaacagtgctactcgatgtgaagtccaccaatactatagtttaaattaagtctaagatcggtgctttagagggaattggtaagagccagcaagcacttttttttgctggaattatggtagcagtcaggtttcagatttctatgagttcggtgaataaaatgagcttatgggtgttgtcaatcttttttaatttcctgaagttatgataaaaatatatagggtacctattcaaacaatatggttgttaaccgccaaatattttttataacaagttatattgtattatgcagtagataaaaaagataatagtttgtgtaattgtttagctaaaacataattatcttgatataaag

SEQ ID NO: 61546 - DNA, 2160 bp, Zea Mays
cttacatagtggcaaaattgctgtttttttgctaaacagttcagggtggagacaaccaacagattttgctgtgaacattaatctttgttagttaggtttacttattcatagagggtaatgtttacatgagaggtttgtttttaaaagtgattctgaaactcagattacaggtgaatactaaattgaaagttgctacagtgaagcttaaaaaaactagagaggaacagaaccaatttgatgaagcaagcaatcagattgtgttgcacctaaaaccaaaggttaagtttttgtaggggtcgtaatgggatctaaaatttaaggatcaaatcagattaggatcatgctctatttttgttcatttttgaaaatcctatataagcatggtgaaagctgagaagagatattctcaacagaaacacctttgccatggaagccatggatttcctataaacaaatagctccagtgagtaaaattataaatgggtagtcataagacgtgtaaacgtacctaaagcagagcatatagttcaggaatattctccacaagtgtctcaaataatcagatccaagcaaccatgagcatgacaaaattaagtattagctactactacatcctgaatctgatgattcagctcaactttcctagattgagactgaaaagctgctagcccagttagttgagactgagatgaacagacgtttgaaggaggacacttacaaaggaaagaagtttaatgcattctgtcacttcttgggctaccaagctaggggagcactgcctgcaaagtttgattgcgattatgcctacgttttggggcatgtgtgctaccacatcatagctgccggattgaacggataacggatacatgactacagtgacaaatcttaagaatccagtgaacaagtggcgatgtggtgcgactcctatttcgtattactactttattcgcttgatgggacgcaaggcttcccatgtggcattggaatgtgctcttcaatcacatccaaacatggtcaaattttcaccattgatccaacctctgctacggcaatttccagcatcggcggtgtgctctttacaaagccttagagctgcctctcctgcaaagtctgaacttgcagagatagtcccacaagagaaatcaccaaaagattccattcaaccaatgtcaccgagtccaaggtattctacctcaagatgaagggcgactaccacaggtgcatagaggaaggatgctgcggggagcaccatgaatccctacaaagctgctcgagtttcctctgactgttcaccattattggaagcaggtcaggcagagagccttggaaccgaactcttggagatggtgcctagcagggaagaggagattaagttgaaagaataaagggaggatgctttgtcgacttttgtagttaatgattatgtgagacttcagtttaagggctcaacttttactggttcttggaagtcatttagtagccctaagatttcatcagcattcttagtagtaattgctatagtatcaaatgggattgtggtatgagttgctcgagtactaagtactaacgttgttgtacattgtgaagctaagtgggtaatatcaaaagggattaagatttatgtgtggtgcttactgtatttgtttttattattttattgtgctttgtacatgtaccgtcattcttactctggtgttcttttaatgcaaagtttgacacaatatatttttatacgagagaccgaaggttacttagtattgttttctgtttcttttatcgtctttgcagatctatgtttggatgatgaaaacagtgctactcgatgtgaagtccaccaatactatagtttaaattaagtctaagatcggtgctttagagggaattggtaagagccagcaagcacttttttttgctggaattatggtagcagtcaggtttcagatttctatgagttcggtgaataaaatgagcttatgggtgttgtcaatcttttttaatttcctgaagttatgataaaaatatatagggtacctattcaaacaatatggttgttaaccgccaaatattttttataacaagttatattgtattatgcagtagataaaaaagataatagtttgtgtaattgtttagctaaaacataattatcttgatataaag

SEQ ID NO: 61547 - DNA, 2390 bp, Zea Mays
taccacccccattgaagtgttgtcgccttttccttgggattttggcagccttttattcccaccatgcactaatttcagataaactaaaggctacaaaaggaagaatctcttatcttccgggtcaccaaaacaaatgaagttagtggtatagaaaagaaatacaacaccccatgatttcccattgaaacaaaaggaagacattcatatccatcattgcaattgcaaaagaaaaaaaatagcaggatgtgcaagctgttccaattgttttttcttttccaattcttagtccatgcaattgcctttatgcttctgcaatctgtctgattgatgattaatcaattaagttttgtaaaaggaattagttgcttagatctctggacttgaggagcaaaggaatcaactcgaggcagaactgaaaaagctactactacatcctgaatctgatgattcagctcaactttcctagattgagactgaaaagctgctagcccagttagttgagactgagatgaacagacgtttgaaggaggacacttacaaaggaaagaagtttaatgcattctgtcacttcttgggctaccaagctaggggagcactgcctgcaaagtttgattgcgattatgcctacgttttggggcatgtgtgctaccacatcatagctgccggattgaacggataacggatacatgactacagtgacaaatcttaagaatccagtgaacaagtggcgatgtggtgcgactcctatttcgtattactactttattcgcttgatgggacgcaaggcttcccatgtggcattggaatgtgctcttcaatcacatccaaacatggtatgttttttccttacttgcatgtgacctgtcacatttttttctcacatggatctggaagagccgcgtgagaggaagctaaagggttctggcttaagctgtatcaggtcaaattttcaccattgatccaacctctgctacggcaatttccagcatcggcggtgtgctctttacaaagccttagagctgcctctcctgcaaagtctgaacttgcagagatagtcccacaagagaaatcaccaaaagattccattcaaccaatgtcaccgagtccaaggtattctacctcaagatgaagggcgactaccacaggtatactgttatcgctagcagatctagaccatgcaagttgtggtttgtagagatcaaaacttaagatctgtgtgtagatatttgtctagacaatgggagtgacaggatgctggtttttagtaaggttggttgcttatctatgaatttgcctgtatgatgcatgatcctgtgctgtctcctgtagtacatggttgaaatataaatttgtgttccatgttttttacccgccccctacacgtatctcttggatatctgatttctactcatgatgatttggcatgtaccttgctgagttcaagtcaggtgcatagaggaaggatgctgcggggagcaccatgaatccctacaaagctgctcgagtttcctctgactgttcaccattattggaagcaggtcaggcagagagccttggaaccgaactcttggagatggtgcctagcagggaagaggagattaagttgaaagaataaagggaggatgctttgtcgacttttgtagttaatgattatgtgagacttcagtttaagggctcaacttttactggttcttggaagtcatttagtagccctaagatttcatcagcattcttagtagtaattgctatagtatcaaatgggattgtggtatgagttgctcgagtactaagtactaacgttgttgtacattgtgaagctaagtgggtaatatcaaaagggattaagatttatgtgtggtgcttactgtatttgtttttattattttattgtgctttgtacatgtaccgtcattcttactctggtgttcttttaatgcaaagtttgacacaatatatttttatacgagagaccgaaggttacttagtattgttttctgtttcttttatcgtctttgcagatctatgtttggatgatgaaaacagtgctactcgatgtgaagtccaccaatactatagtttaaattaagtctaagatcggtgctttagagggaattggtaagagccagcaagcacttttttttgctggaattatggtagcagtcaggtttcagatttctatgagttcggtgaataaaatgagcttatgggtgttgtcaatcttttttaatttcctgaagttatgataaaaatatatagggtacctattcaaacaatatggttgttaaccgccaaatattttttataacaagttatattgtattatgcagtagataaaaaagataatagtttgtgtaattgtttagctaaaacataattatcttgatataaag

SEQ ID NO: 61548 - DNA, 3730 bp, Zea Mays
cgccgcagtcctcgcatccgcgcccgcagccgagcagtcctgccgcgcccgcagtcccgcagcgtcgccgcgctcgcgcttccccgcgacagccgccatgcgccctatctccgccgtgcctacgcctcctcccccgcccgcccgagacccgccaagtttcccttccttacacggcgagatccaccatcggcgcccccttccctggcgagccacagccgtccacgttcctggccaccggcgacctcccttctctagcccttagcggcgagccaacacctcctccccatggctgccctccagaccccagtcccgtccgcgcatccgctccctcatcagcgacgcaccgattctccccgacgtcgcccatggcgtggacagcgacctccctcaccctgcactctggctacaaaaggaagaatctcttatcttccgggtcaccaaaacaaatgaagttagtggtatagaaaaggtaatttttgtgctactagcttgtcatctgcaaaccaccacagtaatttttattagctaaatgatatgtcaatgggttaacaaggatttactctacatccatattgacagaaatacaacaccccatgatttcccattgaaacaaaaggaagacattcatatccatcattgcaattgcaaaagaaaaaaaatagcaggatgtgcaagctgttccaattgttttttcttttccaattcttagtccatgcaattgcctttatgcttctgcaatctgtctgattgatgattaatcaattaagttttgtaaaaggaattagttgcttagatctctggacttgaggagcaaaggaatcaactcgaggcagaactgaaaaaggcaatactattctctctatttccaccttcatgaagatctatcgttcaatatatttcttccaaaatatttcagcaacttacatagtggcaaaattgctgtttttttgctaaacagttcagggtggagacaaccaacagattttgctgtgaacattaatctttgttagttaggtttacttattcatagagggtaatgtttacatgagaggtttgtttttaaaagtgattctgaaactcagattacaggtgaatactaaattgaaagttgctacagtgaagcttaaaaaaactagagaggaacagaaccaatttgatgaagcaagcaatcagattgtgttgcacctaaaaccaaaggttaagtttttgtaggggtcgtaatgggatctaaaatttaaggatcaaatcagattaggatcatgctctatttttgttcatttttgaaaatcctatataagcatggtgaaagctgagaagagatattctcaacagaaacacctttgccatggaagccatggatttcctataaacaaatagctccagtgagtaaaattataaatgggtagtcataagacgtgtaaacgtacctaaagcagagcatatagttcaggaatattctccacaagtgtctcaaataatcagatccaagcaaccatgagcatgacaaaattaagtattagctactactacatcctgaatctgatgattcagctcaactttcctagattgagactgaaaagctgctagcccagttagttgagactgagatgaacagacgtttgaaggaggacacttacaaaggaaagaagtttaatgcattctgtcacttcttgggctaccaagctaggggagcactgcctgcaaagtttgattgcgattatgcctacgttttggggcatgtgtgctaccacatcatagctgccggattgaacggataacggatacatgactacagtgacaaatcttaagaatccagtgaacaagtggcgatgtggtgcgactcctatttcggtaagatttgtgttgatatgcctaatagtttaggaaaagtaagaatgtagtgtctaacccatgtctatccctgcagtctatgatgactgtgaagcgatgatcaagtgattgttttatgtctgttttatatgcaaaaatataatcaagttttaccgaagatgctaccaaaagttttttcttatgaattttaattactgaatctaatttctgatccgccttgtgtctttactctaaatgatagtattactactttattcgcttgatgggacgcaaggcttcccatgtggcattggaatgtgctcttcaatcacatccaaacatggtatgttttttccttacttgcatgtgacctgtcacatttttttctcacatggatctggaagagccgcgtgagaggaagctaaagggttctggcttaagctgtatcaggtcaaattttcaccattgatccaacctctgctacggcaatttccagcatcggcggtgtgctctttacaaagccttagagctgcctctcctgcaaagtctgaacttgcagagatagtcccacaagagaaatcaccaaaagattccattcaaccaatgtcaccgagtccaaggtattctacctcaagatgaagggcgactaccacaggtatactgttatcgctagcagatctagaccatgcaagttgtggtttgtagagatcaaaacttaagatctgtgtgtagatatttgtctagacaatgggagtgacaggatgctggtttttagtaaggttggttgcttatctatgaatttgcctgtatgatgcatgatcctgtgctgtctcctgtagtacatggttgaaatataaatttgtgttccatgttttttacccgccccctacacgtatctcttggatatctgatttctactcatgatgatttggcatgtaccttgctgagttcaagtcaggtgcatagaggaaggatgctgcggggagcaccatgaatccctacaaagctgctcgagtttcctctgactgttcaccattattggaagcaggtcaggcagagagccttggaaccgaactcttggagatggtgcctagcagggaagaggagattaagttgaaagaataaagggaggatgctttgtcgacttttgtagttaatgattatgtgagacttcagtttaagggctcaacttttactggttcttggaagtcatttagtagccctaagatttcatcagcattcttagtagtaattgctatagtatcaaatgggattgtggtatgagttgctcgagtactaagtactaacgttgttgtacattgtgaagctaagtgggtaatatcaaaagggattaagatttatgtgtggtgcttactgtatttgtttttattattttattgtgctttgtacatgtaccgtcattcttactctggtgttcttttaatgcaaagtttgacacaatatatttttatacgagagaccgaaggttacttagtattgttttctgtttcttttatcgtctttgcagatctatgtttggatgatgaaaacagtgctactcgatgtgaagtccaccaatactatagtttaaattaagtctaagatcggtgctttagagggaattggtaagagccagcaagcacttttttttgctggaattatggtagcagtcaggtttcagatttctatgagttcggtgaataaaatgagcttatgggtgttgtcaatcttttttaatttcctgaagttatgataaaaatatatagggtacctattcaaacaatatggttgttaaccgccaaatattttttataacaagttatattgtattatgcagtagataaaaaagataatagtttgtgtaattgtttagctaaaacataattatcttgatataaag

SEQ ID NO: 61549 - DNA, 2063 bp, Zea Mays
cgccgcagtcctcgcatccgcgcccgcagccgagcagtcctgccgcgcccgcagtcccgcagcgtcgccgcgctcgcgcttccccgcgacagccgccatgcgccctatctccgccgtgcctacgcctcctcccccgcccgcccgagacccgccaagtttcccttccttacacggcgagatccaccatcggcgcccccttccctggcgagccacagccgtccacgttcctggccaccggcgacctcccttctctagcccttagcggcgagccaacacctcctccccatggctgccctccagaccccagtcccgtccgcgcatccgctccctcatcagcgacgcaccgattctccccgacgtcgcccatggcgtggacagcgacctccctcaccctgcactctggctacaaaaggaagaatctcttatcttccgggtcaccaaaacaaatgaagttagtggtatagaaaaggaattagttgcttagatctctggacttgaggagcaaaggaatcaactcgaggcagaactgaaaaagctactactacatcctgaatctgatgattcagctcaactttcctagattgagactgaaaagctgctagcccagttagttgagactgagatgaacagacgtttgaaggaggacacttacaaaggaaagaagtttaatgcattctgtcacttcttgggctaccaagctaggggagcactgcctgcaaagtttgattgcgattatgcctacgttttggggcatgtgtgctaccacatcatagctgccggattgaacggataacggatacatgactacagtgacaaatcttaagaatccagtgaacaagtggcgatgtggtgcgactcctatttcgagccgcgtgagaggaagctaaagggttctggcttaagctgtatcaggtcaaattttcaccattgatccaacctctgctacggcaatttccagcatcggcggtgtgctctttacaaagccttagagctgcctctcctgcaaagtctgaacttgcagagatagtcccacaagagaaatcaccaaaagattccattcaaccaatgtcaccgagtccaaggtattctacctcaagatgaagggcgactaccacagtcaggtgcatagaggaaggatgctgcggggagcaccatgaatccctacaaagctgctcgagtttcctctgactgttcaccattattggaagcaggtcaggcagagagccttggaaccgaactcttggagatggtgcctagcagggaagaggagattaagttgaaagaataaagggaggatgctttgtcgacttttgtagttaatgattatgtgagacttcagtttaagggctcaacttttactggttcttggaagtcatttagtagccctaagatttcatcagcattcttagtagtaattgctatagtatcaaatgggattgtggtatgagttgctcgagtactaagtactaacgttgttgtacattgtgaagctaagtgggtaatatcaaaagggattaagatttatgtgtggtgcttactgtatttgtttttattattttattgtgctttgtacatgtaccgtcattcttactctggtgttcttttaatgcaaagtttgacacaatatatttttatacgagagaccgaaggttacttagtattgttttctgtttcttttatcgtctttgcagatctatgtttggatgatgaaaacagtgctactcgatgtgaagtccaccaatactatagtttaaattaagtctaagatcggtgctttagagggaattggtaagagccagcaagcacttttttttgctggaattatggtagcagtcaggtttcagatttctatgagttcggtgaataaaatgagcttatgggtgttgtcaatcttttttaatttcctgaagttatgataaaaatatatagggtacctattcaaacaatatggttgttaaccgccaaatattttttataacaagttatattgtattatgcagtagataaaaaagataatagtttgtgtaattgtttagctaaaacataattatcttgatataaag

SEQ ID NO: 61550 - DNA, 3619 bp, Zea Mays
cgccgcagtcctcgcatccgcgcccgcagccgagcagtcctgccgcgcccgcagtcccgcagcgtcgccgcgctcgcgcttccccgcgacagccgccatgcgccctatctccgccgtgcctacgcctcctcccccgcccgcccgagacccgccaagtttcccttccttacacggcgagatccaccatcggcgcccccttccctggcgagccacagccgtccacgttcctggccaccggcgacctcccttctctagcccttagcggcgagccaacacctcctccccatggctgccctccagaccccagtcccgtccgcgcatccgctccctcatcagcgacgcaccgattctccccgacgtcgcccatggcgtggacagcgacctccctcaccctgcactctggctacaaaaggaagaatctcttatcttccgggtcaccaaaacaaatgaagttagtggtatagaaaaggaattagttgcttagatctctggacttgaggagcaaaggaatcaactcgaggcagaactgaaaaaggcaatactattctctctatttccaccttcatgaagatctatcgttcaatatatttcttccaaaatatttcagcaacttacatagtggcaaaattgctgtttttttgctaaacagttcagggtggagacaaccaacagattttgctgtgaacattaatctttgttagttaggtttacttattcatagagggtaatgtttacatgagaggtttgtttttaaaagtgattctgaaactcagattacaggtgaatactaaattgaaagttgctacagtgaagcttaaaaaaactagagaggaacagaaccaatttgatgaagcaagcaatcagattgtgttgcacctaaaaccaaaggttaagtttttgtaggggtcgtaatgggatctaaaatttaaggatcaaatcagattaggatcatgctctatttttgttcatttttgaaaatcctatataagcatggtgaaagctgagaagagatattctcaacagaaacacctttgccatggaagccatggatttcctataaacaaatagctccagtgagtaaaattataaatgggtagtcataagacgtgtaaacgtacctaaagcagagcatatagttcaggaatattctccacaagtgtctcaaataatcagatccaagcaaccatgagcatgacaaaattaagtattaggtatgtattgtttcatttgataattctaggatgtttgtacttcacatcagagttcagttgtttcaacatctttgtttctctaatgcagctactactacatcctgaatctgatgattcagctcaactttcctagattgagactgaaaagctgctagcccagttagttgagactgagatgaacagacgtttgaaggaggacacttacaaaggaaagaagtttaatgcattctgtcacttcttgggctaccaagctaggggagcactgcctgcaaagtttgattgcgattatgcctacgttttggggcatgtgtgctaccacatcatagctgccggattgaacggataacggatacatgactacagtgacaaatcttaagaatccagtgaacaagtggcgatgtggtgcgactcctatttcgagccgcgtgagaggaagctaaagggttctggcttaagctgtatcaggtcaaattttcaccattgatccaacctctgctacggcaatttccaggtaggctccgcatcccctcccacaggttaatatttgaagtttgtgtttctctaaacacaaacatagcttcagtagaaaatagaaactgatacaagtttatatttgaagtttgtgtttagcacacagtgatgtttatatttgaagtttgtccttttctttgaagctaatattttgtaagtcatttcatggctccacgccgcccgtgcccttgccggctgacgacgccagcggcaggtggcagcctgctagctggtgggtcgggcaagcgcaggatgggctcctctgatgatatggaccatggctacacgatatctccacaagatactcctcaatttcttcgtgccatttgacattccttttttgtgcttcggaccatggcttcggttcttgtgtgttttgtttccttttttagagttctttttcagtgttttttggatagattgtgctctttaacctatgacactcgcaactgaacggttccatatactttcagcatcggcggtgtgctctttacaaagccttagagctgcctctcctgcaaagtctgaacttgcagagatagtcccacaagagaaatcaccaaaagattccattcaaccaatgtcaccgagtccaaggtattctacctcaagatgaagggcgactaccacaggtatactgttatcgctagcagatctagaccatgcaagttgtggtttgtagagatcaaaacttaagatctgtgtgtagatatttgtctagacaatgggagtgacaggatgctggtttttagtaaggttggttgcttatctatgaatttgcctgtatgatgcatgatcctgtgctgtctcctgtagtacatggttgaaatataaatttgtgttccatgttttttacccgccccctacacgtatctcttggatatctgatttctactcatgatgatttggcatgtaccttgctgagttcaagtcaggtgcatagaggaaggatgctgcggggagcaccatgaatccctacaaagctgctcgagtttcctctgactgttcaccattattggaagcaggtcaggcagagagccttggaaccgaactcttggagatggtgcctagcagggaagaggagattaagttgaaagaataaagggaggatgctttgtcgacttttgtagttaatgattatgtgagacttcagtttaagggctcaacttttactggttcttggaagtcatttagtagccctaagatttcatcagcattcttagtagtaattgctatagtatcaaatgggattgtggtatgagttgctcgagtactaagtactaacgttgttgtacattgtgaagctaagtgggtaatatcaaaagggattaagatttatgtgtggtgcttactgtatttgtttttattattttattgtgctttgtacatgtaccgtcattcttactctggtgttcttttaatgcaaagtttgacacaatatatttttatacgagagaccgaaggttacttagtattgttttctgtttcttttatcgtctttgcagatctatgtttggatgatgaaaacagtgctactcgatgtgaagtccaccaatactatagtttaaattaagtctaagatcggtgctttagagggaattggtaagagccagcaagcacttttttttgctggaattatggtagcagtcaggtttcagatttctatgagttcggtgaataaaatgagcttatgggtgttgtcaatcttttttaatttcctgaagttatgataaaaatatatagggtacctattcaaacaatatggttgttaaccgccaaatattttttataacaagttatattgtattatgcagtagataaaaaagataatagtttgtgtaattgtttagctaaaacataattatcttgatataaag

SEQ ID NO: 61551 - DNA, 3452 bp, Zea Mays
cgccgcagtcctcgcatccgcgcccgcagccgagcagtcctgccgcgcccgcagtcccgcagcgtcgccgcgctcgcgcttccccgcgacagccgccatgcgccctatctccgccgtgcctacgcctcctcccccgcccgcccgagacccgccaagtttcccttccttacacggcgagatccaccatcggcgcccccttccctggcgagccacagccgtccacgttcctggccaccggcgacctcccttctctagcccttagcggcgagccaacacctcctccccatggctgccctccagaccccagtcccgtccgcgcatccgctccctcatcagcgacgcaccgattctccccgacgtcgcccatggcgtggacagcgacctccctcaccctgcactctggctacaaaaggaagaatctcttatcttccgggtcaccaaaacaaatgaagttagtggtatagaaaaggaattagttgcttagatctctggacttgaggagcaaaggaatcaactcgaggcagaactgaaaaagttcagggtggagacaaccaacagattttgctgtgaacattaatctttgttagttaggtttacttattcatagagggtaatgtttacatgagaggtttgtttttaaaagtgattctgaaactcagattacaggtgaatactaaattgaaagttgctacagtgaagcttaaaaaaactagagaggaacagaaccaatttgatgaagcaagcaatcagattgtgttgcacctaaaaccaaaggttaagtttttgtaggggtcgtaatgggatctaaaatttaaggatcaaatcagattaggatcatgctctatttttgttcatttttgaaaatcctatataagcatggtgaaagctgagaagagatattctcaacagaaacacctttgccatggaagccatggatttcctataaacaaatagctccagtgagtaaaattataaatgggtagtcataagacgtgtaaacgtacctaaagcagagcatatagttcaggaatattctccacaagtgtctcaaataatcagatccaagcaaccatgagcatgacaaaattaagtattagctactactacatcctgaatctgatgattcagctcaactttcctagattgagactgaaaagctgctagcccagttagttgagactgagatgaacagacgtttgaaggaggacacttacaaaggaaagaagtttaatgcattctgtcacttcttgggctaccaagctaggggagcactgcctgcaaagtttgattgcgattatgcctacgttttggggcatgtgtgctaccacatcatagctgccggattgaacggataacggatacatgactacagtgacaaatcttaagaatccagtgaacaagtggcgatgtggtgcgactcctatttcgtattactactttattcgcttgatgggacgcaaggcttcccatgtggcattggaatgtgctcttcaatcacatccaaacatggtcaaattttcaccattgatccaacctctgctacggcaatttccaggtaggctccgcatcccctcccacaggttaatatttgaagtttgtgtttctctaaacacaaacatagcttcagtagaaaatagaaactgatacaagtttatatttgaagtttgtgtttagcacacagtgatgtttatatttgaagtttgtccttttctttgaagctaatattttgtaagtcatttcatggctccacgccgcccgtgcccttgccggctgacgacgccagcggcaggtggcagcctgctagctggtgggtcgggcaagcgcaggatgggctcctctgatgatatggaccatggctacacgatatctccacaagatactcctcaatttcttcgtgccatttgacattccttttttgtgcttcggaccatggcttcggttcttgtgtgttttgtttccttttttagagttctttttcagtgttttttggatagattgtgctctttaacctatgacactcgcaactgaacggttccatatactttcagcatcggcggtgtgctctttacaaagccttagagctgcctctcctgcaaagtctgaacttgcagagatagtcccacaagagaaatcaccaaaagattccattcaaccaatgtcaccgagtccaaggtattctacctcaagatgaagggcgactaccacaggtatactgttatcgctagcagatctagaccatgcaagttgtggtttgtagagatcaaaacttaagatctgtgtgtagatatttgtctagacaatgggagtgacaggatgctggtttttagtaaggttggttgcttatctatgaatttgcctgtatgatgcatgatcctgtgctgtctcctgtagtacatggttgaaatataaatttgtgttccatgttttttacccgccccctacacgtatctcttggatatctgatttctactcatgatgatttggcatgtaccttgctgagttcaagtcaggtgcatagaggaaggatgctgcggggagcaccatgaatccctacaaagctgctcgagtttcctctgactgttcaccattattggaagcaggtcaggcagagagccttggaaccgaactcttggagatggtgcctagcagggaagaggagattaagttgaaagaataaagggaggatgctttgtcgacttttgtagttaatgattatgtgagacttcagtttaagggctcaacttttactggttcttggaagtcatttagtagccctaagatttcatcagcattcttagtagtaattgctatagtatcaaatgggattgtggtatgagttgctcgagtactaagtactaacgttgttgtacattgtgaagctaagtgggtaatatcaaaagggattaagatttatgtgtggtgcttactgtatttgtttttattattttattgtgctttgtacatgtaccgtcattcttactctggtgttcttttaatgcaaagtttgacacaatatatttttatacgagagaccgaaggttacttagtattgttttctgtttcttttatcgtctttgcagatctatgtttggatgatgaaaacagtgctactcgatgtgaagtccaccaatactatagtttaaattaagtctaagatcggtgctttagagggaattggtaagagccagcaagcacttttttttgctggaattatggtagcagtcaggtttcagatttctatgagttcggtgaataaaatgagcttatgggtgttgtcaatcttttttaatttcctgaagttatgataaaaatatatagggtacctattcaaacaatatggttgttaaccgccaaatattttttataacaagttatattgtattatgcagtagataaaaaagataatagtttgtgtaattgtttagctaaaacataattatcttgatataaag

SEQ ID NO: 61552 - DNA, 2098 bp, Zea Mays
cgccgcagtcctcgcatccgcgcccgcagccgagcagtcctgccgcgcccgcagtcccgcagcgtcgccgcgctcgcgcttccccgcgacagccgccatgcgccctatctccgccgtgcctacgcctcctcccccgcccgcccgagacccgccaagtttcccttccttacacggcgagatccaccatcggcgcccccttccctggcgagccacagccgtccacgttcctggccaccggcgacctcccttctctagcccttagcggcgagccaacacctcctccccatggctgccctccagaccccagtcccgtccgcgcatccgctccctcatcagcgacgcaccgattctccccgacgtcgcccatggcgtggacagcgacctccctcaccctgcactctggctacaaaaggaagaatctcttatcttccgggtcaccaaaacaaatgaagttagtggtatagaaaaggaattagttgcttagatctctggacttgaggagcaaaggaatcaactcgaggcagaactgaaaaagctactactacatcctgaatctgatgattcagctcaactttcctagattgagactgaaaagctgctagcccagttagttgagactgagatgaacagacgtttgaaggaggacacttacaaaggaaagaagtttaatgcattctgtcacttcttgggctaccaagctaggggagcactgcctgcaaagtttgattgcgattatgcctacgttttggggcatgtgtgctaccacatcatagctgccggattgaacggataacggatacatgactacagtgacaaatcttaagaatccagtgaacaagtggcgatgtggtgcgactcctatttcgtattactactttattcgcttgatgggacgcaaggcttcccatgtggcattggaatgtgctcttcaatcacatccaaacatggtcaaattttcaccattgatccaacctctgctacggcaatttccagcatcggcggtgtgctctttacaaagccttagagctgcctctcctgcaaagtctgaacttgcagagatagtcccacaagagaaatcaccaaaagattccattcaaccaatgtcaccgagtccaaggtattctacctcaagatgaagggcgactaccacagtcaggtgcatagaggaaggatgctgcggggagcaccatgaatccctacaaagctgctcgagtttcctctgactgttcaccattattggaagcaggtcaggcagagagccttggaaccgaactcttggagatggtgcctagcagggaagaggagattaagttgaaagaataaagggaggatgctttgtcgacttttgtagttaatgattatgtgagacttcagtttaagggctcaacttttactggttcttggaagtcatttagtagccctaagatttcatcagcattcttagtagtaattgctatagtatcaaatgggattgtggtatgagttgctcgagtactaagtactaacgttgttgtacattgtgaagctaagtgggtaatatcaaaagggattaagatttatgtgtggtgcttactgtatttgtttttattattttattgtgctttgtacatgtaccgtcattcttactctggtgttcttttaatgcaaagtttgacacaatatatttttatacgagagaccgaaggttacttagtattgttttctgtttcttttatcgtctttgcagatctatgtttggatgatgaaaacagtgctactcgatgtgaagtccaccaatactatagtttaaattaagtctaagatcggtgctttagagggaattggtaagagccagcaagcacttttttttgctggaattatggtagcagtcaggtttcagatttctatgagttcggtgaataaaatgagcttatgggtgttgtcaatcttttttaatttcctgaagttatgataaaaatatatagggtacctattcaaacaatatggttgttaaccgccaaatattttttataacaagttatattgtattatgcagtagataaaaaagataatagtttgtgtaattgtttagctaaaacataattatcttgatataaag

SEQ ID NO: 61553 - DNA, 2739 bp, Zea Mays
cgccgcagtcctcgcatccgcgcccgcagccgagcagtcctgccgcgcccgcagtcccgcagcgtcgccgcgctcgcgcttccccgcgacagccgccatgcgccctatctccgccgtgcctacgcctcctcccccgcccgcccgagacccgccaagtttcccttccttacacggcgagatccaccatcggcgcccccttccctggcgagccacagccgtccacgttcctggccaccggcgacctcccttctctagcccttagcggcgagccaacacctcctccccatggctgccctccagaccccagtcccgtccgcgcatccgctccctcatcagcgacgcaccgattctccccgacgtcgcccatggcgtggacagcgacctccctcaccctgcactctggctacaaaaggaagaatctcttatcttccgggtcaccaaaacaaatgaagttagtggtatagaaaaggaattagttgcttagatctctggacttgaggagcaaaggaatcaactcgaggcagaactgaaaaaggcaatactattctctctatttccaccttcatgaagatctatcgttcaatatatttcttccaaaatatttcagcaacttacatagtggcaaaattgctgtttttttgctaaacagttcagggtggagacaaccaacagattttgctgtgaacattaatctttgttagttaggtttacttattcatagagggtaatgtttacatgagaggtttgtttttaaaagtgattctgaaactcagattacaggtgaatactaaattgaaagttgctacagtgaagcttaaaaaaactagagaggaacagaaccaatttgatgaagcaagcaatcagattgtgttgcacctaaaaccaaaggttaagtttttgtaggggtcgtaatgggatctaaaatttaaggatcaaatcagattaggatcatgctctatttttgttcatttttgaaaatcctatataagcatggtgaaagctgagaagagatattctcaacagaaacacctttgccatggaagccatggatttcctataaacaaatagctccagtgagtaaaattataaatgggtagtcataagacgtgtaaacgtacctaaagcagagcatatagttcaggaatattctccacaagtgtctcaaataatcagatccaagcaaccatgagcatgacaaaattaagtattagctactactacatcctgaatctgatgattcagctcaactttcctagattgagactgaaaagctgctagcccagttagttgagactgagatgaacagacgtttgaaggaggacacttacaaaggaaagaagtttaatgcattctgtcacttcttgggctaccaagctaggggagcactgcctgcaaagtttgattgcgattatgcctacgttttggggcatgtgtgctaccacatcatagctgccggattgaacggataacggatacatgactacagtgacaaatcttaagaatccagtgaacaagtggcgatgtggtgcgactcctatttcgagccgcgtgagaggaagctaaagggttctggcttaagctgtatcaggtcaaattttcaccattgatccaacctctgctacggcaatttccagcatcggcggtgtgctctttacaaagccttagagctgcctctcctgcaaagtctgaacttgcagagatagtcccacaagagaaatcaccaaaagattccattcaaccaatgtcaccgagtccaaggtattctacctcaagatgaagggcgactaccacagtcaggtgcatagaggaaggatgctgcggggagcaccatgaatccctacaaagctgctcgagtttcctctgactgttcaccattattggaagcaggtcaggcagagagccttggaaccgaactcttggagatggtgcctagcagggaagaggagattaagttgaaagaataaagggaggatgctttgtcgacttttgtagttaatgattatgtgagacttcagtttaagggctcaacttttactggttcttggaagtcatttagtagccctaagatttcatcagcattcttagtagtaattgctatagtatcaaatgggattgtggtatgagttgctcgagtactaagtactaacgttgttgtacattgtgaagctaagtgggtaatatcaaaagggattaagatttatgtgtggtgcttactgtatttgtttttattattttattgtgctttgtacatgtaccgtcattcttactctggtgttcttttaatgcaaagtttgacacaatatatttttatacgagagaccgaaggttacttagtattgttttctgtttcttttatcgtctttgcagatctatgtttggatgatgaaaacagtgctactcgatgtgaagtccaccaatactatagtttaaattaagtctaagatcggtgctttagagggaattggtaagagccagcaagcacttttttttgctggaattatggtagcagtcaggtttcagatttctatgagttcggtgaataaaatgagcttatgggtgttgtcaatcttttttaatttcctgaagttatgataaaaatatatagggtacctattcaaacaatatggttgttaaccgccaaatattttttataacaagttatattgtattatgcagtagataaaaaagataatagtttgtgtaattgtttagctaaaacataattatcttgatataaag

SEQ ID NO: 61554 - DNA, 3066 bp, Zea Mays
cgccgcagtcctcgcatccgcgcccgcagccgagcagtcctgccgcgcccgcagtcccgcagcgtcgccgcgctcgcgcttccccgcgacagccgccatgcgccctatctccgccgtgcctacgcctcctcccccgcccgcccgagacccgccaagtttcccttccttacacggcgagatccaccatcggcgcccccttccctggcgagccacagccgtccacgttcctggccaccggcgacctcccttctctagcccttagcggcgagccaacacctcctccccatggctgccctccagaccccagtcccgtccgcgcatccgctccctcatcagcgacgcaccgattctccccgacgtcgcccatggcgtggacagcgacctccctcaccctgcactctggctacaaaaggaagaatctcttatcttccgggtcaccaaaacaaatgaagttagtggtatagaaaaggtaatttttgtgctactagcttgtcatctgcaaaccaccacagtaatttttattagctaaatgatatgtcaatgggttaacaaggatttactctacatccatattgacagaaatacaacaccccatgatttcccattgaaacaaaaggaagacattcatatccatcattgcaattgcaaaagaaaaaaaatagcaggatgtgcaagctgttccaattgttttttcttttccaattcttagtccatgcaattgcctttatgcttctgcaatctgtctgattgatgattaatcaattaagttttgtaaaaggaattagttgcttagatctctggacttgaggagcaaaggaatcaactcgaggcagaactgaaaaagctactactacatcctgaatctgatgattcagctcaactttcctagattgagactgaaaagctgctagcccagttagttgagactgagatgaacagacgtttgccatttttgcagaaggaggacacttacaaaggaaagaagtttaatgcattctgtcacttcttgggctaccaagctaggggagcactgcctgcaaagtttgattgcgattatgcctacgttttggggcatgtgtgctaccacatcatagctgccggattgaacggataacggatacatgactacagtgacaaatcttaagaatccagtgaacaagtggcgatgtggtgcgactcctatttcggtaagatttgtgttgatatgcctaatagtttaggaaaagtaagaatgtagtgtctaacccatgtctatccctgcagtctatgatgactgtgaagcgatgatcaagtgattgttttatgtctgttttatatgcaaaaatataatcaagttttaccgaagatgctaccaaaagttttttcttatgaattttaattactgaatctaatttctgatccgccttgtgtctttactctaaatgatagtattactactttattcgcttgatgggacgcaaggcttcccatgtggcattggaatgtgctcttcaatcacatccaaacatggtatgttttttccttacttgcatgtgacctgtcacatttttttctcacatggatctggaagagccgcgtgagaggaagctaaagggttctggcttaagctgtatcaggtcaaattttcaccattgatccaacctctgctacggcaatttccagcatcggcggtgtgctctttacaaagccttagagctgcctctcctgcaaagtctgaacttgcagagatagtcccacaagagaaatcaccaaaagattccattcaaccaatgtcaccgagtccaaggtattctacctcaagatgaagggcgactaccacaggtatactgttatcgctagcagatctagaccatgcaagttgtggtttgtagagatcaaaacttaagatctgtgtgtagatatttgtctagacaatgggagtgacaggatgctggtttttagtaaggttggttgcttatctatgaatttgcctgtatgatgcatgatcctgtgctgtctcctgtagtacatggttgaaatataaatttgtgttccatgttttttacccgccccctacacgtatctcttggatatctgatttctactcatgatgatttggcatgtaccttgctgagttcaagtcaggtgcatagaggaaggatgctgcggggagcaccatgaatccctacaaagctgctcgagtttcctctgactgttcaccattattggaagcaggtcaggcagagagccttggaaccgaactcttggagatggtgcctagcagggaagaggagattaagttgaaagaataaagggaggatgctttgtcgacttttgtagttaatgattatgtgagacttcagtttaagggctcaacttttactggttcttggaagtcatttagtagccctaagatttcatcagcattcttagtagtaattgctatagtatcaaatgggattgtggtatgagttgctcgagtactaagtactaacgttgttgtacattgtgaagctaagtgggtaatatcaaaagggattaagatttatgtgtggtgcttactgtatttgtttttattattttattgtgctttgtacatgtaccgtcattcttactctggtgttcttttaatgcaaagtttgacacaatatatttttatacgagagaccgaaggttacttagtattgttttctgtttcttttatcgtctttgcagatctatgtttggatgatgaaaacagtgctactcgatgtgaagtccaccaatactatagtttaaattaagtctaagatcggtgctttagagggaattggtaagagccagcaagcacttttttttgctggaattatggtagcagtcaggtttcagatttctatgagttcggtgaataaaatgagcttatgggtgttgtcaatcttttttaatttcctgaagttatgataaaaatatatagggtacctattcaaacaatatggttgttaaccgccaaatattttttataacaagttatattgtattatgcagtagataaaaaagataatagtttgtgtaattgtttagctaaaacataattatcttgatataaag

SEQ ID NO: 61555 - DNA, 3275 bp, Zea Mays
cgccgcagtcctcgcatccgcgcccgcagccgagcagtcctgccgcgcccgcagtcccgcagcgtcgccgcgctcgcgcttccccgcgacagccgccatgcgccctatctccgccgtgcctacgcctcctcccccgcccgcccgagacccgccaagtttcccttccttacacggcgagatccaccatcggcgcccccttccctggcgagccacagccgtccacgttcctggccaccggcgacctcccttctctagcccttagcggcgagccaacacctcctccccatggctgccctccagaccccagtcccgtccgcgcatccgctccctcatcagcgacgcaccgattctccccgacgtcgcccatggcgtggacagcgacctccctcaccctgcactctggctacaaaaggaagaatctcttatcttccgggtcaccaaaacaaatgaagttagtggtatagaaaagaaatacaacaccccatgatttcccattgaaacaaaaggaagacattcatatccatcattgcaattgcaaaagaaaaaaaatagcaggatgtgcaagctgttccaattgttttttcttttccaattcttagtccatgcaattgcctttatgcttctgcaatctgtctgattgatgattaatcaattaagttttgtaaaaggaattagttgcttagatctctggacttgaggagcaaaggaatcaactcgaggcagaactgaaaaaggcaatactattctctctatttccaccttcatgaagatctatcgttcaatatatttcttccaaaatatttcagcaacttacatagtggcaaaattgctgtttttttgctaaacagttcagggtggagacaaccaacagattttgctgtgaacattaatctttgttagttaggtttacttattcatagagggtaatgtttacatgagaggtttgtttttaaaagtgattctgaaactcagattacaggtgaatactaaattgaaagttgctacagtgaagcttaaaaaaactagagaggaacagaaccaatttgatgaagcaagcaatcagattgtgttgcacctaaaaccaaaggttaagtttttgtaggggtcgtaatgggatctaaaatttaaggatcaaatcagattaggatcatgctctatttttgttcatttttgaaaatcctatataagcatggtgaaagctgagaagagatattctcaacagaaacacctttgccatggaagccatggatttcctataaacaaatagctccagtgagtaaaattataaatgggtagtcataagacgtgtaaacgtacctaaagcagagcatatagttcaggaatattctccacaagtgtctcaaataatcagatccaagcaaccatgagcatgacaaaattaagtattagcagctactactacatcctgaatctgatgattcagctcaactttcctagattgagactgaaaagctgctagcccagttagttgagactgagatgaacagacgtttgaaggaggacacttacaaaggaaagaagtttaatgcattctgtcacttcttgggctaccaagctaggggagcactgcctgcaaagtttgattgcgattatgcctacgttttggggcatgtgtgctaccacatcatagctgccggattgaacggataacggatacatgactacagtgacaaatcttaagaatccagtgaacaagtggcgatgtggtgcgactcctatttcgtattactactttattcgcttgatgggacgcaaggcttcccatgtggcattggaatgtgctcttcaatcacatccaaacatggtcaaattttcaccattgatccaacctctgctacggcaatttccagcatcggcggtgtgctctttacaaagccttagagctgcctctcctgcaaagtctgaacttgcagagatagtcccacaagagaaatcaccaaaagattccattcaaccaatgtcaccgagtccaaggtattctacctcaagatgaagggcgactaccacaggtatactgttatcgctagcagatctagaccatgcaagttgtggtttgtagagatcaaaacttaagatctgtgtgtagatatttgtctagacaatgggagtgacaggatgctggtttttagtaaggttggttgcttatctatgaatttgcctgtatgatgcatgatcctgtgctgtctcctgtagtacatggttgaaatataaatttgtgttccatgttttttacccgccccctacacgtatctcttggatatctgatttctactcatgatgatttggcatgtaccttgctgagttcaagtcaggtgcatagaggaaggatgctgcggggagcaccatgaatccctacaaagctgctcgagtttcctctgactgttcaccattattggaagcaggtcaggcagagagccttggaaccgaactcttggagatggtgcctagcagggaagaggagattaagttgaaagaataaagggaggatgctttgtcgacttttgtagttaatgattatgtgagacttcagtttaagggctcaacttttactggttcttggaagtcatttagtagccctaagatttcatcagcattcttagtagtaattgctatagtatcaaatgggattgtggtatgagttgctcgagtactaagtactaacgttgttgtacattgtgaagctaagtgggtaatatcaaaagggattaagatttatgtgtggtgcttactgtatttgtttttattattttattgtgctttgtacatgtaccgtcattcttactctggtgttcttttaatgcaaagtttgacacaatatatttttatacgagagaccgaaggttacttagtattgttttctgtttcttttatcgtctttgcagatctatgtttggatgatgaaaacagtgctactcgatgtgaagtccaccaatactatagtttaaattaagtctaagatcggtgctttagagggaattggtaagagccagcaagcacttttttttgctggaattatggtagcagtcaggtttcagatttctatgagttcggtgaataaaatgagcttatgggtgttgtcaatcttttttaatttcctgaagttatgataaaaatatatagggtacctattcaaacaatatggttgttaaccgccaaatattttttataacaagttatattgtattatgcagtagataaaaaagataatagtttgtgtaattgtttagctaaaacataattatcttgatataaag

SEQ ID NO: 61556 - DNA, 3238 bp, Zea Mays
cgccgcagtcctcgcatccgcgcccgcagccgagcagtcctgccgcgcccgcagtcccgcagcgtcgccgcgctcgcgcttccccgcgacagccgccatgcgccctatctccgccgtgcctacgcctcctcccccgcccgcccgagacccgccaagtttcccttccttacacggcgagatccaccatcggcgcccccttccctggcgagccacagccgtccacgttcctggccaccggcgacctcccttctctagcccttagcggcgagccaacacctcctccccatggctgccctccagaccccagtcccgtccgcgcatccgctccctcatcagcgacgcaccgattctccccgacgtcgcccatggcgtggacagcgacctccctcaccctgcactctggctacaaaaggaagaatctcttatcttccgggtcaccaaaacaaatgaagttagtggtatagaaaaggaattagttgcttagatctctggacttgaggagcaaaggaatcaactcgaggcagaactgaaaaagctactactacatcctgaatctgatgattcagctcaactttcctagattgagactgaaaagctgctagcccagttagttgagactgagatgaacagacgtttgaaggaggacacttacaaaggaaagaagtttaatgcattctgtcacttcttgggctaccaagctaggggagcactgcctgcaaagtttgattgcgattatgcctacgttttggggcatgtgtgctaccacatcatagctgccggattgaacggataacggatacatgactacagtgacaaatcttaagaatccagtgaacaagtggcgatgtggtgcgactcctatttcggtaagatttgtgttgatatgcctaatagtttaggaaaagtaagaatgtagtgtctaacccatgtctatccctgcagtctatgatgactgtgaagcgatgatcaagtgattgttttatgtctgttttatatgcaaaaatataatcaagttttaccgaagatgctaccaaaagttttttcttatgaattttaattactgaatctaatttctgatccgccttgtgtctttactctaaatgatagtattactactttattcgcttgatgggacgcaaggcttcccatgtggcattggaatgtgctcttcaatcacatccaaacatggtatgttttttccttacttgcatgtgacctgtcacatttttttctcacatggatctggaagagccgcgtgagaggaagctaaagggttctggcttaagctgtatcaggtcaaattttcaccattgatccaacctctgctacggcaatttccaggtaggctccgcatcccctcccacaggttaatatttgaagtttgtgtttctctaaacacaaacatagcttcagtagaaaatagaaactgatacaagtttatatttgaagtttgtgtttagcacacagtgatgtttatatttgaagtttgtccttttctttgaagctaatattttgtaagtcatttcatggctccacgccgcccgtgcccttgccggctgacgacgccagcggcaggtggcagcctgctagctggtgggtcgggcaagcgcaggatgggctcctctgatgatatggaccatggctacacgatatctccacaagatactcctcaatttcttcgtgccatttgacattccttttttgtgcttcggaccatggcttcggttcttgtgtgttttgtttccttttttagagttctttttcagtgttttttggatagattgtgctctttaacctatgacactcgcaactgaacggttccatatactttcagcatcggcggtgtgctctttacaaagccttagagctgcctctcctgcaaagtctgaacttgcagagatagtcccacaagagaaatcaccaaaagattccattcaaccaatgtcaccgagtccaaggtattctacctcaagatgaagggcgactaccacaggtatactgttatcgctagcagatctagaccatgcaagttgtggtttgtagagatcaaaacttaagatctgtgtgtagatatttgtctagacaatgggagtgacaggatgctggtttttagtaaggttggttgcttatctatgaatttgcctgtatgatgcatgatcctgtgctgtctcctgtagtacatggttgaaatataaatttgtgttccatgttttttacccgccccctacacgtatctcttggatatctgatttctactcatgatgatttggcatgtaccttgctgagttcaagtcaggtgcatagaggaaggatgctgcggggagcaccatgaatccctacaaagctgctcgagtttcctctgactgttcaccattattggaagcaggtcaggcagagagccttggaaccgaactcttggagatggtgcctagcagggaagaggagattaagttgaaagaataaagggaggatgctttgtcgacttttgtagttaatgattatgtgagacttcagtttaagggctcaacttttactggttcttggaagtcatttagtagccctaagatttcatcagcattcttagtagtaattgctatagtatcaaatgggattgtggtatgagttgctcgagtactaagtactaacgttgttgtacattgtgaagctaagtgggtaatatcaaaagggattaagatttatgtgtggtgcttactgtatttgtttttattattttattgtgctttgtacatgtaccgtcattcttactctggtgttcttttaatgcaaagtttgacacaatatatttttatacgagagaccgaaggttacttagtattgttttctgtttcttttatcgtctttgcagatctatgtttggatgatgaaaacagtgctactcgatgtgaagtccaccaatactatagtttaaattaagtctaagatcggtgctttagagggaattggtaagagccagcaagcacttttttttgctggaattatggtagcagtcaggtttcagatttctatgagttcggtgaataaaatgagcttatgggtgttgtcaatcttttttaatttcctgaagttatgataaaaatatatagggtacctattcaaacaatatggttgttaaccgccaaatattttttataacaagttatattgtattatgcagtagataaaaaagataatagtttgtgtaattgtttagctaaaacataattatcttgatataaag

SEQ ID NO: 61557 - DNA, 2596 bp, Zea Mays
cgccgcagtcctcgcatccgcgcccgcagccgagcagtcctgccgcgcccgcagtcccgcagcgtcgccgcgctcgcgcttccccgcgacagccgccatgcgccctatctccgccgtgcctacgcctcctcccccgcccgcccgagacccgccaagtttcccttccttacacggcgagatccaccatcggcgcccccttccctggcgagccacagccgtccacgttcctggccaccggcgacctcccttctctagcccttagcggcgagccaacacctcctccccatggctgccctccagaccccagtcccgtccgcgcatccgctccctcatcagcgacgcaccgattctccccgacgtcgcccatggcgtggacagcgacctccctcaccctgcactctggctacaaaaggaagaatctcttatcttccgggtcaccaaaacaaatgaagttagtggtatagaaaagaaatacaacaccccatgatttcccattgaaacaaaaggaagacattcatatccatcattgcaattgcaaaagaaaaaaaatagcaggatgtgcaagctgttccaattgttttttcttttccaattcttagtccatgcaattgcctttatgcttctgcaatctgtctgattgatgattaatcaattaagttttgtaaaaggaattagttgcttagatctctggacttgaggagcaaaggaatcaactcgaggcagaactgaaaaagctactactacatcctgaatctgatgattcagctcaactttcctagattgagactgaaaagctgctagcccagttagttgagactgagatgaacagacgtttgaaggaggacacttacaaaggaaagaagtttaatgcattctgtcacttcttgggctaccaagctaggggagcactgcctgcaaagtttgattgcgattatgcctacgttttggggcatgtgtgctaccacatcatagctgccggattgaacggataacggatacatgactacagtgacaaatcttaagaatccagtgaacaagtggcgatgtggtgcgactcctatttcgtattactactttattcgcttgatgggacgcaaggcttcccatgtggcattggaatgtgctcttcaatcacatccaaacatggtcaaattttcaccattgatccaacctctgctacggcaatttccagcatcggcggtgtgctctttacaaagccttagagctgcctctcctgcaaagtctgaacttgcagagatagtcccacaagagaaatcaccaaaagattccattcaaccaatgtcaccgagtccaaggtattctacctcaagatgaagggcgactaccacaggtatactgttatcgctagcagatctagaccatgcaagttgtggtttgtagagatcaaaacttaagatctgtgtgtagatatttgtctagacaatgggagtgacaggatgctggtttttagtaaggttggttgcttatctatgaatttgcctgtatgatgcatgatcctgtgctgtctcctgtagtacatggttgaaatataaatttgtgttccatgttttttacccgccccctacacgtatctcttggatatctgatttctactcatgatgatttggcatgtaccttgctgagttcaagtcaggtgcatagaggaaggatgctgcggggagcaccatgaatccctacaaagctgctcgagtttcctctgactgttcaccattattggaagcaggtcaggcagagagccttggaaccgaactcttggagatggtgcctagcagggaagaggagattaagttgaaagaataaagggaggatgctttgtcgacttttgtagttaatgattatgtgagacttcagtttaagggctcaacttttactggttcttggaagtcatttagtagccctaagatttcatcagcattcttagtagtaattgctatagtatcaaatgggattgtggtatgagttgctcgagtactaagtactaacgttgttgtacattgtgaagctaagtgggtaatatcaaaagggattaagatttatgtgtggtgcttactgtatttgtttttattattttattgtgctttgtacatgtaccgtcattcttactctggtgttcttttaatgcaaagtttgacacaatatatttttatacgagagaccgaaggttacttagtattgttttctgtttcttttatcgtctttgcagatctatgtttggatgatgaaaacagtgctactcgatgtgaagtccaccaatactatagtttaaattaagtctaagatcggtgctttagagggaattggtaagagccagcaagcacttttttttgctggaattatggtagcagtcaggtttcagatttctatgagttcggtgaataaaatgagcttatgggtgttgtcaatcttttttaatttcctgaagttatgataaaaatatatagggtacctattcaaacaatatggttgttaaccgccaaatattttttataacaagttatattgtattatgcagtagataaaaaagataatagtttgtgtaattgtttagctaaaacataattatcttgatataaag

SEQ ID NO: 61558 - DNA, 3293 bp, Zea Mays
cgccgcagtcctcgcatccgcgcccgcagccgagcagtcctgccgcgcccgcagtcccgcagcgtcgccgcgctcgcgcttccccgcgacagccgccatgcgccctatctccgccgtgcctacgcctcctcccccgcccgcccgagacccgccaagtttcccttccttacacggcgagatccaccatcggcgcccccttccctggcgagccacagccgtccacgttcctggccaccggcgacctcccttctctagcccttagcggcgagccaacacctcctccccatggctgccctccagaccccagtcccgtccgcgcatccgctccctcatcagcgacgcaccgattctccccgacgtcgcccatggcgtggacagcgacctccctcaccctgcactctggctacaaaaggaagaatctcttatcttccgggtcaccaaaacaaatgaagttagtggtatagaaaaggtaatttttgtgctactagcttgtcatctgcaaaccaccacagtaatttttattagctaaatgatatgtcaatgggttaacaaggatttactctacatccatattgacagaaatacaacaccccatgatttcccattgaaacaaaaggaagacattcatatccatcattgcaattgcaaaagaaaaaaaatagcaggatgtgcaagctgttccaattgttttttcttttccaattcttagtccatgcaattgcctttatgcttctgcaatctgtctgattgatgattaatcaattaagttttgtaaaaggaattagttgcttagatctctggacttgaggagcaaaggaatcaactcgaggcagaactgaaaaaggcaatactattctctctatttccaccttcatgaagatctatcgttcaatatatttcttccaaaatatttcagcaacttacatagtggcaaaattgctgtttttttgctaaacagttcagggtggagacaaccaacagattttgctgtgaacattaatctttgttagttaggtttacttattcatagagggtaatgtttacatgagaggtttgtttttaaaagtgattctgaaactcagattacaggtgaatactaaattgaaagttgctacagtgaagcttaaaaaaactagagaggaacagaaccaatttgatgaagcaagcaatcagattgtgttgcacctaaaaccaaaggttaagtttttgtaggggtcgtaatgggatctaaaatttaaggatcaaatcagattaggatcatgctctatttttgttcatttttgaaaatcctatataagcatggtgaaagctgagaagagatattctcaacagaaacacctttgccatggaagccatggatttcctataaacaaatagctccagtgagtaaaattataaatgggtagtcataagacgtgtaaacgtacctaaagcagagcatatagttcaggaatattctccacaagtgtctcaaataatcagatccaagcaaccatgagcatgacaaaattaagtattaggtatgtattgtttcatttgataattctaggatgtttgtacttcacatcagagttcagttgtttcaacatctttgtttctctaatgcagctactactacatcctgaatctgatgattcagctcaactttcctagattgagactgaaaagctgctagcccagttagttgagactgagatgaacagacgtttgaaggaggacacttacaaaggaaagaagtttaatgcattctgtcacttcttgggctaccaagctaggggagcactgcctgcaaagtttgattgcgattatgcctacgttttggggcatgtgtgctaccacatcatagctgccggattgaacggataacggatacatgactacagtgacaaatcttaagaatccagtgaacaagtggcgatgtggtgcgactcctatttcgagccgcgtgagaggaagctaaagggttctggcttaagctgtatcaggtcaaattttcaccattgatccaacctctgctacggcaatttccagctaatattttgtaagtcatttcatggctccacgccgcccgtgcccttgccggctgacgacgccagcggcaggtggcagcctgctagctggtgggtcgggcaagcgcaggatgggctcctctgatgatatggaccatggctacacgatatctccacaagatactcctcaatttcttcgtgccatttgacattccttttttgtgcttcggaccatggcttcggttcttcatcggcggtgtgctctttacaaagccttagagctgcctctcctgcaaagtctgaacttgcagagatagtcccacaagagaaatcaccaaaaggtaatgcttcatttttcaggtcatcatccttcttgccatttctcccccattcatttttcaatggatgtggctcaatatgcacgtgttccattgtgattttgctgttccatagattccattcaaccaatgtcaccgagtccaaggtattctacctcaagatgaagggcgactaccacaggtatactgttatcgctagcagatctagaccatgcaagttgtggtttgtagagatcaaaacttaagatctgtgtgtagatatttgtctagacaatgggagtgacaggatgctggtttttagtaaggttggttgcttatctatgaatttgcctgtatgatgcatgatcctgtgctgtctcctgtagtacatggttgaaatataaatttgtgttccatgttttttacccgccccctacacgtatctcttggatatctgatttctactcatgatgatttggcatgtaccttgctgagttcaagtcaggtgcatagaggaaggatgctgcggggagcaccatgaatccctacaaagctgctcgagtttcctctgactgttcaccattattggaagcagatctatgtttggatgatgaaaacagtgctactcgatgtgaagtccaccaatactatagtttaaattaagtctaagatcggtgctttagagggaattggtaagagccagcaagcacttttttttgctggaattatggtagcagtcaggtttcagatttctatgagttcggtgaataaaatgagcttatgggtgttgtcaatcttttttaatttcctgaagttatgataaaaatatatagggtacctattcaaacaatatggttgttaaccgccaaatattttttataacaagttatattgtattatgcagtagataaaaaagataatagtttgtgtaattgtttagctaaaacataattatcttgatataaag

SEQ ID NO: 61559 - DNA, 2660 bp, Zea Mays
cgccgcagtcctcgcatccgcgcccgcagccgagcagtcctgccgcgcccgcagtcccgcagcgtcgccgcgctcgcgcttccccgcgacagccgccatgcgccctatctccgccgtgcctacgcctcctcccccgcccgcccgagacccgccaagtttcccttccttacacggcgagatccaccatcggcgcccccttccctggcgagccacagccgtccacgttcctggccaccggcgacctcccttctctagcccttagcggcgagccaacacctcctccccatggctgccctccagaccccagtcccgtccgcgcatccgctccctcatcagcgacgcaccgattctccccgacgtcgcccatggcgtggacagcgacctccctcaccctgcactctggctacaaaaggaagaatctcttatcttccgggtcaccaaaacaaatgaagttagtggtatagaaaaggaattagttgcttagatctctggacttgaggagcaaaggaatcaactcgaggcagaactgaaaaagttcagggtggagacaaccaacagattttgctgtgaacattaatctttgttagttaggtttacttattcatagagggtaatgtttacatgagaggtttgtttttaaaagtgattctgaaactcagattacaggtgaatactaaattgaaagttgctacagtgaagcttaaaaaaactagagaggaacagaaccaatttgatgaagcaagcaatcagattgtgttgcacctaaaaccaaaggttaagtttttgtaggggtcgtaatgggatctaaaatttaaggatcaaatcagattaggatcatgctctatttttgttcatttttgaaaatcctatataagcatggtgaaagctgagaagagatattctcaacagaaacacctttgccatggaagccatggatttcctataaacaaatagctccagtgagtaaaattataaatgggtagtcataagacgtgtaaacgtacctaaagcagagcatatagttcaggaatattctccacaagtgtctcaaataatcagatccaagcaaccatgagcatgacaaaattaagtattagctactactacatcctgaatctgatgattcagctcaactttcctagattgagactgaaaagctgctagcccagttagttgagactgagatgaacagacgtttgaaggaggacacttacaaaggaaagaagtttaatgcattctgtcacttcttgggctaccaagctaggggagcactgcctgcaaagtttgattgcgattatgcctacgttttggggcatgtgtgctaccacatcatagctgccggattgaacggataacggatacatgactacagtgacaaatcttaagaatccagtgaacaagtggcgatgtggtgcgactcctatttcgtattactactttattcgcttgatgggacgcaaggcttcccatgtggcattggaatgtgctcttcaatcacatccaaacatggtcaaattttcaccattgatccaacctctgctacggcaatttccagcatcggcggtgtgctctttacaaagccttagagctgcctctcctgcaaagtctgaacttgcagagatagtcccacaagagaaatcaccaaaagattccattcaaccaatgtcaccgagtccaaggtattctacctcaagatgaagggcgactaccacagtcaggtgcatagaggaaggatgctgcggggagcaccatgaatccctacaaagctgctcgagtttcctctgactgttcaccattattggaagcaggtcaggcagagagccttggaaccgaactcttggagatggtgcctagcagggaagaggagattaagttgaaagaataaagggaggatgctttgtcgacttttgtagttaatgattatgtgagacttcagtttaagggctcaacttttactggttcttggaagtcatttagtagccctaagatttcatcagcattcttagtagtaattgctatagtatcaaatgggattgtggtatgagttgctcgagtactaagtactaacgttgttgtacattgtgaagctaagtgggtaatatcaaaagggattaagatttatgtgtggtgcttactgtatttgtttttattattttattgtgctttgtacatgtaccgtcattcttactctggtgttcttttaatgcaaagtttgacacaatatatttttatacgagagaccgaaggttacttagtattgttttctgtttcttttatcgtctttgcagatctatgtttggatgatgaaaacagtgctactcgatgtgaagtccaccaatactatagtttaaattaagtctaagatcggtgctttagagggaattggtaagagccagcaagcacttttttttgctggaattatggtagcagtcaggtttcagatttctatgagttcggtgaataaaatgagcttatgggtgttgtcaatcttttttaatttcctgaagttatgataaaaatatatagggtacctattcaaacaatatggttgttaaccgccaaatattttttataacaagttatattgtattatgcagtagataaaaaagataatagtttgtgtaattgtttagctaaaacataattatcttgatataaag

SEQ ID NO: 61560 - DNA, 2890 bp, Zea Mays
cgccgcagtcctcgcatccgcgcccgcagccgagcagtcctgccgcgcccgcagtcccgcagcgtcgccgcgctcgcgcttccccgcgacagccgccatgcgccctatctccgccgtgcctacgcctcctcccccgcccgcccgagacccgccaagtttcccttccttacacggcgagatccaccatcggcgcccccttccctggcgagccacagccgtccacgttcctggccaccggcgacctcccttctctagcccttagcggcgagccaacacctcctccccatggctgccctccagaccccagtcccgtccgcgcatccgctccctcatcagcgacgcaccgattctccccgacgtcgcccatggcgtggacagcgacctccctcaccctgcactctggctacaaaaggaagaatctcttatcttccgggtcaccaaaacaaatgaagttagtggtatagaaaaggaattagttgcttagatctctggacttgaggagcaaaggaatcaactcgaggcagaactgaaaaagctactactacatcctgaatctgatgattcagctcaactttcctagattgagactgaaaagctgctagcccagttagttgagactgagatgaacagacgtttgaaggaggacacttacaaaggaaagaagtttaatgcattctgtcacttcttgggctaccaagctaggggagcactgcctgcaaagtttgattgcgattatgcctacgttttggggcatgtgtgctaccacatcatagctgccggattgaacggataacggatacatgactacagtgacaaatcttaagaatccagtgaacaagtggcgatgtggtgcgactcctatttcgtattactactttattcgcttgatgggacgcaaggcttcccatgtggcattggaatgtgctcttcaatcacatccaaacatggtcaaattttcaccattgatccaacctctgctacggcaatttccaggtaggctccgcatcccctcccacaggttaatatttgaagtttgtgtttctctaaacacaaacatagcttcagtagaaaatagaaactgatacaagtttatatttgaagtttgtgtttagcacacagtgatgtttatatttgaagtttgtccttttctttgaagctaatattttgtaagtcatttcatggctccacgccgcccgtgcccttgccggctgacgacgccagcggcaggtggcagcctgctagctggtgggtcgggcaagcgcaggatgggctcctctgatgatatggaccatggctacacgatatctccacaagatactcctcaatttcttcgtgccatttgacattccttttttgtgcttcggaccatggcttcggttcttgtgtgttttgtttccttttttagagttctttttcagtgttttttggatagattgtgctctttaacctatgacactcgcaactgaacggttccatatactttcagcatcggcggtgtgctctttacaaagccttagagctgcctctcctgcaaagtctgaacttgcagagatagtcccacaagagaaatcaccaaaagattccattcaaccaatgtcaccgagtccaaggtattctacctcaagatgaagggcgactaccacaggtatactgttatcgctagcagatctagaccatgcaagttgtggtttgtagagatcaaaacttaagatctgtgtgtagatatttgtctagacaatgggagtgacaggatgctggtttttagtaaggttggttgcttatctatgaatttgcctgtatgatgcatgatcctgtgctgtctcctgtagtacatggttgaaatataaatttgtgttccatgttttttacccgccccctacacgtatctcttggatatctgatttctactcatgatgatttggcatgtaccttgctgagttcaagtcaggtgcatagaggaaggatgctgcggggagcaccatgaatccctacaaagctgctcgagtttcctctgactgttcaccattattggaagcaggtcaggcagagagccttggaaccgaactcttggagatggtgcctagcagggaagaggagattaagttgaaagaataaagggaggatgctttgtcgacttttgtagttaatgattatgtgagacttcagtttaagggctcaacttttactggttcttggaagtcatttagtagccctaagatttcatcagcattcttagtagtaattgctatagtatcaaatgggattgtggtatgagttgctcgagtactaagtactaacgttgttgtacattgtgaagctaagtgggtaatatcaaaagggattaagatttatgtgtggtgcttactgtatttgtttttattattttattgtgctttgtacatgtaccgtcattcttactctggtgttcttttaatgcaaagtttgacacaatatatttttatacgagagaccgaaggttacttagtattgttttctgtttcttttatcgtctttgcagatctatgtttggatgatgaaaacagtgctactcgatgtgaagtccaccaatactatagtttaaattaagtctaagatcggtgctttagagggaattggtaagagccagcaagcacttttttttgctggaattatggtagcagtcaggtttcagatttctatgagttcggtgaataaaatgagcttatgggtgttgtcaatcttttttaatttcctgaagttatgataaaaatatatagggtacctattcaaacaatatggttgttaaccgccaaatattttttataacaagttatattgtattatgcagtagataaaaaagataatagtttgtgtaattgtttagctaaaacataattatcttgatataaag

SEQ ID NO: 61561 - DNA, 2561 bp, Zea Mays
cgccgcagtcctcgcatccgcgcccgcagccgagcagtcctgccgcgcccgcagtcccgcagcgtcgccgcgctcgcgcttccccgcgacagccgccatgcgccctatctccgccgtgcctacgcctcctcccccgcccgcccgagacccgccaagtttcccttccttacacggcgagatccaccatcggcgcccccttccctggcgagccacagccgtccacgttcctggccaccggcgacctcccttctctagcccttagcggcgagccaacacctcctccccatggctgccctccagaccccagtcccgtccgcgcatccgctccctcatcagcgacgcaccgattctccccgacgtcgcccatggcgtggacagcgacctccctcaccctgcactctggctacaaaaggaagaatctcttatcttccgggtcaccaaaacaaatgaagttagtggtatagaaaagaaatacaacaccccatgatttcccattgaaacaaaaggaagacattcatatccatcattgcaattgcaaaagaaaaaaaatagcaggatgtgcaagctgttccaattgttttttcttttccaattcttagtccatgcaattgcctttatgcttctgcaatctgtctgattgatgattaatcaattaagttttgtaaaaggaattagttgcttagatctctggacttgaggagcaaaggaatcaactcgaggcagaactgaaaaagctactactacatcctgaatctgatgattcagctcaactttcctagattgagactgaaaagctgctagcccagttagttgagactgagatgaacagacgtttgaaggaggacacttacaaaggaaagaagtttaatgcattctgtcacttcttgggctaccaagctaggggagcactgcctgcaaagtttgattgcgattatgcctacgttttggggcatgtgtgctaccacatcatagctgccggattgaacggataacggatacatgactacagtgacaaatcttaagaatccagtgaacaagtggcgatgtggtgcgactcctatttcgagccgcgtgagaggaagctaaagggttctggcttaagctgtatcaggtcaaattttcaccattgatccaacctctgctacggcaatttccagcatcggcggtgtgctctttacaaagccttagagctgcctctcctgcaaagtctgaacttgcagagatagtcccacaagagaaatcaccaaaagattccattcaaccaatgtcaccgagtccaaggtattctacctcaagatgaagggcgactaccacaggtatactgttatcgctagcagatctagaccatgcaagttgtggtttgtagagatcaaaacttaagatctgtgtgtagatatttgtctagacaatgggagtgacaggatgctggtttttagtaaggttggttgcttatctatgaatttgcctgtatgatgcatgatcctgtgctgtctcctgtagtacatggttgaaatataaatttgtgttccatgttttttacccgccccctacacgtatctcttggatatctgatttctactcatgatgatttggcatgtaccttgctgagttcaagtcaggtgcatagaggaaggatgctgcggggagcaccatgaatccctacaaagctgctcgagtttcctctgactgttcaccattattggaagcaggtcaggcagagagccttggaaccgaactcttggagatggtgcctagcagggaagaggagattaagttgaaagaataaagggaggatgctttgtcgacttttgtagttaatgattatgtgagacttcagtttaagggctcaacttttactggttcttggaagtcatttagtagccctaagatttcatcagcattcttagtagtaattgctatagtatcaaatgggattgtggtatgagttgctcgagtactaagtactaacgttgttgtacattgtgaagctaagtgggtaatatcaaaagggattaagatttatgtgtggtgcttactgtatttgtttttattattttattgtgctttgtacatgtaccgtcattcttactctggtgttcttttaatgcaaagtttgacacaatatatttttatacgagagaccgaaggttacttagtattgttttctgtttcttttatcgtctttgcagatctatgtttggatgatgaaaacagtgctactcgatgtgaagtccaccaatactatagtttaaattaagtctaagatcggtgctttagagggaattggtaagagccagcaagcacttttttttgctggaattatggtagcagtcaggtttcagatttctatgagttcggtgaataaaatgagcttatgggtgttgtcaatcttttttaatttcctgaagttatgataaaaatatatagggtacctattcaaacaatatggttgttaaccgccaaatattttttataacaagttatattgtattatgcagtagataaaaaagataatagtttgtgtaattgtttagctaaaacataattatcttgatataaag

SEQ ID NO: 61562 - DNA, 4235 bp, Zea Mays
cgccgcagtcctcgcatccgcgcccgcagccgagcagtcctgccgcgcccgcagtcccgcagcgtcgccgcgctcgcgcttccccgcgacagccgccatgcgccctatctccgccgtgcctacgcctcctcccccgcccgcccgagacccgccaagtttcccttccttacacggcgagatccaccatcggcgcccccttccctggcgagccacagccgtccacgttcctggccaccggcgacctcccttctctagcccttagcggcgagccaacacctcctccccatggctgccctccagaccccagtcccgtccgcgcatccgctccctcatcagcgacgcaccgattctccccgacgtcgcccatggcgtggacagcgacctccctcaccctgcactctggctacaaaaggaagaatctcttatcttccgggtcaccaaaacaaatgaagttagtggtatagaaaaggtaatttttgtgctactagcttgtcatctgcaaaccaccacagtaatttttattagctaaatgatatgtcaatgggttaacaaggatttactctacatccatattgacagaaatacaacaccccatgatttcccattgaaacaaaaggaagacattcatatccatcattgcaattgcaaaagaaaaaaaatagcaggatgtgcaagctgttccaattgttttttcttttccaattcttagtccatgcaattgcctttatgcttctgcaatctgtctgattgatgattaatcaattaagttttgtaaaaggaattagttgcttagatctctggacttgaggagcaaaggaatcaactcgaggcagaactgaaaaaggcaatactattctctctatttccaccttcatgaagatctatcgttcaatatatttcttccaaaatatttcagcaacttacatagtggcaaaattgctgtttttttgctaaacagttcagggtggagacaaccaacagattttgctgtgaacattaatctttgttagttaggtttacttattcatagagggtaatgtttacatgagaggtttgtttttaaaagtgattctgaaactcagattacaggtgaatactaaattgaaagttgctacagtgaagcttaaaaaaactagagaggaacagaaccaatttgatgaagcaagcaatcagattgtgttgcacctaaaaccaaaggttaagtttttgtaggggtcgtaatgggatctaaaatttaaggatcaaatcagattaggatcatgctctatttttgttcatttttgaaaatcctatataagcatggtgaaagctgagaagagatattctcaacagaaacacctttgccatggaagccatggatttcctataaacaaatagctccagtgagtaaaattataaatgggtagtcataagacgtgtaaacgtacctaaagcagagcatatagttcaggaatattctccacaagtgtctcaaataatcagatccaagcaaccatgagcatgacaaaattaagtattagctactactacatcctgaatctgatgattcagctcaactttcctagattgagactgaaaagctgctagcccagttagttgagactgagatgaacagacgtttgccatttttgcagaaggaggacacttacaaaggaaagaagtttaatgcattctgtcacttcttgggctaccaagctaggggagcactgcctgcaaagtttgattgcgattatgcctacgttttggggcatgtgtgctaccacatcatagctgccggattgaacggataacggatacatgactacagtgacaaatcttaagaatccagtgaacaagtggcgatgtggtgcgactcctatttcggtaagatttgtgttgatatgcctaatagtttaggaaaagtaagaatgtagtgtctaacccatgtctatccctgcagtctatgatgactgtgaagcgatgatcaagtgattgttttatgtctgttttatatgcaaaaatataatcaagttttaccgaagatgctaccaaaagttttttcttatgaattttaattactgaatctaatttctgatccgccttgtgtctttactctaaatgatagtattactactttattcgcttgatgggacgcaaggcttcccatgtggcattggaatgtgctcttcaatcacatccaaacatggtatgttttttccttacttgcatgtgacctgtcacatttttttctcacatggatctggaagagccgcgtgagaggaagctaaagggttctggcttaagctgtatcaggtcaaattttcaccattgatccaacctctgctacggcaatttccaggtaggctccgcatcccctcccacaggttaatatttgaagtttgtgtttctctaaacacaaacatagcttcagtagaaaatagaaactgatacaagtttatatttgaagtttgtgtttagcacacagtgatgtttatatttgaagtttgtccttttctttgaagctaatattttgtaagtcatttcatggctccacgccgcccgtgcccttgccggctgacgacgccagcggcaggtggcagcctgctagctggtgggtcgggcaagcgcaggatgggctcctctgatgatatggaccatggctacacgatatctccacaagatactcctcaatttcttcgtgccatttgacattccttttttgtgcttcggaccatggcttcggttcttgtgtgttttgtttccttttttagagttctttttcagtgttttttggatagattgtgctctttaacctatgacactcgcaactgaacggttccatatactttcagcatcggcggtgtgctctttacaaagccttagagctgcctctcctgcaaagtctgaacttgcagagatagtcccacaagagaaatcaccaaaagattccattcaaccaatgtcaccgagtccaaggtattctacctcaagatgaagggcgactaccacaggtatactgttatcgctagcagatctagaccatgcaagttgtggtttgtagagatcaaaacttaagatctgtgtgtagatatttgtctagacaatgggagtgacaggatgctggtttttagtaaggttggttgcttatctatgaatttgcctgtatgatgcatgatcctgtgctgtctcctgtagtacatggttgaaatataaatttgtgttccatgttttttacccgccccctacacgtatctcttggatatctgatttctactcatgatgatttggcatgtaccttgctgagttcaagtcaggtgcatagaggaaggatgctgcggggagcaccatgaatccctacaaagctgctcgagtttcctctgactgttcaccattattggaagcaggtcaggcagagagccttggaaccgaactcttggagatggtgcctagcagggaagaggagattaagttgaaagaataaagggaggatgctttgtcgacttttgtagttaatgattatgtgagacttcagtttaagggctcaacttttactggttcttggaagtcatttagtagccctaagatttcatcagcattcttagtagtaattgctatagtatcaaatgggattgtggtatgagttgctcgagtactaagtactaacgttgttgtacattgtgaagctaagtgggtaatatcaaaagggattaagatttatgtgtggtgcttactgtatttgtttttattattttattgtgctttgtacatgtaccgtcattcttactctggtgttcttttaatgcaaagtttgacacaatatatttttatacgagagaccgaaggttacttagtattgttttctgtttcttttatcgtctttgcagatctatgtttggatgatgaaaacagtgctactcgatgtgaagtccaccaatactatagtttaaattaagtctaagatcggtgctttagagggaattggtaagagccagcaagcacttttttttgctggaattatggtagcagtcaggtttcagatttctatgagttcggtgaataaaatgagcttatgggtgttgtcaatcttttttaatttcctgaagttatgataaaaatatatagggtacctattcaaacaatatggttgttaaccgccaaatattttttataacaagttatattgtattatgcagtagataaaaaagataatagtttgtgtaattgtttagctaaaacataattatcttgatataaag

SEQ ID NO: 61563 - DNA, 2390 bp, Zea Mays
cgccgcagtcctcgcatccgcgcccgcagccgagcagtcctgccgcgcccgcagtcccgcagcgtcgccgcgctcgcgcttccccgcgacagccgccatgcgccctatctccgccgtgcctacgcctcctcccccgcccgcccgagacccgccaagtttcccttccttacacggcgagatccaccatcggcgcccccttccctggcgagccacagccgtccacgttcctggccaccggcgacctcccttctctagcccttagcggcgagccaacacctcctccccatggctgccctccagaccccagtcccgtccgcgcatccgctccctcatcagcgacgcaccgattctccccgacgtcgcccatggcgtggacagcgacctccctcaccctgcactctggctacaaaaggaagaatctcttatcttccgggtcaccaaaacaaatgaagttagtggtatagaaaagttgcttagatctctggacttgaggagcaaaggaatcaactcgaggcagaactgaaaaagctactactacatcctgaatctgatgattcagctcaactttcctagattgagactgaaaagctgctagcccagttagttgagactgagatgaacagacgtttgaaggaggacacttacaaaggaaagaagtttaatgcattctgtcacttcttgggctaccaagctaggggagcactgcctgcaaagtttgattgcgattatgcctacgttttggggcatgtgtgctaccacatcatagctgccggattgaacggataacggatacatgactacagtgacaaatcttaagaatccagtgaacaagtggcgatgtggtgcgactcctatttcgtattactactttattcgcttgatgggacgcaaggcttcccatgtggcattggaatgtgctcttcaatcacatccaaacatggtcaaattttcaccattgatccaacctctgctacggcaatttccagcatcggcggtgtgctctttacaaagccttagagctgcctctcctgcaaagtctgaacttgcagagatagtcccacaagagaaatcaccaaaagattccattcaaccaatgtcaccgagtccaaggtattctacctcaagatgaagggcgactaccacaggtatactgttatcgctagcagatctagaccatgcaagttgtggtttgtagagatcaaaacttaagatctgtgtgtagatatttgtctagacaatgggagtgacaggatgctggtttttagtaaggttggttgcttatctatgaatttgcctgtatgatgcatgatcctgtgctgtctcctgtagtacatggttgaaatataaatttgtgttccatgttttttacccgccccctacacgtatctcttggatatctgatttctactcatgatgatttggcatgtaccttgctgagttcaagtcaggtgcatagaggaaggatgctgcggggagcaccatgaatccctacaaagctgctcgagtttcctctgactgttcaccattattggaagcaggtcaggcagagagccttggaaccgaactcttggagatggtgcctagcagggaagaggagattaagttgaaagaataaagggaggatgctttgtcgacttttgtagttaatgattatgtgagacttcagtttaagggctcaacttttactggttcttggaagtcatttagtagccctaagatttcatcagcattcttagtagtaattgctatagtatcaaatgggattgtggtatgagttgctcgagtactaagtactaacgttgttgtacattgtgaagctaagtgggtaatatcaaaagggattaagatttatgtgtggtgcttactgtatttgtttttattattttattgtgctttgtacatgtaccgtcattcttactctggtgttcttttaatgcaaagtttgacacaatatatttttatacgagagaccgaaggttacttagtattgttttctgtttcttttatcgtctttgcagatctatgtttggatgatgaaaacagtgctactcgatgtgaagtccaccaatactatagtttaaattaagtctaagatcggtgctttagagggaattggtaagagccagcaagcacttttttttgctggaattatggtagcagtcaggtttcagatttctatgagttcggtgaataaaatgagcttatgggtgttgtcaatcttttttaatttcctgaagttatgataaaaatatatagggtacctattcaaacaatatggttgttaaccgccaaatattttttataacaagttatattgtattatgcagtagataaaaaagataatagtttgtgtaattgtttagctaaaacataattatcttgatataaag

SEQ ID NO: 61564 - DNA, 2421 bp, Zea Mays
ctccatccccgcgcccgcagtccccgccgcagtcctcgcatccgcgcccgcagccgagcagtcctgccgcgcccgcagtcccgcagcgtcgccgcgctcgcgcttccccgcgacagccgccatgcgccctatctccgccgtgcctacgcctcctcccccgcccgcccgagacccgccaagtttcccttccttacacggcgagatccaccatcggcgcccccttccctggcgagccacagccgtccacgttcctggccaccggcgacctcccttctctagcccttagcggcgagccaacacctcctccccatggctgccctccagaccccagtcccgtccgcgcatccgctccctcatcagcgacgcaccgattctccccgacgtcgcccatggcgtggacagcgacctccctcaccctgcactctggctacaaaaggaagaatctcttatcttccgggtcaccaaaacaaatgaagttagtggtatagaaaaggaattagttgcttagatctctggacttgaggagcaaaggaatcaactcgaggcagaactgaaaaagctactactacatcctgaatctgatgattcagctcaactttcctagattgagactgaaaagctgctagcccagttagttgagactgagatgaacagacgtttgaaggaggacacttacaaaggaaagaagtttaatgcattctgtcacttcttgggctaccaagctaggggagcactgcctgcaaagtttgattgcgattatgcctacgttttggggcatgtgtgctaccacatcatagctgccggattgaacggataacggatacatgactacagtgacaaatcttaagaatccagtgaacaagtggcgatgtggtgcgactcctatttcgtattactactttattcgcttgatgggacgcaaggcttcccatgtggcattggaatgtgctcttcaatcacatccaaacatggtcaaattttcaccattgatccaacctctgctacggcaatttccagcatcggcggtgtgctctttacaaagccttagagctgcctctcctgcaaagtctgaacttgcagagatagtcccacaagagaaatcaccaaaagattccattcaaccaatgtcaccgagtccaaggtattctacctcaagatgaagggcgactaccacaggtatactgttatcgctagcagatctagaccatgcaagttgtggtttgtagagatcaaaacttaagatctgtgtgtagatatttgtctagacaatgggagtgacaggatgctggtttttagtaaggttggttgcttatctatgaatttgcctgtatgatgcatgatcctgtgctgtctcctgtagtacatggttgaaatataaatttgtgttccatgttttttacccgccccctacacgtatctcttggatatctgatttctactcatgatgatttggcatgtaccttgctgagttcaagtcaggtgcatagaggaaggatgctgcggggagcaccatgaatccctacaaagctgctcgagtttcctctgactgttcaccattattggaagcaggtcaggcagagagccttggaaccgaactcttggagatggtgcctagcagggaagaggagattaagttgaaagaataaagggaggatgctttgtcgacttttgtagttaatgattatgtgagacttcagtttaagggctcaacttttactggttcttggaagtcatttagtagccctaagatttcatcagcattcttagtagtaattgctatagtatcaaatgggattgtggtatgagttgctcgagtactaagtactaacgttgttgtacattgtgaagctaagtgggtaatatcaaaagggattaagatttatgtgtggtgcttactgtatttgtttttattattttattgtgctttgtacatgtaccgtcattcttactctggtgttcttttaatgcaaagtttgacacaatatatttttatacgagagaccgaaggttacttagtattgttttctgtttcttttatcgtctttgcagatctatgtttggatgatgaaaacagtgctactcgatgtgaagtccaccaatactatagtttaaattaagtctaagatcggtgctttagagggaattggtaagagccagcaagcacttttttttgctggaattatggtagcagtcaggtttcagatttctatgagttcggtgaataaaatgagcttatgggtgttgtcaatcttttttaatttcctgaagttatgataaaaatatatagggtacctattcaaacaatatggttgttaaccgccaaatattttttataacaagttatattgtattatgcagtagataaaaaagataatagtttgtgtaattgtttagctaaaacataattatcttgatataaag

SEQ ID NO: 61565 - DNA, 1787 bp, Zea Mays
gtcaaactaacttcagagaccggctgctggttctccaccaaactaaccaaccatgcgtccgtcgtcgcgttacccgccgcaacccgcgctacctgcccctagccggggagcagctccccgacgccgtggactggcgcgagcgcggcgccgtcgccgaggtcaaggaccagggccaatgcggtccgtacgttgttccatgctctgctcttctgctttttttctccccctgcaagcagatctcaaactttggaacagtctctcgaagtgcatagtttgaagaaaaaaaaaagtagcacaagaagaatggatcggtggaactgattctagtttcacaaggctgcataccagagtggacgtttttttctctaaaagctttagggcgggccaaatctagagagaaatctcaaatctgcatgttcttctgtgaaattcagggcttagttatctcatggtttggtggcgtgagaggtgcaggtgcgtgctgggcgttctcggcggtggcagcggtggaagggatcaacaagatcgtgacaggcagcctcatctcgctgtcggagcaggagcttatcgactgcgataagttccaggaccagggctgcgatggcggcttaatggacaatgctttcgtgttcatgatcaagaacggcgggatcgacaccgaggccgactacccgttcactggccacgacgggacgtgcgatctcaaactgaaaaatacaagggttgtatccatagattcgttcgagcgtgtgcccatcaactacgagagagcgctgcagaaggccgtggcgcaccagcctgttagtgccagcattgaagcatctcggcgcgcgttccagctctacagttctggcatcttcgacgggagatgcgggacgtacctggaccacggtgtgacggtggtggggtacggcagcgagggcggcaaggactactggatcgtgaagaactcgtggggcacccagtggggcgaggccgggtacgtccggatggcgcgcaacgtcagggtgagggccggcaagtgcggcatcgccatggagccgctgtacccggtgaaggagggcccgaacccgccgccgggcccgacgccgccgtcgcccgtgaagccgcctaacgtgtgcaacgcggagtactcgtgcccggaggccaccacctgctgctgcgtctccgagtaccgcggcaaatgcctcgcatacggctgctgcgagctggagaacgccacctgctgcgaggaccactcgtcctgctgcccgcacgactaccccgtctgcagcgtccgggacgggacctgccgtaagagcgccaacagcccgatgatggtgaaggctctgcagcgcaagccggcgatgtatactggcggcggcggcggcggcgagcaaagcgggaggagcagctggtgaggagattgagactgtggtggtgcgtggcgtgtactgttcatcgttcagacagatgacttgctggccatgctgtgggctcaggaactgcttcttcacagtggcgatgttctgatctgtaatgcacgaagcacgatactatttgttgtatatgtatgtatgtgtaactacagataagattaggaacggtgtgaaagaataaagaaaccgatggaataagtgatttgggaacaatctcagaatcaatttatgcagccctttaggataacttcgggaacagtcttgcacaaacaacaaggtaataatgcattcactcgtcgtgttatgtaaaacatgttctccagaacaaagctcagatttgcagtgaatatattcctgaattcaagttcg

SEQ ID NO: 61566 - DNA, 1447 bp, Zea Mays
gtcaaactaacttcagagaccggctgctggttctccaccaaactaaccaaccatgcgtccgtcgtcgcgttacccgccgcaacccgcgctactcgctctcgctctcgccctcgccctcgcggcggcggccccggagctgagacccctcgccgccgccgtcaccgtcacgccgccgccggagcggacggacgaggaggtgcggcggctgtacgaggagtggaggtcggagcacgacgcggggccgaggcgtggcgccaccggcggcagcctcggcccgggcgaggacgacgacgcgcggcggctggaggtgttccgctacaacctccgctacatcgacgcgcacaacgcggaggcggacgcggggctccacggcttccgcctcggcctcacccgcttcgccgacctcaccctggaggagtaccgcgcccgcctcctccttggctcccgcggccgcaacggcaccgcggtgggcgtcgtcgggagccgccgctacctgcccctagccggggagcagctccccgacgccgtggactggcgcgagcgcggcgccgtcgccgaggtcaaggaccagggccaatgcggtgcgtgctgggcgttctcggcggtggcagcggtggaagggatcaacaagatcgtgacaggcagcctcatctcgctgtcggagcaggagcttatcgactgcgataagttccaggaccagggctgcgatggcggcttaatggacaatgctttcgtgttcatgatcaagaacggcgggatcgacaccgaggccgactacccgttcactggccacgacgggacgtgcgatctcaaactgaaaaatacaagggttgtatccatagattcgttcgagcgtgtgcccatcaactacgagagagcgctgcagaaggccgtggcgcaccagcctgttagtgccagcattgaagcatctcggcgcgcgttccagctctacagttctagcgccaacagcccgatgatggtgaaggctctgcagcgcaagccggcgatgtatactggcggcggcggcggcggcgagcaaagcgggaggagcagctggtgaggagattgagactgtggtggtgcgtggcgtgtactgttcatcgttcagacagatgacttgctggccatgctgtgggctcaggaactgcttcttcacagtggcgatgttctgatctgtaatgcacgaagcacgatactatttgttgtatatgtatgtatgtgtaactacagataagattaggaacggtgtgaaagaataaagaaaccgatggaataagtgatttgggaacaatctcagaatcaatttatgcagccctttaggataacttcgggaacagtcttgcacaaacaacaaggtaataatgcattcactcgtcgtgttatgtaaaacatgttctccagaacaaagctcagatttgcagtgaatatattcctgaattcaagttcg

SEQ ID NO: 61567 - DNA, 1829 bp, Zea Mays
gtcaaactaacttcagagaccggctgctggttctccaccaaactaaccaaccatgcgtccgtcgtcgcgttacccgccgcaacccgcgctactcgctctcgctctcgccctcgccctcgcggcggcggccccggagctgagacccctcgccgccgccgtcaccgtcacgccgccgccggagcggacggacgaggaggtgcggcggctgtacgaggagtggaggtcggagcacgacgcggggccgaggcgtggcgccaccggcggcagcctcggcccgggcgaggacgacgacgcgcggcggctggaggtgttccgctacaacctccgctacatcgacgcgcacaacgcggaggcggacgcggggctccacggcttccgcctcggcctcacccgcttcgccgacctcaccctggaggagtaccgcgcccgcctcctccttggctcccgcggccgcaacggcaccgcggtgggcgtcgtcgggagccgccgctacctgcccctagccggggagcagctccccgacgccgtggactggcgcgagcgcggcgccgtcgccgaggtcaaggaccagggccaatgcggtgcgtgctgggcgttctcggcggtggcagcggtggaagggatcaacaagatcgtgacaggcagcctcatctcgctgtcggagcaggagcttatcgactgcgataagttccaggaccagggctgcgatggcggcttaatggacaatgctttcgtgttcatgatcaagaacggcgggatcgacaccgaggccgactacccgttcactggccacgacgggacgtgcgatctcaaactgaaaaatacaagggttgtatccatagattcgttcgagcgtgtgcccatcaactacgagagagcgctgcagaaggccgtggcgcaccagcctgttagtgccagcattgaagcatctcggcgcgcgttccagctctacagttctcgagggcggcaaggactactggatcgtgaagaactcgtggggcacccagtggggcgaggccgggtacgtccggatggcgcgcaacgtcagggtgagggccggcaagtgcggcatcgccatggagccgctgtacccggtgaaggagggcccgaacccgccgccgggcccgacgccgccgtcgcccgtgaagccgcctaacgtgtgcaacgcggagtactcgtgcccggaggccaccacctgctgctgcgtctccgagtaccgcggcaaatgcctcgcatacggctgctgcgagctggagaacgccacctgctgcgaggaccactcgtcctgctgcccgcacgactaccccgtctgcagcgtccgggacgggacctgccgtaagagcgccaacagcccgatgatggtgaaggctctgcagcgcaagccggcgatgtatactggcggcggcggcggcggcgagcaaagcgggaggagcagctggtgaggagattgagactgtggtggtgcgtggcgtgtactgttcatcgttcagacagatgacttgctggccatgctgtgggctcaggaactgcttcttcacagtggcgatgttctgatctgtaatgcacgaagcacgatactatttgttgtatatgtatgtatgtgtaactacagataagattaggaacggtgtgaaagaataaagaaaccgatggaataagtgatttgggaacaatctcagaatcaatttatgcagccctttaggataacttcgggaacagtcttgcacaaacaacaaggtaataatgcattcactcgtcgtgttatgtaaaacatgttctccagaacaaagctcagatttgcagtgaatatattcctgaattcaagttcg

SEQ ID NO: 61568 - DNA, 812 bp, Zea Mays
cgtcaaactaattaagcaccccgaaaacatctgcagccctgcagaattccggttggctggcgcgcgcgcgtcgcccgccctcgacacgaggacttggcgtcttcgtttcgttgccaattggcgacgcctccatccggcagcgacgacgacattgccagcagccgtcgctagctagctagctagctcatggcactgctcccgctgttcctgaggccggtggtccggttcgcggcgcgcgtggcggccggcgggccggcggccgcggcggcgacgatcctgcaccgcgccggcgcgctgccgaggaaccggggcctggagcgcctcgtccgggacgacgacgtcgacgacgacgacgagctccacggccgcggccacgacgactgcatcgctagcttcgtcgtcggcgtcatgcgctgcctctgctagctagtagtctagtctagtctagtctagatggcgcatgcagcagtgctggccatggacgacgtgacatgcgtgcacgcacgtagcaatggcgcgcgacgctggtgtagattcagctagctgactagctctggctagctagtagagctagagagaggggaaacgggctccattgttctcgccttctcggagggaatccaccttgatgaattcgtgaatttgtagcagggaatgaagttgcattgcaatgctgacctttaccttctgcatgtgcacctctcagctgaaggcattttattacagctagctgcggctagatgtaggaatcaagtgtaccccttgcaaaatatggtattcacatgacaaacgaacgaacgaacaaaaaaaaa

SEQ ID NO: 61569 - DNA, 1407 bp, Zea Mays
gtcaaaagcacactgcaccaccaacctttcctggcttcatctcctcctttcctccccaaaagacacaagagggggaagagagagagaggagaggcagagagaagagggggaggcagtccagtgtccacgcaggtacgctccacagaagagagatggcgatgcggatggcggcggcggcagtggcgctggtggcggtgatgggcgtgctggcgccccgagcggcggcgcagacgccgaactgcgcggagaagctgatcccgtgctcgccgtacatgaacacgacggggacgccgccggatacctgctgcggcccgctcaaggacgccgtccagaacgacctcaagtgcctctgcgacctctacgcctcgccggagatcttcaaggccttcaacatcagcctcgaccaggccctcggcctctccaagcgttgcggcctcagcgacaccaccgccgcctgcaagggcctttctcctacgcagtctcctccaggtaaccccctcttagcttgctgtgcttcagttacaacactttgggttttgtgaagtcttcacataaaactgcatctcaacaactgcataattaatatgccaacaacaactgcatctgaaacaggaagcgacatgcattgagtgatcctcgctctacgttttccaaccgggcacacctagctaactagctagacaaaaggcatgcaacttcgttctcacaaccctccttgcattgcacttgcaggttcgccgccatcaggcggcagcagcaacgccgcccgtcgcgctctgccggccagtttcgcgggactggtgacgagcttgttcctagctctgtggtctgtattattggcgtaaattaaaagctccgcatgctgcaacgggcggcaatgcttgttgcttgtcttatcccacagtagatgatttcacttgcacatacgatacgatcaacatttgttttgctgtgctgtgtgtctgatgagatcagaatttctcattggttccttcgtggtgttcgtgttagactctgcacaattaaatggaaggtttctggctagttgctactatgtgttgtgtatgtcagtatgtgcttggttaccaatgtactctcaccagtacagatcactgaaccactttgtccgctgatagctacatggaacgcgaagcagccactacagttgagcttgagcaacctctgaattctggagcccggttgcctcgtatcattacgtggaccaataaccatctctccagaatcgctatttctacctattattcgttcagcctgccaacggcctacgtcatctctgctcaagagtagtgctgggaatatagtccaatatttttaagataagaatgagcacgacactatatctgtttttagttcggcaacgactgctatgcaagcagtccttctgtg

SEQ ID NO: 61570 - DNA, 3188 bp, Zea Mays
cccatgtcagctgaggtctgctcacctgtgtgagagagagtgtgtgagtgtgaccgtgggtggggtggggaggaagacgagcccgtcgagctgtgccgattttgcccccgaatccgtcgttacccctgctttggagggatctgaaggtgctggtggcctgctgctgcctgcctgtctgccaggagcccagaggccagagcagagactgtggtggtggtgatggcggctgtgcagcggaaaggcttctcgtcgtggtactagtggaggaggcgtgaaatttcatccataaaggctgtcgcggtggccggtgggtggagatcgcgctcaattcccgccgaaaccgcctccggggtagcgtggccgcgggaagtgggagtgggagatgattactttcgtggactcggcggccatggagctggagagggagagcggcaggtgcctggtggacccgcagctgtggcacgcctgcgccggcggcatggtccagatgccgccggtgcactccagggtgtactacttcccgcagggccacgccgagcacgcgcagggccacgcccacgccgacctccccgccggccgggtcccggccctcgtcctctgccgcgtcgacgccgtccggttcctggccgatccggacaccgacgaggtgctcgccagggtccgcctcgcccccgtccggcccaacgagccggaccacgccgacgccgcggcgccgggcgcgcgggaggacaagcccgcgtccttcgccaagacgctcacgcagtccgacgccaacaacggcgggggcttctccgtgccgcggtactgcgccgagaccatcttcccgcggctggactactccgccgacccgcccgtccagaccgtgctcgccaaggacgtgcacggcgtcgtctggaagttccgccacatctaccgcggcacgccccggcgccacctgctcaccaccgggtggagcgccttcgtgaaccagaagaggctcgtcgcgggggactccatcgtgttcatgaggacggggaacggggacctctgcgtcggcatccggcgcgccaaaaagggcggcatcggaggagggccggagttcccgcaccaccagccgccagacggcggcgggtacgggtacgggtacgccggcttctccacgttcctgagaggagaagaggacgacgcggccgcgaggggcaaggtcagggtgctggtgcggccggaggaggtcgtcgaggccgccaacctcgcggcgagcgggcagccgttcgaggtggtctactacccgagggcgagcacgccggagttctgcgtcaaggcgggggcggtccgcgcggccatgcgcacccagtggtgcgccgggatgaggttcaagatggccttcgagacggaggactcgtccaggatcagctggttcatgggcactgtcgccgccgtgcaggtcgctgaccccatccgatggcccaattcaccctggaggcttcttcagaacgtgaagagagtgagcccatggctggtcgagcttgtctcaagcacgccggccatccaccacctcacgccgttctcgccgccaagcaggaagaagctgtgtatcccattgtacccggagggccaccagctcccggcgccgatgttccacggaagccctctggtgggccgtggtgttggcccgatgcgctacttcccggacggcggcactcctcctgcaggcatacagggagccaggcatgcgcaattcggcatatctttaccagatctccaccacctcaccaggctgcagtcgagtctatcgccgcacgcgcacgggcttcgccaccagctcgaccacggcgcgcggccgaggatcgccggcggcctcatcgtcggccacccggcagctcgggacgacatctcgtgcttgctcaccattggcaccgccccgcacaagaaaccatcagacgtcaagtcggccgcggcggcgccggcgccgcagctgatgctgtttgggaaaccgattctcaccgagcagcagatatctctaggctttcggccgctgccggcgccgaagaagagcccgtccgacgacgctgctgagactgagaggacggtgagcaacaactcggatgcctcgagcccagctgggactgcgagtgggagcacgccgtccatcagtggaggcgccccgtcgtcgtgccaggacaacaaggcggcggcgacggcgacggcgactgatgacgacgatctcctcgggcactgcaaggtgttcatgcagtcggaggacgtcgggcgcacgctcgacctctcggctgtcgcgtcgtacgaggagctctaccagaggctggccgacatgttcggcgtcgacagggccgagctgacgagccatgtcttctaccgcgacggcgcttctggagcgctcaagcacgccggcgacgagcctttcaggtccgtacggtggttttcgtcagtctgaagcggcgttcggttcctgtgtcgcttacttgctagtgttcctggccgtggtgctaagcattccaacctaactactagacacggttatcttcaagcatcaaactcatctaggtgttctttccttggaagcatccgatcctcatgtgagttcaccaagaccgctcggaggctgaccatacaaacggacgcgaggtagaagaaggcggcagacaatgaagctctcgtcgcctgtacaaccggggggagctagcgagccgcggcggcgatctcgaaggacgatcgccacttgcagagtgctggtgcagactgcagagagggcggtgctgctgtcgtgtcggtcgtttcttatcagctcttttgttgcctgcaaaatgaatttaaagaatgtgctctgtcacgctgccacgtcagtcagtcagcacgcagtcgacaccgcccaccggtactgttccactgctatgtggccgtgttgcgtccatgccctgtcgttgttcctgttgccgggtataagtgtacattcgggccgcccggctcggcccggcccaagcctgaaaaggctcgtattgtttgaatttcgggccggtccggtccgtttgaatttcgggccgtgccgggccggcccatgggcctagctctcggcccacggcccggcccgtaattgcttaaacgtgccaggctcatttcgggcggcccgaaattataaaagcccgaaattcacattacggcccgaaatttaattttagacccgaaattcagtt

SEQ ID NO: 61571 - DNA, 3345 bp, Zea Mays
atttgcctgattgtttccttctgattccgatcgatcgagagagatagagagagaacggctacgagagacatgagacagcagtggacaatgagtacaatgatgcagctcgtcgttgtggaaaatagcactagcgctggcactttgggtgtgcaactgaaaagtaacaataagcaatttacaattaattaagccactaagcagagtaggcagaggtatccccttcagatgcagagctgtttgcttgactgccctttctctcttcctctctctctctctatttattagttgttttgctgcccccatgtcagctgaggtctgctcacctgtgtgagagagagtgtgtgagtgtgaccgtgggtggggtggggaggaagacgagcccgtcgagctgtgccgattttgcccccgaatccgtcgttacccctgctttggagggatctgaaggtgctggtggcctgctgctgcctgcctgtctgccaggagcccagaggccagagcagagactgtggtggtggtgatggcggctgtgcagcggaaaggcttctcgtcgtggtactagtggaggaggcgtgaaatttcatccataaaggctgtcgcggtggccggtgggtggagatcgcgctcaattcccgccgaaaccgcctccggggtagcgtggccgcgggaagtgggagtgggagatgattactttcgtggactcggcggccatggagctggagagggagagcggcaggtgcctggtggacccgcagctgtggcacgcctgcgccggcggcatggtccagatgccgccggtgcactccagggtgtactacttcccgcagggccacgccgagcacgcgcagggccacgcccacgccgacctccccgccggccgggtcccggccctcgtcctctgccgcgtcgacgccgtccggttcctggccgatccggacaccgacgaggtgctcgccagggtccgcctcgcccccgtccggcccaacgagccggaccacgccgacgccgcggcgccgggcgcgcgggaggacaagcccgcgtccttcgccaagacgctcacgcagtccgacgccaacaacggcgggggcttctccgtgccgcggtactgcgccgagaccatcttcccgcggctggactactccgccgacccgcccgtccagaccgtgctcgccaaggacgtgcacggcgtcgtctggaagttccgccacatctaccgcggcacgccccggcgccacctgctcaccaccgggtggagcgccttcgtgaaccagaagaggctcgtcgcgggggactccatcgtgttcatgaggacggggaacggggacctctgcgtcggcatccggcgcgccaaaaagggcggcatcggaggagggccggagttcccgcaccaccagccgccagacggcggcgggtacgggtacgggtacgccggcttctccacgttcctgagaggagaagaggacgacgcggccgcgaggggcaaggtcagggtgctggtgcggccggaggaggtcgtcgaggccgccaacctcgcggcgagcgggcagccgttcgaggtggtctactacccgagggcgagcacgccggagttctgcgtcaaggcgggggcggtccgcgcggccatgcgcacccagtggtgcgccgggatgaggttcaagatggccttcgagacggaggactcgtccaggatcagctggttcatgggcactgtcgccgccgtgcaggtcgctgaccccatccgatggcccaattcaccctggaggcttcttcaggtcgcttgggatgaaccggacttgttacagaacgtgaagagagtgagcccatggctggtcgagcttgtctcaagcacgccggccatccaccacctcacgccgttctcgccgccaagcaggaagaagctgtgtatcccattgtacccggagggccaccagctcccggcgccgatgttccacggaagccctctggtgggccgtggtgttggcccgatgcgctacttcccggacggcggcactcctcctgcaggcatacagggagccaggcatgcgcaattcggcatatctttaccagatctccaccacctcaccaggctgcagtcgagtctatcgccgcacgcgcacgggcttcgccaccagctcgaccacggcgcgcggccgaggatcgccggcggcctcatcgtcggccacccggcagctcgggacgacatctcgtgcttgctcaccattggcaccgccccgcacaagaaaccatcagacgtcaagtcggccgcggcggcgccggcgccgcagctgatgctgtttgggaaaccgattctcaccgagcagcagatatctctaggctttcggccgctgccggcgccgaagaagagcccgtccgacgacgctgctgagactgagaggacggtgagcaacaactcggatgcctcgagcccagctgggactgcgagtgggagcacgccgtccatcagtggaggcgccccgtcgtcgtgccaggacaacaaggcggcggcgacggcgacggcgactgatgacgacgatctcctcgggcactgcaaggtgttcatgcagtcggaggacgtcgggcgcacgctcgacctctcggctgtcgcgtcgtacgaggagctctaccagaggctggccgacatgttcggcgtcgacagggccgagctgacgagccatgtcttctaccgcgacggcgcttctggagcgctcaagcacgccggcgacgagcctttcagtgagttcaccaagaccgctcggaggctgaccatacaaacggacgcgaggtagaagaaggcggcagacaatgaagctctcgtcgcctgtacaaccggggggagctagcgagccgcggcggcgatctcgaaggacgatcgccacttgcagagtgctggtgcagactgcagagagggcggtgctgctgtcgtgtcggtcgtttcttatcagctcttttgttgcctgcaaaatgaatttaaagaatgtgctctgtcacgctgccacgtcagtcagtcagcacgcagtcgacaccgcccaccggtactgttccactgctatgtggccgtgttgcgtccatgccctgtcgttgttcctgttgccgggtataagtgtacattcgggccgcccggctcggcccggcccaagcctgaaaaggctcgtattgtttgaatttcgggccggtccggtccgtttgaatttcgggccgtgccgggccggcccatgggcctagctctcggcccacggcccggcccgtaattgcttaaacgtgccaggctcatttcgggcggcccgaaattataaaagcccgaaattcacattacggcccgaaatttaattttagacccgaaattcagtt

SEQ ID NO: 61572 - DNA, 1106 bp, Zea Mays
atgacccagctgccttcaaagttcaaaaacaaaatgatggtggtgagggtggacgagaaccctgcgccggatggagagaactctcccctggacgatgagtacgtctcggccgacgatgagcacgttgacaatgaagacaaggagaccgatagcatcggcgactacgaaaaccccagtggggcgccccactgggactgcgagtgggagcacgccgtccatcagtggaggcgccccgtcgtcgtgccaggacaacaaggcggcggcgacggcgacggcgactgatgacgacgatctcctcgggcactgcaaggtgttcatgcagtcggaggacgtcgggcgcacgctcgacctctcggctgtcgcgtcgtacgaggagctctaccagaggctggccgacatgttcggcgtcgacagggccgagctgacgagccatgtcttctaccgcgacggcgcttctggagcgctcaagcacgccggcgacgagcctttcagtgagttcaccaagaccgctcggaggctgaccatacaaacggacgcgaggtagaagaaggcggcagacaatgaagctctcgtcgcctgtacaaccggggggagctagcgagccgcggcggcgatctcgaaggacgatcgccacttgcagagtgctggtgcagactgcagagagggcggtgctgctgtcgtgtcggtcgtttcttatcagctcttttgttgcctgcaaaatgaatttaaagaatgtgctctgtcacgctgccacgtcagtcagtcagcacgcagtcgacaccgcccaccggtactgttccactgctatgtggccgtgttgcgtccatgccctgtcgttgttcctgttgccgggtataagtgtacattcgggccgcccggctcggcccggcccaagcctgaaaaggctcgtattgtttgaatttcgggccggtccggtccgtttgaatttcgggccgtgccgggccggcccatgggcctagctctcggcccacggcccggcccgtaattgcttaaacgtgccaggctcatttcgggcggcccgaaattataaaagcccgaaattcacattacggcccgaaatttaattttagacccgaaattcagtt

SEQ ID NO: 61573 - DNA, 1903 bp, Zea Mays
ggatgacccagctgccttcaaagttcaaaaacaaaatgatggtggtgagggtggacgagaaccctgcgccggatggagagaactctcccctggacgatgagtacgtctcggccgacgatgagcacgttgacaatgaagacaaggagaccgatagcatcggcgactacgaaaaccccagtggggcgccccagttgaagaagggtccttggtcgcccgaagaggataagcgtcttaaagactacgtcgaggtacacggcgcggggaactggaataaggtgcagaagaatgccatgctcaaccgttgtggcaagagctgccgtctccgctggaccaaccacctcaggcccgatcttaagaaggatcctttcgacgctgaggaagaggaaaagataatcaagctttacatcagttgcctggccgcacagataatgaaataaaaaacttttggaataccagaaaaaggagaaaacagagatgtggttcgcctctccatccagaatatatgctttctcagcttagtcataaagacatggactgtgaaactcctggagaatcacatggcaagaaacggtcaaatgagtgctcaaaagaaaaggttgttgatgtgcaagaacttgtggatgagttaattgtatttgagcaccttgactatggtaaggatacagtgtttccaaccagacctttgaaatgccatgcatctactagtagtgtgcaaattcctggtgccattgagaaaaccttttgtcccactgatttgaactatgtaatgacaaagaatcagtcggtgcatgttggtagtgccattggcagtggctatccagtatatggtggcagactctctacttcagggaccatattcggttccattcagacagagatcccttcgatccaaagttccagctatagcccaagtaatgactggttggctcaatgtccttcggcttgcattgagcaacggattccaatggaatgcaatacaatatctcagtcaaaagcttaccttatgatgcattcttcttcagctttctgtgcccctgaacatgaggcctgttctgaaactcaagctccagacttatgttcaggttcagatgctgttttcgaccccagccagtgttatccagttgctagtttttctgatcttgggatctcggatacactactaacaaaaggtctcttgaatgatatagcactagcaagtttgttgaatgttaatttgaaggaccagtcacatatcaacaggcaggaacctaccaatgatacatcactaggaggagcaagtttcttgaatgctaatttgaaggaccagtcacatctcaactggcaggaacatatgaatgagacatcaccagtagcaggtttattgaatgctaatttggaggagcagtcacatctcaactggcaggaacctaagaatgagtcatcaccagaagcaggtttcttgaatgctaatttggaggagcagtcacatctcaactggcccttgcaggaatgtgagccatggattgagagacaaatgttttgaccaatagtttgatccttgttacaagcctgacttcccatgttcctgagcagcagtttcctctactgcacaaccagggccagagtgagcaacaaccaagatattcttgtgagcgtgatggaaattacattttagttctctgccttcgctgtcttaagctctctgaagtattgtcttcgactttgctgggatgatgagctgctgccccgagacaacaacagtcagccagaccaaaatcacttaaatagttttaacaatgtattaagttttgtcttgttacctgctgtctggcgtctgccatgttttgtccactgttaaacttgtctaataatacccttttagggctaatttggaaagcctcaatgtcttaagttttgtcttggt

SEQ ID NO: 61574 - DNA, 1955 bp, Zea Mays
attaaaggagccctagcttttggaggatgacccagctgccttcaaagttcaaaaacaaaatgatggtggtgagggtggacgagaaccctgcgccggatggagagaactctcccctggacgatgagtacgtctcggccgacgatgagcacgttgacaatgaagacaaggagaccgatagcatcggcgactacgaaaaccccagtggggcgccccagttgaagaagggtccttggtcgcccgaagaggataagcgtcttaaagactacgtcgaggtacacggcgcggggaactggaataaggtgcagaagaatgccatgctcaaccgttgtggcaagagctgccgtctccgctggaccaaccacctcaggcccgatcttaagaaggatcctttcgacgctgaggaagaggaaaagataatcaagctttacatcaggtggggccccaagtggtccatgatggcctcatatttgcctggccgcacagataatgaaataaaaaacttttggaataccagaaaaaggagaaaacagagatgtggttcgcctctccatccagaatatatgctttctcagcttagtcataaagacatggactgtgaaactcctggagaatcacatggcaagaaacggtcaaatgagtgctcaaaagaaaaggttgttgatgtgcaagaacttgtggatgagttaattgtatttgagcaccttgactatggtaaggatacagtgtttccaaccagacctttgaaatgccatgcatctactagtagtgtgcaaattcctggtgccattgagaaaaccttttgtcccactgatttgaactatgtaatgacaaagaatcagtcggtgcatgttggtagtgccattggcagtggctatccagtatatggtggcagactctctacttcagggaccatattcggttccattcagacagagatcccttcgatccaaagttccagctatagcccaagtaatgactggttggctcaatgtccttcggcttgcattgagcaacggattccaatggaatgcaatacaatatctcagtcaaaagcttaccttatgatgcattcttcttcagctttctgtgcccctgaacatgaggcctgttctgaaactcaagctccagacttatgttcagatgctgttttcgaccccagccagtgttatccagttgctagtttttctgatcttgggatctcggatacactactaacaaaaggtctcttgaatgatatagcactagcaagtttgttgaatgttaatttgaaggaccagtcacatatcaacaggcaggaacctaccaatgatacatcactaggaggagcaagtttcttgaatgctaatttgaaggaccagtcacatctcaactggcaggaacatatgaatgagacatcaccagtagcaggtttattgaatgctaatttggaggagcagtcacatctcaactggcaggaacctaagaatgagtcatcaccagaagcaggtttcttgaatgctaatttggaggagcagtcacatctcaactggcccttgcaggaatgtgagccatggattgagagacaaatgttttgaccaatagtttgatccttgttacaagcctgacttcccatgttcctgagcagcagtttcctctactgcacaaccagggccagagtgagcaacaaccaagatattcttgtgagcgtgatggaaattacattttagttctctgccttcgctgtcttaagctctctgaagtattgtcttcgactttgctgggatgatgagctgctgccccgagacaacaacagtcagccagaccaaaatcacttaaatagttttaacaatgtattaagttttgtcttgttacctgctgtctggcgtctgccatgttttgtccactgttaaacttgtctaataatacccttttagggctaatttggaaagcctcaatgtcttaagttttgtcttggt

SEQ ID NO: 61575 - DNA, 2167 bp, Zea Mays
aagagccaacataaagcaacgcccaggcatacacgacacgaaccaggcaaccagctgccgagggaggaaccctagcggaacaggtgacggcgtcgcgctaccggtgacggcgtcgcgctaccggtgacgggggatacggcggcatcgtccccctcggcccctcctccatccccggcgcggcggcgccagcagccgtcctgcagtagattaaaggagccctagcttttggaggatgacccagctgccttcaaagttcaaaaacaaaatgatggtggtgagggtggacgagaaccctgcgccggatggagagaactctcccctggacgatgagtacgtctcggccgacgatgagcacgttgacaatgaagacaaggagaccgatagcatcggcgactacgaaaaccccagtggggcgccccagttgaagaagggtccttggtcgcccgaagaggataagcgtcttaaagactacgtcgaggtacacggcgcggggaactggaataaggtgcagaagaatgccatgctcaaccgttgtggcaagagctgccgtctccgctggaccaaccacctcaggcccgatcttaagaaggatcctttcgacgctgaggaagaggaaaagataatcaagctttacatcaggtggggccccaagtggtccatgatggcctcatatttgcctggccgcacagataatgaaataaaaaacttttggaataccagaaaaaggagaaaacagagatgtggttcgcctctccatccagaatatatgctttctcagcttagtcataaagacatggactgtgaaactcctggagaatcacatggcaagaaacggtcaaatgagtgctcaaaagaaaaggttgttgatgtgcaagaacttgtggatgagttaattgtatttgagcaccttgactatggtaaggatacagtgtttccaaccagacctttgaaatgccatgcatctactagtagtgtgcaaattcctggtgccattgagaaaaccttttgtcccactgatttgaactatgtaatgacaaagaatcagtcggtgcatgttggtagtgccattggcagtggctatccagtatatggtggcagactctctacttcagggaccatattcggttccattcagacagagatcccttcgatccaaagttccagctatagcccaagtaatgactggttggctcaatgtccttcggcttgcattgagcaacggattccaatggaatgcaatacaatatctcagtcaaaagcttaccttatgatgcattcttcttcagctttctgtgcccctgaacatgaggcctgttctgaaactcaagctccagacttatgttcaggttcagatgctgttttcgaccccagccagtgttatccagttgctagtttttctgatcttgggatctcggatacactactaacaaaaggtctcttgaatgatatagcactagcaagtttgttgaatgttaatttgaaggaccagtcacatatcaacaggcaggaacctaccaatgatacatcactaggaggagcaagtttcttgaatgctaatttgaaggaccagtcacatctcaactggcaggaacatatgaatgagacatcaccagtagcaggtttattgaatgctaatttggaggagcagtcacatctcaactggcaggaacctaagaatgagtcatcaccagaagcaggtttcttgaatgctaatttggaggagcagtcacatctcaactggcccttgcaggaatgtgagccatggattgagagacaaatgttttgaccaatagtttgatccttgttacaagcctgacttcccatgttcctgagcagcagtttcctctactgcacaaccagggccagagtgagcaacaaccaagatattcttgtgagcgtgatggaaattacattttagttctctgccttcgctgtcttaagctctctgaagtattgtcttcgactttgctgggatgatgagctgctgccccgagacaacaacagtcagccagaccaaaatcacttaaatagttttaacaatgtattaagttttgtcttgttacctgctgtctggcgtctgccatgttttgtccactgttaaacttgtctaataatacccttttagggctaatttggaaagcctcaatgtcttaagttttgtcttggt

SEQ ID NO: 61576 - DNA, 1914 bp, Zea Mays
gccaacagagcaacgcccaggaacacacgacacgaatcaggcaaccagctgccgagggaggaaccctagcggaacaggtgacggcggcgcgctaccggtgacgggggatacggcggcatcgtcctcctcggcccctcctccatccccggcgtggcggcgccagcagccggcctgcagattaaaggagccccaggagccccaactttcggaggacgacccagctgccttcaaagttcaaaatcaaaatgacggtggtgagggtggacgagaaccctgcgccggatggagagaactctcccctagacgatgagtacgtctcggccgacgatgaacacgttgatgatgaagacaaggagaccgatagcatcgacgactatgaaaaccccagcgggacgccccagatgaagaagggtccctggtcgcccgaagaggataagcgtctcaaagactacgtcgaggtacacggcgcggggaactggaataaggtgcagcagaatgccaggctcaaccgctgtggcaagagctgtcgtctccgctggacgaaccacctcaggcccgatcttaagaaggagcctttcaacgctgaggaagaggaaaagataatcaagcttcacattagacggggccccaagtggtccatgatggcctcatatttgcctggccgcacagataatgaaataaagaacttttggaataccagaaaaagaagaaaacagagatgtggttcgcctctctatccagaatatatgctttctcaggttagtcataaagacatggactttgaaactcttggagagtcacatggcaagaaacggtcaaatgagtgctcaaaagaaaaggttgttgatgtgcaagaacttgtggatgagttaattgtatttgagcaccttgactatggtaaggatatagtgtttccaatcagacctttgaaatgccatgcatctactggcagtgtgcaaatttctggtgacattcggaaaaccttttgtcccactgatttgaactatgtaatgacaaagaatcagtcggtgcctgttggtagtgccattggcagtggctatccactttctgtgcccctgaacatgatgcctgttctgaaactcaagctccagacttatgttcaggttcagatgttgttttcgaccccagccaatgttatccagttgctagtttttctgatcttgggatctcggatacaccactaacatcaggtttcttgaatgatataacactagcaagtttgttgaatgtcaatttgaaggacctgtcacatctcaaccgacaggaacctaccaatgatacatcacttggaggagcaagtttattgaatgctaatttgaaggaccagtcacatctctctcagtgagctggaatgcatgtgcctgacttgtgggggcatggttttgaaattctcaggccaactttccttcactcgagagcttgatagagagaattcacgaggatggaagagtagcagagaagacactggacctgccaatgtatgccaagtacaaagactcgccttatctgagaaacccttcgaagcacgggagtactatcggtgggacccaggctgagatggattccaagtgagaagccccctggagggccactagataatctgttacttatttgccctatggtaaatgcgtcggtgttgatgcagaaacaattggactcattgtgagcttactcgcttcttttcgaaagtagttagtattcctcgaagtggtgtttttaccttgtaataaaggaaaaaaaataaagtggggttattgaaacttgagagtcaaatactgagatgttatgcgcgttttgatttctgaattaatcgatcggtatcacttgtactgtttttatacgacgatgctcgaaaccattcatttgtcattttaatttgatacacttgaagtc

SEQ ID NO: 61577 - DNA, 1917 bp, Zea Mays
gccaacagagcaacgcccaggaacacacgacacgaatcaggcaaccagctgccgagggaggaaccctagcggaacaggtgacggcggcgcgctaccggtgacgggggatacggcggcatcgtcctcctcggcccctcctccatccccggcgtggcggcgccagcagccggcctgcagaagattaaaggagccccaggagccccaactttcggaggacgacccagctgccttcaaagttcaaaatcaaaatgacggtggtgagggtggacgagaaccctgcgccggatggagagaactctcccctagacgatgagtacgtctcggccgacgatgaacacgttgatgatgaagacaaggagaccgatagcatcgacgactatgaaaaccccagcgggacgccccagatgaagaagggtccctggtcgcccgaagaggataagcgtctcaaagactacgtcgaggtacacggcgcggggaactggaataaggtgcagcagaatgccaggctcaaccgctgtggcaagagctgtcgtctccgctggacgaaccacctcaggcccgatcttaagaaggagcctttcaacgctgaggaagaggaaaagataatcaagcttcacattagacggggccccaagtggtccatgatggcctcatatttgcctggccgcacagataatgaaataaagaacttttggaataccagaaaaagaagaaaacagagatgtggttcgcctctctatccagaatatatgctttctcaggttagtcataaagacatggactttgaaactcttggagagtcacatggcaagaaacggtcaaatgagtgctcaaaagaaaaggttgttgatgtgcaagaacttgtggatgagttaattgtatttgagcaccttgactatggtaaggatatagtgtttccaatcagacctttgaaatgccatgcatctactggcagtgtgcaaatttctggtgacattcggaaaaccttttgtcccactgatttgaactatgtaatgacaaagaatcagtcggtgcctgttggtagtgccattggcagtggctatccactttctgtgcccctgaacatgatgcctgttctgaaactcaagctccagacttatgttcaggttcagatgttgttttcgaccccagccaatgttatccagttgctagtttttctgatcttgggatctcggatacaccactaacatcaggtttcttgaatgatataacactagcaagtttgttgaatgtcaatttgaaggacctgtcacatctcaaccgacaggaacctaccaatgatacatcacttggaggagcaagtttattgaatgctaatttgaaggaccagtcacatctctctcagtgagctggaatgcatgtgcctgacttgtgggggcatggttttgaaattctcaggccaactttccttcactcgagagcttgatagagagaattcacgaggatggaagagtagcagagaagacactggacctgccaatgtatgccaagtacaaagactcgccttatctgagaaacccttcgaagcacgggagtactatcggtgggacccaggctgagatggattccaagtgagaagccccctggagggccactagataatctgttacttatttgccctatggtaaatgcgtcggtgttgatgcagaaacaattggactcattgtgagcttactcgcttcttttcgaaagtagttagtattcctcgaagtggtgtttttaccttgtaataaaggaaaaaaaataaagtggggttattgaaacttgagagtcaaatactgagatgttatgcgcgttttgatttctgaattaatcgatcggtatcacttgtactgtttttatacgacgatgctcgaaaccattcatttgtcattttaatttgatacacttgaagtc

SEQ ID NO: 61578 - DNA, 1625 bp, Zea Mays
gccaacagagcaacgcccaggaacacacgacacgaatcaggcaaccagctgccgagggaggaaccctagcggaacaggtgacggcggcgcgctaccggtgacgggggatacggcggcatcgtcctcctcggcccctcctccatccccggcgtggcggcgccagcagccggcctgcagaagattaaaggagccccaggagccccaactttcggaggacgacccagctgccttcaaagttcaaaatcaaaatgacggtggtgagggtggacgagaaccctgcgccggatggagagaactctcccctagacgatgagtacgtctcggccgacgatgaacacgttgatgatgaagacaaggagaccgatagcatcgacgactatgaaaaccccagcgggacgccccagatgaagaagggtccctggtcgcccgaagaggataagcgtctcaaagactacgtcgaggtacacggcgcggggaactggaataaggtgcagcagaatgccaggctcaaccgctgtggcaagagctgtcgtctccgctggacgaaccacctcaggcccgatcttaagaaggagcctttcaacgctgaggaagaggaaaagataatcaagcttcacattagacggggccccaagtggtccatgatggcctcatatttgcctggccgcacagataatgaaataaagaacttttggaataccagaaaaagaagaaaacagagatgtggttcgcctctctatccagaatatatgctttctcaggttagtcataaagacatggactttgaaactcttggagagtcacatggcaagaaacggtcaaatgagtgctcaaaagaaaaggttgttgatgtgcaagaacttgtggatgagttaattgtatttgagcaccttgactatggtaaggatatagtgtttccaatcagacctttgaaatgccatgcatctactggcagtgtgcaaatttctggtgacattcggaaaaccttttgtcccactgatttgaactatgtaatgacaaagaatcagtcggtgcctgttggtagtgccattggcagtggctatccactttctgtgcccctgaacatgatgcctgttctgaaactcaagctccagacttatgttcaggccaactttccttcactcgagagcttgatagagagaattcacgaggatggaagagtagcagagaagacactggacctgccaatgtatgccaagtacaaagactcgccttatctgagaaacccttcgaagcacgggagtactatcggtgggacccaggctgagatggattccaagtgagaagccccctggagggccactagataatctgttacttatttgccctatggtaaatgcgtcggtgttgatgcagaaacaattggactcattgtgagcttactcgcttcttttcgaaagtagttagtattcctcgaagtggtgtttttaccttgtaataaaggaaaaaaaataaagtggggttattgaaacttgagagtcaaatactgagatgttatgcgcgttttgatttctgaattaatcgatcggtatcacttgtactgtttttatacgacgatgctcgaaaccattcatttgtcattttaatttgatacacttgaagtc

SEQ ID NO: 61579 - DNA, 2045 bp, Zea Mays
gccaacagagcaacgcccaggaacacacgacacgaatcaggcaaccagctgccgagggaggaaccctagcggaacaggtgacggcggcgcgctaccggtgacgggggatacggcggcatcgtcctcctcggcccctcctccatccccggcgtggcggcgccagcagccggcctgcagaagattaaaggagccccaggagccccaactttcggaggacgacccagctgccttcaaagttcaaaatcaaaatgacggtggtgagggtggacgagaaccctgcgccggatggagagaactctcccctagacgatgagtacgtctcggccgacgatgaacacgttgatgatgaagacaaggagaccgatagcatcgacgactatgaaaaccccagcgggacgccccagatgaagaagggtccctggtcgcccgaagaggataagcgtctcaaagactacgtcgaggtacacggcgcggggaactggaataaggtgcagcagaatgccaggctcaaccgctgtggcaagagctgtcgtctccgctggacgaaccacctcaggcccgatcttaagaaggagcctttcaacgctgaggaagaggaaaagataatcaagcttcacattagacggggccccaagtggtccatgatggcctcatatttgcctggccgcacagataatgaaataaagaacttttggaataccagaaaaagaagaaaacagagatgtggttcgcctctctatccagaatatatgctttctcaggttagtcataaagacatggactttgaaactcttggagagtcacatggcaagaaacggtcaaatgagtgctcaaaagaaaaggttgttgatgtgcaagaacttgtggatgagttaattgtatttgagcaccttgactatggtaaggatatagtgtttccaatcagacctttgaaatgccatgcatctactggcagtgtgcaaatttctggtgacattcggaaaaccttttgtcccactgatttgaactatgtaatgacaaagaatcagtcggtgcctgttggtagtgccattggcagtggctatccagtatatggtggcagactctctacttcagggaccatattcggttccattcagacagagattccttcgatccaaagttccagctatagcccaagtaatgactggttggctcaatgtccttcggcttgcattgagcaacggattccaatggaatgcaatacaatatctcagtcaaaagcttaccttatgatgcattcttcttcagctttctgtgcccctgaacatgatgcctgttctgaaactcaagctccagacttatgttcaggttcagatgttgttttcgaccccagccaatgttatccagttgctagtttttctgatcttgggatctcggatacaccactaacatcaggaacctaccaatgatacatcacttggaggagcaagtttattgaatgctaatttgaaggaccagtcacatctctctcagtgagctggaatgcatgtgcctgacttgtgggggcatggttttgaaattctcaggccaactttccttcactcgagagcttgatagagagaattcacgaggatggaagagtagcagagaagacactggacctgccaatgtatgccaagtacaaagactcgccttatctgagaaacccttcgaagcacgggagtactatcggtgggacccaggctgagatggattccaagtgagaagccccctggagggccactagataatctgttacttatttgccctatggtaaatgcgtcggtgttgatgcagaaacaattggactcattgtgagcttactcgcttcttttcgaaagtagttagtattcctcgaagtggtgtttttaccttgtaataaaggaaaaaaaataaagtggggttattgaaacttgagagtcaaatactgagatgttatgcgcgttttgatttctgaattaatcgatcggtatcacttgtactgtttttatacgacgatgctcgaaaccattcatttgtcattttaatttgatacacttgaagtc

SEQ ID NO: 61580 - DNA, 2116 bp, Zea Mays
gccaacagagcaacgcccaggaacacacgacacgaatcaggcaaccagctgccgagggaggaaccctagcggaacaggtgacggcggcgcgctaccggtgacgggggatacggcggcatcgtcctcctcggcccctcctccatccccggcgtggcggcgccagcagccggcctgcagattaaaggagccccaggagccccaactttcggaggacgacccagctgccttcaaagttcaaaatcaaaatgacggtggtgagggtggacgagaaccctgcgccggatggagagaactctcccctagacgatgagtacgtctcggccgacgatgaacacgttgatgatgaagacaaggagaccgatagcatcgacgactatgaaaaccccagcgggacgccccagatgaagaagggtccctggtcgcccgaagaggataagcgtctcaaagactacgtcgaggtacacggcgcggggaactggaataaggtgcagcagaatgccaggctcaaccgctgtggcaagagctgtcgtctccgctggacgaaccacctcaggcccgatcttaagaaggagcctttcaacgctgaggaagaggaaaagataatcaagcttcacattagacggggccccaagtggtccatgatggcctcatatttgcctggccgcacagataatgaaataaagaacttttggaataccagaaaaagaagaaaacagagatgtggttcgcctctctatccagaatatatgctttctcaggttagtcataaagacatggactttgaaactcttggagagtcacatggcaagaaacggtcaaatgagtgctcaaaagaaaaggttgttgatgtgcaagaacttgtggatgagttaattgtatttgagcaccttgactatggtaaggatatagtgtttccaatcagacctttgaaatgccatgcatctactggcagtgtgcaaatttctggtgacattcggaaaaccttttgtcccactgatttgaactatgtaatgacaaagaatcagtcggtgcctgttggtagtgccattggcagtggctatccagtatatggtggcagactctctacttcagggaccatattcggttccattcagacagagattccttcgatccaaagttccagctatagcccaagtaatgactggttggctcaatgtccttcggcttgcattgagcaacggattccaatggaatgcaatacaatatctcagtcaaaagcttaccttatgatgcattcttcttcagctttctgtgcccctgaacatgatgcctgttctgaaactcaagctccagacttatgttcaggttcagatgttgttttcgaccccagccaatgttatccagttgctagtttttctgatcttgggatctcggatacaccactaacatcaggtttcttgaatgatataacactagcaagtttgttgaatgtcaatttgaaggacctgtcacatctcaaccgacaggaacctaccaatgatacatcacttggaggagcaagtttattgaatgctaatttgaaggaccagtcacatctctctcagtgagctggaatgcatgtgcctgacttgtgggggcatggttttgaaattctcaggccaactttccttcactcgagagcttgatagagagaattcacgaggatggaagagtagcagagaagacactggacctgccaatgtatgccaagtacaaagactcgccttatctgagaaacccttcgaagcacgggagtactatcggtgggacccaggctgagatggattccaagtgagaagccccctggagggccactagataatctgttacttatttgccctatggtaaatgcgtcggtgttgatgcagaaacaattggactcattgtgagcttactcgcttcttttcgaaagtagttagtattcctcgaagtggtgtttttaccttgtaataaaggaaaaaaaataaagtggggttattgaaacttgagagtcaaatactgagatgttatgcgcgttttgatttctgaattaatcgatcggtatcacttgtactgtttttatacgacgatgctcgaaaccattcatttgtcattttaatttgatacacttgaagtc

SEQ ID NO: 61581 - DNA, 2315 bp, Zea Mays
gtcatgatagaggaaggcagaaaatattacatgatagatgatgcagttagtagcttcatgaatgtaaatcttcgaagaatgaccataaggacactgaagatttatactgcattaagggcaaagtcacacaacagggtcattcagagaatgtaatgccactgagcaggtgctccatgggaatgctgacgtgtgaaaaaacaaaacataggtcacatatgcttaacataagtagctacaagctatatatgtgtgttccaaatgggtgtgcactacatcatgccatatggttgagtgtaaactgacatttgattctatttcatgattattaaaaaaaactcggacgggaggaaaagaccgccctccggtattatattaagaggccgaaatatagtcccggccgaaaaaatctccgaaccctaactccccatcactagcaggtcatcaccgcccactctgcaacggcccagccgaagggtggcgcgcaggacgtaaaccgggagcggatagacacaacgaggggatttttttaaccaagccagaaattcgccccgagggagatcaaacccgggacttggaggtgctactcggaagccttaatcattacactagaggtcctttcacctctttcatgattataatttgacaggttctttcatgcaatgaaatctatgtgtcgatgtaagatttatcattgcagttacattgttttgttagacaaaaaaatttcatttcacacaggattagacaatgagatcaaaatcaaaagcatcttcatgatgttattaacgatcaagcagaataactacagcttataattgatatatggatcaaaacataatatgtagggaattgtaccttcaaaaagcagcagtgctccagcactccaggagtgttaaatgtacttacagtagccccaagagcaacaactaagtagtcataatccaacataaaatcaccattcccatcaagattagttccaacagcagaacggcaatgtacagtttttctatttgcatcaatcttgaaacactcggcttcacaaaatgtgacatccttgtttttctatgaaaaataaagacaagaacaataaaacagtctgtgtcactgaactaacacagaaagtgaatgaacactactgaggcatacaaggtatcgaggtaagcactcttagtaaacacgaaatgatttttttaaatttttttgatgccaatgctatgccactttgacaactgaattttatcatcgcatattagggacactgaacaagtcacaagagtgcaatattgtgatttatgaaataatgttatgtcatgtttacacatatcacttctatatatccaaactacacacgtacacattataaattatacctatgatcagattgagctgactgcatgcgttttaaggccccacttgttttggatgtcgggagtatcacaaatgaacagctaaccaacacatggcaagactcaagagtcaagaccaaagagatgtgccaccaacactttttccagctttgtatgcacacagcttgaggaaaaatagaacggtgagggaggcattgacagacaacaagtgggtgatggatgtggatcacaatatgagccagcagatcatcacggaatttgtggccttatgggtgcgcctacaggatatacacctgctgcaatcacaataaggcacggtcacttggctacattcgcctgatggtcagtacatggcaaagtctgcatatgaagtgcagattcttcgcttggctcatgcttcagaacagaatatggacaactgcgcttttgcagctgcaggggtggccaaacgaccacttctgtcagctgtgtgttaggaacctagagacattctcacaattttttatcccaggaatactgcttctctaggataatatggggaaaagtggcttcatggattgaggcaccagctttggcgctgtctaattggagccagatggaagacttgggacaatggttcattgagatggggaactgtggaacagaagacagggtgtgcgatctatgatcacgctaaccatttgggaaatgtagaaagagagaaataactgcgtattcaataaagttagcaagacacctctaagtgttcagtgcaaattgcaatacaagatgaggcaagtatgtgaatacatgcggtggaacaggggcctagagctgattctaccgatacaagcacaacacctaatagcattatttatgctaacattccaacgagaataaacaaaacaccacaccaaattgcattgagcacacagtagcacataatcaattggcaaaaaaagaagtacc

SEQ ID NO: 61582 - DNA, 2362 bp, Zea Mays
gaagagccactccgccgccaccacctcgtccaaactttcgtttgtcatcatggcgcccttcctcatctaatcttggtggcgccccttcctagcgtttgttctgccgtccgcgctgcagtctgcttctcccgtttcactcctatcttagctgcacggactagttttgcatcgttttgatctacaccgtaccgtttcactctcttgttcttaacggcgggggcgcgagtttttccgtgctaagccgcctacgcaaggaggtgatagattgacgcgtcaagaaatcgtttcagttgccatgactccagtttcggtttctgcacagtgctaaccccgggcttgtcggattaacttcctgaagaaggaagccccaatgcctgtgctagatccagcatgccattcagtgttgcaggtcatgacgaatcttgtgattggtctgtgtcaaagcaatggatacatatatattcgcaatacatcagcattttttctttgttatgtttggtttgctgtctcgcttgattgattgatggcagtgatttgacattacctgcgcttctgatgtaacctgtgaaggaaagggaaaaatcaatggttgaatttcttaatatgagccatctagtaaccattcaattcaattgtctcttgttatttctgcatcagctcatttcattcatttggcagtgatgatacaaccattcagcttacaacgccagttctgcttctgataaatcgtgacagacaaagctgattcatatctgagccttatccgtgtcagtttttaacaaatacgtactcaaatttagggtcttgaatttttgtatctgtccaacccgtacatccctttggccactgatgaagttgtccaatgtttggaggctgcagtcggctccaagttcctgcttgtcaggtagaacctacttggagctgctgcactcgcatgacaagactgggcaatactgaggcctctatgcagtgtccaaatacgtttgcagtttaatactcctatatatggtagactagttatttcacccacaatatttatactgggttaatttttgccgagtttaactatccttacacgagtgttattgttcgtgttgaggctgaaaaactcggagaatgcgtgttgtcatcagcttcggctctgtgctgtgagttgggagttaaataacagcacaagattgtttacttctgtggtttcataccgcatattttgcaccatcccttgcaacatattatcctgtcaggcttagaacaacgattcattagctacctatatgtcaaactaattcatcagccatgtgttcaactagtagttttgactgtttttatcttctaacaattatctctagaggtgtcgaacaggcccttagagttgtggatgatgataccaaagtaaaatacagttatccctggcttattccttttaaaagggtgctgagaacattattctgacacaactatatcagacggtgaaaactcgaaaaccaagaacacctcacacggcgcagtaatttcgtgctactaatgagaagtcaatacttttctgatgatacatcacttgcatcttttttcgagttgcataatgaattttacattttgaatttctgtgtctcgtttcaaatgcaagccatgttcttttgcagatagtttggtaacatttcactggtagtcagtcatgtttaactgagcatccacttttctgagttgtttatattgtgtgtatctagcttgtttaccctgtatctcaaatgttaatcttgttttgatgtttctgttcagtaattatcactggtaatgttgtttgtcttgaggcaacaaattagagtctctgatgtgcttctttccatagtgcatcaagcgctgtacgttgccaatagcagtttggaataagttatcatgcattcactgtccttaaacagtgtgtgcatcccgatgtccaacatttgcttcaatccccattgcaaactcgaacaatttgcaaaatttcttctagtgacgtgtatgtggtttttctattgttgggcaaccataggatgccgtaggatgactgctttaatattgccttcgttgtaaattttttagttcgacgattaaagtattttctttagtttgctctgctcagtttacttgttaaacttgtgctatctaggtccagtgaagttctcaagacctacggatgttcgaagattttatcacctactgatgggatcaactagggtcgagggattgtacataaccaatttacttgttgatttgtgctatgctgatgttttatgggcaagagtatgtaagaaaccggagctgtggcaggattggacaaaaaataatcaaaacatttattatattttctcgcctttttatg

SEQ ID NO: 61583 - DNA, 2198 bp, Zea Mays
gaagagccactccgccgccaccacctcgtccaaactttcgtttgtcatcatggcgcccttcctcatctaatcttggtggcgccccttcctagcgtttgttctgccgtccgcgctgcagtctgcttctcccgtttcactcctatcttagctgcacggactagttttgcatcgttttgatctacaccgtaccgtttcactctcttgttcttaacggcgggggcgcgagtttttccgtgctaagccgcctacgcaaggaggtgatagattgacgcgtcaagaaatcgtttcagttgccatgactccagtagtgctaaccccgggcttgtcggattaacttcctgaagaaggaagccccaatgcctgtgctagatccagcatgccattcagtgttgcaggtcatgacgaatcttgtgattggtctgtgtcaaagcaatggatacatatatattcgcaatacatcagcattttttctttgttatgtttggtttgctgtctcgcttgattgattgatggcagtgatttgacattacctgcgcttctgatgtaacctgtgaaggaaagggaaaaatcaatggttgaatttcttaatatgagccatctagtaaccattcaattcaattgtctcttgttatttctgcatcagctcatttcattcatttggcagtgatgatacaaccattcagcttacaacgccagttctgcttctgataaatcgtgacagacaaagctgattcatatctgagccttatccgtgtcagtttttaacaaatacgtactcaaatttagggtcttgaatttttgtatctgtccaacccgtacatccctttggccactgatgaagttgtccaatgtttggaggctgcagtcggctccaagttcctgcttgtcaggtagaacctacttggagctgctgcactcgcatgacaagactgggcaatactgaggcctctatgcagtgtccaaatacgtttgcagtttaatactcctatatatggtagactagttatttcacccacaatatttatactgggttaatttttgccgagtttaactatccttacacgagtgttattgttcgtgttgaggctgaaaaactcggagaatgcgtgttgtcatcagcttcggctctgtgctgtgagttgggagttaaataacagcacaagattgtttacttctgtggtttcataccgcatattttgcaccatcccttgcaacatattatcctgtcaggcttagaacaacgattcattagctacctatatgtcaaactaattcatcagccatgtgttcaactagtagttttgactgtttttatcttctaacaattatctctagaggtgtcgaacaggcccttagagttgtggatgatgataccaaagtaaaatacagttatccctggcttattccttttaaaagggtgctgagaacattattctgacacaactatatcagacggtgaaaactcgaaaaccaagaacacctcacacggcgcagtaatttcgtgctactaatgagaagtcaatacttttctgatgatacatcacttgcatcttttttcgagttgcataatgaattttacattttgaatttctgtgtctcgtttcaaatgcaagccatgttcttttgcagatagtttggtaacatttcactggtagtcagtcatgtttaactgagcatccacttttctgagttgtttatattgtgtgtatctagcttgtttaccctgtatctcaaatgttaatcttgttttgatgtttctgttcagtaattatcactggtaatgttgtttgtcttgaggcaacaaattagagtctctgatgtgcttctttccatagtgcatcaagcgctgtacgttgccaatagcagtttggaataagttatcatgcattcactgtccttaaacagtgtgtgcatcccgatgtccaacatttgcttcaatccccattgcaaactcgaacaatttgcaaaatttcttctagtgacgtgtccagtgaagttctcaagacctacggatgttcgaagattttatcacctactgatgggatcaactagggtcgagggattgtacataaccaatttacttgttgatttgtgctatgctgatgttttatgggcaagagtatgtaagaaaccggagctgtggcaggattggacaaaaaataatcaaaacatttattatattttctcgcctttttatg

SEQ ID NO: 61584 - DNA, 4501 bp, Zea Mays
ctagcccatatattggagccctatcctcattttatacactatttctaaccttttatttcctaaataacatgatttatttcctaataatatgatataggactcaattgttggagctgcaaacatttttatggccctaaacactttaaatcaggtcctattttaattttaaggactgaaatataggacttcttgttggagatgctcttaggaagagatatgtagatgactcaaaataccacaagaatccatcagaccctagaagaacaccgcaaacttcttgcaaatgatccaggtgaaaagtattgtttcaacttgtacatgactaagacttgcttcctggcataatcattgtaaataataagatgcatatgcaatgagttgcttgaccaaaaaggacatgctaaaattaggctgttatgttctacaatcttggaaagaaccattgctagactgaggtctaaagtgagatttgtcaaaacaggggatgccaatactgctttcttccatgtgcaggccatgttcaggaaaaagatgaacttcattcataaactggtggttgatgaacatcttattcttatcacttcccaagaggctaagcagcaggctatgtttcagttttacaacgatctgattggtaaagaggttgaacaaaattttagtctaaaccttgctgattttcactaaggaaactttgagctctctgattttgataatcccataaccttggaggaaatcaaatctgttgttttaagtcttcctaatgatagagccccaggacctgacggattcacaggatgtttttataaatgttgttagaatataatcaagtggaccctcctggctgtgccactgtggtattagttttacagcaaggttcccctggaaggcttggtttgctgaattcagcctatattactctcattcccaaacatgttgaggctatacatcctgggacttcagaccaatcagattggttcacagttttgctaaacttatcactaaaatccttgccaacagattagctcctgaactggataaaatggtcatcacagatcaaagtgccttcatccaggacagatgtatttatgataactttattatggttaaccaaaccaacaagatgctgcataaaaagagaatccctgctcttttcttgaagctggacattaaaaaggcgtttgactctgtgtgttgggcctttcttctagaaattcttcagcacttgggttttgggcaggtttggtgcaacctgattttgaacctgctcatgacatcctctactcaaattcttgtggatggagtgcctggccagcctataagtcacaaaataaggttgaggcaaggtgatccattatcccctcttttgtccatcctagtcatggatgttcttaacagcctttttaccaaagcggatgagtgtgggctattgcatccccttgccggtagaaatatcagccaaagggtctcaatgttcatagatgatgttgctgtttttgttaagccagtttctgaagacttagaggtggtcagagaaatcttgaggggctttggtgttgcctctggtctccaaactaacttgcaaaaaagtttttcctacccaatttggtgtgacaatgaaagggttgaattggctgtccagaccttgggatgtgcctcaaaaaacttttctacaacttatcctggcctctctctgagaagcaaaaaaacttagtgctggagaccttgctccttggattgagaaaattgctgccaagcttccaggatggaaagctgagcttctaaacttagctgggagaatcacgctaattaaatctgtcctctctgccatcccggtttacctgtttattgctctcaatgctcctaaatgggttataaaagtcattgataaaattagaaggaatttttttgtggaaaggaataaaggaggctagaggaggcaattgtcttatatcttgggataaagtcactaggccttttgatttgggtggccatggaattcctaatatcctcactataactgggctctgcaaatgtgatggctttggctttagaaaactgctccttccaaatcatggagtggcttagatcttaaaatcccgtcccaagccagagctttatttcaggttgcagtgtctaccactattggtaatggtacttcaaccttcttttcgaaagataagtggattcatgggtgttccattgaggatatagctcctctcattactgctgcagttccaaagaagaatggagaagtgaggactgtacagcaggcccttacctcttattattgggttcaggatatccagggaaatctcttcctgactgctattgagcaatacctgcagctatgggaggttcttgaaacttttcagcttcaaaactcaaatggtaaacttgtgtggcgatttagcagtaatggtttattcagctccaaatctgcctacagagatttctacattcgagctgaatcttttgagccttggaaaagaatctggaagagctgggcagcccctaagtgtaaggtctttgtatggattgctataaacaataaatgttggacagccgacagattaaaaaataggggtcttggttatcctgaaaattgtgttcttgtgatcaagaagatgaaactgtgcagcatattctatcaaattgcgttttcacaaaacagttttggcataatatatatactccaattggtctctctattgtgactcctaagagaagagattcatgttttgctgaatggtggaggaaggcttcagctaagattcctaaaagcaaaagaaagggctttaattaatagtgtggtcatccttggggcttggagcctttggaagcataaaaataggtgtatctttgatggagcccggccttgcctttctaccttagaggatggattcaaagatgagacgtggctttggtttttttgcaggagccaagaacatgcgctctctttttgatcctggttagaggaaggaaggtttttatcctctttgtatgttatggtggtggagtgttgtgtgcgtctggtatgtgtatgtgtgcgtgtgtgtctggtgtgtgtttgacgtgtgcgtctggtgtgtgtttttgtatgttgtgtcctgtccgttccaggcctcaggccttttcccctcttcaatgtaatgatacgcagccctcctgcgtatttgagaaaaaaatgttctacaatctacataatagataataaaaaaggaaatgaatggcttcataacccagttgctggatactgcttgctaagtgctaacatggggctgcatataggaccaccccatgatcgtgccactgccggcccgcagccgaatatcactgatgtgccacctaagcacaccagccgctgcaccagagttgtgctgcggcagccagctccagcggtggggagtggagggaaatgccagaacaagaagcaacagcacagaatcaaggttgggaaggtgcatgaggagatagttcgggaggtgcatactggccaacagctcaccttcaaggagtttgagctctgcattggttgatcatcagttgtgcacgagctaatgaggctgttgacaagttccacgtcctcgtacacccccacgttccagcccaagaagacttatgccttgttcgcttattctcattccatgtggattggagtggattgagatgctgactcaatcccaccgcatggattaatatcaaaacgaacaagcccttaggagggtggctacatggcatcaagcacttggctgccactgtcacatatgggtggcgcagcaccgagtacggggcaaaggagaaggaagtttagtgcctcgattccgccacctggacagccttgatggcattggctcgtgcaatgctggaagggtccaggtgggcatacgggaaggcttgcaaggaactccctctgttcatgacacaggaataggctgcccaacatgggctgtgtggtgcataaactccagcctggttggaccatatctcgcatggctggagaggaccttgtgaaccatgtgtgggagttgacagatggaggaagaaagtgtgtctctcaaagaatgattcaccaaagagagcaagtgacgtggtcggcctccacatatattctgtgtgaagggataaggggcaaatgcataatcgtccccggcctccacatatattctgtgtgaagagataagaggcaaatgcataatcgtcccctaacatgtgttgggaaataaatggagaagggaaacagagaaatgggaaaggaacacctgaaataaagattgggcgtgtccggtgtcaaatttggaagtcgcaagaattgggtgctatgtcttagtgagtaatgcgtactgagatcaatattctgaaatatctcctaaattctaagataccgacaaaactacagaaatttccatggaatttacagaactacaatagctgtaggataacaaagggcattaaagagaacatctaataacataatgaggcaacagaacatgacatattgagt

SEQ ID NO: 61585 - DNA, 1104 bp, Zea Mays
aaacacatgacccttcatctccttgttcagggttccgatttccgccccaccatccgccgccgccgacgatgcttcgtcgttgcatccttcgcagcccttgcactacatgatgataaatctgaggcttgtttctctacattcgcagttgccgcctaagagctttcgccttgccaggcttgagagctagtgctgctaaatccttccttggatgtctgatgcgattcaaatccaattcttttgtgctttggttgtagagggttccgtaggtttcggtctaaaatcgtgtgctttgcaagatcagcttcttgtttggacttcgaaactgaaacctggtccaggcaatcggcaaatcatcctgccatcttgcgatactgtatccaagccagcttaaactcacctggatctgacgtcctgattttctgggccctttcggctggcacatgccttctgcttcagccatttatgcttctcttttctgctgttgcttgaactgtgtacctgaatgttttactgcttaccctagctaaaattttcttgaatggctatttgctatggcacacagcaaaagcttatgttgcaaggtcatgttttgaattgaaggcataactcttatttgagaatcctgtattttcttggccccacaaatcaagctcctgtattagctttatcagtaagcgattgtttctagatatggatgtaatggagcttctcccaaatagcaaacaagtttcggctgcataactcttatttgagaaggatgatttgtttggcgtgagatactgaagtcgtggctccctacctttatcagtaatcaaaggatgcgccaaatgcttgcagactccagtgagcaggactgcagtatacacgtacattgaggcagtaatattaatgttgatagagagaattaaatacatctctttgtttttgaactagaggtttatgccttgtatactgggagtaagtattctgttgctgcaaatagtacgtacaaaacacccgactcggatataaagtgccgtagggtacggcactgagtagatgaagaacagaactcggttacatccataattcgtagcaataaaacagtgccccgtttatttgtca

SEQ ID NO: 61586 - DNA, 1065 bp, Zea Mays
aaacacatgacccttcatctccttgttcagggttccgatttccgccccaccatccgccgccgccgacgatgcttcgtcgttgcatccttcgcagcccttgcactacttgccgcctaagagctttcgccttgccaggcttgagagctagtgctgctaaatccttccttggatgtctgatgcgattcaaatccaattcttttgtgctttggttgtagagggttccgtaggtttcggtctaaaatcgtgtgctttgcaagatcagcttcttgtttggacttcgaaactgaaacctggtccaggcaatcggcaaatcatcctgccatcttgcgatactgtatccaagccagcttaaactcacctggatctgacgtcctgattttctgggccctttcggctggcacatgccttctgcttcagccatttatgcttctcttttctgctgttgcttgaactgtgtacctgaatgttttactgcttaccctagctaaaattttcttgaatggctatttgctatggcacacagcaaaagcttatgttgcaaggtcatgttttgaattgaaggcataactcttatttgagaatcctgtattttcttggccccacaaatcaagctcctgtattagctttatcagtaagcgattgtttctagatatggatgtaatggagcttctcccaaatagcaaacaagtttcggctgcataactcttatttgagaaggatgatttgtttggcgtgagatactgaagtcgtggctccctacctttatcagtaatcaaaggatgcgccaaatgcttgcagactccagtgagcaggactgcagtatacacgtacattgaggcagtaatattaatgttgatagagagaattaaatacatctctttgtttttgaactagaggtttatgccttgtatactgggagtaagtattctgttgctgcaaatagtacgtacaaaacacccgactcggatataaagtgccgtagggtacggcactgagtagatgaagaacagaactcggttacatccataattcgtagcaataaaacagtgccccgtttatttgtca

SEQ ID NO: 61587 - DNA, 944 bp, Zea Mays
aaacacatgacccttcatctccttgttcagggttccgatttccgccccaccatccgccgccgccgacgatgcttcgtcgttgcatccttcgcagcccttgcactacgtttcggtctaaaatcgtgtgctttgcaagatcagcttcttgtttggacttcgaaactgaaacctggtccaggcaatcggcaaatcatcctgccatcttgcgatactgtatccaagccagcttaaactcacctggatctgacgtcctgattttctgggccctttcggctggcacatgccttctgcttcagccatttatgcttctcttttctgctgttgcttgaactgtgtacctgaatgttttactgcttaccctagctaaaattttcttgaatggctatttgctatggcacacagcaaaagcttatgttgcaaggtcatgttttgaattgaaggcataactcttatttgagaatcctgtattttcttggccccacaaatcaagctcctgtattagctttatcagtaagcgattgtttctagatatggatgtaatggagcttctcccaaatagcaaacaagtttcggctgcataactcttatttgagaaggatgatttgtttggcgtgagatactgaagtcgtggctccctacctttatcagtaatcaaaggatgcgccaaatgcttgcagactccagtgagcaggactgcagtatacacgtacattgaggcagtaatattaatgttgatagagagaattaaatacatctctttgtttttgaactagaggtttatgccttgtatactgggagtaagtattctgttgctgcaaatagtacgtacaaaacacccgactcggatataaagtgccgtagggtacggcactgagtagatgaagaacagaactcggttacatccataattcgtagcaataaaacagtgccccgtttatttgtca

SEQ ID NO: 61588 - DNA, 1631 bp, Zea Mays
tggccgcaccgaccctcgagagtccagacggccgtatcgttggcgcttgtcgtctccctatcgccccggctcctcgcctctccgtggccggccggtgctgatcacttctctgctcaccgctcgaatctgggctgtcgccgagccattctgatcaccgctgctgatcacttctctgctcaacggaaaggagacagattcgtggttcgtcagcggacgcggcggcgacttcatagggtgttctcggccgcttccggcgcgcaaagcggacgcacggcgtgcgcccgcccccagggatgaactgctccagattctacaaaggttagatctactgctgcatcttccgaatccgcgtgcgaatgcaccgccgagctcgataaggccctgtggccgcgccggcgctgtgcctcgtacgcctggccgcagggtcgttggtaggcgcgtacaaccccgccgctattgctcgcggatggcccggtgcgtggctcgctgaggcagtgtgaggctgccgagggggccggtggggaaatcttggatcctggtcgttcggcgacgtggcggtatctatagagctcggattcatgggctcgtcatcccagcacgattccatttccgcatcaggaagttcggagcgtgctgatggcagcagaagcagcattagcatgtggaccaaaattacgagcacagactcgtggagatggtgcctagggttgatttacatcgttgctgttgccagtatatggattgctgctagctacatcgtgcagtctgttgtggatgccggtgtctctccgttcttgatcacctatatatgcaattctctgtttgttgtctacattcccatagtcgaggctgcccggtactttgaggattctattggtgacttgtggacaaagctgaaattcaaggatgctgaaagcctgcagcaggcttctgacatggagagtgtgaatcttctccaaagtggggggcatgagatcaatgttgcctcggatcaatcacaaacaaggctgtctggagacgcttcagttccagatacatgcttccctgcccaggcagagctaactgttgtagattgcagcaaagggttggatgcaaaagggcgctggacacgtgctcgtgtggcccaagtgagcatgctaatcagccccttttggttccttgcacagcttacgttcaatctgtctctaagatacaccactgtcacgtcaaacacgatattgagtagcacgtctagcctcttcactttcttggttgcattagtttttcttggagagacattcacatggttgaagctaattagtgtgcttctctgcatgggaggtacaataattgtcagcctggctgattcaagtagttcagttaatgccattgctacaaatcctcctcttggagatttcctatccattgtttctgctggtttatacgctgtttacatcaccttgattcgaaaaaagttgcccgatgagaaagaaggtcaaggacaagtgagcatggctcagtttctgggattcctgggactgttcaatatgttgtttttctttcctgttgcgttggtgttgaacttcgccaagctggagccattccacaggctcacatgggaacaagctggtcttgttgttggaaaaggtagg

SEQ ID NO: 61589 - DNA, 1106 bp, Zea Mays
tggccgcaccgaccctcgagagtccagacggccgtatcgttggcgcttgtcgtctccctatcgccccggctcctcgcctctccgtggccggccggtgctgatcacttctctgctcaccgctcgaatctgggctgtcgccgagccattctgatcaccgctgctgatcacttctctgctcaacggaaaggagacagattcgtggttcgtcagcggacgcggcggcgacttcatagggtgttctcggccgcttccggcgcgcaaagcggacgcacggcgtgcgcccgcccccagggatgaactgctccagattctacaaagtcgaggctgcccggtactttgaggattctattggtgacttgtggacaaagctgaaattcaaggatgctgaaagcctgcagcaggcttctgacatggagagtgtgaatcttctccaaagtggggggcatgagatcaatgttgcctcggatcaatcacaaacaaggctgtctggagacgcttcagttccagatacatgcttccctgcccaggcagagctaactgttgtagattgcagcaaagggttggatgcaaaagggcgctggacacgtgctcgtgtggcccaagtgagcatgctaatcagccccttttggttccttgcacagcttacgttcaatctgtctctaagatacaccactgtcacgtcaaacacgatattgagtagcacgtctagcctcttcactttcttggttgcattagtttttcttggagagacattcacatggttgaagctaattagtgtgcttctctgcatgggaggtacaataattgtcagcctggctgattcaagtagttcagttaatgccattgctacaaatcctcctcttggagatttcctatccattgtttctgctggtttatacgctgtttacatcaccttgattcgaaaaaagttgcccgatgagaaagaaggtcaaggacaagtgagcatggctcagtttctgggattcctgggactgttcaatatgttgtttttctttcctgttgcgttggtgttgaacttcgccaagctggagccattccacaggctcacatgggaacaagctggtcttgttgttggaaaaggtagg

SEQ ID NO: 61590 - DNA, 887 bp, Zea Mays
atagaatacgacatttacggttggcggacgccagggacaggcgtcctgctgctgtgacatgtgagcctgcgacatatcaggctgcttggaggccggtggggacgtgcagctcgccggagtggccgccgcacaccgtcgacagccacgaggacgagcctttttcgtggtcacgggcccgccgcccctcgcggcgccgtcctgctgctctcggcatgctcgaaatctgcagcggggcagcaccaccagaaatgcgacccggaaaaccagagcgagcgaggtgaaacgagggcgaggtactacttgcccagggaagctcaggagatgtgacatacagaaaccctcgttcacaaatggcggcggcgccgacgaacaagaagaaggtgacgagaatacgtcgagaagagaaggaagcaagagaggagggaggaaggagatctgaaccttctatattgacaggcctgcgtacgtacataaaggtggtctgatcgtaaatttggtggggctttctcttccttccaccgtctcgagccgtttcttgagaacagcagcactagtagctatggcctacggagtactactgctgctgttctccacgatgatctttatgaaaaaggagatacaactgtttcagcgtgtgtgtgtttcaagatgaagatggttgtgtttcaccggtgcaaaacatttcggttgcacagtcgctctctcatataagtgaaactgttaaagaagtccaagtaccaagtctcaagggcacgcttttctcctttgcacatctctactatatttaacagtgagtttcttcttgtgtcacctcctcacctcctctagcaagcgcaccaaatatccaaaaaagaggtgtagaggatttaaaccctgcttgatggcat

SEQ ID NO: 61591 - DNA, 877 bp, Zea Mays
atagaatacgacatttacggttggcggacgccagggacaggcgtcctgctgctgtgacatgtgagcctgcgacatatcaggctgcttggaggccggtggggacgtgcagctcgccggagtggccgccgcacaccgtcgacagccacgaggacgagcctttttcgtggtcacgggcccgccgcccctcgcggcgccgtcctgctgctctcggcatgctcgaaatctgcagcggggcagcaccaccagaaatgcgacccagcgagcgaggtgaaacgagggcgaggtactacttgcccagggaagctcaggagatgtgacatacagaaaccctcgttcacaaatggcggcggcgccgacgaacaagaagaaggtgacgagaatacgtcgagaagagaaggaagcaagagaggagggaggaaggagatctgaaccttctatattgacaggcctgcgtacgtacataaaggtggtctgatcgtaaatttggtggggctttctcttccttccaccgtctcgagccgtttcttgagaacagcagcactagtagctatggcctacggagtactactgctgctgttctccacgatgatctttatgaaaaaggagatacaactgtttcagcgtgtgtgtgtttcaagatgaagatggttgtgtttcaccggtgcaaaacatttcggttgcacagtcgctctctcatataagtgaaactgttaaagaagtccaagtaccaagtctcaagggcacgcttttctcctttgcacatctctactatatttaacagtgagtttcttcttgtgtcacctcctcacctcctctagcaagcgcaccaaatatccaaaaaagaggtgtagaggatttaaaccctgcttgatggcat

SEQ ID NO: 61592 - DNA, 1056 bp, Zea Mays
agggcaaaagaggaaatttctttgggctgggtctactaaaccctaatgggctgcggcctcgtatataaaccagcaccactcatccgtcgccgcacggaagtttcggcggcgccggcgtgctcgtgatctcaacccaaggcgtgcctccgctccggtcacccgtcgctccacgcaaccatgttgtatgtgtttgcagtcgaggaggaagaccagggagcccaaggaggagaacgtcacccttggacccactgtccgtgaaggagagtatgtctttggtgtcgctcacatctttgcatccttcaatgacaccttcattcatatcactgatttgtctgggagggaaactctggttcggatcaccggtggcatgaaggtgaaggctgaccgtgacgagtcgtcaccttacgctgctatgcttgctgctcaagacgtcgcacagcgctgcaaggagcttggcattactgcactgcacattaagcttcgcgccaccggaggcaacaagaccaagacccctggacctggtgcccagtctgccctcagggcgcttgctcgttccgggatgaaaatcggacgcattggtaaggagaggacgttaccccggtccccactgacagcactcgcagaaagggcggtaggaggggaaggaggctgtaggcgtctcgtctgcgtggcatttgccggctcttggccggtggccattatgaagctagccctctctgggtggtgttgctgttctgtgtttgtcaagacgagctttaattttgctctatgtggatgaccgtttaccgttactcgaacctatatgatgttccatggataatgttttttggctgaggaattggctcgtcatatttatgtatgcattttcactctctctataaagtgtactagagtaatcttccctagcgaaagggcctatagcctagtggttaaggactttcgaatagcatctccaaatcttgggttagatttctctcgggaacaaatttttaggcttgttaaaaaaatcctctcgctatgtctcatccgcttttgggttatgatgttctgtgcgtc

SEQ ID NO: 61593 - DNA, 782 bp, Zea Mays
agcacggtagcggtggattcggatccggctgcaagcacgtcgaggaggaagaccagggagcccaaggaggagaacgtcacccttggacccactgtccgtgaaggagagtatgtctttggtgtcgctcacatctttgcatccttcaatgacaccttcattcatatcactgatttgtctgggagggaaactctggttcggatcaccggtggcatgaaggtgaaggctgaccgtgacgagtcgtcaccttacgctgctatgcttgctgctcaagacgtcgcacagcgctgcaaggagcttggcattactgcactgcacattaagcttcgtgccaccggaggcaacaagaccaagacccccggacctggtgcccagtctgccctcagggcgcttgctcgttctgggatgaaaatcggacgcattgaggacgttaccccggtccccacggacagcactcgcagaaagggcggtaggaggggaaggaggctgtaggcatctctggcggctcttggcggcatgaagctagtcctctctgggtggtgttgctgttttctgtgtttgtcaagacgagctttaattttgctctatgtggatgaccgtttacagttactcgagcctatatgatgttgcatggataatgttttttggctgaggaattggctcgtcatatttatatatgcattttcactctctataaacgtgtactagagtaaccttccgtttcgatgagtcatatttatatgaagccagttacagacatggaatgcaacggaagatgcaagaga

SEQ ID NO: 61594 - DNA, 1488 bp, Zea Mays
aggtttccagaaaatatgtggtttgggaagattggcccattccaagcacataccgaagcttctaaagtcaaagtaaaaattcgcttgaatctacatggtttggtttcagtcgaatctgccgttttgataaatgattatcaaaggaatggaagttctactgatcatatggaggtggatagcagtggtgatgacatgcagggtcacaagtcaagaagtgaaaggtctatccagcggcaggagttgccaatcactgagtacatatatggtgcaatgagcaagcatgaattgctggaagctcaagagcaagaacagcaattggcttatcaggataaacttgtggaatggacaaaggacaggaagaatgcattagaatcttatgtatatgacacccgtaacaagctttctgagaggtaccggagctttgctactgattcagaaagggaacaaatctcagttaatttacaacagactgaagattggctttacgaagaaggtgatgatgagacagaagcagtttacagtagcaaacttgaggagctgaaaaagcttgtagatccaattgaaaatcgttgtaaagatgacgaagtgagagctgaagccatgagagatcttttgaagtgcattgttgaccacagaaatgctgccaagtcattatccacacctgaaagagatgctgttgacaatgagtgcaataaagctgagcagtggctaagggaggggtcccaacttcaagaatccttgcccaagaatgtggacccagtactttggtcctgtgaaatcaagagaaaggaagaagagctggatacgttctgtcgaaacataacaaggcacaagggctctccagcaaggacagatggcagcaggggttcagattacatgcctacacctgatagagattaaatattttcacgatcacgaggtttctttactgtacggccacacatgtcttagaccttgttcgtttacgtcggattgcacccggaatcgttccagctaatcaaagtttatataaattagagaagcaatccggctaggaatcgttccgacccaccaatccggtagaaacgaacaaggccttaatcattttgtagcatatatatgaatgaacgagttcctgctaacaccgtcatataatcgactctgtacaacactaggcccgccattgggtgaccgcttcttggttctccaaggtgcagttgtcacttgagagcctactgatcatgattgtcgatacctgtgaattcttttccggtacttggatcaaggttgtctgcttcagtttgttctgaatggaaaggataattaaaaggaaattgtatgcaatagatattgttgacgccgttttttagcttggcagatttatgcttcagtttgttgatcccaggaagttacccattatttaattttgtttgttaataccttgtatggtgtacattgatgatagttccttcgcacacatttttttttcttatgatgaaacaatacatt

SEQ ID NO: 61595 - DNA, 3050 bp, Zea Mays
caaaattgctcatgaggagccaagagaaaagtaactacaccacgtccccacagcaggcaaaaggaagctgccccacctgtcggcgacaggcgagtaggcacggccggggacggctcctccttgccaccgcggcgtgcgcggaccgtgcgtccgtgccctccggctccggcgcaccgctccgctccgctcattccatctccatccaccgcgccccaaatcgcacggcctcgcctccccattcgcgccgatcgaatcccgaatcggcggccatgagcgtggtcggcttcgacgtcggcaacgacaccctggtggcggcggcggcgcggcagcggggcattgatgtgctcctcaacgccgagtccaagcgcgagtcacccgccgccgtcgccttctcccacaacgcgcgcctcatcggctgccacgccgcgtccgcctcgtccgcccacgcccccttctccagcgtcaaacgcctctcctgggcgccacggggaggaacccggactcctccctcctccgcgacctcccccgcctccctttctccgtctcccacgcctccggtggcggcgccgtcgtccacgttgaccacatcgggccgccgcatcgcgctctctccgacccatctcctctccatgctgctcgcctacctcaagcagctcgcggaggccgacctcggaggcgcccccgtcgccgactgcgtgatctccgtgccctgctacttcactcaagcgcaacgccgcgcctacctcgacgccgccgccgtcgcggggctcaggccgctccgcctcatgcacgacctcgccgccgccgcgcttggctacggcctctaccgctccgacctcggcggcgccgggggccccacctgcgtcgccttcgtggacgtcggccaatgcgacacgcaggtcgcagttgtctccttcgacatgtcggggatgaaggtgctgtcccacggcttcgatgcagacctcgggggcagggatttcgacgaggtgctgttcgagcatttcgccgaggagttcagggacaggtataggattgatgtcgtgaggaatgtgaaggccagtatgaggttgagggcagcctgtgagaaggccaagaaggttctgagcgcgaatgcagaggccgtggtgaacatcgagtgcctgatggaagagaaggatgtgaggggggtgatccgaagggaggactttgagaagctatgtgccagactgctggagagggttgttgaaccttgcaagagggcggtggaagattcagggattggattggagaggctgcattctgtggaactcgtcgggtcaggttctcgggttcctgccattaccaaggtgcttgcgggattctttagaagggaacctagtcgcacactcaatgctagtgagtgtgtggctcgggggtgcgcgttgcaatgtgcaatgcttagtcctacgttccgtgttcgggaatacgaggtgcaggatgcaatccctgcttccataggatttaacactagtgacggcccagtttcaacattgtcaagtgatgcattgttccggagaggcctgcactttcccagtgttaagatcattactctagagaagaatgacagttttagttttgatgcatattatgtggatgctaatgaattgcctcctggtacctcaacagacatcggtagttttcagattggcccattccaagcacataccgaagcttctaaagtcaaagtaaaaattcgcttgaatctacatggtttggtttcagtcgaatctgccgttttgataaatgattatcaaaggaatggaagttctactgatcatatggaggtggatagcagtggtgatgacatgcagggtcacaagtcaagaagtgaaaggtctatccagcggcaggagttgccaatcactgagtacatatatggtgcaatgagcaagcatgaattgctggaagctcaagagcaagaacagcaattggcttatcaggataaacttgtggaatggacaaaggacaggaagaatgcattagaatcttatgtatatgacacccgtaacaagactgaagattggctttacgaagaaggtgatgatgagacagaagcagtttacagtagcaaacttgaggagctgaaaaagcttgtagatccaattgaaaatcgttgtaaagatgacgaagtgagagctgaagccatgagagatcttttgaagtgcattgttgaccacagaaatgctgccaagtcattatccacacctgaaagagatgctgttgacaatgagtgcaataaagctgagcagtggctaagggaggggtcccaacttcaagaatccttgcccaagaatgtggacccagtactttggtcctgtgaaatcaagagaaaggaagaagagctggatacgttctgtcgaaacataacaaggcacaagggctctccagcaaggacagatggcagcaggggttcagattacatgcctacacctgatagagattaaatattttcacgatcacgaggtttctttactgtacggccacacatgtcttagaccttgttcgtttacgtcggattgcacccggaatcgttccagctaatcaaagtttatataaattagagaagcaatccggctaggaatcgttccgacccaccaatccggtagaaacgaacaaggccttaatcattttgtagcatatatatgaatgaacgagttcctgctaacaccgtcatataatcgactctgtacaacactaggcccgccattgggtgaccgcttcttggttctccaaggtgcagttgtcacttgagagcctactgatcatgattgtcgatacctgtgaattcttttccggtacttggatcaaggttgtctgcttcagtttgttctgaatggaaaggataattaaaaggaaattgtatgcaatagatattgttgacgccgttttttagcttggcagatttatgcttcagtttgttgatcccaggaagttacccattatttaattttgtttgttaataccttgtatggtgtacattgatgatagttccttcgcacacatttttttttcttatgatgaaacaatacatt

SEQ ID NO: 61596 - DNA, 3122 bp, Zea Mays
caaaattgctcatgaggagccaagagaaaagtaactacaccacgtccccacagcaggcaaaaggaagctgccccacctgtcggcgacaggcgagtaggcacggccggggacggctcctccttgccaccgcggcgtgcgcggaccgtgcgtccgtgccctccggctccggcgcaccgctccgctccgctcattccatctccatccaccgcgccccaaatcgcacggcctcgcctccccattcgcgccgatcgaatcccgaatcggcggccatgagcgtggtcggcttcgacgtcggcaacgacaccctggtggcggcggcggcgcggcagcggggcattgatgtgctcctcaacgccgagtccaagcgcgagtcacccgccgccgtcgccttctcccacaacgcgcgcctcatcggctgccacgccgcgtccgcctcgtccgcccacgcccccttctccagcgtcaaacgcctctcctgggcgccacggggaggaacccggactcctccctcctccgcgacctcccccgcctccctttctccgtctcccacgcctccggtggcggcgccgtcgtccacgttgaccacatcgggccgccgcatcgcgctctctccgacccatctcctctccatgctgctcgcctacctcaagcagctcgcggaggccgacctcggaggcgcccccgtcgccgactgcgtgatctccgtgccctgctacttcactcaagcgcaacgccgcgcctacctcgacgccgccgccgtcgcggggctcaggccgctccgcctcatgcacgacctcgccgccgccgcgcttggctacggcctctaccgctccgacctcggcggcgccgggggccccacctgcgtcgccttcgtggacgtcggccaatgcgacacgcaggtcgcagttgtctccttcgacatgtcggggatgaaggtgctgtcccacggcttcgatgcagacctcgggggcagggatttcgacgaggtgctgttcgagcatttcgccgaggagttcagggacaggtataggattgatgtcgtgaggaatgtgaaggccagtatgaggttgagggcagcctgtgagaaggccaagaaggttctgagcgcgaatgcagaggccgtggtgaacatcgagtgcctgatggaagagaaggatgtgaggggggtgatccgaagggaggactttgagaagctatgtgccagactgctggagagggttgttgaaccttgcaagagggcggtggaagattcagggattggattggagaggctgcattctgtggaactcgtcgggtcaggttctcgggttcctgccattaccaaggtgcttgcgggattctttagaagggaacctagtcgcacactcaatgctagtgagtgtgtggctcgggggtgcgcgttgcaatgtgcaatgcttagtcctacgttccgtgttcgggaatacgaggtgcaggatgcaatccctgcttccataggatttaacactagtgacggcccagtttcaacattgtcaagtgatgcattgttccggagaggcctgcactttcccagtgttaagatcattactctagagaagaatgacagttttagttttgatgcatattatgtggatgctaatgaattgcctcctggtacctcaacagacatcggtagttttcagcagattggcccattccaagcacataccgaagcttctaaagtcaaagtaaaaattcgcttgaatctacatggtttggtttcagtcgaatctgccgttttgataaatgattatcaaaggaatggaagttctactgatcatatggaggtggatagcagtggtgatgacatgcagggtcacaagtcaagaagtgaaaggtctatccagcggcaggagttgccaatcactgagtacatatatggtgcaatgagcaagcatgaattgctggaagctcaagagcaagaacagcaattggcttatcaggataaacttgtggaatggacaaaggacaggaagaatgcattagaatcttatgtatatgacacccgtaacaagctttctgagaggtaccggagctttgctactgattcagaaagggaacaaatctcagttaatttacaacagactgaagattggctttacgaagaaggtgatgatgagacagaagcagtttacagtagcaaacttgaggagctgaaaaagcttgtagatccaattgaaaatcgttgtaaagatgacgaagtgagagctgaagccatgagagatcttttgaagtgcattgttgaccacagaaatgctgccaagtcattatccacacctgaaagagatgctgttgacaatgagtgcaataaagctgagcagtggctaagggaggggtcccaacttcaagaatccttgcccaagaatgtggacccagtactttggtcctgtgaaatcaagagaaaggaagaagagctggatacgttctgtcgaaacataacaaggcacaagggctctccagcaaggacagatggcagcaggggttcagattacatgcctacacctgatagagattaaatattttcacgatcacgaggtttctttactgtacggccacacatgtcttagaccttgttcgtttacgtcggattgcacccggaatcgttccagctaatcaaagtttatataaattagagaagcaatccggctaggaatcgttccgacccaccaatccggtagaaacgaacaaggccttaatcattttgtagcatatatatgaatgaacgagttcctgctaacaccgtcatataatcgactctgtacaacactaggcccgccattgggtgaccgcttcttggttctccaaggtgcagttgtcacttgagagcctactgatcatgattgtcgatacctgtgaattcttttccggtacttggatcaaggttgtctgcttcagtttgttctgaatggaaaggataattaaaaggaaattgtatgcaatagatattgttgacgccgttttttagcttggcagatttatgcttcagtttgttgatcccaggaagttacccattatttaattttgtttgttaataccttgtatggtgtacattgatgatagttccttcgcacacatttttttttcttatgatgaaacaatacatt

SEQ ID NO: 61597 - DNA, 3112 bp, Zea Mays
caaaattgctcatgaggagccaagagaaaagtaactacaccacgtccccacagcaggcaaaaggaagctgccccacctgtcggcgacaggcgagtaggcacggccggggacggctcctccttgccaccgcggcgtgcgcggaccgtgcgtccgtgccctccggctccggcgcaccgctccgctccgctcattccatctccatccaccgcgccccaaatcgcacggcctcgcctccccattcgcgccgatcgaatcccgaatcggcggccatgagcgtggtcggcttcgacgtcggcaacgacaccctggtggcggcggcggcgcggcagcggggcattgatgtgctcctcaacgccgagtccaagcgcgagtcacccgccgccgtcgccttctcccacaacgcgcgcctcatcggctgccacgccgcgtccgcctcgtccgcccacgcccccttctccagcgtcaaacgcctctcctgggcgccacggggaggaacccggactcctccctcctccgcgacctcccccgcctccctttctccgtctcccacgcctccggtggcggcgccgtcgtccacgttgaccacatcgggccgccgcatcgcgctctctccgacccatctcctctccatgctgctcgcctacctcaagcagctcgcggaggccgacctcggaggcgcccccgtcgccgactgcgtgatctccgtgccctgctacttcactcaagcgcaacgccgcgcctacctcgacgccgccgccgtcgcggggctcaggccgctccgcctcatgcacgacctcgccgccgccgcgcttggctacggcctctaccgctccgacctcggcggcgccgggggccccacctgcgtcgccttcgtggacgtcggccaatgcgacacgcaggtcgcagttgtctccttcgacatgtcggggatgaaggtgctgtcccacggcttcgatgcagacctcgggggcagggatttcgacgaggtgctgttcgagcatttcgccgaggagttcagggacaggtataggattgatgtcgtgaggaatgtgaaggccagtatgaggttgagggcagcctgtgagaaggccaagaaggttctgagcgcgaatgcagaggccgtggtgaacatcgagtgcctgatggaagagaaggatgtgaggggggtgatccgaagggaggactttgagaagctatgtgccagactgctggagagggttgttgaaccttgcaagagggcggtggaagattcagggattggattggagaggctgcattctgtggaactcgtcgggtcaggttctcgggttcctgccattaccaaggtgcttgcgggattctttagaagggaacctagtcgcacactcaatgctagtgagtgtgtggctcgggggtgcgcgttgcaatgtgcaatgcttagtcctacgttccgtgttcgggaatacgaggtgcaggatgcaatccctgcttccataggatttaacactagtgacggcccagtttcaacattgtcaagtgatgcattgttccggagaggcctgcactttcccagtgttaagatcattactctagagaagaatgacagttttagttttgatgcatattatgtggatgctaatgaattgcctcctggtacctcaacagacatcggtagttttcagattggcccattccaagcacataccgaagcttctaaagtcaaagtaaaaattcgcttgaatctacatggtttggtttcagtcgaatctgccgttttgataaatgattatcaaaggaatggaagttctactgatcatatggaggtggatagcagtggtgatgacatgcagggtcacaagtcaagaagtgaaaggtctatccagcggcaggagttgccaatcactgagtacatatatggtgcaatgagcaagcatgaattgctggaagctcaagagcaagaacagcaattggcttatcaggataaacttgtggaatggacaaaggacaggaagaatgcattagaatcttatgtatatgacacccgtaacaagctttctgagaggtaccggagctttgctactgattcagaaagggaacaaatctcagttaatttacaacagactgaagattggctttacgaagaaggtgatgatgagacagaagcagtttacagtagcaaacttgaggagctgaaaaagatccaattgaaaatcgttgtaaagatgacgaagtgagagctgaagccatgagagatcttttgaagtgcattgttgaccacagaaatgctgccaagtcattatccacacctgaaagagatgctgttgacaatgagtgcaataaagctgagcagtggctaagggaggggtcccaacttcaagaatccttgcccaagaatgtggacccagtactttggtcctgtgaaatcaagagaaaggaagaagagctggatacgttctgtcgaaacataacaaggcacaagggctctccagcaaggacagatggcagcaggggttcagattacatgcctacacctgatagagattaaatattttcacgatcacgaggtttctttactgtacggccacacatgtcttagaccttgttcgtttacgtcggattgcacccggaatcgttccagctaatcaaagtttatataaattagagaagcaatccggctaggaatcgttccgacccaccaatccggtagaaacgaacaaggccttaatcattttgtagcatatatatgaatgaacgagttcctgctaacaccgtcatataatcgactctgtacaacactaggcccgccattgggtgaccgcttcttggttctccaaggtgcagttgtcacttgagagcctactgatcatgattgtcgatacctgtgaattcttttccggtacttggatcaaggttgtctgcttcagtttgttctgaatggaaaggataattaaaaggaaattgtatgcaatagatattgttgacgccgttttttagcttggcagatttatgcttcagtttgttgatcccaggaagttacccattatttaattttgtttgttaataccttgtatggtgtacattgatgatagttccttcgcacacatttttttttcttatgatgaaacaatacatt

SEQ ID NO: 61598 - DNA, 3044 bp, Zea Mays
caaaattgctcatgaggagccaagagaaaagtaactacaccacgtccccacagcaggcaaaaggaagctgccccacctgtcggcgacaggcgagtaggcacggccggggacggctcctccttgccaccgcggcgtgcgcggaccgtgcgtccgtgccctccggctccggcgcaccgctccgctccgctcattccatctccatccaccgcgccccaaatcgcacggcctcgcctccccattcgcgccgatcgaatcccgaatcggcggccatgagcgtggtcggcttcgacgtcggcaacgacaccctggtggcggcggcggcgcggcagcggggcattgatgtgctcctcaacgccgagtccaagcgcgagtcacccgccgccgtcgccttctcccacaacgcgcgcctcatcggctgccacgccgcgtccgcctcgtccgcccacgcccccttctccagcgtcaaacgcctctcctgggcgccacggggaggaacccggactcctccctcctccgcgacctcccccgcctccctttctccgtctcccacgcctccggtggcggcgccgtcgtccacgttgaccacatcgggccgccgcatcgcgctctctccgacccatctcctctccatgctgctcgcctacctcaagcagctcgcggaggccgacctcggaggcgcccccgtcgccgactgcgtgatctccgtgccctgctacttcactcaagcgcaacgccgcgcctacctcgacgccgccgccgtcgcggggctcaggccgctccgcctcatgcacgacctcgccgccgccgcgcttggctacggcctctaccgctccgacctcggcggcgccgggggccccacctgcgtcgccttcgtggacgtcggccaatgcgacacgcaggtcgcagttgtctccttcgacatgtcggggatgaaggtgctgtcccacggcttcgatgcagacctcgggggcagggatttcgacgaggtgctgttcgagcatttcgccgaggagttcagggacaggtataggattgatgtcgtgaggaatgtgaaggccagtatgaggttgagggcagcctgtgagaaggccaagaaggttctgagcgcgaatgcagaggccgtggtgaacatcgagtgcctgatggaagagaaggatgtgaggggggtgatccgaagggaggactttgagaagctatgtgccagactgctggagagggttgttgaaccttgcaagagggcggtggaagattcagggattggattggagaggctgcattctgtggaactcgtcgggtcaggttctcgggttcctgccattaccaaggtgcttgcgggattctttagaagggaacctagtcgcacactcaatgctagtgagtgtgtggctcgggggtgcgcgttgcaatgtgcaatgcttagtcctacgttccgtgttcgggaatacgaggtgcaggatgcaatccctgcttccataggatttaacactagtgacggcccagtttcaacattgtcaagtgatgcattgttccggagaggcctgcactttcccagtgttaagatcattactctagagaagaatgacagttttagttttgatgcatattatgtggatgctaatgaattgcctcctggtacctcaacagacatcggtagttttcagattggcccattccaagcacataccgaagcttctaaagtcaaagtaaaaattcgcttgaatctacatggtttggtttcagtcgaatctgccgttggtcacaagtcaagaagtgaaaggtctatccagcggcaggagttgccaatcactgagtacatatatggtgcaatgagcaagcatgaattgctggaagctcaagagcaagaacagcaattggcttatcaggataaacttgtggaatggacaaaggacaggaagaatgcattagaatcttatgtatatgacacccgtaacaagctttctgagaggtaccggagctttgctactgattcagaaagggaacaaatctcagttaatttacaacagactgaagattggctttacgaagaaggtgatgatgagacagaagcagtttacagtagcaaacttgaggagctgaaaaagcttgtagatccaattgaaaatcgttgtaaagatgacgaagtgagagctgaagccatgagagatcttttgaagtgcattgttgaccacagaaatgctgccaagtcattatccacacctgaaagagatgctgttgacaatgagtgcaataaagctgagcagtggctaagggaggggtcccaacttcaagaatccttgcccaagaatgtggacccagtactttggtcctgtgaaatcaagagaaaggaagaagagctggatacgttctgtcgaaacataacaaggcacaagggctctccagcaaggacagatggcagcaggggttcagattacatgcctacacctgatagagattaaatattttcacgatcacgaggtttctttactgtacggccacacatgtcttagaccttgttcgtttacgtcggattgcacccggaatcgttccagctaatcaaagtttatataaattagagaagcaatccggctaggaatcgttccgacccaccaatccggtagaaacgaacaaggccttaatcattttgtagcatatatatgaatgaacgagttcctgctaacaccgtcatataatcgactctgtacaacactaggcccgccattgggtgaccgcttcttggttctccaaggtgcagttgtcacttgagagcctactgatcatgattgtcgatacctgtgaattcttttccggtacttggatcaaggttgtctgcttcagtttgttctgaatggaaaggataattaaaaggaaattgtatgcaatagatattgttgacgccgttttttagcttggcagatttatgcttcagtttgttgatcccaggaagttacccattatttaattttgtttgttaataccttgtatggtgtacattgatgatagttccttcgcacacatttttttttcttatgatgaaacaatacatt

SEQ ID NO: 61599 - DNA, 3119 bp, Zea Mays
caaaattgctcatgaggagccaagagaaaagtaactacaccacgtccccacagcaggcaaaaggaagctgccccacctgtcggcgacaggcgagtaggcacggccggggacggctcctccttgccaccgcggcgtgcgcggaccgtgcgtccgtgccctccggctccggcgcaccgctccgctccgctcattccatctccatccaccgcgccccaaatcgcacggcctcgcctccccattcgcgccgatcgaatcccgaatcggcggccatgagcgtggtcggcttcgacgtcggcaacgacaccctggtggcggcggcggcgcggcagcggggcattgatgtgctcctcaacgccgagtccaagcgcgagtcacccgccgccgtcgccttctcccacaacgcgcgcctcatcggctgccacgccgcgtccgcctcgtccgcccacgcccccttctccagcgtcaaacgcctctcctgggcgccacggggaggaacccggactcctccctcctccgcgacctcccccgcctccctttctccgtctcccacgcctccggtggcggcgccgtcgtccacgttgaccacatcgggccgccgcatcgcgctctctccgacccatctcctctccatgctgctcgcctacctcaagcagctcgcggaggccgacctcggaggcgcccccgtcgccgactgcgtgatctccgtgccctgctacttcactcaagcgcaacgccgcgcctacctcgacgccgccgccgtcgcggggctcaggccgctccgcctcatgcacgacctcgccgccgccgcgcttggctacggcctctaccgctccgacctcggcggcgccgggggccccacctgcgtcgccttcgtggacgtcggccaatgcgacacgcaggtcgcagttgtctccttcgacatgtcggggatgaaggtgctgtcccacggcttcgatgcagacctcgggggcagggatttcgacgaggtgctgttcgagcatttcgccgaggagttcagggacaggtataggattgatgtcgtgaggaatgtgaaggccagtatgaggttgagggcagcctgtgagaaggccaagaaggttctgagcgcgaatgcagaggccgtggtgaacatcgagtgcctgatggaagagaaggatgtgaggggggtgatccgaagggaggactttgagaagctatgtgccagactgctggagagggttgttgaaccttgcaagagggcggtggaagattcagggattggattggagaggctgcattctgtggaactcgtcgggtcaggttctcgggttcctgccattaccaaggtgcttgcgggattctttagaagggaacctagtcgcacactcaatgctagtgagtgtgtggctcgggggtgcgcgttgcaatgtgcaatgcttagtcctacgttccgtgttcgggaatacgaggtgcaggatgcaatccctgcttccataggatttaacactagtgacggcccagtttcaacattgtcaagtgatgcattgttccggagaggcctgcactttcccagtgttaagatcattactctagagaagaatgacagttttagttttgatgcatattatgtggatgctaatgaattgcctcctggtacctcaacagacatcggtagttttcagcagattggcccattccaagcacataccgaagcttctaaagtcaaagtaaaaattcgcttgaatctacatggtttggtttcagtcgaatctgccgttttgataaatgattatcaaaggaatggaagttctactgatcatatggaggtggatagcagtggtgatgacatgggtcacaagtcaagaagtgaaaggtctatccagcggcaggagttgccaatcactgagtacatatatggtgcaatgagcaagcatgaattgctggaagctcaagagcaagaacagcaattggcttatcaggataaacttgtggaatggacaaaggacaggaagaatgcattagaatcttatgtatatgacacccgtaacaagctttctgagaggtaccggagctttgctactgattcagaaagggaacaaatctcagttaatttacaacagactgaagattggctttacgaagaaggtgatgatgagacagaagcagtttacagtagcaaacttgaggagctgaaaaagcttgtagatccaattgaaaatcgttgtaaagatgacgaagtgagagctgaagccatgagagatcttttgaagtgcattgttgaccacagaaatgctgccaagtcattatccacacctgaaagagatgctgttgacaatgagtgcaataaagctgagcagtggctaagggaggggtcccaacttcaagaatccttgcccaagaatgtggacccagtactttggtcctgtgaaatcaagagaaaggaagaagagctggatacgttctgtcgaaacataacaaggcacaagggctctccagcaaggacagatggcagcaggggttcagattacatgcctacacctgatagagattaaatattttcacgatcacgaggtttctttactgtacggccacacatgtcttagaccttgttcgtttacgtcggattgcacccggaatcgttccagctaatcaaagtttatataaattagagaagcaatccggctaggaatcgttccgacccaccaatccggtagaaacgaacaaggccttaatcattttgtagcatatatatgaatgaacgagttcctgctaacaccgtcatataatcgactctgtacaacactaggcccgccattgggtgaccgcttcttggttctccaaggtgcagttgtcacttgagagcctactgatcatgattgtcgatacctgtgaattcttttccggtacttggatcaaggttgtctgcttcagtttgttctgaatggaaaggataattaaaaggaaattgtatgcaatagatattgttgacgccgttttttagcttggcagatttatgcttcagtttgttgatcccaggaagttacccattatttaattttgtttgttaataccttgtatggtgtacattgatgatagttccttcgcacacatttttttttcttatgatgaaacaatacatt

SEQ ID NO: 61600 - DNA, 3131 bp, Zea Mays
attagcacagctcaaaattgctcatgaggagccaagagaaaagtaactacaccacgtccccacagcaggcaaaaggaagctgccccacctgtcggcgacaggcgagtaggcacggccggggacggctcctccttgccaccgcggcgtgcgcggaccgtgcgtccgtgccctccggctccggcgcaccgctccgctccgctcattccatctccatccaccgcgccccaaatcgcacggcctcgcctccccattcgcgccgatcgaatcccgaatcggcggccatgagcgtggtcggcttcgacgtcggcaacgacaccctggtggcggcggcggcgcggcagcggggcattgatgtgctcctcaacgccgagtccaagcgcgagtcacccgccgccgtcgccttctcccacaacgcgcgcctcatcggctgccacgccgcgtccgcctcgtccgcccacgcccccttctccagcgtcaaacgcctctcctgggcgccacggggaggaacccggactcctccctcctccgcgacctcccccgcctccctttctccgtctcccacgcctccggtggcggcgccgtcgtccacgttgaccacatcgggccgccgcatcgcgctctctccgacccatctcctctccatgctgctcgcctacctcaagcagctcgcggaggccgacctcggaggcgcccccgtcgccgactgcgtgatctccgtgccctgctacttcactcaagcgcaacgccgcgcctacctcgacgccgccgccgtcgcggggctcaggccgctccgcctcatgcacgacctcgccgccgccgcgcttggctacggcctctaccgctccgacctcggcggcgccgggggccccacctgcgtcgccttcgtggacgtcggccaatgcgacacgcaggtcgcagttgtctccttcgacatgtcggggatgaaggtgctgtcccacggcttcgatgcagacctcgggggcagggatttcgacgaggtgctgttcgagcatttcgccgaggagttcagggacaggtataggattgatgtcgtgaggaatgtgaaggccagtatgaggttgagggcagcctgtgagaaggccaagaaggttctgagcgcgaatgcagaggccgtggtgaacatcgagtgcctgatggaagagaaggatgtgaggggggtgatccgaagggaggactttgagaagctatgtgccagactgctggagagggttgttgaaccttgcaagagggcggtggaagattcagggattggattggagaggctgcattctgtggaactcgtcgggtcaggttctcgggttcctgccattaccaaggtgcttgcgggattctttagaagggaacctagtcgcacactcaatgctagtgagtgtgtggctcgggggtgcgcgttgcaatgtgcaatgcttagtcctacgttccgtgttcgggaatacgaggtgcaggatgcaatccctgcttccataggatttaacactagtgacggcccagtttcaacattgtcaagtgatgcattgttccggagaggcctgcactttcccagtgttaagatcattactctagagaagaatgacagttttagttttgatgcatattatgtggatgctaatgaattgcctcctggtacctcaacagacatcggtagttttcagattggcccattccaagcacataccgaagcttctaaagtcaaagtaaaaattcgcttgaatctacatggtttggtttcagtcgaatctgccgttttgataaatgattatcaaaggaatggaagttctactgatcatatggaggtggatagcagtggtgatgacatgcagggtcacaagtcaagaagtgaaaggtctatccagcggcaggagttgccaatcactgagtacatatatggtgcaatgagcaagcatgaattgctggaagctcaagagcaagaacagcaattggcttatcaggataaacttgtggaatggacaaaggacaggaagaatgcattagaatcttatgtatatgacacccgtaacaagctttctgagaggtaccggagctttgctactgattcagaaagggaacaaatctcagttaatttacaacagactgaagattggctttacgaagaaggtgatgatgagacagaagcagtttacagtagcaaacttgaggagctgaaaaagcttgtagatccaattgaaaatcgttgtaaagatgacgaagtgagagctgaagccatgagagatcttttgaagtgcattgttgaccacagaaatgctgccaagtcattatccacacctgaaagagatgctgttgacaatgagtgcaataaagctgagcagtggctaagggaggggtcccaacttcaagaatccttgcccaagaatgtggacccagtactttggtcctgtgaaatcaagagaaaggaagaagagctggatacgttctgtcgaaacataacaaggcacaagggctctccagcaaggacagatggcagcaggggttcagattacatgcctacacctgatagagattaaatattttcacgatcacgaggtttctttactgtacggccacacatgtcttagaccttgttcgtttacgtcggattgcacccggaatcgttccagctaatcaaagtttatataaattagagaagcaatccggctaggaatcgttccgacccaccaatccggtagaaacgaacaaggccttaatcattttgtagcatatatatgaatgaacgagttcctgctaacaccgtcatataatcgactctgtacaacactaggcccgccattgggtgaccgcttcttggttctccaaggtgcagttgtcacttgagagcctactgatcatgattgtcgatacctgtgaattcttttccggtacttggatcaaggttgtctgcttcagtttgttctgaatggaaaggataattaaaaggaaattgtatgcaatagatattgttgacgccgttttttagcttggcagatttatgcttcagtttgttgatcccaggaagttacccattatttaattttgtttgttaataccttgtatggtgtacattgatgatagttccttcgcacacatttttttttcttatgatgaaacaatacatt

SEQ ID NO: 61601 - DNA, 3128 bp, Zea Mays
attagcacagctcaaaattgctcatgaggagccaagagaaaagtaactacaccacgtccccacagcaggcaaaaggaagctgccccacctgtcggcgacaggcgagtaggcacggccggggacggctcctccttgccaccgcggcgtgcgcggaccgtgcgtccgtgccctccggctccggcgcaccgctccgctccgctcattccatctccatccaccgcgccccaaatcgcacggcctcgcctccccattcgcgccgatcgaatcccgaatcggcggccatgagcgtggtcggcttcgacgtcggcaacgacaccctggtggcggcggcggcgcggcagcggggcattgatgtgctcctcaacgccgagtccaagcgcgagtcacccgccgccgtcgccttctcccacaacgcgcgcctcatcggctgccacgccgcgtccgcctcgtccgcccacgcccccttctccagcgtcaaacgcctctcctgggcgccacggggaggaacccggactcctccctcctccgcgacctcccccgcctccctttctccgtctcccacgcctccggtggcggcgccgtcgtccacgttgaccacatcgggccgccgcatcgcgctctctccgacccatctcctctccatgctgctcgcctacctcaagcagctcgcggaggccgacctcggaggcgcccccgtcgccgactgcgtgatctccgtgccctgctacttcactcaagcgcaacgccgcgcctacctcgacgccgccgccgtcgcggggctcaggccgctccgcctcatgcacgacctcgccgccgccgcgcttggctacggcctctaccgctccgacctcggcggcgccgggggccccacctgcgtcgccttcgtggacgtcggccaatgcgacacgcaggtcgcagttgtctccttcgacatgtcggggatgaaggtgctgtcccacggcttcgatgcagacctcgggggcagggatttcgacgaggtgctgttcgagcatttcgccgaggagttcagggacaggtataggattgatgtcgtgaggaatgtgaaggccagtatgaggttgagggcagcctgtgagaaggccaagaaggttctgagcgcgaatgcagaggccgtggtgaacatcgagtgcctgatggaagagaaggatgtgaggggggtgatccgaagggaggactttgagaagctatgtgccagactgctggagagggttgttgaaccttgcaagagggcggtggaagattcagggattggattggagaggctgcattctgtggaactcgtcgggtcaggttctcgggttcctgccattaccaaggtgcttgcgggattctttagaagggaacctagtcgcacactcaatgctagtgagtgtgtggctcgggggtgcgcgttgcaatgtgcaatgcttagtcctacgttccgtgttcgggaatacgaggtgcaggatgcaatccctgcttccataggatttaacactagtgacggcccagtttcaacattgtcaagtgatgcattgttccggagaggcctgcactttcccagtgttaagatcattactctagagaagaatgacagttttagttttgatgcatattatgtggatgctaatgaattgcctcctggtacctcaacagacatcggtagttttcagattggcccattccaagcacataccgaagcttctaaagtcaaagtaaaaattcgcttgaatctacatggtttggtttcagtcgaatctgccgttttgataaatgattatcaaaggaatggaagttctactgatcatatggaggtggatagcagtggtgatgacatgggtcacaagtcaagaagtgaaaggtctatccagcggcaggagttgccaatcactgagtacatatatggtgcaatgagcaagcatgaattgctggaagctcaagagcaagaacagcaattggcttatcaggataaacttgtggaatggacaaaggacaggaagaatgcattagaatcttatgtatatgacacccgtaacaagctttctgagaggtaccggagctttgctactgattcagaaagggaacaaatctcagttaatttacaacagactgaagattggctttacgaagaaggtgatgatgagacagaagcagtttacagtagcaaacttgaggagctgaaaaagcttgtagatccaattgaaaatcgttgtaaagatgacgaagtgagagctgaagccatgagagatcttttgaagtgcattgttgaccacagaaatgctgccaagtcattatccacacctgaaagagatgctgttgacaatgagtgcaataaagctgagcagtggctaagggaggggtcccaacttcaagaatccttgcccaagaatgtggacccagtactttggtcctgtgaaatcaagagaaaggaagaagagctggatacgttctgtcgaaacataacaaggcacaagggctctccagcaaggacagatggcagcaggggttcagattacatgcctacacctgatagagattaaatattttcacgatcacgaggtttctttactgtacggccacacatgtcttagaccttgttcgtttacgtcggattgcacccggaatcgttccagctaatcaaagtttatataaattagagaagcaatccggctaggaatcgttccgacccaccaatccggtagaaacgaacaaggccttaatcattttgtagcatatatatgaatgaacgagttcctgctaacaccgtcatataatcgactctgtacaacactaggcccgccattgggtgaccgcttcttggttctccaaggtgcagttgtcacttgagagcctactgatcatgattgtcgatacctgtgaattcttttccggtacttggatcaaggttgtctgcttcagtttgttctgaatggaaaggataattaaaaggaaattgtatgcaatagatattgttgacgccgttttttagcttggcagatttatgcttcagtttgttgatcccaggaagttacccattatttaattttgtttgttaataccttgtatggtgtacattgatgatagttccttcgcacacatttttttttcttatgatgaaacaatacatt

SEQ ID NO: 61602 - DNA, 1120 bp, Zea Mays
caactgtatcatataataaataaacaactgtcactaactcataataacatccataagtacacggagacatcagatgtcagtaatgaactaaatcaacatccattatttcgcaattactgtacctggtcacttcaaaacttttaaaaaactgaagccaagcttgaggtcaacttgctaacaacagttgctacaagaaggccatacataatgtagagccttagtacatgtcacacatcaaacttttgtttaacagtttcttcctttctactgaccatattaaccattcctatgtttttctgaggttaatgttttttctcaaatgcaggagagctacatatcattatatttaaaaaggtaaaaagggtaagaatccatacaaccacacaccacgtcacctagaccgtagaggttcaattagaacatgtgtgcctatttcaagaagagcaacatgaccatgactctcaagtggaacacaggaaaaaaaacatagttaataccctggccagccccccccccccccaaacaaaaaactgcaactctttgctagcaaacagcaaaggtctagctaagctcagagattcacattaatatgagtgttgtacgttctagtatatgctatatccaaactttaaaatacaaattcaacagcaatcaaacaagaaatgtagatggacacttctttcggactgtatattcgcactttgaagcaagagttacaacccacaaagtcaactggaagaaagaagagcattttgtaaacaaattaatcagtgttgggacttgggagccatcagatggtattagaagtaactccaagaacatgcacctttcttttcagttagtgaacactatcacggcaactaactgggcacttttctaacaatcgaaaaccttatataacatatgcacaatttattctggcagtgatgcaatgatgcataaattgacaaccagagaaaagaaaaaatgcataaagataccgttatgtggggtggaaataaggcagcaaattctgaaatatcagtgatgatatcttcaagatgctgaccaagggtgcccaggcacaagctgaccaatttccgaggtttagccttctttgagaaaggatctgaaatacatt

SEQ ID NO: 61603 - DNA, 384 bp, Zea Mays
atggaccgacgcctccgctccccggcgcgccgtcccgagcgccagcagctcgcgggcagcggcagcccgcaccgcttcctccgcccgggcgcgctcgcgcggctccgcgactccagggtcctggcccgctccctccgctgtgccgcgcgggcgtgggcgccgccctcctcgcctcctcgctcgcccgcgccgcccgccgcctgggacggcgtgccatgcttcctcgggcccgcctccgccacgagggggatgcggtacccgttgcggaagaagctggccgccgcccgagccgtggtgctcctgtccccaccgctggatgtcgtggaggcgttcatggacgcgttcgcgccagcggcgtcgccggacgtggtcgctgcgcactga

SEQ ID NO: 61604 - DNA, 551 bp, Zea Mays
aaaaggttttaactctattgtgagtttagtagcatggaaaatttggaagcatagaaatgcttgtgtgtttgaaaatgcttccccaaacatccacgcaatcttgttgtccatccatgaagatgccttattatggggccttgctggggttgctgctcttaggagtgtttggcaatagtttagctttttggttgtgttttttcattagatttgggtgtgtattatcgttttttctttcttttttccttttcgtgggtgctttctaggcaccttgtatttggtcttttctagacctttttctgacttcttaatatatgatacgtggttcccccacgtgttcgagaaaaagttatatatcatgtacatcggtgaaaagaatttgaacctgtgcattgaaaccaaaaattatctttgatgaaaggccatctctagcatcaacaattcccctgtagagtgaatcatcgccatggaaagagtacatgtaacttggtcccagaaaatatatgccctttacttgctctgaagaaagtgcatcagaaaatacatagactggg

SEQ ID NO: 61605 - DNA, 1188 bp, Zea Mays
aactgagcaaaagacatctcactctcctcaccccaaattaggatatggcaggtgctaaaatttagcacatccaaacactacatgtgaaaaaatggagtttgatttccactccaccacccccggaagaaaaaaactgtccaatcgaatcaaagagagaaaaaaaatcctaaaccctagcatctcccatggacgacagcgatggcggactgagcttcgatttcgagggcggcctcgactctgccccagcttctgggggcgggggccccgtgccgtcctccaccgaccccggcgcgggtgtcgggggaggcggcgacgggctgggtatgcacgggcgcggccgaggtcgcgggagctaccgccaaacggtgtgccggcactggcttcgcggcctctgcatgaagggcgaggcctgcggattcctgcaccagttcgacaaggcccgcatgcccgtctgccgcttcttccgcgacttcggcgagtgccgcgagcccgactgcgcgtacaagcactcgtacgacgacgtcaaggagtgcaacatgtacaagatgggtttttgtcccaatggtcctaattgccggtataagcatatcaagctccctgggccaccgccttctgttgaggaagttcttcagaagattttgcagatgcgctcttttaacagatacagtcagaatagaaataataattataatcatcaaggggagagacctcaacatccacaaggttctgggttgcctaaccaaaactcggcagaaaatgccactgccgtggatccaccagctggtggacaacaagcacaaacgctgaatcaacaaccaccacagcagcagcagaagccaaatacaaatgatcaggcccaaggtgtttcaaatggtcatcaagccactagaatcgccacaccccttccacaaggaccatctaggtgtacttcattgttaaaagttgcaatcgggagaatctggaaatatcagttcagcaaggaatttgggctacacagaggagtaacgaggctaaactcaatgaagcttttgaatccactgagaatgttattttgatattctcaattaatagaactcgcaatttccagatgacttctaggattggtggctacattggtggtggaaattggaaatctgctcatggaacagcacattttggtcggaacttctctatgcagtggcttaaggt

SEQ ID NO: 61606 - DNA, 1241 bp, Zea Mays
catttagctcataaagtatgctagaatgagctaaaagtgatccaactgagcaaaagacatctcactctcctcaccccaaattaggatatggcaggtgctaaaatttagcacatccaaacactacatgtgaaaaaatggagtttgatttccactccaccacccccggaagaaaaaaactgtccaatcgaatcaaagagagaaaaaaaatcctaaaccctagcatctcccatggacgacagcgatggcggactgagcttcgatttcgagggcggcctcgactctgccccagcttctgggggcgggggccccgtgccgtcctccaccgaccccggcgcgggtgtcgggggaggcggcgacgggctgggtatgcacgggcgcggccgaggtcgcgggagctaccgccaaacggtgtgccggcactggcttcgcggcctctgcatgaagggcgaggcctgcggattcctgcaccagttcgacaaggcccgcatgcccgtctgccgcttcttccgcgacttcggcgagtgccgcgagcccgactgcgcgtacaagcactcgtacgacgacgtcaaggagtgcaacatgtacaagatgggtttttgtcccaatggtcctaattgccggtataagcatatcaagctccctgggccaccgccttctgttgaggaagttcttcagaagattttgcagatgcgctcttttaacagatacagtcagaatagaaataataattataatcatcaaggggagagacctcaacatccacaaggttctgggttgcctaaccaaaactcggcagaaaatgccactgccgtggatccaccagctggtggacaacaagcacaaacgctgaatcaacaaccaccacagcagcagcagaagccaaatacaaatgatcaggcccaaggtgtttcaaatggtcatcaagccactagaatcgccacaccccttccacaaggaccatctaggtacttcattgttaaaagttgcaatcgggagaatctggaaatatcagttcagcaaggaatttgggctacacagaggagtaacgaggctaaactcaatgaagcttttgaatccactgagaatgttattttgatattctcaattaatagaactcgcaatttccaggggtgtgcaaagatgacttctaggattggtggctacattggtggtggaaattggaaatctgctcatggaacagcacattttggtcggaacttctctatgcagtggcttaaggt

SEQ ID NO: 61607 - DNA, 3538 bp, Zea Mays
tgttggtttgcttctcaacaattaggcaatagactgttctaggacagattcaaccatgagccaagaactgccaatttccaacatttttgtttctgttgttaccaacaaagttgagatgcgttgatccgaggtacacaaaggagtcaattgggctgagcttcaagctgctcgagacaaatccagaggcctacacggcatggaactaccggaagcttgcgttgcagcacaatgtcaaggagctttctgacccacaggccatcaagtctgctattgatgatgagctgagagtggctgaggttgctttaaggcagaacccaaagtcctatggggcttggtatcaccggaagtggttgctaaaccaaaagctagcgcctgtggatttcaaatatgagcttggcctcttggataaactgttaaaggtggacgccaggaatttccatggatggaattaccgaaggttccttgcgagattcatgggtttgccagatgatgaggagcttaagtatacgatggataaaatcagtgacaacttcagtaattactcagcatggcataatcgtagtatacttctgtccaacctactaatccagcagagcaaaggttttgagtcaaagcagaagattttttccgaggagtttgaacttgttactcaagctctttttacagatccaagtgaccaaagtggatggttctatcacctctggcttttagctcaaacatctagtccagataacccacagctgattgcttcatggccttctaatgctgcaaagctcagtttctcttttatcaaggaaaaggctgagcagcacacactgtcatccgtctggtcaaggactgtacccattgttctttattttaatgagcctgtcaaaggattaaatcattcaagtgtgaacttaaagtctgatttggagttcggtaaggatatccaatggaggcccctcacaatggcagactctgggtactctaaatgttgggccacatatcttcaaattacaaatgaatgtagcagtttgcaggaatattctgttgaaatgagcataccctgctcggatgacattgtgtctagaagtggctctaactacaactgtcctgtgcattttacattttacattgaactgatcagcaacaacgcagcccagggtttagatacgtttgataagccagttgcctggaattgctcagactcattccagtctcatggaaaccgtgatcctatccctttggatctgctaaacattactagtgccttggtcgaacatgactcagattggcattttgaaaggctgtctgaggagatagatcttttcagagagttagctgatgacaatagcaagtttgggaagttgacattagcccggctattgcttgcttgtgctgctataaaatcccgtggaagatctctaattgaaaggaagggatactgtgaagaggcactggggctcttcactgacttgattcacctggatccatctcataagcagtactatgaggatgaacggagcttagccctgatggataagttaacatgtgacatggagactttcacgaagcattgttctgttcaggttcaaccaaattcagctcccctgcatcatgtgcagtttcgcagattgtctgtaacacgcatcggatttgctgagcgcctgttgtgggttcaaatgctggacctaagccataatagtcttagatcagtcgaaggtttggaggctttgcagcgccttgtgttcttgaacatcagcaacaaccagatcagtagtttcacagcacttgaaccccttacgaagataatctcactgaaagttctggatttgtcgttcaacgagattggagctcactcaattgacacagcacggtatatctgcccgtctccgttctcacacaaaactgaagcaagtgaagcttttgaagagtaccaggaggtaaataatatcaacgtgacggaatactgggacgccatattgttcttcagatctttgaagctggcacagcttgatatcagaggaaatgcagttgccagcaaggacggcttcagaactcttgtcgtgacgctcattccttgtctaaaatggtttgatggtgaaggtgtcagttaatcggtggagttccacttaggagttgggcaatcttggtagtgtcaaggctcactatgtgaactattttttgctagaagccattgatttgcttcatatgcagtgctgtatttgtttatgcgaatctgagacatgatcatgatgttacagagttctgaattttcaggattgaactgtcataggtcatacaagaaagaagatgttatctaattgcaagttgttctactttcagaattctttaataagtttatttattaaaatagaacagagctacactgctaccatttacatttttgttgtgagcgttgctctcttccagaggttatctgacgatgatgttgtaattgaactttgggagttttgaatgcagtttatgtactacagattttctcccgttctcttttcacaaggcctgaagctaaaatcccttgtcagaggctcttgattctagtgtcgcagtcccagacttaactagtccaacaatctgtagtttctatttagatgcattcttctaaacttctgtttttgttgatagctgtagctctggagctaactaaagactatgtaaaataaactctgcatcatagtagaaaatagaaaagcttatgtatgaactctgaagttttctaataaacaatccttcaaaaataggaaacaccaatcatgcctctcagtttcagatagcagagatgagccccagtaacttagtacatgcgtagtgtattccctttgaagcacgattcactcaaaacacaggagcgacatcttctcttcaacggagcaatcgacctggcacgacgaccggcaggcggccgggatcaggatgagccccaggcaccgctgctccgtcggaggcgagcagtggcgggcgctgcggtactctacggcgtcctggaggatgatgttgccctgcttgtcgatgcagtggaacaggccgtggaagtagcggccgtcgttgacgccgatgagcatccgccggaacagcagcttccggagcttcgcgacagacggtgagctgctgcccacgggcgcggtggagctgttgcggtacgtgtctccagaatccgggatggcttgcgacggccctggtgctccttcttccattgtgctaaggatcccctctggtagtggtagatgagcatgggcatgggcatgtaacagggttaaagaaaatttggatatgggttctggtacgcagaattactaggcaagattttatgcctggtacttaaggatctcgatggcaggggtggataattttcgcagaaaatttcgaaactggtaggtaactgggtcagatccgaatacagatagcttagctatggttttgggtgctctgtttcgagaagtaggaagggaggagaaggatcgggcgtaccttctacgcgctcgtcgccggggaagacctggaggagggctgggtgctcgcgttcggggccggg

SEQ ID NO: 61608 - DNA, 4089 bp, Zea Mays
gttgtccgtccctgttgactgctgagctgtagtgatgatctgatcacctttgtaaaactgttgttggtttgcttctcaacaattaggcaatagactgttctaggacagattcaaccatgagccaagaactgccaatttccaacatttttgtttctgttgttaccaacaaagttgagatgcgttgatccgaggtatgcgcatcagatattcatagaaaaattccaatctgcagctgcacccgtcgctcgtgtcagcggctccggtcgaggtaggaggagcgtgttgcaatttgttgcgcgacggcgacggcaaaggatcactgcagctagcgccgggccgatggcagcggcaaccacggagggcggcggcgcgggcgaatctgaaccgagctaatctacacgacagcgcccccggcggcacgaccgcacgagtactaggcagtactagcctagcctagtactcctagtcctagtcctaagattaggtcccaggagatgaaggcacctacttggttggaagggtgaacggccgctccccctccctaagatccaaaccccggcacccgcggcgccggcgacgcagggaggaggcgatgcacggccggccgcggcgcccggccaagcctgaggacgacgaggcggcgtcagcgaaagccgccaagctccgggacctccaggcccaggtcctgcacaatcaccatgcccgcacgtacacaaaggagtcaattgggctgagcttcaagctgctcgagacaaatccagaggcctacacggcatggaactaccggaagcttgcgttgcagcacaatgtcaaggagctttctgacccacaggccatcaagtctgctattgatgatgagctgagagtggctgaggttgctttaaggcagaacccaaagtcctatggggcttggtatcaccggaagtggttgctaaaccaaaagctagcgcctgtggatttcaaatatgagcttggcctcttggataaactgttaaaggtggacgccaggaatttccatggatggaattaccgaaggttccttgcgagattcatgggtttgccagatgatgaggagcttaagtatacgatggataaaatcagtgacaacttcagtaattactcagcatggcataatctatacttctgtccaacctactaatccagcagagcaaaggttttgagtcaaagcagaagattttttccgaggagtttgaacttgttactcaagctctttttacagatccaagtgaccaaagtggatggttctatcacctctggcttttagctcaaacatctagtccagataacccacagctgattgcttcatggccttctaatgctgcaaagctcagtttctcttttatcaaggaaaaggctgagcagcacacactgtcatccgtctggtcaaggactgtacccattgttctttattttaatgagcctgtcaaaggattaaatcattcaagtgtgaacttaaagtctgatttggagttcggtaaggatatccaatggaggcccctcacaatggcagactctgggtactctaaatgttgggccacatatcttcaaattacaaatgaatgtagcagtttgcaggaatattctgttgaaatgagcataccctgctcggatgacattgtgtctagaagtggctctaactacaactgtcctgtgcattttacattttacattgaactgatcagcaacaacgcagcccagggtttagatacgtttgataagccagttgcctggaattgctcagactcattccagtctcatggaaaccgtgatcctatccctttggatctgctaaacattactagtgccttggtcgaacatgactcagattggcattttgaaaggctgtctgaggagatagatcttttcagagagttagctgatgacaatagcccggctattgcttgcttgtgctgctataaaatcccgtggaagatctctaattgaaaggaagggatactgtgaagaggcactggggctcttcactgacttgattcacctggatccatctcataagcagtactatgaggatgaacggagcttagccctgatggataagttaacatgtgacatggagactttcacgaagcattgttctgttcaggttcaaccaaattcagctcccctgcatcatgtgcagtttcgcagattgtctgtaacacgcatcggatttgctgagcgcctgttgtgggttcaaatgctggacctaagccataatagtcttagatcagtcgaaggtttggaggctttgcagcgccttgtgttcttgaacatcagcaacaaccagatcagtagtttcacagcacttgaaccccttacgaagataatctcactgaaagttctggatttgtcgttcaacgagattggagctcactcaattgacacagcacggtatatctgcccgtctccgttctcacacaaaactgaagcaagtgaagcttttgaagagtaccaggaggtaaataatatcaacgtgacggaatactgggacgccatattgttcttcagatctttgaagctggcacagcttgatatcagaggaaatgcagttgccagcaaggacggcttcagaactcttgtcgtgacgctcattccttgtctaaaatggtttgatggtgaaggtgtcagttaatcggtggagttccacttaggagttgggcaatcttggtagtgtcaaggctcactatgtgaactattttttgctagaagccattgatttgcttcatatgcagtgctgtatttgtttatgcgaatctgagacatgatcatgatgttacagagttctgaattttcaggattgaactgtcataggtcatacaagaaagaagatgttatctaattgcaagttgttctactttcagaattctttaataagtttatttattaaaatagaacagagctacactgctaccatttacatttttgttgtgagcgttgctctcttccagaggttatctgacgatgatgttgtaattgaactttgggagttttgaatgcagtttatgtactacagattttctcccgttctcttttcacaaggcctgaagctaaaatcccttgtcagaggctcttgattctagtgtcgcagtcccagacttaactagtccaacaatctgtagtttctatttagatgcattcttctaaacttctgtttttgttgatagctgtagctctggagctaactaaagactatgtaaaataaactctgcatcatagtagaaaatagaaaagcttatgtatgaactctgaagttttctaataaacaatccttcaaaaataggaaacaccaatcatgcctctcagtttcagatagcagagatgagccccagtaacttagtacatgcgtagtgtattccctttgaagcacgattcactcaaaacacaggagcgacatcttctcttcaacggagcaatcgacctggcacgacgaccggcaggcggccgggatcaggatgagccccaggcaccgctgctccgtcggaggcgagcagtggcgggcgctgcggtactctacggcgtcctggaggatgatgttgccctgcttgtcgatgcagtggaacaggccgtggaagtagcggccgtcgttgacgccgatgagcatccgccggaacagcagcttccggagcttcgcgacagacggtgagctgctgcccacgggcgcggtggagctgttgcggtacgtgtctccagaatccgggatggcttgcgacggccctggtgctccttcttccattgtgctaaggatcccctctggtagtggtagatgagcatgggcatgggcatgtaacagggttaaagaaaatttggatatgggttctggtacgcagaattactaggcaagattttatgcctggtacttaaggatctcgatggcaggggtggataattttcgcagaaaatttcgaaactggtaggtaactgggtcagatccgaatacagatagcttagctatggttttgggtgctctgtttcgagaagtaggaagggaggagaaggatcgggcgtaccttctacgcgctcgtcgccggggaagacctggaggagggctgggtgctcgcgttcggggccggg

SEQ ID NO: 61609 - DNA, 3947 bp, Zea Mays
gtaccagacatggttgtccgtccctgttgactgctgagctgtagtgatgatctgatcacctttctgcacccgtcgctcgtgtcagcggctccggtcgaggtaggaggagcgtgttgcaatttgttgcgcgacggcgacggcaaaggatcactgcagctagcgccgggccgatggcagcggcaaccacggagggcggcggcgcgggcgaatctgaaccgagctaatctacacgacagcgcccccggcggcacgaccgcacgagtactaggcagtactagcctagcctagtactcctagtcctagtcctaagattaggtcccaggagatgaaggcacctacttggttggaagggtgaacggccgctccccctccctaagatccaaaccccggcacccgcggcgccggcgacgcagggaggaggcgatgcacggccggccgcggcgcccggccaagcctgaggacgacgaggcggcgtcagcgaaagccgccaagctccgggacctccaggcccaggtcctgcacaatcaccatgcccgcacgtacacaaaggagtcaattgggctgagcttcaagctgctcgagacaaatccagaggcctacacggcatggaactaccggaagcttgcgttgcagcacaatgtcaaggagctttctgacccacaggccatcaagtctgctattgatgatgagctgagagtggctgaggttgctttaaggcagaacccaaagtcctatggggcttggtatcaccggaagtggttgctaaaccaaaagctagcgcctgtggatttcaaatatgagcttggcctcttggataaactgttaaaggtggacgccaggaatttccatggatggaattaccgaaggttccttgcgagattcatgggtttgccagatgatgaggagcttaagtatacgatggataaaatcagtgacaacttcagtaattactcagcatggcataatcgtagtatacttctgtccaacctactaatccagcagagcaaaggttttgagtcaaagcagaagattttttccgaggagtttgaacttgttactcaagctctttttacagatccaagtgaccaaagtggatggttctatcacctctggcttttagctcaaacatctagtccagataacccacagctgattgcttcatggccttctaatgctgcaaagctcagtttctcttttatcaaggaaaaggctgagcagcacacactgtcatccgtctggtcaaggactgtacccattgttctttattttaatgagcctgtcaaaggattaaatcattcaagtgtgaacttaaagtctgatttggagttcggtaaggatatccaatggaggcccctcacaatggcagactctgggtactctaaatgttgggccacatatcttcaaattacaaatgaatgtagcagtttgcaggaatattctgttgaaatgagcataccctgctcggatgacattgtgtctagaagtggctctaactacaactgtcctgtgcattttacattttacattgaactgatcagcaacaacgcagcccagggtttagatacgtttgataagccagttgcctggaattgctcagactcattccagtctcatggaaaccgtgatcctatccctttggatctgctaaacattactagtgccttggtcgaacatgactcagattggcattttgaaaggctgtctgaggagatagatcttttcagagagttagctgatgacaatagcaagtttgggaagttgacattagcccggctattgcttgcttgtgctgctataaaatcccgtggaagatctctaattgaaaggaagggatactgtgaagaggcactggggctcttcactgacttgattcacctggatccatctcataagcagtactatgaggatgaacggagcttagccctgatggataagttaacatgtgacatggagactttcacgaagcattgttctgttcaggttcaaccaaattcagctcccctgcatcatgtgcagtttcgcagattgtctgtaacacgcatcggatttgctgagcgcctgttgtgggttcaaatgctggacctaagccataatagtcttagatcagtcgaaggtttggaggctttgcagcgccttgtgttcttgaacatcagcaacaaccagatcagtagtttcacagcacttgaaccccttacgaagataatctcactgaaagttctggatttgtcgttcaacgagattggagctcactcaattgacacagcacggtatatctgcccgtctccgttctcacacaaaactgaagcaagtgaagcttttgaagagtaccaggaggtaaataatatcaacgtgacggaatactgggacgccatattgttcttcagatctttgaagctggcacagcttgatatcagaggaaatgcagttgccagcaaggacggcttcagaactcttgtcgtgacgctcattccttgtctaaaatggtttgatggtgaaggtgtcagttaatcggtggagttccacttaggagttgggcaatcttggtagtgtcaaggctcactatgtgaactattttttgctagaagccattgatttgcttcatatgcagtgctgtatttgtttatgcgaatctgagacatgatcatgatgttacagagttctgaattttcaggattgaactgtcataggtcatacaagaaagaagatgttatctaattgcaagttgttctactttcagaattctttaataagtttatttattaaaatagaacagagctacactgctaccatttacatttttgttgtgagcgttgctctcttccagaggttatctgacgatgatgttgtaattgaactttgggagttttgaatgcagtttatgtactacagattttctcccgttctcttttcacaaggcctgaagctaaaatcccttgtcagaggctcttgattctagtgtcgcagtcccagacttaactagtccaacaatctgtagtttctatttagatgcattcttctaaacttctgtttttgttgatagctgtagctctggagctaactaaagactatgtaaaataaactctgcatcatagtagaaaatagaaaagcttatgtatgaactctgaagttttctaataaacaatccttcaaaaataggaaacaccaatcatgcctctcagtttcagatagcagagatgagccccagtaacttagtacatgcgtagtgtattccctttgaagcacgattcactcaaaacacaggagcgacatcttctcttcaacggagcaatcgacctggcacgacgaccggcaggcggccgggatcaggatgagccccaggcaccgctgctccgtcggaggcgagcagtggcgggcgctgcggtactctacggcgtcctggaggatgatgttgccctgcttgtcgatgcagtggaacaggccgtggaagtagcggccgtcgttgacgccgatgagcatccgccggaacagcagcttccggagcttcgcgacagacggtgagctgctgcccacgggcgcggtggagctgttgcggtacgtgtctccagaatccgggatggcttgcgacggccctggtgctccttcttccattgtgctaaggatcccctctggtagtggtagatgagcatgggcatgggcatgtaacagggttaaagaaaatttggatatgggttctggtacgcagaattactaggcaagattttatgcctggtacttaaggatctcgatggcaggggtggataattttcgcagaaaatttcgaaactggtaggtaactgggtcagatccgaatacagatagcttagctatggttttgggtgctctgtttcgagaagtaggaagggaggagaaggatcgggcgtaccttctacgcgctcgtcgccggggaagacctggaggagggctgggtgctcgcgttcggggccggg

SEQ ID NO: 61610 - DNA, 4016 bp, Zea Mays
attagagcttggtccttgttttgttttcgccttgttactgttgcaatagagcggtctcttctatgttctatcataaaaaaaaggagatggtagtaggtagaagatataattatatagtaccacgcaagctgaaacacgtgatgcctttaattaaactggtcaattctactacctatttggctcatatactgaaaactactaatatatacataacttattcggtacgctgtcgtaatcatcaagccatctactaccagctgttctcaactcctcaaaaaatgtatatatactagaaaaaggccatcgagctattttttctattcaatagcaacaaacaaaaagaaacaaatcattaaagcgattacaagcacgcatggtgcccgcctgcacaacgcgtaaaacggcatgtactactgtaacgaacaaaatccagtaaatgtcacatatataaaacgagactggattgcgttgttacagctagatttcagctaccctggctatcagattaacctaaacctgtctagcccaggccacgtaatcaaacatgccccgcgtgtcagtgtcacaggatgctcgttcccggtgaatctagcagacgtgccgatgaacaccgtttcgtcgttttcaggacatccacactgtctcctctgccagcatgacaaaaataagcgcagtcttataatctgatgatcatttagagtcattaaggcgcttgtagctcagtggatagagcgtctgtttcctaagcagaaggccgtaggttcgacccctacctggcgcgtctacagtagtgactttcatcgaagcctttcagatgtttacactctaattttttaattgacatttaatactgtttcagttccaaatttttaatgatgtcttaatactgtttcagtgacttcaatgaatccttaatttttttgtttattccaacgctattcctctgcctgccgtgttttttttttgccattttttttactgccaacacattccaacgggtttcccatttttttatcgacatttaccgattcaggacttcaatatgtgtccgcatcttggcacctgagcttgttgggagcaaagcatgtttgggagcaagagtatggaaaatgattgaggctgatttggtgggaggggattttgagagtgtaaggcccaaaatatgtataaaaattaattaacaacaataaaataaatatatgaagaaataaaatagtaaattcagatatcttaaattatatatttgagtattgaaaattgaggattggattttgaaaaccaagaattattgtagaaaagaagtaatagattagatttctattcaactaaatgattatgtataacaatagatgatgtaccataagcatttatttacatgaatatttaattctaaagtaacttttactttttatcccaccttcagaatatcattttcctaaggaggaagaaaacaatatgagtgttttgcatatttcaaacatctactaaacaaataaatcagctaaaataaatatatatctattacttcacaattgattttgagtatgtgttaaaaatttgaattcctaaattttatcttggatttgaattttaattttgtaaatcaaaaggggatagaaaatagaggatgagaaggaaattctagaatttagaaaaaagaagaaaataaatattatgtagataaaaataagtaaataaaaatatattattcctacactagagtttgaatttgtataattgactcaaaggtgaaattcatattcaaatctaaaattggattcaaaataattatgaataaagaaaaacagaaaatagaagaaaaagaaaaggagaaatactctgatgggctgagttccctctattcagcccactaaggaattacttctgcgcggcctagacttcatttccacgcgtgccgacaggtggaccctcctgtcagccgctcttaacccgcgcgcacatgaaaccgcctcgggctggcatgtgggcccatgtcctcacccgcgcagccccacgctctttcgcatcacgcactgacagactggccctgcttgtagcctcccctcccgggtgttgacactggtgtgcgggccggggtgtcagattcttcctctccctctgtaacggacgcctggatctcccccgtaagactcagatcgcgcggttacgaccggaccgagcgtgatctcagggcatgctcacctgctcggactcagtccagggtttaaagccgtgcccctctgagccatccaaagggagatccgtcgagccaccattagcgcagtgaggaaaaaattccagtccgccgccatcgccaggccgagagagggccgccacccatgaatctactgctcgtcgtcgctaacgtcatgggcgttcacgaggatcgtctctggtgctcgaggaatctcaccggcagtcggaccgggtgcggggcattaaagcgattacttgttcgggtgtaagaccaaggagatgtttgagacaatagttagttgttaaaattagttataaacattcaaacatgctagataataatttatttattagttacttttaacaaattatctaagttatatagctatttattagttagctaatttcacaaacaaatttgttagctaactactattagctctagtgcatcggaacatctatacgctatttttattccggaactgcatagacgtcacggcatcacgcgctaagcagcgctaatccggaccacgaagtagctagctgaggattggataagcaacccacggcatggaagcacgcgctagtagtactaggatttgtaatcaatccagaaagaaagaaatagcatacttgcctcgcggtgaggctgagcctgcgaacgtcgggcccgagctctgccttctggccggcgccggtgagctccagccgcgccgacagttggccccccgtccctgacaccgacacgacgtggtacccggcctgggcggccgcacggggccacggggcagcagcgaagagaagaacgacggcgacgacgacgacgacgacgaagcgcgcggtttgccgcggcggcggtgaccacggccacgccatggcgtgcgagcgctaggtgggggctagggcaagaacaaaatagattatgcagggtgctgcagctgcacaggagcttctaatcaaatggggagtgggattgtgggtcgactggcctggccacttgcgtctggcgccctctccagagtccagacctccaagtccagtccagccgcggggtgtggagggcaggaggagtattgtattattaccgcttattggattatattgtgcagagtaggccaattattggattattaatttattatacatattgtgcggttcttgcccgtgatcgcgtcttcgtcttcgctagagctttctataccaaacaccgataccaattattcctcttgttaattagctgttgttttcatggaaagagtccccggcccaccaccacgcgccacacaaggtcacaaacatgggcggcgccggcgttctgccgacgatatataaaccgctcagctagcgcagctattctctcccgtgaaatctatcggaaggaatcgacgacgttgcaactgcgactccccggaaccatgtcaagtctccatcgctctcagtctcagaacgtacgtctccacggttctcctgccccagatatatagtgacactgaacagtgaacactgatgtactgggggtgtttggtttctatggactaatgtttagtccctatattttattttattatagtttcaaaattgccaaatatagaaactaaaactttattttagtttctatatttagtaatttatacactaaaaaggaataaaataaaaggactaaacattagtccatagaaaccaaacaccccctcatgtctacttcttggtaacggtaacatactaacaaccatatacacatctatcgatgttccttcgttgtaatatatcgcacctagcatacacgtcgaggttccggacgtcgtcgtcgccggcggcgg

SEQ ID NO: 61611 - DNA, 3322 bp, Zea Mays
tctcttcgcttctcctgcctgcggttgtgcggcctgcctccggtaaggagtcagccaagaacgcgatgcgaccggccttctccgcctccaagccgtcgccgtccgggagggagaagggcaggaggaagggcgcctccgcggccgaacagctgctcaccggccaggccgtccccctccgcacccgcctccacgacgctctcgccctcggcctcaccaagtctgatggccacggtgctaaaaaatggcagtctactgatgctggagtacagtctcacgtgctcaaatcggtgggtgcatttgtcggttgtctttcaaatgaactgctcagacttcctcctataaaggagtcaatttcagatatacttgtagcactggaaggtattcttaagacagagaacgtttcagttctgatccaagcagctgacgtgagctcgaagtttttctctactttaggaaattctgttcgccaatactcagttttggagatggtttcgtgcctctcatgccatttgtctgcaaatcagctacgtattgctttaccatgtgcaagtgcattgacttgtatattgaacaaccaagttacagcgagagcttcgactcaggcagaaatttgggaggctctggacaagaccaatgcagttgcgagtgttatttcaactctacagaattacaccgaagatgtccatccactgaactatctgacagagatgatatctctgctaagaagtatactgtggatttggccttcctcgagataccatgtatggagcaatcacaacttgatggccaaactagcacattactgtcttactgctgaaacaacagtttcagctaaaattcttaagctatatgctgctttaggtacatctgtgcctgtgctttatgtggcaatggagcaatggtccttcttaagaatgaagagctgatcattaagactggtaaccttatgggaaaatctcatcctactgttactaggattgaagcattgaggctctgccaggtttttctgagatcttcaaggggctgcaattggttgatgactgcacatggtcagcctattgttcaaggcataaccaatgccatgtctgaaataaatgagaagacattagtaagagagggatgtcggactgcattactggcgcttcgttattctgggaatcatcatagatgcttctggtttaatgctattgataaaatactttataagattctttgtgggagctgcaactcttcatctcatgcacatcagactttgtgccatggggagctgttcaatatagattccaaagatattatggatatacatccctatgtatgggatatactcggatatctagcagtacattgcgacaatgagcatttttcggtagggacatgtcagaataatttcttgcagggactgatatcatgtgcttgctcgctagcaacagatttaactctgaaaaaaagtcccctcaaattgtctaaggaggagcaggaaccggctttgagggcagttcttatgatgcttctctctcctagccaattcattttctctgagttagatgcggggattgtgtgccatgaatgcagagatcattacaacgaaggtttggttggagtccttaaacaagccttgtgtcagaacatgagcccagggcccaagtcttatattgcacatatactgagtatgtttggcctctgtggttttccaagcaagctaggaggaaatatgagaaatgttttgtgtgacagtgagttagttgatctggaactgttgcttgcagatggcgaatctctaagtgctcatgcggctatcctatcagcaagatgtcctaaattattaccatctgaaaaaacttttgtccgtgatgggtcagtaacttatgaatggggcagaaggtcatgctatcatgttcgaatgtctgatcgtgtagatagtcacgctctgaagaaaattttggagtatgcatacactgggttggtcactgtagatgatgccactgttaagcctgtaaaaacacttgcaaagtattgccatttgagatcgctgcacttgatgcttcagaaagagcaacctagatggcactcatgtcccatatatgatcttactacagcactcgaaccagctaaacattcgttctcgtgagtacacttccatttgttctcacttgtgagccaaaagttatggcgtgctgactagtatttattttgggtctgaacatatgataccaggcatctgttgctaaaacctctagttattcacatcacaagtataatattagttatttgcattctaaatttctgatgctgctctgaagggttcttgaagaactattagatagagcccaagaagagatcacacctggcccttctatactcatgtgttataattataatccgtatgctcagtattatctttgctttttaacaagttttgctgactctcgttgtacgtcgttgcatttaatttccagggacatcattttggaggcccaatcaaatgacaaaatggagtgtcaccatggttcgtgccagttatcgactcctcatattcatagccataaggtcattctgagcgtgagctgcgaatacctccgtgctttgttccagtctgggatgcatgagagctttgcggagactatcagagttccggtcggatgggaagcactgagaaaactagttcagtggttctactcaggcgagctgcctagagttccacctgactgccgatggaaggctacgagtacagaagagaagctatctatcctgaaatcgtacgcggagctgtcgtccctggcggacttctggttcgtggacgggatgaaggaagagagccttcaagtgttgacctcgtgcctgaattcctccagcacggacgcctccctcgccttcatcggcttcgcggcgaacttgggccagtgggagctggtggaggccgccatcagcagcgtggcgcatctgtaccccaggctgcgagactccggtcggttggagcagctcgatgaggacgtgctcaacatgctgcggacagagcatgtcaggtatttgcagcaccgcagtgcaagtaaatgaatccttaatgtcatggagggttttttttccccgtccactggtggtcgcatagcggtcctgttgtcatgttgtggtggtgtatgcacagctgttgcgttaaaaaaaaactgtacagccacttccgttgaagcttatggcgtcatgaacggggctcatctccgttgaaacaggaccgtgatggttaaaaccgttaatgatacttgcgttagtaccggtgctagtttcttgcctaagagggatcgtgcatgtgtgttagaaaaattataag

SEQ ID NO: 61612 - DNA, 2403 bp, Zea Mays
tctcttcgcttctcctgcctgcggttgtgcggcctgcctccggtaaggagtcagccaagaacgcgatgcgaccggccttctccgcctccaagccgtcgccgtccgggagggagaagggcaggaggaagggcgcctccgcggccgaacagctgctcaccggccaggccgtccccctccgcacccgcctccacgacgctctcgccctcggcctcaccaagtctgatggccacggtgctaaaaaatggcagtctactgatgctggagtacagtctcacgtgctcaaatcggtgggtgcatttgtcggttgtctttcaaatgaactgctcagacttcctcctataaaggagtcaatttcagatatacttgtagcactggaaggtattcttaagacagagaacgtttcagttctgatccaagcagctgacgtgagctcgaagtttttctctactttaggaaattctgttcgccaatactcagttttggagatggtttcgtgcctctcatgccatttgtctgcaaatcagctacgtattgctttaccatgtgcaagtgcattgacttgtatattgaacaaccaagttacagcgagagcttcgactcaggcagaaatttgggaggctctggacaagaccaatgcagttgcgagtgttatttcaactctacagaattacaccgaagatgtccatccactgaactatctgacagagatgatatctctgctaagaagtatactgtggatttggccttcctcgagataccatgtatggagcaatcacaacttgatggccaaactagcacattactgtcttactgctgaaacaacagtttcagctaaaattcttaagctatatgctgctttagctttatgtggcaatggagcaatggtccttcttaagaatgaagagctgatcattaagactggtaaccttatgggaaaatctcatcctactgttactaggattgaagcattgaggctctgccaggtttttctgagatcttcaaggggctgcaattggttgatgactgcacatggtcagcctattgttcaaggcataaccaatgccatgtctgaaataaatgagaagacattagtaagagagggatgtcggactgcattactggcgcttcgttattctgggaatcatcatagatgcttctggtttaatgctattgataaaatactttataagattctttgtgggagctgcaactcttcatctcatgcacatcagactttgtgccatggggagctgttcaatatagattccaaagatattatggatatacatccctatgtatgggatatactcggatatctagcagtacattgcgacaatgagcatttttcggtagggacatgtcagaataatttcttgcagggactgatatcatgtgcttgctcgctagcaacagatttaactctgaaaaaaagtcccctcaaattgtctaaggaggagcaggaaccggctttgagggcagttcttatgatgcttctctctcctagccaattcattttctctgagggacatcattttggaggcccaatcaaatgacaaaatggagtgtcaccatggttcgtgccagttatcgactcctcatattcatagccataaggtcattctgagcgtgagctgcgaatacctccgtgctttgttccagtctgggatgcatgagagagccatgtgtgcagctttgcggagactatcagagttccggtcggatgggaagcactgagaaaactagttcagtggttctactcaggcgagctgcctagagttccacctgactgccgatggaaggctacgagtacagaagagaagctatctatcctgaaatcgtacgcggagctgtcgtccctggcggacttctggttcgtggacgggatgaaggaagagagccttcaagtgttgacctcgtgcctgaattcctccagcacggacgcctccctcgccttcatcggcttcgcggcgaacttgggccagtgggagctggtggaggccgccatcagcagcgtggcgcatctgtaccccaggctgcgagactccggtcggttggagcagctcgatgaggacgtgctcaacatgctgcggacagagcatgtcaggtatttgcagcaccgcagtgcaagtaaatgaatccttaatgtcatggagggttttttttccccgtccactggtggtcgcatagcggtcctgttgtcatgttgtggtggtgtatgcacagctgttgcgttaaaaaaaaactgtacagccacttccgttgaagcttatggcgtcatgaacggggctcatctccgttgaaacaggaccgtgatggttaaaaccgttaatgatacttgcgttagtaccggtgctagtttcttgcctaagagggatcgtgcatgtgtgttagaaaaattataag

SEQ ID NO: 61613 - DNA, 2975 bp, Zea Mays
tctcttcgcttctcctgcctgcggttgtgcggcctgcctccggtaaggagtcagccaagaacgcgatgcgaccggccttctccgcctccaagccgtcgccgtccgggagggagaagggcaggaggaagggcgcctccgcggccgaacagctgctcaccggccaggccgtccccctccgcacccgcctccacgacgctctcgccctcggcctcaccaagtctgatggccacggtgctaaaaaatggcagtctactgatgctggagtacagtctcacgtgctcaaatcggtgggtgcatttgtcggttgtctttcaaatgaactgctcagacttcctcctataaaggagtcaatttcagatatacttgtagcactggaaggtattcttaagacagagaacgtttcagttctgatccaagcagctgacgtgagctcgaagtttttctctactttaggaaattctgttcgccaatactcagttttggagatggtttcgtgcctctcatgccatttgtctgcaaatcagctacgtattgctttaccatgtgcaagtgcattgacttgtatattgaacaaccaagttacagcgagagcttcgactcaggcagaaatttgggaggctctggacaagaccaatgcagttgcgagtgttatttcaactctacagaattacaccgaagatgtccatccactgaactatctgacagagatgatatctctgctaagaagtatactgtggatttggccttcctcgagataccatgtatggagcaatcacaacttgatggccaaactagcacattactgtcttactgctgaaacaacagtttcagctaaaattcttaagctatatgctgctttaggtacatctgtgcctgtgctttatgtggcaatggagcaatggtccttcttaagaatgaagagctgatcattaagactggtaaccttatgggaaaatctcatcctactgttactaggattgaagcattgaggctctgccaggtttttctgagatcttcaaggggctgcaattggttgatgactgcacatggtcagcctattgttcaaggcataaccaatgccatgtctgaaataaatgagaagacattagtaagagagggatgtcggactgcattactggcgcttcgttattctgggaatcatcatagatgcttctggtttaatgctattgataaaatactttataagattctttgtgggagctgcaactcttcatctcatgcacatcagactttgtgccatggggagctgttcaatatagattccaaagatattatggatatacatccctatgtatgggatatactcggatatctagcagtacattgcgacaatgagcatttttcggtagggacatgtcagaataatttcttgcagggactgatatcatgtgcttgctcgctagcaacagatttaactctgaaaaaaagtcccctcaaattgtctaaggaggagcaggaaccggctttgagggcagttcttatgatgcttctctctcctagccaattcattttctctgagagatcattacaacgaaggtttggttggagtccttaaacaagccttgtgtcagaacatgagcccagggcccaagtcttatattgcacatatactgaatggcgaatctctaagtgctcatgcggctatcctatcagcaagatgtcctaaattattaccatctgaaaaaacttttgtccgtgatgggtcagtaacttatgaatggggcagaaggtcatgctatcatgttcgaatgtctgatcgtgtagatagtcacgctctgaagaaaattttggagtatgcatacactgggttggtcactgtagatgatgccactgttaagcctgtaaaaacacttgcaaagtattgccatttgagatcgctgcacttgatgcttcagaaagagcaacctagatggcactcatgtcccatatatgatcttactacagcactcgaaccagctaaacattcgttctcggacatcattttggaggcccaatcaaatgacaaaatggagtgtcaccatggttcgtgccagttatcgactcctcatattcatagccataaggtcattctgagcgtgagctgcgaatacctccgtgctttgttccagtctgggatgcatgagaggtacgccttctgtttcctggcatctgaagcagggtgtcgcacgcattatctttgttgcttatctataaggacacgtcgtgaatgtttaaaacaaccgataagagccatgtgtgcagctttgcggagactatcagagttccggtcggatgggaagcactgagaaaactagttcagtggttctactcaggcgagctgcctagagttccacctgactgccgatggaaggctacgagtacagaagagaagctatctatcctgaaatcgtacgcggagctgtcgtccctggcggacttctggttcgtggacgggatgaaggaagagagccttcaagtgttgacctcgtgcctgaattcctccagcacggacgcctccctcgccttcatcggcttcgcggcgaacttgggccagtgggagctggtggaggccgccatcagcagcgtggcgcatctgtaccccaggctgcgagactccggtcggttggagcagctcgatgaggacgtgctcaacatgctgcggacagagcatgtcaggtatttgcagcaccgcagtgcaagtaaatgaatccttaatgtcatggagggttttttttccccgtccactggtggtcgcatagcggtcctgttgtcatgttgtggtggtgtatgcacagctgttgcgttaaaaaaaaactgtacagccacttccgttgaagcttatggcgtcatgaacggggctcatctccgttgaaacaggaccgtgatggttaaaaccgttaatgatacttgcgttagtaccggtgctagtttcttgcctaagagggatcgtgcatgtgtgttagaaaaattataag

SEQ ID NO: 61614 - DNA, 2863 bp, Zea Mays
tctcttcgcttctcctgcctgcggttgtgcggcctgcctccggtaaggagtcagccaagaacgcgatgcgaccggccttctccgcctccaagccgtcgccgtccgggagggagaagggcaggaggaagggcgcctccgcggccgaacagctgctcaccggccaggccgtccccctccgcacccgcctccacgacgctctcgccctcggcctcaccaagtctgatggccacggtgctaaaaaatggcagtctactgatgctggagtacagtctcacgtgctcaaatcggtgggtgcatttgtcggttgtctttcaaatgaactgctcagacttcctcctataaaggagtcaatttcagatatacttgtagcactggaaggtattcttaagacagagaacgtttcagttctgatccaagcagctgacgtgagctcgaagtttttctctactttaggaaattctgttcgccaatactcagttttggagatggtttcgtgcctctcatgccatttgtctgcaaatcagctacgtattgctttaccatgtgcaagtgcattgacttgtatattgaacaaccaagttacagcgagagcttcgactcaggcagaaatttgggaggctctggacaagaccaatgcagttgcgagtgttatttcaactctacagaattacaccgaagatgtccatccactgaactatctgacagagatgatatctctgctaagaagtatactgtggatttggccttcctcgagataccatgtatggagcaatcacaacttgatggccaaactagcacattactgtcttactgctgaaacaacagtttcagctaaaattcttaagctatatgctgctttagctttatgtggcaatggagcaatggtccttcttaagaatgaagagctgatcattaagactggtaaccttatgggaaaatctcatcctactgttactaggattgaagcattgaggctctgccaggtttttctgagatcttcaaggggctgcaattggttgatgactgcacatggtcagcctattgttcaaggcataaccaatgccatgtctgaaataaatgagaagacattagtaagagagggatgtcggactgcattactggcgcttcgttattctgggaatcatcatagatgcttctggtttaatgctattgataaaatactttataagattctttgtgggagctgcaactcttcatctcatgcacatcagactttgtgccatggggagctgttcaatatagattccaaagatattatggatatacatccctatgtatgggatatactcggatatctagcagtacattgcgacaatgagcatttttcggtagggacatgtcagaataatttcttgcagggactgatatcatgtgcttgctcgctagcaacagatttaactctgaaaaaaagtcccctcaaattgtctaaggaggagcaggaaccggctttgagggcagttcttatgatgcttctctctcctagccaattcattttctctgagatggcgaatctctaagtgctcatgcggctatcctatcagcaagatgtcctaaattattaccatctgaaaaaacttttgtccgtgatgggtcagtaacttatgaatggggcagaaggtcatgctatcatgttcgaatgtctgatcgtgtagatagtcacgctctgaagaaaattttggagtatgcatacactgggttggtcactgtagatgatgccactgttaagcctgtaaaaacacttgcaaagtattgccatttgagatcgctgcacttgatgcttcagaaagagcaacctagatggcactcatgtcccatatatgatcttactacagcactcgaaccagctaaacattcgttctcggacatcattttggaggcccaatcaaatgacaaaatggagtgtcaccatggttcgtgccagttatcgactcctcatattcatagccataaggtcattctgagcgtgagctgcgaatacctccgtgctttgttccagtctgggatgcatgagaggtacgccttctgtttcctggcatctgaagcagggtgtcgcacgcattatctttgttgcttatctataaggacacgtcgtgaatgtttaaaacaaccgataagagccatgtgtgcagctttgcggagactatcagagttccggtcggatgggaagcactgagaaaactagttcagtggttctactcaggcgagctgcctagagttccacctgactgccgatggaaggctacgagtacagaagagaagctatctatcctgaaatcgtacgcggagctgtcgtccctggcggacttctggttcgtggacgggatgaaggaagagagccttcaagtgttgacctcgtgcctgaattcctccagcacggacgcctccctcgccttcatcggcttcgcggcgaacttgggccagtgggagctggtggaggccgccatcagcagcgtggcgcatctgtaccccaggctgcgagactccggtcggttggagcagctcgatgaggacgtgctcaacatgctgcggacagagcatgtcaggtatttgcagcaccgcagtgcaagtaaatgaatccttaatgtcatggagggttttttttccccgtccactggtggtcgcatagcggtcctgttgtcatgttgtggtggtgtatgcacagctgttgcgttaaaaaaaaactgtacagccacttccgttgaagcttatggcgtcatgaacggggctcatctccgttgaaacaggaccgtgatggttaaaaccgttaatgatacttgcgttagtaccggtgctagtttcttgcctaagagggatcgtgcatgtgtgttagaaaaattataag

SEQ ID NO: 61615 - DNA, 3425 bp, Zea Mays
tctcttcgcttctcctgcctgcggttgtgcggcctgcctccggtaaggagtcagccaagaacgcgatgcgaccggccttctccgcctccaagccgtcgccgtccgggagggagaagggcaggaggaagggcgcctccgcggccgaacagctgctcaccggccaggccgtccccctccgcacccgcctccacgacgctctcgccctcggcctcaccaagtctgatggccacggtgctaaaaaatggcagtctactgatgctggagtacagtctcacgtgctcaaatcggtgggtgcatttgtcggttgtctttcaaatgaactgctcagacttcctcctataaaggagtcaatttcagatatacttgtagcactggaaggtattcttaagacagagaacgtttcagttctgatccaagcagctgacgtgagctcgaagtttttctctactttaggaaattctgttcgccaatactcagttttggagatggtttcgtgcctctcatgccatttgtctgcaaatcagctacgtattgctttaccatgtgcaagtgcattgacttgtatattgaacaaccaagttacagcgagagcttcgactcaggcagaaatttgggaggctctggacaagaccaatgcagttgcgagtgttatttcaactctacagaattacaccgaagatgtccatccactgaactatctgacagagatgatatctctgctaagaagtatactgtggatttggccttcctcgagataccatgtatggagcaatcacaacttgatggccaaactagcacattactgtcttactgctgaaacaacagtttcagctaaaattcttaagctatatgctgctttagctttatgtggcaatggagcaatggtccttcttaagaatgaagagctgatcattaagactggtaaccttatgggaaaatctcatcctactgttactaggattgaagcattgaggctctgccaggtttttctgagatcttcaaggggctgcaattggttgatgactgcacatggtcagcctattgttcaaggcataaccaatgccatgtctgaaataaatgagaagacattagtaagagagggatgtcggactgcattactggcgcttcgttattctgggaatcatcatagatgcttctggtttaatgctattgataaaatactttataagattctttgtgggagctgcaactcttcatctcatgcacatcagactttgtgccatggggagctgttcaatatagattccaaagatattatggatatacatccctatgtatgggatatactcggatatctagcagtacattgcgacaatgagcatttttcggtagggacatgtcagaataatttcttgcagggactgatatcatgtgcttgctcgctagcaacagatttaactctgaaaaaaagtcccctcaaattgtctaaggaggagcaggaaccggctttgagggcagttcttatgatgcttctctctcctagccaattcattttctctgagaaagttagatgcggggattgtgtgccatgaatgcagagatcattacaacgaaggtttggttggagtccttaaacaagccttgtgtcagaacatgagcccagggcccaagtcttatattgcacatatactgagtatgtttggcctctgtggttttccaagcaagctaggaggaaatatgagaaatgttttgtgtgacagtgagttagttgatctggaactgttgcttgcagatggcgaatctctaagtgctcatgcggctatcctatcagcaagatgtcctaaattattaccatctgaaaaaacttttgtccgtgatgggtcagtaacttatgaatggggcagaaggtcatgctatcatgttcgaatgtctgatcgtgtagatagtcacgctctgaagaaaattttggagtatgcatacactgggttggtcactgtagatgatgccactgttaagcctgtaaaaacacttgcaaagtattgccatttgagatcgctgcacttgatgcttcagaaagagcaacctagatggcactcatgtcccatatatgatcttactacagcactcgaaccagctaaacattcgttctcgtgagtacacttccatttgttctcacttgtgagccaaaagttatggcgtgctgactagtatttattttgggtctgaacatatgataccaggcatctgttgctaaaacctctagttattcacatcacaagtataatattagttatttgcattctaaatttctgatgctgctctgaagggttcttgaagaactattagatagagcccaagaagagatcacacctggcccttctatactcatgtgttataattataatccgtatgctcagtattatctttgctttttaacaagttttgctgactctcgttgtacgtcgttgcatttaatttccagggacatcattttggaggcccaatcaaatgacaaaatggagtgtcaccatggttcgtgccagttatcgactcctcatattcatagccataaggtcattctgagcgtgagctgcgaatacctccgtgctttgttccagtctgggatgcatgagaggtacgccttctgtttcctggcatctgaagcagggtgtcgcacgcattatctttgttgcttatctataaggacacgtcgtgaatgtttaaaacaaccgataagagccatgtgtgcagctttgcggagactatcagagttccggtcggatgggaagcactgagaaaactagttcagtggttctactcaggcgagctgcctagagttccacctgactgccgatggaaggctacgagtacagaagagaagctatctatcctgaaatcgtacgcggagctgtcgtccctggcggacttctggttcgtggacgggatgaaggaagagagccttcaagtgttgacctcgtgcctgaattcctccagcacggacgcctccctcgccttcatcggcttcgcggcgaacttgggccagtgggagctggtggaggccgccatcagcagcgtggcgcatctgtaccccaggctgcgagactccggtcggttggagcagctcgatgaggacgtgctcaacatgctgcggacagagcatgtcaggtatttgcagcaccgcagtgcaagtaaatgaatccttaatgtcatggagggttttttttccccgtccactggtggtcgcatagcggtcctgttgtcatgttgtggtggtgtatgcacagctgttgcgttaaaaaaaaactgtacagccacttccgttgaagcttatggcgtcatgaacggggctcatctccgttgaaacaggaccgtgatggttaaaaccgttaatgatacttgcgttagtaccggtgctagtttcttgcctaagagggatcgtgcatgtgtgttagaaaaattataag

SEQ ID NO: 61616 - DNA, 3623 bp, Zea Mays
tctcttcgcttctcctgcctgcggttgtgcggcctgcctccggtaaggagtcagccaagaacgcgatgcgaccggccttctccgcctccaagccgtcgccgtccgggagggagaagggcaggaggaagggcgcctccgcggccgaacagctgctcaccggccaggccgtccccctccgcacccgcctccacgacgctctcgccctcggcctcaccaagtctgatggccacggtgctaaaaaatggcagtctactgatgctggagtacagtctcacgtgctcaaatcggtgggtgcatttgtcggttgtctttcaaatgaactgctcagacttcctcctataaaggagtcaatttcagatatacttgtagcactggaaggtattcttaagacagagaacgtttcagttctgatccaagcagctgacgtgagctcgaagtttttctctactttaggaaattctgttcgccaatactcagttttggagatggtttcgtgcctctcatgccatttgtctgcaaatcagctacgtattgctttaccatgtgcaagtgcattgacttgtatattgaacaaccaagttacagcgagagcttcgactcaggcagaaatttgggaggctctggacaagaccaatgcagttgcgagtgttatttcaactctacagaattacaccgaagatgtccatccactgaactatctgacagagatgatatctctgctaagaagtatactgtggatttggccttcctcgagataccatgtatggagcaatcacaacttgatggccaaactagcacattactgtcttactgctgaaacaacagtttcagctaaaattcttaagctatatgctgctttagctttatgtggcaatggagcaatggtccttcttaagaatgaagagctgatcattaagactggtaaccttatgggaaaatctcatcctactgttactaggattgaagcattgaggctctgccaggtttttctgagatcttcaaggggctgcaattggttgatgactgcacatggtcagcctattgttcaaggcataaccaatgccatgtctgaaataaatgagaagacattagtaagagagggatgtcggactgcattactggcgcttcgttattctgggaatcatcatagatgcttctggtttaatgctattgataaaatactttataagattctttgtgggagctgcaactcttcatctcatgcacatcagactttgtgccatggggagctgttcaatatagattccaaagatattatggatatacatccctatgtatgggatatactcggatatctagcagtacattgcgacaatgagcatttttcggtagggacatgtcagaataatttcttgcagggactgatatcatgtgcttgctcgctagcaacagatttaactctgaaaaaaagtcccctcaaattgtctaaggaggagcaggaaccggctttgagggcagttcttatgatgcttctctctcctagccaattcattttctctgaggcaagttctaaatttctggaagctgttctaccattagacaatgaatatatgaacatgttcatgtcatcactagaatcgaatgttaccagaaatcttacggcatcttttgactgtgtcaagatcatgaccaacctcatgaacatagcatgcttgttggtagtacaatctaactatagtctcaacaaaaggagtgctgtagatgtattatccaacattatcaaggaatgtctgcacgatcatttgtacattacgagatcaaactttgcttctcatctgcaattttgttttgatggaagttcatgctgctatctctctgaagagtgggagggtgaaaatattgttttattttatggtctcgtagtattgtttaatctgctgaagagtgacaactttatttgtttccactgtaaaagaaagttagatgcggggattgtgtgccatgaatgcagagatcattacaacgaaggtttggttggagtccttaaacaagccttgtgtcagaacatgagcccagggcccaagtcttatattgcacatatactgaatggcgaatctctaagtgctcatgcggctatcctatcagcaagatgtcctaaattattaccatctgaaaaaacttttgtccgtgatgggtcagtaacttatgaatggggcagaaggtcatgctatcatgttcgaatgtctgatcgtgtagatagtcacgctctgaagaaaattttggagtatgcatacactgggttggtcactgtagatgatgccactgttaagcctgtaaaaacacttgcaaagtattgccatttgagatcgctgcacttgatgcttcagaaagagcaacctagatggcactcatgtcccatatatgatcttactacagcactcgaaccagctaaacattcgttctcgtgagtacacttccatttgttctcacttgtgagccaaaagttatggcgtgctgactagtatttattttgggtctgaacatatgataccaggcatctgttgctaaaacctctagttattcacatcacaagtataatattagttatttgcattctaaatttctgatgctgctctgaagggttcttgaagaactattagatagagcccaagaagagatcacacctggcccttctatactcatgtgttataattataatccgtatgctcagtattatctttgctttttaacaagttttgctgactctcgttgtacgtcgttgcatttaatttccagggacatcattttggaggcccaatcaaatgacaaaatggagtgtcaccatggttcgtgccagttatcgactcctcatattcatagccataaggtcattctgagcgtgagctgcgaatacctccgtgctttgttccagtctgggatgcatgagagctttgcggagactatcagagttccggtcggatgggaagcactgagaaaactagttcagtggttctactcaggcgagctgcctagagttccacctgactgccgatggaaggctacgagtacagaagagaagctatctatcctgaaatcgtacgcggagctgtcgtccctggcggacttctggttcgtggacgggatgaaggaagagagccttcaagtgttgacctcgtgcctgaattcctccagcacggacgcctccctcgccttcatcggcttcgcggcgaacttgggccagtgggagctggtggaggccgccatcagcagcgtggcgcatctgtaccccaggctgcgagactccggtcggttggagcagctcgatgaggacgtgctcaacatgctgcggacagagcatgtcaggtatttgcagcaccgcagtgcaagtaaatgaatccttaatgtcatggagggttttttttccccgtccactggtggtcgcatagcggtcctgttgtcatgttgtggtggtgtatgcacagctgttgcgttaaaaaaaaactgtacagccacttccgttgaagcttatggcgtcatgaacggggctcatctccgttgaaacaggaccgtgatggttaaaaccgttaatgatacttgcgttagtaccggtgctagtttcttgcctaagagggatcgtgcatgtgtgttagaaaaattataag

SEQ ID NO: 61617 - DNA, 2893 bp, Zea Mays
aagaacgctacgatttctcttcgcttctcctgcctgcggttgtgcggcctgcctccggtaaggagtcagccaagaacgcgatgcgaccggccttctccgcctccaagccgtcgccgtccgggagggagaagggcaggaggaagggcgcctccgcggccgaacagctgctcaccggccaggccgtccccctccgcacccgcctccacgacgctctcgccctcggcctcaccaagtctgatggccacggtgctaaaaaatggcagtctactgatgctggagtacagtctcacgtgctcaaatcggtgggtgcatttgtcggttgtctttcaaatgaactgctcagacttcctcctataaaggagtcaatttcagatatacttgtagcactggaaggtattcttaagacagagaacgtttcagttctgatccaagcagctgacgtgagctcgaagtttttctctactttaggaaattctgttcgccaatactcagttttggagatggtttcgtgcctctcatgccatttgtctgcaaatcagctacgtattgctttaccatgtgcaagtgcattgacttgtatattgaacaaccaagttacagcgagagcttcgactcaggcagaaatttgggaggctctggacaagaccaatgcagttgcgagtgttatttcaactctacagaattacaccgaagatgtccatccactgaactatctgacagagatgatatctctgctaagaagtatactgtggatttggccttcctcgagataccatgtatggagcaatcacaacttgatggccaaactagcacattactgtcttactgctgaaacaacagtttcagctaaaattcttaagctatatgctgctttagctttatgtggcaatggagcaatggtccttcttaagaatgaagagctgatcattaagactggtaaccttatgggaaaatctcatcctactgttactaggattgaagcattgaggctctgccaggtttttctgagatcttcaaggggctgcaattggttgatgactgcacatggtcagcctattgttcaaggcataaccaatgccatgtctgaaataaatgagaagacattagtaagagagggatgtcggactgcattactggcgcttcgttattctgggaatcatcatagatgcttctggtttaatgctattgataaaatactttataagattctttgtgggagctgcaactcttcatctcatgcacatcagactttgtgccatggggagctgttcaatatagattccaaagatattatggatatacatccctatgtatgggatatactcggatatctagcagtacattgcgacaatgagcatttttcggtagggacatgtcagaataatttcttgcagggactgatatcatgtgcttgctcgctagcaacagatttaactctgaaaaaaagtcccctcaaattgtctaaggaggagcaggaaccggctttgagggcagttcttatgatgcttctctctcctagccaattcattttctctgagaaagttagatgcggggattgtgtgccatgaatgcagagatcattacaacgaaggtttggttggagtccttaaacaagccttgtgtcagaacatgagcccagggcccaagtcttatattgcacatatactgaatggcgaatctctaagtgctcatgcggctatcctatcagcaagatgtcctaaattattaccatctgaaaaaacttttgtccgtgatgggtcagtaacttatgaatggggcagaaggtcatgctatcatgttcgaatgtctgatcgtgtagatagtcacgctctgaagaaaattttggagtatgcatacactgggttggtcactgtagatgatgccactgttaagcctgtaaaaacacttgcaaagtattgccatttgagatcgctgcacttgatgcttcagaaagagcaacctagatggcactcatgtcccatatatgatcttactacagcactcgaaccagctaaacattcgttctcggacatcattttggaggcccaatcaaatgacaaaatggagtgtcaccatggttcgtgccagttatcgactcctcatattcatagccataaggtcattctgagcgtgagctgcgaatacctccgtgctttgttccagtctgggatgcatgagagctttgcggagactatcagagttccggtcggatgggaagcactgagaaaactagttcagtggttctactcaggcgagctgcctagagttccacctgactgccgatggaaggctacgagtacagaagagaagctatctatcctgaaatcgtacgcggagctgtcgtccctggcggacttctggttcgtggacgggatgaaggaagagagccttcaagtgttgacctcgtgcctgaattcctccagcacggacgcctccctcgccttcatcggcttcgcggcgaacttgggccagtgggagctggtggaggccgccatcagcagcgtggcgcatctgtaccccaggctgcgagactccggtcggttggagcagctcgatgaggacgtgctcaacatgctgcggacagagcatgtcaggtatttgcagcaccgcagtgcaagtaaatgaatccttaatgtcatggagggttttttttccccgtccactggtggtcgcatagcggtcctgttgtcatgttgtggtggtgtatgcacagctgttgcgttaaaaaaaaactgtacagccacttccgttgaagcttatggcgtcatgaacggggctcatctccgttgaaacaggaccgtgatggttaaaaccgttaatgatacttgcgttagtaccggtgctagtttcttgcctaagagggatcgtgcatgtgtgttagaaaaattataag

SEQ ID NO: 61618 - DNA, 2405 bp, Zea Mays
gaagaacgctacgatttctcttcgcttctcctgcctgcggttgtgcggcctgcctccggtaaggagtcagccaagaacgcgatgcgaccggccttctccgcctccaagccgtcgccgtccgggagggagaagggcaggaggaagggcgcctccgcggccgaacagctgctcaccggccaggccgtccccctccgcacccgcctccacgacgctctcgccctcggcctcaccaagtctgatggccacggtgctaaaaaatggcagtctactgatgctggagtacagtctcacgtgctcaaatcggtgggtgcatttgtcggttgtctttcaaatgaactgctcagacttcctcctataaaggagtcaatttcagatatacttgtagcactggaaggtattcttaagacagagaacgtttcagttctgatccaagcagctgacgtgagctcgaagtttttctctactttaggaaattctgttcgccaatactcagttttggagatggtttcgtgcctctcatgccatttgtctgcaaatcagctacgtattgctttaccatgtgcaagtgcattgacttgtatattgaacaaccaagttacagcgagagcttcgactcaggcagaaatttgggaggctctggacaagaccaatgcagttgcgagtgttatttcaactctacagaattacaccgaagatgtccatccactgaactatctgacagagatgatatctctgctaagaagtatactgtggatttggccttcctcgagataccatgtatggagcaatcacaacttgatggccaaactagcacattactgtcttactgctgaaacaacagtttcagctaaaattcttaagctatatgctgctttagctttatgtggcaatggagcaatggtccttcttaagaatgaagagctgatcattaagactggtaaccttatgggaaaatctcatcctactgttactaggattgaagcattgaggctctgccaggtttttctgagatcttcaaggggctgcaattggttgatgactgcacatggtcagcctattgttcaaggcataaccaatgccatgtctgaaataaatgagaagacattagtaagagagggatgtcggactgcattactggcgcttcgttattctgggaatcatcatagatgcttctggtttaatgctattgataaaatactttataagattctttgtgggagctgcaactcttcatctcatgcacatcagactttgtgccatggggagctgttcaatatagattccaaagatattatggatatacatccctatgtatgggatatactcggatatctagcagtacattgcgacaatgagcatttttcggtagggacatgtcagaataatttcttgcagggactgatatcatgtgcttgctcgctagcaacagatttaactctgaaaaaaagtcccctcaaattgtctaaggaggagcaggaaccggctttgagggcagttcttatgatgcttctctctcctagccaattcattttctctgagggacatcattttggaggcccaatcaaatgacaaaatggagtgtcaccatggttcgtgccagttatcgactcctcatattcatagccataaggtcattctgagcgtgagctgcgaatacctccgtgctttgttccagtctgggatgcatgagagctttgcggagactatcagagttccggtcggatgggaagcactgagaaaactagttcagtggttctactcaggcgagctgcctagagttccacctgactgccgatggaaggctacgagtacagaagagaagctatctatcctgaaatcgtacgcggagctgtcgtccctggcggacttctggttcgtggacgggatgaaggaagagagccttcaagtgttgacctcgtgcctgaattcctccagcacggacgcctccctcgccttcatcggcttcgcggcgaacttgggccagtgggagctggtggaggccgccatcagcagcgtggcgcatctgtaccccaggctgcgagactccggtcggttggagcagctcgatgaggacgtgctcaacatgctgcggacagagcatgtcaggtatttgcagcaccgcagtgcaagtaaatgaatccttaatgtcatggagggttttttttccccgtccactggtggtcgcatagcggtcctgttgtcatgttgtggtggtgtatgcacagctgttgcgttaaaaaaaaactgtacagccacttccgttgaagcttatggcgtcatgaacggggctcatctccgttgaaacaggaccgtgatggttaaaaccgttaatgatacttgcgttagtaccggtgctagtttcttgcctaagagggatcgtgcatgtgtgttagaaaaattataag

SEQ ID NO: 61619 - DNA, 3317 bp, Zea Mays
ctgggtgctagaagaacgctacgatttctcttcgcttctcctgcctgcggttgtgcggcctgcctccggtaaggagtcagccaagaacgcgatgcgaccggccttctccgcctccaagccgtcgccgtccgggagggagaagggcaggaggaagggcgcctccgcggccgaacagctgctcaccggccaggccgtccccctccgcacccgcctccacgacgctctcgccctcggcctcaccaagtctgatggccacggtgctaaaaaatggcagtctactgatgctggagtacagtctcacgtgctcaaatcggtgggtgcatttgtcggttgtctttcaaatgaactgctcagacttcctcctataaaggagtcaatttcagatatacttgtagcactggaaggtattcttaagacagagaacgtttcagttctgatccaagcagctgacgtgagctcgaagtttttctctactttaggaaattctgttcgccaatactcagttttggagatggtttcgtgcctctcatgccatttgtctgcaaatcagctacgtattgctttaccatgtgcaagtgcattgacttgtatattgaacaaccaagttacagcgagagcttcgactcaggcagaaatttgggaggctctggacaagaccaatgcagttgcgagtgttatttcaactctacagaattacaccgaagatgtccatccactgaactatctgacagagatgatatctctgctaagaagtatactgtggatttggccttcctcgagataccatgtatggagcaatcacaacttgatggccaaactagcacattactgtcttactgctgaaacaacagtttcagctaaaattcttaagctatatgctgctttagctttatgtggcaatggagcaatggtccttcttaagaatgaagagctgatcattaagactggtaaccttatgggaaaatctcatcctactgttactaggattgaagcattgaggctctgccaggtttttctgagatcttcaaggggctgcaattggttgatgactgcacatggtcagcctattgttcaaggcataaccaatgccatgtctgaaataaatgagaagacattagtaagagagggatgtcggactgcattactggcgcttcgttattctgggaatcatcatagatgcttctggtttaatgctattgataaaatactttataagattctttgtgggagctgcaactcttcatctcatgcacatcagactttgtgccatggggagctgttcaatatagattccaaagatattatggatatacatccctatgtatgggatatactcggatatctagcagtacattgcgacaatgagcatttttcggtagggacatgtcagaataatttcttgcagggactgatatcatgtgcttgctcgctagcaacagatttaactctgaaaaaaagtcccctcaaattgtctaaggaggagcaggaaccggctttgagggcagttcttatgatgcttctctctcctagccaattcattttctctgaggcaagttctaaatttctggaagctgttctaccattagacaatgaatatatgaacatgttcatgtcatcactagaatcgaatgttaccagaaatcttacggcatcttttgactgtgtcaagatcatgaccaacctcatgaacatagcatgcttgttggtagtacaatctaactatagtctcaacaaaaggagtgctgtagatgtattatccaacattatcaaggaatgtctgcacgatcatttgtacattacgagatcaaactttgcttctcatctgcaattttgttttgatggaagttcatgctgctatctctctgaagagtgggagggtgaaaatattgttttattttatggtctcgtagtattgtttaatctgctgaagagtgacaactttatttgtttccactgtaaaagaaagttagatgcggggattgtgtgccatgaatgcagagatcattacaacgaaggtttggttggagtccttaaacaagccttgtgtcagaacatgagcccagggcccaagtcttatattgcacatatactgaatggcgaatctctaagtgctcatgcggctatcctatcagcaagatgtcctaaattattaccatctgaaaaaacttttgtccgtgatgggtcagtaacttatgaatggggcagaaggtcatgctatcatgttcgaatgtctgatcgtgtagatagtcacgctctgaagaaaattttggagtatgcatacactgggttggtcactgtagatgatgccactgttaagcctgtaaaaacacttgcaaagtattgccatttgagatcgctgcacttgatgcttcagaaagagcaacctagatggcactcatgtcccatatatgatcttactacagcactcgaaccagctaaacattcgttctcggacatcattttggaggcccaatcaaatgacaaaatggagtgtcaccatggttcgtgccagttatcgactcctcatattcatagccataaggtcattctgagcgtgagctgcgaatacctccgtgctttgttccagtctgggatgcatgagagctttgcggagactatcagagttccggtcggatgggaagcactgagaaaactagttcagtggttctactcaggcgagctgcctagagttccacctgactgccgatggaaggctacgagtacagaagagaagctatctatcctgaaatcgtacgcggagctgtcgtccctggcggacttctggttcgtggacgggatgaaggaagagagccttcaagtgttgacctcgtgcctgaattcctccagcacggacgcctccctcgccttcatcggcttcgcggcgaacttgggccagtgggagctggtggaggccgccatcagcagcgtggcgcatctgtaccccaggctgcgagactccggtcggttggagcagctcgatgaggacgtgctcaacatgctgcggacagagcatgtcaggtatttgcagcaccgcagtgcaagtaaatgaatccttaatgtcatggagggttttttttccccgtccactggtggtcgcatagcggtcctgttgtcatgttgtggtggtgtatgcacagctgttgcgttaaaaaaaaactgtacagccacttccgttgaagcttatggcgtcatgaacggggctcatctccgttgaaacaggaccgtgatggttaaaaccgttaatgatacttgcgttagtaccggtgctagtttcttgcctaagagggatcgtgcatgtgtgttagaaaaattataag

SEQ ID NO: 61620 - DNA, 2942 bp, Zea Mays
ggtatcagaggagcgattctccgaaccctagcaccatggatttctctaccgagatctctcagtccactcagtttctcatccaagagatccgtaagatgttcgacgcggccgaggctcggcttgactggcgcttcgccagactgctgcagtcgaaccgtgacgcggtgagtccactacctcctcttctcgtcgtcgacgagccgaaccgcgtcgtggcgagcccatcgccgcttcctcccgtcgtctacgagccgtaccgcgacgaggccatggcaggagccgacgccagggcgcactacggcgggtacctgccctgtgagagaggaggcctcgccacggcgtggcaaccgggcgacctcttcggtagaggcgtctactccgacgagcagcgcttcgaggagcccatcagcgccgacaactgtggggccgatgcaaggcgagaagtcgcgctcgcggcgcgtgtgcttgccgccgacacgtgcgcagccgggatcctcgacggcgctgcgccctttgccgccaccagcgagaagcagatggcacctgtggcatcaccttcgccgttctcatttctgaccacaacatcagcggctcgagttgcagtcatggagaccaccaccagcaactcgccacccaagtgttcggcaaaatgcttgaacgtctcatcgacgcccaatctggcgttgggcgacccagaggagccggagaatatcgtcgcgtcgaagcccgtcgtggacaaaccggtgactagcgccaacaccaagacgttccagcacgagatcaaggacctggcagtcaacgtctatggcaagtggctgaggctcgggatctactctgaggtcaggttccagacctgcaccaaggcccattccgggtcccttagtcacgaggagcaggacgccaagaccttcgcggcatggggagtggattatctagcagacccggtgtcctactccgaggagtacgagctcttgttcggcatctaccactcgaccaacaccgaggacagaattcttaccaccatgccaacctcgacatccacgctgctccactcgtcattgacatatgcacttccaggtgcttcccttccaaaccttgccttgctgagctcgatgtctctggagcatgccagcttgggtgcacatcacgtgttggaggaattgtcaacacgcaccgatgacctcttcagcaatagaatcggctccaagcccacactcatggcctacggtagtgagcttcgtgtagtccgagctgacaagtcaagacgaagccctgttgtatcggcagcttgggagcaagtgtatgtgcagcaatagagatgaccatgggcagtcgatcaaaggatagcaccaaagaaatacagatgccatgggatcctgggttgcagaagaccaatgagttcggtgaccaaggcaatttctccatctttgtttgggatcctggtgatcacaatgttcagccgatcaaaggatagcacactggtattatttggataaattgcttgcactggcaatgagatctcgatggaattgatgccatgtatcggcttgggggcaagccgatttttaagaaggggagaatgttagggaatgtgagctcaaacggtccgtgccagcccaggttcaaaagagcaggacggtcaggagaatagacatgaaatattcagagtgttactgttatctttcttctccagttttctctcttctatgtttcctctaccttccctctagattcttctagacccttctagagtggcttcaacattgttcttctatccttaatcctcatgctgttcttccttcccagactataatcctctgtaatcgctattgtgagttgaattaatacacactggtagtgtgagttgttaacagtccggcaccggaacctgatcagggtggtgacctgctgcgccagcgtggacgcgaggggggacgacttcagggcgctggtgttcgagttcatgccgaactacagcctcgacaggtggctgcacccggggtcccgcgagctcgacaaggacgtgaagagcctgagcgtggcccagaggctcagcgtcgccctggacatcgccgacgcgctgagctacctgcacacgagctccgtgccgcccatcatccactgcgacctcaagccgagcaatgtcctcctcggggaggacatgaccgcgctcatcggcgacttcggcctcgccaagctgctccttgacccggggagcgacgaccccgaccctcgcggctgcgcccaggaaagcaccatcggcataagagggacgattggatacgtcgcaccagagtacggcacgacggggaaagtgacgacgcatggcgacgtgtacagcttcggggtcacgctcctggagatcttcaccggaaggtcgcccgccgacggcgcgttcgaggatgggctcacgctggtggagttcgtgggcgcggcgctgctgcacgacaagatcgagcaggtcgtcgacccggccctgctgccggccgtggggttcgatggcgacgcgtcccgtggctcaggggagagcggcgcgcgcgtcccggtgcacaactgcctggtgtctgccctgagggtcgggctccgctgcacacgggcagtgccgtacgggaggctgagcatgacggatgcggcctccgagctgcgagcgatcagggacgcttgcgcagttgcgctcgcgccgccagtgtccagtgattcctaggtgttcggctggtcaaggtaagagtaggaccagtgattcctaggtattgtaccgtggctagtgggctgatctatgggctcacctaggtcaagttacgtgtgtctgggccaaaaagcgcggcatgggctcattccccactgcgaagttcaaaagcctgcgttcggcacgagatatgggataatgggaacaccatttttctaaaaattcctatttttccaaagaaaataaactatttttc

SEQ ID NO: 61621 - DNA, 3330 bp, Zea Mays
tccttaatcctcatgctgttcttccttcccagactataatcctctgtaatcgctattgtgagttgaattaatacacactggtagtgtgagttgttaacaattggtatcagaggagcgattctccgaaccctagcaccatggatttctctaccgagatctctcagtccactcagtttctcatccaagagatccgtaagatgttcgacgcggccgaggctcggcttgactggcgcttcgccagactgctgcagtcgaaccgtgacgcggtgagtccactacctcctcttctcgtcgtcgacgagccgaaccgcgtcgtggcgagcccatcgccgcttcctcccgtcgtctacgagccgtaccgcgacgaggccatggcaggagccgacgccagggcgcactacggcgggtacctgccctgtgagagaggaggcctcgccacggcgtggcaaccgggcgacctcttcggtagaggcgtctactccgacgagcagcgcttcgaggagcccatcagcgccgacaactgtggggccgatgcaaggcgagaagtcgcgctcgcggcgcgtgtgcttgccgccgacacgtgcgcagccgggatcctcgacggcgctgcgccctttgccgccaccagcgagaagcagatggcacctgtggcatcaccttcgccgttctcatttctgaccacaacatcagcggctcgagttgcagtcatggagaccaccaccagcaactcgccacccaagtgttcggcaaaatgcttgaacgtctcatcgacgcccaatctggcgttgggcgacccagaggagccggagaatatcgtcgcgtcgaagcccgtcgtggacaaaccggtgactagcgccaacaccaagacgttccagcacgagatcaaggacctggcagtcaacgtctatggcaagtggctgaggctcgggatctactctgaggtcaggttccagacctgcaccaaggcccattccgggtcccttagtcacgaggagcaggacgccaagaccttcgcggcatggggagtggattatctagcagacccggtgtcctactccgaggagtacgagctcttgttcggcatctaccactcgaccaacaccgaggacagaattcttaccaccatgccaacctcgacatccacgctgctccactcgtcattgacatatgcacttccaggtgcttcccttccaaaccttgccttgctgagctcgatgtctctggagcatgccagcttgggtgcacatcacgtgttggaggaattgtcaacacgcaccgatgacctcttcagcaatagaatcggctccaagcccacactcatggcctacggtagtgagcttcgtgtagtccgagctgacaagtcaagacgaagccctgttggtaagataagagagctcaatgaagacataattgttcccgaatattattacgctggtggagatgaactccaatcacttaatgcttggtttggtccagaggggaatattcagataatagttgaactccaatcacttaatctaaacagtagaccatccttgtcattggtggtttcgctggagactagtacgagtcctccaattctatggccaagccgtggaccgctcaacatgtttgctatggttctatgcacacttgaggaagctgatcaatcattcatattctacagtatcggcagcttgggagcaagtgtatgtgcagcaatagagatgaccatgggcagtcgatcaaaggatagcaccaaagaaatacagatgccatgggatcctgggttgcagaagaccaatgagttcggtgaccaaggcaatttctccatctttgtttgggatcctggtgatcacaatgttcagccgatcaaaggatagcacactggtattatttggataaattgcttgcactggcaatgagatctcgatggaattgatgccatgtatcggcttgggggcaagccgatttttaagaaggggagaatgttagggaatgtgagctcaaacggtccgtgccagcccaggttcaaaagagcaggacggtcaggagaatagacatgaaatattcagagtgttactgttatctttcttctccagttttctctcttctatgtttcctctaccttccctctagattcttctagacccttctagagtggcttcaacattgttcttctatccttaatcctcatgctgttcttccttcccagactataatcctctgtaatcgctattgtgagttgaattaatacacactggtagtgtgagttgttaacagtccggcaccggaacctgatcagggtggtgacctgctgcgccagcgtggacgcgaggggggacgacttcagggcgctggtgttcgagttcatgccgaactacagcctcgacaggtggctgcacccggggtcccgcgagctcgacaaggacgtgaagagcctgagcgtggcccagaggctcagcgtcgccctggacatcgccgacgcgctgagctacctgcacacgagctccgtgccgcccatcatccactgcgacctcaagccgagcaatgtcctcctcggggaggacatgaccgcgctcatcggcgacttcggcctcgccaagctgctccttgacccggggagcgacgaccccgaccctcgcggctgcgcccaggaaagcaccatcggcataagagggacgattggatacgtcgcaccagagtacggcacgacggggaaagtgacgacgcatggcgacgtgtacagcttcggggtcacgctcctggagatcttcaccggaaggtcgcccgccgacggcgcgttcgaggatgggctcacgctggtggagttcgtgggcgcggcgctgctgcacgacaagatcgagcaggtcgtcgacccggccctgctgccggccgtggggttcgatggcgacgcgtcccgtggctcaggggagagcggcgcgcgcgtcccggtgcacaactgcctggtgtctgccctgagggtcgggctccgctgcacacgggcagtgccgtacgggaggctgagcatgacggatgcggcctccgagctgcgagcgatcagggacgcttgcgcagttgcgctcgcgccgccagtgtccagtgattcctaggtgttcggctggtcaaggtaagagtaggaccagtgattcctaggtattgtaccgtggctagtgggctgatctatgggctcacctaggtcaagttacgtgtgtctgggccaaaaagcgcggcatgggctcattccccactgcgaagttcaaaagcctgcgttcggcacgagatatgggataatgggaacaccatttttctaaaaattcctatttttccaaagaaaataaactatttttc

SEQ ID NO: 61622 - DNA, 477 bp, Zea Mays
ctcagtccactcagtttctcatccaagagatccgtaagatgttcgacgcggccgaggctcggcttgactggcgcttcgccagactgctgcagtcgaaccgtgacgcgggtggtgacctgctgcgccagcgtggacgcgaggggggacgacttcagggcgctggtgttcgagttcatgccgaactacagcctcgacaggtggctgcacccggggtcccgcgagctcgacaaggacgtgaagagcctgagcgtggcccagaggctcagcgtcgccctggacatcgccgacgcgctgagctacctgcacacgagctccgtgccgcccatcatccactgcgacctcaagccgagcaatgtcctcctcggggaggacatgaccgcgctcatcggcgacttcggcctcgccaagctgctccttgacccggggagcgacgaccccgaccctcgcggctgcgcccaggaaagcaccatcggcata

SEQ ID NO: 61623 - DNA, 2120 bp, Zea Mays
gtcctcctcttcgccggtttccacacgttcgccggccgccgccctccccgctccctctcccgtccgcttggttgtttacgcctgcacccaggctagggcaggacatccaacgcgccaccttgtacggctgctgcctgggcctggtttgagtctttgacgaaaccgcagaagcatccggcgcccgcgctagcctcctcctcccccaagcgttgtttcgccgccgttcgatagctgagggcagaggcgggcaagtataggagatgtcggtgctcatcgtcaccagcgtgggcgacatcgaggtggatctccacaccgaccggtgcgcgctcaccaccaagaacttcctcaagctctgcaaaatgaagtactacaatgggtgtctgttccacaaggtggagaaggatttcttggcacaaactggcgatccaactggaactggcaccggtggtgattccgtatacaaatttctctatggtgatcaagctcgattttttgatgatgaaatccgtccagagttgaggcattctaaaactggaaccgttgctatggccagtgctggtgaaaactgcaatgcctcgcagttctacattaccttgcgggatgacgtggattaccttgatgataaacacactgtgtttgggatggttgccgaaggttttgatacgctgacaaaaataaatgaagcttatgttgatgataatggaagaccattcaaggacataagaattaagcatacatatgtcttggatgatcctttcgatgatcctcctcaacttgctgaacttattcctgagaattctcctacaggaaagccacgtgatgaggttgcagaagagcgcttagaggatacttgggttcctttggaccaaacagttgctcctgaagaacttgaggaaatgatccgctctaaagaggcacacacaaatgcagtaatacttgagagtctggcagatattccagatgctgaggttaaaccgccagataatgtcttatttgtttgtaagctcaacccagtaacacaggatgaagatttatacacaatcttttctcgttttggaactgtgacatcagctgaaataattcgtgactacaagactggagatagtttatgctatgcttttattgaattcgatacaaaggaggcttgtgagcgtgcatatttcaagatggacaattgtctgattgacgatagaaggatccatgttgattttagtcagagtgtttcgaagctgtggggtcaattcagacaaagcaaaagaaatgcaaagaaagatgggtgttttaagtgtggcgcccctgatcacctagccagagactgcgatcaagacggtgagcagaaaaacaaaggcccaagttatgttctaaaagatgaaaatacacaacgtggtggaaatcaccgtagaagctatgatctagtatttgacgaagacgaagctgattgttctgaagagagagatcatgaaaatggccacagaagaaagaatcgaagaatagatgatcgaaaatcagagctaccacctcgtggtggtcgtgatagaaatagccatgagagaacacacagtgatgagaaaggaagcaagcatgggaaagatgataggaaccgaggggatcggaaacatgatgactaccacagttacagtagatccggtgacagaagctctggtagaaacgatgatcgtgattatagcaagcgccacgacagaagcagaagtggggaggaagagaagggctacagacgaagggataagtctgatgatagtaaacatagaagagaagacggagggcaccatgtgagaaaccagcagtctgatgataggtcctacaaggagagaaggcacagagatggtagataagaaagtttctgcacgactcggttttcttgcctgctttccactgatgtctctataagctggtattcttagctcaacttttttttttgtaagtcaatgtaactgcctggaatatgttgaattgttgtagtgtccagatctgaatctttttttgtgtgtttacagtttttgctggataatttattgcaatcaaaaaattgctgacttagactgtttgcgcttattctattgtaaggattggcatgggcccataaataattctattgtaag

SEQ ID NO: 61624 - DNA, 2216 bp, Zea Mays
ggccttccaatcggtccaagagcacgggagcccatctgaccgcggctctagtggcccgtcgtcctcctcttcgccggtttccacacgttcgccggccgccgccctccccgctccctctcccgtccgcttggttgtttacgcctgcacccaggctagggcaggacatccaacgcgccaccttgtacggctgctgcctgggcctggtttgagtctttgacgaaaccgcagaagcatccggcgcccgcgctagcctcctcctcccccaagcgttgtttcgccgccgttcgatagctgagggcagaggcgggcaagtataggagatgtcggtgctcatcgtcaccagcgtgggcgacatcgaggtggatctccacaccgaccgaatgaagtactacaatgggtgtctgttccacaaggtggagaaggatttcttggcacaaactggcgatccaactggaactggcaccggtggtgattccgtatacaaatttctctatggtgatcaagctcgattttttgatgatgaaatccgtccagagttgaggcattctaaaactggaaccgttgctatggccagtgctggtgaaaactgcaatgcctcgcagttctacattaccttgcgggatgacgtggattaccttgatgataaacacactgtgtttgggatggttgccgaaggttttgatacgctgacaaaaataaatgaagcttatgttgatgataatggaagaccattcaaggacataagaattaagcatacatatgtcttggatgatcctttcgatgatcctcctcaacttgctgaacttattcctgagaattctcctacaggaaagccacgtgatgaggttgcagaagagcgcttagaggatacttgggttcctttggaccaaacagttgctcctgaagaacttgaggaaatgatccgctctaaagaggcacacacaaatgcagtaatacttgagagtctggcagatattccagatgctgaggttaaaccgccagataatgtcttatttgtttgtaagctcaacccagtaacacaggatgaagatttatacacaatcttttctcgttttggaactgtgacatcagctgaaataattcgtgactacaagactggagatagtttatgctatgcttttattgaattcgatacaaaggaggcttgtgagcgtgcatatttcaagatggacaattgtctgattgacgatagaaggatccatgttgattttagtcagagtgtttcgaagctgtggggtcaattcagacaaagcaaaagaaatgcaaagaaagatgggtgttttaagtgtggcgcccctgatcacctagccagagactgcgatcaagacggtgagcagaaaaacaaaggcccaagttatgttctaaaagatgaaaatacacaacgtggtggaaatcaccgtagaagctatgatctagtatttgacgaagacgaagctgattgttctgaagagagagatcatgaaaatggccacagaagaaagaatcgaagaatagatgatcgaaaatcagagctaccacctcgtggtggtcgtgatagaaatagccatgagagaacacacagtgatgagaaaggaagcaagcatgggaaagatgataggaaccgaggggatcggaaacatgatgactaccacagttacagtagatccggtgacagaagctctggtagaaacgatgatcgtgattatagcaagcgccacgacagaagcagaagtggggaggaagagaagggctacagacgaagggataagtctgatggtgagcggcaccatagagacgatggctacgatcgccgcaggagagatgaagacagccacaggaaaaggagcccagatagtaaacatagaagagaagacggagggcaccatgtgagaaaccagcagtctgatgataggtcctacaaggagagaaggcacagagatggtagataagaaagtttctgcacgactcggttttcttgcctgctttccactgatgtctctataagctggtattcttagctcaacttttttttttgtaagtcaatgtaactgcctggaatatgttgaattgttgtagtgtccagatctgaatctttttttgtgtgtttacagtttttgctggataatttattgcaatcaaaaaattgctgacttagactgtttgcgcttattctattgtaaggattggcatgggcccataaataattctattgtaag

SEQ ID NO: 61625 - DNA, 1284 bp, Zea Mays
atgaccatttcgagcgagcgtgcaagagcaagactcttcggagttactgttggctgccgagattgcgaagaagcaggtgctttggtcgtgaacggtggcgccgccgagcagcggaaagcaccggcaccgaaacgccatctgcgcgctgtagctgtacagcagcgatcaccggccctgccgccgggcaatgcacgcgaccaacccgacggcctcgccgcgcaggctgctggctgccaagctgccatccgccgaccgccgcccatccctccaggctccagcgatggcataggctgtcaggcatcaccgcgtcagctactcaggtcaggctagggcgttgggctgccatcctgctggtttaactccacgccgcctgcacctgccaggcaggggcgctaggttgtcatccctccaggaaccgatcagccgagtagttgctgcctcgctggtcaggttagtgatctgaaaatctgaagttcatcctccaagcttcagtccgcctgtcaggtactcaggttgctgtctggctatttacttttattgatggaatcggctgtggaaggaaaggggaggactgcaagtgatggaactgattcagaaagtaattcgtttgacaagagggatgatatgtctgaagatgaactggtagtgcttggtggaaaaattgatgattcagtggacaatgtcaatattgatgaatctgaggacaacagaagtaaacaaggggtcaagagaaggcgcaaaagggtgaagatgaaggctacaactgaaactgaaaggagcaaaaaggcaaaatctaaagtttgggatgcctttactaaggtgactgtgccggatacgacagagaaggggaagatgatatcaaaggcaaaatgtaactattgtaagaagctatattcttacatacaaggatcaacaacatctcatttgtcaaggcacatgagaatttgtgccgtgtatttgaagcatgtggcaaagcagcaggatcaatctcttctaaattttgctccatcaacagcagatgttcgtagtgagttagaaaaactttatggggattttgaggtgcagcatagagagagaaaagagtctcaaagcaaatctaatgcttcctcatctttgagtgttgaaagatcatgtagtttgccatccgcttcatgtcaatttccgtctttcttgtcatcaactcagtctaacccatcaaagagcgagttgcttatctatttggaggagactaatgaagaagatgatgaggacaatgttgtgaacataatgttcccaaaagcttga

SEQ ID NO: 61626 - DNA, 949 bp, Zea Mays
atgaccatttcgagcgagcgtgcaagagcaagactcttcggagttactgttggctgccgagattgcgaagaagcaggtgctttggtcgtgaacggtggcgccgccgagcagcggaaagcaccggcaccgaaacgccatctgcgcgctgtagctgtacagcagcgatcaccggccctgccgccgggcaatgcacgcgaccaacccgacggcctcgccgcgcaggctgctggctgccaagctgccatccgccgaccgccgcccatccctccaggctccagcgatggcataggctgtcaggcatcaccgcgtcagctactcaggtcaggcaggggcgctaggttgtcatccctccaggaaccgatcagccgagtagttgctgcctcgctggtcaggttgctgtctggctatttacttttattgatggaatcggctgtggaaggaaaggggaggactgcaagtgatggaactgattcagaaagtaattcgtttgacaagagggatgatatgtctgaagatgaactggtagtgcttggtggaaaaattgatgattcagtggacaatgtcaatattgatgaatctgaggacaacagaagtaaacaaggggtcaagagaaggcgcaaaagggtgaagatgaaggctacaactgaaactgaaaggagcaaaaaggcaaaatctaaagtttgggatgcctttactaaggtgactgtgccggatacgacagagaaggggaagatgatatcaaaggcaaaatgtaactattgtaagaagctatattcttacatacaaggatcaacaacatctcatttgtcaaggcacatgagaatttgtgccgtgtatttgaagcatgtggcaaagcagcaggatcaatctcttctaaattttgctccatcaacagcaggaagaagatgatgaggacaatgttgtgaacataatgttcccaaaagcttga

SEQ ID NO: 61627 - DNA, 1279 bp, Zea Mays
atgaccatttcgagcgagcgtgcaagagcaagactcttcggagttactgttggctgccgagattgcgaagaagcaggtgctttggtcgtgaacggtggcgccgccgagcagcggaaagcaccggcaccgaaacgccatctgcgcgctgtagctgtacagcagcgatcaccggccctgccgccgggcaatgcacgcgaccaacccgacggcctcgccgcgcaggctgctggctgccaagctgccatccgccgaccgccgcccatccctccaggctccagcgatggcataggctgtcaggcatcaccgcgtcagctactcaggctagggcgttgggctgccatcctgctggtttaactccacgccgcctgcacctgccaggcaggggcgctaggttgtcatccctccaggaaccgatcagccgagtagttgctgcctcgctggtcaggttagtgatctgaaaatctgaagttcatcctccaagcttcagtccgcctgtcaggtactcaggttgctgtctggctatttacttttattgatggaatcggctgtggaaggaaaggggaggactgcaagtgatggaactgattcagaaagtaattcgtttgacaagagggatgatatgtctgaagatgaactggtagtgcttggtggaaaaattgatgattcagtggacaatgtcaatattgatgaatctgaggacaacagaagtaaacaaggggtcaagagaaggcgcaaaagggtgaagatgaaggctacaactgaaactgaaaggagcaaaaaggcaaaatctaaagtttgggatgcctttactaaggtgactgtgccggatacgacagagaaggggaagatgatatcaaaggcaaaatgtaactattgtaagaagctatattcttacatacaaggatcaacaacatctcatttgtcaaggcacatgagaatttgtgccgtgtatttgaagcatgtggcaaagcagcaggatcaatctcttctaaattttgctccatcaacagcagatgttcgtagtgagttagaaaaactttatggggattttgaggtgcagcatagagagagaaaagagtctcaaagcaaatctaatgcttcctcatctttgagtgttgaaagatcatgtagtttgccatccgcttcatgtcaatttccgtctttcttgtcatcaactcagtctaacccatcaaagagcgagttgcttatctatttggaggagactaatgaagaagatgatgaggacaatgttgtgaacataatgttcccaaaagcttga

SEQ ID NO: 61628 - DNA, 1092 bp, Zea Mays
atgaccatttcgagcgagcgtgcaagagcaagactcttcggagttactgttggctgccgagattgcgaagaagcaggtgctttggtcgtgaacggtggcgccgccgagcagcggaaagcaccggcaccgaaacgccatctgcgcgctgtagctgtacagcagcgatcaccggccctgccgccgggcaatgcacgcgaccaacccgacggcctcgccgcgcaggctgctggctgccaagctgccatccgccgaccgccgcccatccctccaggctccagcgatggcataggctgtcaggcatcaccgcgtcagctactcaggttgctgtctggctatttacttttattgatggaatcggctgtggaaggaaaggggaggactgcaagtgatggaactgattcagaaagtaattcgtttgacaagagggatgatatgtctgaagatgaactggtagtgcttggtggaaaaattgatgattcagtggacaatgtcaatattgatgaatctgaggacaacagaagtaaacaaggggtcaagagaaggcgcaaaagggtgaagatgaaggctacaactgaaactgaaaggagcaaaaaggcaaaatctaaagtttgggatgcctttactaaggtgactgtgccggatacgacagagaaggggaagatgatatcaaaggcaaaatgtaactattgtaagaagctatattcttacatacaaggatcaacaacatctcatttgtcaaggcacatgagaatttgtgccgtgtatttgaagcatgtggcaaagcagcaggatcaatctcttctaaattttgctccatcaacagcagatgttcgtagtgagttagaaaaactttatggggattttgaggtgcagcatagagagagaaaagagtctcaaagcaaatctaatgcttcctcatctttgagtgttgaaagatcatgtagtttgccatccgcttcatgtcaatttccgtctttcttgtcatcaactcagtctaacccatcaaagagcgagttgcttatctatttggaggagactaatgaagaagatgatgaggacaatgttgtgaacataatgttcccaaaagcttga

SEQ ID NO: 61629 - DNA, 1222 bp, Zea Mays
atgaccatttcgagcgagcgtgcaagagcaagactcttcggagttactgttggctgccgagattgcgaagaagcaggtgctttggtcgtgaacggtggcgccgccgagcagcggaaagcaccggcaccgaaacgccatctgcgcgctgtagctgtacagcagcgatcaccggccctgccgccgggcaatgcacgcgaccaacccgacggcctcgccgcgcaggctgctggctgccaagctgccatccgccgaccgccgcccatccctccaggctccagcgatggcataggctgtcaggcatcaccgcgtcagctactcaggtcaggctagggcgttgggctgccatcctgctggtttaactccacgccgcctgcacctgccaggcaggggcgctaggttgtcatccctccaggaaccgatcagccgagtagttgctgcctcgctggtcaggttgctgtctggctatttacttttattgatggaatcggctgtggaaggaaaggggaggactgcaagtgatggaactgattcagaaagtaattcgtttgacaagagggatgatatgtctgaagatgaactggtagtgcttggtggaaaaattgatgattcagtggacaatgtcaatattgatgaatctgaggacaacagaagtaaacaaggggtcaagagaaggcgcaaaagggtgaagatgaaggctacaactgaaactgaaaggagcaaaaaggcaaaatctaaagtttgggatgcctttactaaggtgactgtgccggatacgacagagaaggggaagatgatatcaaaggcaaaatgtaactattgtaagaagctatattcttacatacaaggatcaacaacatctcatttgtcaaggcacatgagaatttgtgccgtgtatttgaagcatgtggcaaagcagcaggatcaatctcttctaaattttgctccatcaacagcagatgttcgtagtgagttagaaaaactttatggggattttgaggtgcagcatagagagagaaaagagtctcaaagcaaatctaatgcttcctcatctttgagtgttgaaagatcatgtagtttgccatccgcttcatgtcaatttccgtctttcttgtcatcaactcagtctaacccatcaaagagcgagttgcttatctatttggaggagactaatgaagaagatgatgaggacaatgttgtgaacataatgttcccaaaagcttga

SEQ ID NO: 61630 - DNA, 999 bp, Zea Mays
atgaccatttcgagcgagcgtgcaagagcaagactcttcggagttactgttggctgccgagattgcgaagaagcaggtgctttggtcgtgaacggtggcgccgccgagcagcggaaagcaccggcaccgaaacgccatctgcgcgctgtagctgtacagcagcgatcaccggccctgccgccgggcaatgcacgcgaccaacccgacggcctcgccgcgcaggctgctggctgccaagctgccatccgccgaccgccgcccatccctccaggctccagcgatggcataggctgtcaggcatcaccgcgtcagctactcaggtcaggcaggggcgctaggttgtcatccctccaggaaccgatcagccgagtagttgctgcctcgctggtcaggttagtgatctgaaaatctgaagttcatcctccaagcttcagtccgcctgtcaggtactcaggttgctgtctggctatttacttttattgatggaatcggctgtggaaggaaaggggaggactgcaagtgatggaactgattcagaaagtaattcgtttgacaagagggatgatatgtctgaagatgaactggtagtgcttggtggaaaaattgatgattcagtggacaatgtcaatattgatgaatctgaggacaacagaagtaaacaaggggtcaagagaaggcgcaaaagggtgaagatgaaggctacaactgaaactgaaaggagcaaaaaggcaaaatctaaagtttgggatgcctttactaaggtgactgtgccggatacgacagagaaggggaagatgatatcaaaggcaaaatgtaactattgtaagaagctatattcttacatacaaggatcaacaacatctcatttgtcaaggcacatgagaatttgtgccgtgtatttgaagcatgtggcaaagcagcaggatcaatctcttctaaattttgctccatcaacagcagacaaagagtttgatttgctgaattggtggaaggttaatt

SEQ ID NO: 61631 - DNA, 1187 bp, Zea Mays
atgaccatttcgagcgagcgtgcaagagcaagactcttcggagttactgttggctgccgagattgcgaagaagcaggtgctttggtcgtgaacggtggcgccgccgagcagcggaaagcaccggcaccgaaacgccatctgcgcgctgtagctgtacagcagcgatcaccggccctgccgccgggcaatgcacgcgaccaacccgacggcctcgccgcgcaggctgctggctgccaagctgccatccgccgaccgccgcccatccctccaggctccagcgatggcataggctgtcaggcatcaccgcgtcagctactcaggtcaggcaggggcgctaggttgtcatccctccaggaaccgatcagccgagtagttgctgcctcgctggtcaggttagtgatctgaaaatctgaagttcatcctccaagcttcagtccgcctgtcaggtactcaggttgctgtctggctatttacttttattgatggaatcggctgtggaaggaaaggggaggactgcaagtgatggaactgattcagaaagtaattcgtttgacaagagggatgatatgtctgaagatgaactggtagtgcttggtggaaaaattgatgattcagtggacaatgtcaatattgatgaatctgaggacaacagaagtaaacaaggggtcaagagaaggcgcaaaagggtgaagatgaaggctacaactgaaactgaaaggagcaaaaaggcaaaatctaaagtttgggatgcctttactaaggtgactgtgccggatacgacagagaaggggaagatgatatcaaaggcaaaatgtaactattgtaagaagctatattcttacatacaaggatcaacaacatctcatttgtcaaggcacatgagaatttgtgccgtgtatttgaagcatgtggcaaagcagcaggatcaatctcttctaaattttgctccatcaacagcagataatgcctcaaacaatgatggtgctattcgaggtttgagggccagattttcagctagacaaggaagtgcttttgttgcaaaatatttccatatcagatgttgtgcacacataattaatttggttgttaaggatgggactgctgcattggattctttaataagcaatctaagatcaactgtcaagtatgttatggtgattgctactattcttgatccaaggtataaa

SEQ ID NO: 61632 - DNA, 1184 bp, Zea Mays
gagccacgcccagggcaagtcttcttctccagactccaaccgtccgagttcccttgcccacgtcgccccaaaacaggaattggcactcccgttgcctcgtccctcgcgtccagctccgccagaaccacccacaaccgcgcctcgcccgttctcgcccagctccggccgcccgcgctgcgcatcaacatgcagggagccgtgccacgctgctcctcgtcgtgccgcgctgcatcctcgtggctgccttggctgggcgagcatgcccctgcagccccatccccgcgctcctcctcagtgcgcagcgcggcacccccggccgtgtcctggcctcccttgccgagttgtgttgccgctgtagccttttcatcttctccctgcaagcctgagcgcgccactgcgctggccgacgattcgcccaacatcggcccctccccaggcgcagtctcctgcaccggtgagcaccctagcgaccacgtctcgtctcgctcctccctgctccctgcaacgcagaccgcgtggagcactggagcccccagcccccacgcgtgcgtgtattcttgcccagccagccatctctccaagcaccgtgaacagaggagagagagaaaaacaaccgctcatgtgaggtgttgaggaagatggaaccaagtgtctcattggtctgcaagaccttctgtggccatgtactctatagtcctctgcgtggccccgacgcaacagcaatcttgccgttctcatgcctcgccgttgactagtctggtcgtccgctgtcgttgcgagagtgcgatccatttttgagcttcgatgaatcgacggtcaagcttcggcgaccaaatgacccagttcttcgagttctacaaagttgaagaccctgagcatctgtttggtgaagtcaagtgtcctctgaccctattatgtcacatttactttataattcatcaactcgcataccatgatcaacctaaggattgactagctttttatttaccttgtccttggttaccttttgggttactatggttagcttcatgctagcgctttactttaatcaatgaacatgatgagatacaatgatggtactatgattttattctggatatgatgatatacttgtgacatttaaggggactcgagctgtttctcgagtgcctctccgaaggacctgttcgttggatgaccgcccg

SEQ ID NO: 61633 - DNA, 5726 bp, Zea Mays
ctcccccattcccgagtcccgaccaaccaccggcaccgacgcggccgctccccagcatggcctccaccgccgccgcgccgcgcaccacgaaggagctcatggacgccctcaccgcgcacctctctctctaccacgccgccgcgaaccctagccccgccaccgctgctgcctctacctcctcctcgtcaccgcgcgctgcgatcctccggtggctcgcctccctctcccccgccgcgcgcgctgcggctgccacctccctcctctcccccgccgcggctgccgcgctgctctccatggtccgccggctccgcctccgcggccactcctccttcttcgtgctccactcctcgtccccgtccacctccgcgcgcggagccgaggagccaaccgtcctctcgcgcctctcccggggcctcctcgcccgcgccgccgccagctcccgggcgcaggcgctcctcttcgccaacaccctcctcttcccctcgtcgcccgcatcgtcgcggcgccccgacgtgatcaccgtcgccgaagccttcgtcgctgacctcgacggctttgtcgcagccatggatgagatctctggcgggaggttcctctgctgcggggagggggaagtggacctggccgcgctggcgtgtcaagatttcccggagctgccctggcttaatgccaaggggtactacgtgatcgaggagtttctggccaataggttggatatcgcactgcgaatgtcgtgggcagcggcagggggtgggtcagctggagggagaaaggcggtgagaattgggaagagtgcgaaggagaaggctgggcttgctgcaaacgcgttctggagggagaagggcattctgtcttgcagcaagaagtctgtattttataaagagttgaaaagactgaaactagttgaggagatagtctgtttgaagagcaacattacttgctgcagcggtgatgcaatctttttcacttcattagtgtcggctgctactgctgctggtgatgtacttatgaaattacaagggcttctcatggtggtgtcgacagaaagtataaatcttgaacttattggggatgaagcccccaaaaagaaagatgttgaaaagaccagtggaggttctcggaaaggaaagaagaagtctaacaccttgaaaaagctaacgacatctgctaagccatctaaggataatggatgcagtagttcagataatcgcaattgtagtcctttaccaaaccattgtgctccatctgttgaaggcactgctgctggacctccatctgaaaaaactccttacaaggaaattgtaccaacaacgaaggttgtaagcattactttgccaatctgttttgtttggttgttcatttattcatgacttatgagggacatctcgatattttaggaacaaactgtctcgttggatggttgcaaaaatcaatgtaacaaaaagaagaacaagcggaaagggaaaacaaaactatcaaatccgatgaggcctgagagcccaagatctaccaaattaaaaacagttgttccccatagtgctgcagaggccttgcatgaagctgctaaagaggctgatgtctcacctcatcacccatcgtatgtccatccttccaagaacgagatctctgaagctgttagctgttctgacccttccattttatctaatggaacaaaggtaatatccaccagtaagggcacaaaacttgaagacacattgtattctcctagagttcactcatcacttgctacagaacgttttcagagtgcccatgatgatgccttcaaagtggctgtgcaggcctcatcgtaccttagccaaagtgaatccttggttcagtcatcctcttgtctaccttccagaagcaatgaggtctcttctactaatctgtatggaagttcagttgactccttggtaagatctgcacaggaaaaaactgaatgtgatgggaaacatgtggatcataaatctgaagtgacaaaggacagaattttaccttctgctattcctactgacatgcttcaaagtgctataagtaaaaatggtggagttatgaaaaatggtggtggtgaatgttatgtatacaataggaacctactgggaggaacgtcgtatgaatggcctagtgtaacaccatctcattttgtatctcctcaaatgcaacaacgtccagctgcagcagacaggttgcatcttgatgttggttacagatggccaactcaatttaaccaaccctttcttcctgccaaccatcaggtgaggaatccgccaattgatgctggacacaatcaaatgttaccttctctagcagttccactaagttttgactggcctccagtttttagaggttatggtaaaaatgcttctgtaagctatgatccattgtataccccacagatgcaatcttctgcttggtcagggttccctgctcaactagtgcaaagagggggtatttgcagtgacagtgatgttgcggatgatactgaaagctattggttttctgaagaagaatcagatagtcgtgcacattctggaagagatattaatcaatactttggtggaggtgtgatgtactggagtcctgcagaacatgcaggaactggtttttccaggccaccatctcttagttcagatgatagtgcctgggcttggcatgaggctgatgttatacgagttgttgatgatgtagctaatggtattccatctacatacacaaatggtgtatcatcaccaccctccactccatcttgttctcaaaatgaatctttggatccagctgctcacttgataacagggaatgagatcaataatgaagctctgacttctccatcttcggtgcaagatagtcctgaagataaaataatgcaagttgcaaaggctgtgtcttgtggcagtgaagtagttaaggcagatacattgccatatgccatgctgcggccgatagttgttcctagtatatcacgaaggtcatcacgatctgagattaagggtgctcatgatcacaggaggagcccatgtgtaccatcaacaaggagggacatacctattctaagaagacctccatcaccagtagtacttagtgttcctcgcgtacctaggccaccacctccttcacctgctggagagtcaagaaaacgagggttccctatcgttagatccggcagctcaagtcctcgacattgggggatgagaggtttattttctgaagacaaaatttttcatagggctcagttttgcttggatggtcctgaagttgtatggccttcatggggtaacaagggtacttctggtacattggtgcaaacaattgaggatactgttttgcaggaccaccttgttaagatttcacagctatcttgtgatcaacatccagatgtggcattgcctgtacagccactagatatgctaaatggttcgtctcacaaggcatccctctctttgatgcacaatgctctacatgaagaaatagatcaattctgtaagcaggttgctgctggtaatctggtgaggaggccctatataaactgggctgtcaaaagagtcacccgttgcctgcaggttctgtggcctcgctcccgtacaaatctatttggctcaaatgccactggtctggctcttccaactagtgatgttgatcttgtggttagtcttcctcctgtccgaaacctggaacctattaaagaagctggaattttggaaggccgtaatggcatcaaggaaacatgtctacagcatgcagcaaggtgtcttactaaccaggactgggttagaagtgattcccttaaaacagttgaaaacacagctatacctgtgatcatgcttgtagcggatgtaccctgtgacacgaatatgtccaatgagtattcttcagtactagatggctcacaagactattcagttaacatgcttggagaacaagggagtcctcctcggtctgacacctctagttcagaaggcagcaacatgctgatgtgctcaaaattgaataaggatgattgtgatattgtgcagtcaattcgtcttgatataagtttcaaatcgccatcccatacaggactgcagactactgagttggtacgtgagttgagccagcaatttcctgcagttatacctcttgccttgattctcaagaagtttttggctgaccggagtttggaccacccctattcaggtggtctgagctcttactgtttggtgctgttaattgttcgttttctccagcatgagcatcatcttggtcgacctattaataaaaatctgggcagccttttgatggatttcttgtacttctttgggaacatatttgatccacgccatatgcgcatttctatccaaggaagtggaatttatttgaatcgagaaagagggcaaagcattgacccgattcacatagatgatccacattgccctgctaacaatgtgggcaggaattgtttccgcattcaccaatgtattaagctataaaaaagaggtacgattccacagaatacaattgatgacagggtggaatgacctgtgctgccttctagacacactgatgtctatgcagctgctcagaagcctcagtgtggcaagtttgatacctctggaatagaccaaaaaatagaccggcaagatggcaatattcaaacgtgagctcttgtgtgttcatgcaatggcacatgatgccttgctccctgatcgagcttcttgatgttcagatctctgactgaggtaaattggcttactcaagaacaaggtggtgaattggctttctcatgaacaaggcgttgctgcacacagactactgacgtggctgttcttgcacctttctgaataagcccattcatgtaatgtttggtaaatgcaaaccgcatgattatccgcttgatactgtgattgatagatgcttcacctcgtgccaatattctgtgttccaatgccaagtcacatattctgagcagcaactggagatttgctcatgtaccgattcttcaaggtcctaggatcatttggggtgatgaagattgtgaaatacatgtggaggggtacttatatggagatgcatggtcttagtaattaagcggtcaagaacttatggtcacctgatgaaaacaaggatggttgtgaagagaacggagtagtggcatcagctatcagggaaagggaagtgctattgacatcatggctgacccctttcagattatcgcgctgagatcttcctggcgaggattgggagctacgagccagatatccttgacggaaatgtttgcttggacagcgtaaaccggaaagtaccggcgatgatattgatgatgataatcgcactgctctctattgtcatactgttgtctgcactcttcagcgacatgtcttgtgccttttcaacgtgcgaaatgtgagcaattgctcttgtaaagctgcactatttcactaaaacattattgtttgggttatttagatccatggtattactatttatctatttggaaacttacattacaattttccctggatgtacccgatccatgccatttcctacgcttctccactcggcagattgttgaatcgtatcccaaaatctctcccattgtcgtctccatgaattgctcatctcacctctctaccatggagggtttagggtttatatctttctatcaggttaaactggttggtgtatataacttaatatggtattagatgtctcgaatttaaatcctagttagtataattaaataaaaataaata

SEQ ID NO: 61634 - DNA, 6111 bp, Zea Mays
ctcccccattcccgagtcccgaccaaccaccggcaccgacgcggccgctccccagcatggcctccaccgccgccgcgccgcgcaccacgaaggagctcatggacgccctcaccgcgcacctctctctctaccacgccgccgcgaaccctagccccgccaccgctgctgcctctacctcctcctcgtcaccgcgcgctgcgatcctccggtggctcgcctccctctcccccgccgcgcgcgctgcggctgccacctccctcctctcccccgccgcggctgccgcgctgctctccatggtccgccggctccgcctccgcggccactcctccttcttcgtgctccactcctcgtccccgtccacctccgcgcgcggagccgaggagccaaccgtcctctcgcgcctctcccggggcctcctcgcccgcgccgccgccagctcccgggcgcaggcgctcctcttcgccaacaccctcctcttcccctcgtcgcccgcatcgtcgcggcgccccgacgtgatcaccgtcgccgaagccttcgtcgctgacctcgacggctttgtcgcagccatggatgagatctctggcgggaggttcctctgctgcggggagggggaagtggacctggccgcgctggcgtgtcaagatttcccggagctgccctggcttaatgccaaggggtactacgtgatcgaggagtttctggccaataggttggatatcgcactgcgaatgtcgtgggcagcggcagggggtgggtcagctggagggagaaaggcggtgagaattgggaagagtgcgaaggagaaggctgggcttgctgcaaacgcgttctggagggagaagggatatgcggattggtggatgagactggagcctcggatgagagcaagtctcatgggggtattcttcgggaaaggtgcaatggccctgctcaagcttgcaggcaaatgagatggttgaaggatcagacagtgcctcaagggataatttaggtgaaccaggatcattcgtggcaaacgaatcttgtgaatgtacacggcagtctctgttcagaaagaattgtgcttcttccgttgatggtgcaaacattctgtcttgcagcaagaagtctgtattttataaagagttgaaaagactgaaactagttgaggagatagtctgtttgaagagcaacattacttgctgcagcggtgatgcaatctttttcacttcattagtgtcggctgctactgctgctggtgatgtacttatgaaattacaagggcttctcatggtggtgtcgacagaaagtataaatcttgaacttattggggatgaagcccccaaaaagaaagatgttgaaaagaccagtggaggttctcggaaaggaaagaagaagtctaacaccttgaaaaagctaacgacatctgctaagccatctaagttaacctttttccaggataatggatgcagtagttcagataatcgcaattgtagtcctttaccaaaccattgtgctccatctgttgaaggcactgctgctggacctccatctgaaaaaactccttacaaggaaattgtaccaacaacgaaggttgtaagcattactttgccaatctgttttgtttggttgttcatttattcatgacttatgagggacatctcgatattttaggaacaaactgtctcgttggatggttgcaaaaatcaatgtaacaaaaagaagaacaagcggaaagggaaaacaaaactatcaaatccgatgaggcctgagagcccaagatctaccaaattaaaaacagttgttccccatagtgctgcagaggccttgcatgaagctgctaaagaggctgatgtctcacctcatcacccatcgtatgtccatccttccaagaacgagatctctgaagctgttagctgttctgacccttccattttatctaatggaacaaaggtaatatccaccagtaagggcacaaaacttgaagacacattgtattctcctagagttcactcatcacttgctacagaacgttttcagagtgcccatgatgatgccttcaaagtggctgtgcaggcctcatcgtaccttagccaaagtgaatccttggttcagtcatcctcttgtctaccttccagaagcaatgaggtctcttctactaatctgtatggaagttcagttgactccttggtaagatctgcacaggaaaaaactgaatgtgatgggaaacatgtggatcataaatctgaagtgacaaaggacagaattttaccttctgctattcctactgacatgcttcaaagtgctataagtaaaaatggtggagttatgaaaaatggtggtggtgaatgttatgtatacaataggaacctactgggaggaacgtcgtatgaatggcctagtgtaacaccatctcattttgtatctcctcaaatgcaacaacgtccagctgcagcagacaggttgcatcttgatgttggttacagatggccaactcaatttaaccaaccctttcttcctgccaaccatcaggtgaggaatccgccaattgatgctggacacaatcaaatgttaccttctctagcagttccactaagttttgactggcctccagtttttagaggttatggtaaaaatgcttctgtaagctatgatccattgtataccccacagatgcaatcttctgcttggtcagggttccctgctcaactagtgcaaagagggggtatttgcagtgacagtgatgttgcggatgatactgaaagctattggttttctgaagaagaatcagatagtcgtgcacattctggaagagatattaatcaatactttggtggaggtgtgatgtactggagtcctgcagaacatgcaggaactggtttttccaggccaccatctcttagttcagatgatagtgcctgggcttggcatgaggctgatgttatacgagttgttgatgatgtagctaatggtattccatctacatacacaaatggtgtatcatcaccaccctccactccatcttgttctcaaaatgaatctttggatccagctgctcacttgataacagggaatgagatcaataatgaagctctgacttctccatcttcggtgcaagatagtcctgaagataaaataatgcaagttgcaaaggctgtgtcttgtggcagtgaagtagttaaggcagatacattgccatatgccatgctgcggccgatagttgttcctagtatatcacgaaggtcatcacgatctgagattaagggtgctcatgatcacaggaggagcccatgtgtaccatcaacaaggagggacatacctattctaagaagacctccatcaccagtagtacttagtgttcctcgcgtacctaggccaccacctccttcacctgctggagagtcaagaaaacgagggttccctatcgttagatccggcagctcaagtcctcgacattgggggatgagaggtttattttctgaagacaaaatttttcatagggctcagttttgcttggatggtcctgaagttgtatggccttcatggggtaacaagggtacttctggtacattggtgcaaacaattgaggatactgttttgcaggaccaccttgttaagatttcacagctatcttgtgatcaacatccagatgtggcattgcctgtacagccactagatatgctaaatggttcgtctcacaaggcatccctctctttgatgcacaatgctctacatgaagaaatagatcaattctgtaagcaggttgctgctggtaatctggtgaggaggccctatataaactgggctgtcaaaagagtcacccgttgcctgcaggttctgtggcctcgctcccgtacaaatctatttggctcaaatgccactggtctggctcttccaactagtgatgttgatcttgtggttagtcttcctcctgtccgaaacctggaacctattaaagaagctggaattttggaaggccgtaatggcatcaaggaaacatgtctacagcatgcagcaaggtgtcttactaaccaggactgggttagaagtgattcccttaaaacagttgaaaacacagctatacctgtgatcatgcttgtagcggatgtaccctgtgacacgaatatgtccaatgagtattcttcagtactagatggctcacaagactattcagttaacatgcttggagaacaagggagtcctcctcggtctgacacctctagttcagaaggcagcaacatgctgatgtgctcaaaattgaataaggatgattgtgatattgtgcagtcaattcgtcttgatataagtttcaaatcgccatcccatacaggactgcagactactgagttggtacgtgagttgagccagcaatttcctgcagttatacctcttgccttgattctcaagaagtttttggctgaccggagtttggaccacccctattcaggtggtctgagctcttactgtttggtgctgttaattgttcgttttctccagcatgagcatcatcttggtcgacctattaataaaaatctgggcagccttttgatggatttcttgtacttctttgggaacatatttgatccacgccatatgcgcatttctatccaaggaagtggaatttatttgaatcgagaaagagggcaaagcattgacccgattcacatagatgatccacattgccctgctaacaatgtgggcaggaattgtttccgcattcaccaatgtattaaggcatttgctgatgcgtttgctgttcttgagaatgagctactgcagttcagttcagaatgtagcatgcctgtatcttcattcaatatactaaagaaaataatcccaagtattgattctgatgagctgtagctataaaaaagaggtacgattccacagaatacaattgatgacagggtggaatgacctgtgctgccttctagacacactgatgtctatgcagctgctcagaagcctcagtgtggcaagtttgatacctctggaatagaccaaaaaatagaccggcaagatggcaatattcaaacgtgagctcttgtgtgttcatgcaatggcacatgatgccttgctccctgatcgagcttcttgatgttcagatctctgactgaggtaaattggcttactcaagaacaaggtggtgaattggctttctcatgaacaaggcgttgctgcacacagactactgacgtggctgttcttgcacctttctgaataagcccattcatgtaatgtttggtaaatgcaaaccgcatgattatccgcttgatactgtgattgatagatgcttcacctcgtgccaatattctgtgttccaatgccaagtcacatattctgagcagcaactggagatttgctcatgtaccgattcttcaaggtcctaggatcatttggggtgatgaagattgtgaaatacatgtggaggggtacttatatggagatgcatggtcttagtaattaagcggtcaagaacttatggtcacctgatgaaaacaaggatggttgtgaagagaacggagtagtggcatcagctatcagggaaagggaagtgctattgacatcatggctgacccctttcagattatcgcgctgagatcttcctggcgaggattgggagctacgagccagatatccttgacggaaatgtttgcttggacagcgtaaaccggaaagtaccggcgatgatattgatgatgataatcgcactgctctctattgtcatactgttgtctgcactcttcagcgacatgtcttgtgccttttcaacgtgcgaaatgtgagcaattgctcttgtaaagctgcactatttcactaaaacattattgtttgggttatttagatccatggtattactatttatctatttggaaacttacattacaattttccctggatgtacccgatccatgccatttcctacgcttctccactcggcagattgttgaatcgtatcccaaaatctctcccattgtcgtctccatgaattgctcatctcacctctctaccatggagggtttagggtttatatctttctatcaggttaaactggttggtgtatataacttaatatggtattagatgtctcgaatttaaatcctagttagtataattaaataaaaataaata

SEQ ID NO: 61635 - DNA, 5951 bp, Zea Mays
agcgcccaggcccaccacagcggccactcctcccccattcccgagtcccgaccaaccaccggcaccgacgcggccgctccccagcatggcctccaccgccgccgcgccgcgcaccacgaaggagctcatggacgccctcaccgcgcacctctctctctaccacgccgccgcgaaccctagccccgccaccgctgctgcctctacctcctcctcgtcaccgcgcgctgcgatcctccggtggctcgcctccctctcccccgccgcgcgcgctgcggctgccacctccctcctctcccccgccgcggctgccgcgctgctctccatggtccgccggctccgcctccgcggccactcctccttcttcgtgctccactcctcgtccccgtccacctccgcgcgcggagccgaggagccaaccgtcctctcgcgcctctcccggggcctcctcgcccgcgccgccgccagctcccgggcgcaggcgctcctcttcgccaacaccctcctcttcccctcgtcgcccgcatcgtcgcggcgccccgacgtgatcaccgtcgccgaagccttcgtcgctgacctcgacggctttgtcgcagccatggatgagatctctggcgggaggttcctctgctgcggggagggggaagtggacctggccgcgctggcgtgtcaagatttcccggagctgccctggcttaatgccaaggggtactacgtgatcgaggagtttctggccaataggttggatatcgcactgcgaatgtcgtgggcagcggcagggggtgggtcagctggagggagaaaggcggtgagaattgggaagagtgcgaaggagaaggctgggcttgctgcaaacgcgttctggagggagaagggatatgcggattggtggatgagactggagcctcggatgagagcaagtctcatgggggtattcttcgggaaaggtgcaatggccctggcaaatgagatggttgaaggatcagacagtgcctcaagggataatttaggtgaaccaggatcattcgtggcaaacgaatcttgtgaatgtacacggcagtctctgttcagaaagaattgtgcttcttccgttgatggtgcaaacattctgtcttgcagcaagaagtctgtattttataaagagttgaaaagactgaaactagttgaggagatagtctgtttgaagagcaacattacttgctgcagcggtgatgcaatctttttcacttcattagtgtcggctgctactgctgctggtgatgtacttatgaaattacaagggcttctcatggtggtgtcgacagaaagtataaatcttgaacttattggggatgaagcccccaaaaagaaagatgttgaaaagaccagtggaggttctcggaaaggaaagaagaagtctaacaccttgaaaaagctaacgacatctgctaagccatctaaggataatggatgcagtagttcagataatcgcaattgtagtcctttaccaaaccattgtgctccatctgttgaaggcactgctgctggacctccatctgaaaaaactccttacaaggaaattgtaccaacaacgaaggaacaaactgtctcgttggatggttgcaaaaatcaatgtaacaaaaagaagaacaagcggaaagggaaaacaaaactatcaaatccgatgaggcctgagagcccaagatctaccaaattaaaaacagttgttccccatagtgctgcagaggccttgcatgaagctgctaaagaggctgatgtctcacctcatcacccatcgtatgtccatccttccaagaacgagatctctgaagctgttagctgttctgacccttccattttatctaatggaacaaagaacgttttcagagtgcccatgatgatgccttcaaagtggctgtgcaggcctcatcgtaccttagccaaagtgaatccttggttcagtcatcctcttgtctaccttccagaagcaatgaggtctcttctactaatctgtatggaagttcagttgactccttggtaagatctgcacaggaaaaaactgaatgtgatgggaaacatgtggatcataaatctgaagtgacaaaggacagaattttaccttctgctattcctactgacatgcttcaaagtgctataagtaaaaatggtggagttatgaaaaatggtggtggtgaatgttatgtatacaataggaacctactgggaggaacgtcgtatgaatggcctagtgtaacaccatctcattttgtatctcctcaaatgcaacaacgtccagctgcagcagacaggttgcatcttgatgttggttacagatggccaactcaatttaaccaaccctttcttcctgccaaccatcaggtgaggaatccgccaattgatgctggacacaatcaaatgttaccttctctagcagttccactaagttttgactggcctccagtttttagaggttatggtaaaaatgcttctgtaagctatgatccattgtataccccacagatgcaatcttctgcttggtcagggttccctgctcaactagtgcaaagagggggtatttgcagtgacagtgatgttgcggatgatactgaaagctattggttttctgaagaagaatcagatagtcgtgcacattctggaagagatattaatcaatactttggtggaggtgtgatgtactggagtcctgcagaacatgcaggaactggtttttccaggccaccatctcttagttcagatgatagtgcctgggcttggcatgaggctgatgttatacgagttgttgatgatgtagctaatggtattccatctacatacacaaatggtgtatcatcaccaccctccactccatcttgttctcaaaatgaatctttggatccagctgctcacttgataacagggaatgagatcaataatgaagctctgacttctccatcttcggtgcaagatagtcctgaagataaaataatgcaagttgcaaaggctgtgtcttgtggcagtgaagtagttaaggcagatacattgccatatgccatgctgcggccgatagttgttcctagtatatcacgaaggtcatcacgatctgagattaagggtgctcatgatcacaggaggagcccatgtgtaccatcaacaaggagggacatacctattctaagaagacctccatcaccagtagtacttagtgttcctcgcgtacctaggccaccacctccttcacctgctggagagtcaagaaaacgagggttccctatcgttagatccggcagctcaagtcctcgacattgggggatgagaggtttattttctgaagacaaaatttttcatagggctcagttttgcttggatggtcctgaagttgtatggccttcatggggtaacaagggtacttctggtacattggtgcaaacaattgaggatactgttttgcaggaccaccttgttaagatttcacagctatcttgtgatcaacatatgtggcattgcctgtacagccactagatatgctaaatggttcgtctcacaaggcatccctctctttgatgcacaatgctctacatgaagaaatagatcaattctgtaagcaggttgctgctggtaatctggtgaggaggccctatataaactgggctgtcaaaagagtcacccgttgcctgcaggttctgtggcctcgctcccgtacaaatctatttggctcaaatgccactggtctggctcttccaactagtgatgttgatcttgtggttagtcttcctcctgtccgaaacctggaacctattaaagaagctggaattttggaaggccgtaatggcatcaaggaaacatgtctacagcatgcagcaaggtgtcttactaaccaggactgggttagaagtgattcccttaaaacagttgaaaacacagctatacctgtgatcatgcttgtagcggatgtaccctgtgacacgaatatgtccaatgagtattcttcagtactagatggctcacaagactattcagttaacatgcttggagaacaagggagtcctcctcggtctgacacctctagttcagaaggcagcaacatgctgatgtgctcaaaattgaataaggatgattgtgatattgtgcagtcaattcgtcttgatataagtttcaaatcgccatcccatacaggactgcagactactgagttggtacgtgagttgagccagcaatttcctgcagttatacctcttgccttgattctcaagaagtttttggctgaccggagtttggaccacccctattcaggtggtctgagctcttactgtttggtgctgttaattgttcgttttctccagcatgagcatcatcttggtcgacctattaataaaaatctgggcagccttttgatggatttcttgtacttctttgggaacatatttgatccacgccatatgcgcatttctatccaaggaagtggaatttatttgaatcgagaaagagggcaaagcattgacccgattcacatagatgatccacattgccctgctaacaatgtgggcaggaattgtttccgcattcaccaatgtattaaggcatttgctgatgcgtttgctgttcttgagaatgagctactgcagttcagttcagaatgtagcatgcctgtatcttcattcaatatactaaagaaaataatcccaagtattgattctgatgagctgtagctataaaaaagaggtacgattccacagaatacaattgatgacagggtggaatgacctgtgctgccttctagacacactgatgtctatgcagctgctcagaagcctcagtgtggcaagtttgatacctctggaatagaccaaaaaatagaccggcaagatggcaatattcaaacgtgagctcttgtgtgttcatgcaatggcacatgatgccttgctccctgatcgagcttcttgatgttcagatctctgactgaggtaaattggcttactcaagaacaaggtggtgaattggctttctcatgaacaaggcgttgctgcacacagactactgacgtggctgttcttgcacctttctgaataagcccattcatgtaatgtttggtaaatgcaaaccgcatgattatccgcttgatactgtgattgatagatgcttcacctcgtgccaatattctgtgttccaatgccaagtcacatattctgagcagcaactggagatttgctcatgtaccgattcttcaaggtcctaggatcatttggggtgatgaagattgtgaaatacatgtggaggggtacttatatggagatgcatggtcttagtaattaagcggtcaagaacttatggtcacctgatgaaaacaaggatggttgtgaagagaacggagtagtggcatcagctatcagggaaagggaagtgctattgacatcatggctgacccctttcagattatcgcgctgagatcttcctggcgaggattgggagctacgagccagatatccttgacggaaatgtttgcttggacagcgtaaaccggaaagtaccggcgatgatattgatgatgataatcgcactgctctctattgtcatactgttgtctgcactcttcagcgacatgtcttgtgccttttcaacgtgcgaaatgtgagcaattgctcttgtaaagctgcactatttcactaaaacattattgtttgggttatttagatccatggtattactatttatctatttggaaacttacattacaattttccctggatgtacccgatccatgccatttcctacgcttctccactcggcagattgttgaatcgtatcccaaaatctctcccattgtcgtctccatgaattgctcatctcacctctctaccatggagggtttagggtttatatctttctatcaggttaaactggttggtgtatataacttaatatggtattagatgtctcgaatttaaatcctagttagtataattaaataaaaataaata

SEQ ID NO: 61636 - DNA, 5914 bp, Zea Mays
agcgcccaggcccaccacagcggccactcctcccccattcccgagtcccgaccaaccaccggcaccgacgcggccgctccccagcatggcctccaccgccgccgcgccgcgcaccacgaaggagctcatggacgccctcaccgcgcacctctctctctaccacgccgccgcgaaccctagccccgccaccgctgctgcctctacctcctcctcgtcaccgcgcgctgcgatcctccggtggctcgcctccctctcccccgccgcgcgcgctgcggctgccacctccctcctctcccccgccgcggctgccgcgctgctctccatggtccgccggctccgcctccgcggccactcctccttcttcgtgctccactcctcgtccccgtccacctccgcgcgcggagccgaggagccaaccgtcctctcgcgcctctcccggggcctcctcgcccgcgccgccgccagctcccgggcgcaggcgctcctcttcgccaacaccctcctcttcccctcgtcgcccgcatcgtcgcggcgccccgacgtgatcaccgtcgccgaagccttcgtcgctgacctcgacggctttgtcgcagccatggatgagatctctggcgggaggttcctctgctgcggggagggggaagtggacctggccgcgctggcgtgtcaagatttcccggagctgccctggcttaatgccaaggggtactacgtgatcgaggagtttctggccaataggttggatatcgcactgcgaatgtcgtgggcagcggcagggggtgggtcagctggagggagaaaggcggtgagaattgggaagagtgcgaaggagaaggctgggcttgctgcaaacgcgttctggagggagaagggatatgcggattggtggatgagactggagcctcggatgagagcaagtctcatgggggtattcttcgggaaaggtgcaatggccctggcaaatgagatggttgaaggatcagacagtgcctcaagggataatttaggtgaaccaggatcattcgtggcaaacgaatcttgtgaatgtacacggcagtctctgttcagaaagaattgtgcttcttccgttgatggtgcaaacattctgtcttgcagcaagaagtctgtattttataaagagttgaaaagactgaaactagttgaggagatagtctgtttgaagagcaacattacttgctgcagcggtgatgcaatctttttcacttcattagtgtcggctgctactgctgctggtgatgtacttatgaaattacaagggcttctcatggtggtgtcgacagaaagtataaatcttgaacttattggggatgaagcccccaaaaagaaagatgttgaaaagaccagtggaggttctcggaaaggaaagaagaagtctaacaccttgaaaaagctaacgacatctgctaagccatctaaggataatggatgcagtagttcagataatcgcaattgtagtcctttaccaaaccattgtgctccatctgttgaaggcactgctgctggacctccatctgaaaaaactccttacaaggaaattgtaccaacaacgaaggaacaaactgtctcgttggatggttgcaaaaatcaatgtaacaaaaagaagaacaagcggaaagggaaaacaaaactatcaaatccgatgaggcctgagagcccaagatctaccaaattaaaaacagttgttccccatagtgctgcagaggccttgcatgaagctgctaaagaggctgatgtctcacctcatcacccatcgtatgtccatccttccaagaacgagatctctgaagctgttagctgttctgacccttccattttatctaatggaacaaagaacgttttcagagtgcccatgatgatgccttcaaagtggctgtgcaggcctcatcgtaccttagccaaagtgaatccttggttcagtcatcctcttgtctaccttccagaagcaatgaggtctcttctactaatctgtatggaagttcagttgactccttggtaagatctgcacaggaaaaaactgaatgtgatgggaaacatgtggatcataaatctgaagtgacaaaggacagaattttaccttctgctattcctactgacatgcttcaaagtgctataagtaaaaatggtggagttatgaaaaatggtggtggtgaatgttatgtatacaataggaacctactgggaggaacgtcgtatgaatggcctagtgtaacaccatctcattttgtatctcctcaaatgcaacaacgtccagctgcagcagacaggttgcatcttgatgttggttacagatggccaactcaatttaaccaaccctttcttcctgccaaccatcaggtgaggaatccgccaattgatgctggacacaatcaaatgttaccttctctagcagttccactaagttttgactggcctccagtttttagaggttatggtaaaaatgcttctgtaagctatgatccattgtataccccacagatgcaatcttctgcttggtcagggttccctgctcaactagtgcaaagagggggtatttgcagtgacagtgatgttgcggatgatactgaaagctattggttttctgaagaagaatcagatagtcgtgcacattctggaagagatattaatcaatactttggtggaggtgtgatgtactggagtcctgcagaacatgcaggaactggtttttccaggccaccatctcttagttcagatgatagtgcctgggcttggcatgaggctgatgttatacgagttgttgatgatgtagctaatggtattccatctacatacacaaatggtgtatcatcaccaccctccactccatcttgttctcaaaatgaatctttggatccagctgctcacttgataacagggaatgagatcaataatgaagctctgacttctccatcttcggtgcaagatagtcctgaagataaaataatgcaagttgcaaaggctgtgtcttgtggcagtgaagtagttaaggcagatacattgccatatgccatgctgcggccgatagttgttcctagtatatcacgaaggtcatcacgatctgagattaagggtgctcatgatcacaggaggagcccatgtgtaccatcaacaaggagggacatacctattctaagaagacctccatcaccagtagtacttagtgttcctcgcgtacctaggccaccacctccttcacctgctggagagtcaagaaaacgagggttccctatcgttagatccggcagctcaagtcctcgacattgggggatgagaggtttattttctgaagacaaaatttttcatagggctcagttttgcttggatggtcctgaagttgtatggccttcatggggtaacaagggtacttctggtacattggtgcaaacaattgaggatactgttttgcaggaccaccttgttaagatttcacagctatcttgtgatcaacatccagatgtggcattgcctgtacagccactagatatgctaaatggttcgtctcacaaggcatccctctctttgatgcacaatgctctacatgaagaaatagatcaattctgtaagcaggttgctgctggtaatctggtgaggaggccctatataaactgggctgtcaaaagagtcacccgttgcctgcaggttctgtggcctcgctcccgtacaaatctatttggctcaaatgccactggtctggctcttccaactagtgatgttgatcttgtggttagtcttcctcctgtccgaaacctggaacctattaaagaagctggaattttggaaggccgtaatggcatcaaggaaacatgtctacagcatgcagcaaggtgtcttactaaccaggactgggttagaagtgattcccttaaaacagttgaaaacacagctatacctgtgatcatgcttgtagcggatgtaccctgtgacacgaatatgtccaatgagtattcttcagtactagatggctcacaagactattcagttaacatgcttggagaacaagggagtcctcctcggtctgacacctctagttcagaaggcagcaacatgctgatgtgctcaaaattgaataaggatgattgtgatattgtgcagtcaattcgtcttgatataagtttcaaatcgccatcccatacaggactgcagactactgagttggtacgtgagttgagccagcaatttcctgcagttatacctcttgccttgattctcaagaagtttttggctgaccggagtttggaccacccctattcaggtggtctgagctcttactgtttggtgctgttaattgttcgttttctccagcatgagcatcatcttggtcgacctattaataaagaacatatttgatccacgccatatgcgcatttctatccaaggaagtggaatttatttgaatcgagaaagagggcaaagcattgacccgattcacatagatgatccacattgccctgctaacaatgtgggcaggaattgtttccgcattcaccaatgtattaaggcatttgctgatgcgtttgctgttcttgagaatgagctactgcagttcagttcagaatgtagcatgcctgtatcttcattcaatatactaaagaaaataatcccaagtattgattctgatgagctgtagctataaaaaagaggtacgattccacagaatacaattgatgacagggtggaatgacctgtgctgccttctagacacactgatgtctatgcagctgctcagaagcctcagtgtggcaagtttgatacctctggaatagaccaaaaaatagaccggcaagatggcaatattcaaacgtgagctcttgtgtgttcatgcaatggcacatgatgccttgctccctgatcgagcttcttgatgttcagatctctgactgaggtaaattggcttactcaagaacaaggtggtgaattggctttctcatgaacaaggcgttgctgcacacagactactgacgtggctgttcttgcacctttctgaataagcccattcatgtaatgtttggtaaatgcaaaccgcatgattatccgcttgatactgtgattgatagatgcttcacctcgtgccaatattctgtgttccaatgccaagtcacatattctgagcagcaactggagatttgctcatgtaccgattcttcaaggtcctaggatcatttggggtgatgaagattgtgaaatacatgtggaggggtacttatatggagatgcatggtcttagtaattaagcggtcaagaacttatggtcacctgatgaaaacaaggatggttgtgaagagaacggagtagtggcatcagctatcagggaaagggaagtgctattgacatcatggctgacccctttcagattatcgcgctgagatcttcctggcgaggattgggagctacgagccagatatccttgacggaaatgtttgcttggacagcgtaaaccggaaagtaccggcgatgatattgatgatgataatcgcactgctctctattgtcatactgttgtctgcactcttcagcgacatgtcttgtgccttttcaacgtgcgaaatgtgagcaattgctcttgtaaagctgcactatttcactaaaacattattgtttgggttatttagatccatggtattactatttatctatttggaaacttacattacaattttccctggatgtacccgatccatgccatttcctacgcttctccactcggcagattgttgaatcgtatcccaaaatctctcccattgtcgtctccatgaattgctcatctcacctctctaccatggagggtttagggtttatatctttctatcaggttaaactggttggtgtatataacttaatatggtattagatgtctcgaatttaaatcctagttagtataattaaataaaaataaata

SEQ ID NO: 61637 - DNA, 5925 bp, Zea Mays
agcgcccaggcccaccacagcggccactcctcccccattcccgagtcccgaccaaccaccggcaccgacgcggccgctccccagcatggcctccaccgccgccgcgccgcgcaccacgaaggagctcatggacgccctcaccgcgcacctctctctctaccacgccgccgcgaaccctagccccgccaccgctgctgcctctacctcctcctcgtcaccgcgcgctgcgatcctccggtggctcgcctccctctcccccgccgcgcgcgctgcggctgccacctccctcctctcccccgccgcggctgccgcgctgctctccatggtccgccggctccgcctccgcggccactcctccttcttcgtgctccactcctcgtccccgtccacctccgcgcgcggagccgaggagccaaccgtcctctcgcgcctctcccggggcctcctcgcccgcgccgccgccagctcccgggcgcaggcgctcctcttcgccaacaccctcctcttcccctcgtcgcccgcatcgtcgcggcgccccgacgtgatcaccgtcgccgaagccttcgtcgctgacctcgacggctttgtcgcagccatggatgagatctctggcgggaggttcctctgctgcggggagggggaagtggacctggccgcgctggcgtgtcaagatttcccggagctgccctggcttaatgccaaggggtactacgtgatcgaggagtttctggccaataggttggatatcgcactgcgaatgtcgtgggcagcggcagggggtgggtcagctggagggagaaaggcggtgagaattgggaagagtgcgaaggagaaggctgggcttgctgcaaacgcgttctggagggagaagggatatgcggattggtggatgagactggagcctcggatgagagcaagtctcatgggggtattcttcgggaaaggtgcaatggccctggcaaatgagatggttgaaggatcagacagtgcctcaagggataatttaggtgaaccaggatcattcgtggcaaacgaatcttgtgaatgtacacggcagtctctgttcagaaagaattgtgcttcttccgttgatggtgcaaacattctgtcttgcagcaagaagtctgtattttataaagagttgaaaagactgaaactagttgaggagatagtctgtttgaagagcaacattacttgctgcagcggtgatgcaatctttttcacttcattagtgtcggctgctactgctgctggtgatgtacttatgaaattacaagggcttctcatggtggtgtcgacagaaagtataaatcttgaacttattggggatgaagcccccaaaaagaaagatgttgaaaagaccagtggaggttctcggaaaggaaagaagaagtctaacaccttgaaaaagctaacgacatctgctaagccatctaaggataatggatgcagtagttcagataatcgcaattgtagtcctttaccaaaccattgtgctccatctgttgaaggcactgctgctggacctccatctgaaaaaactccttacaaggaaattgtaccaacaacgaaggaacaaactgtctcgttggatggttgcaaaaatcaatgtaacaaaaagaagaacaagcggaaagggaaaacaaaactatcaaatccgatgaggcctgagagcccaagatctaccaaattaaaaacagttgttccccatagtgctgcagaggccttgcatgaagctgctaaagaggctgatgtctcacctcatcacccatcgtatgtccatccttccaagaacgagatctctgaagctgttagctgttctgacccttccattttatctaatggaacaaagaacgttttcagagtgcccatgatgatgccttcaaagtggctgtgcaggcctcatcgtaccttagccaaagtgaatccttggttcagtcatcctcttgtctaccttccagaagcaatgaggtctcttctactaatctgtatggaagttcagttgactccttggtaagatctgcacaggaaaaaactgaatgtgatgggaaacatgtggatcataaatctgaagtgacaaaggacagaattttaccttctgctattcctactgacatgcttcaaagtgctataagtaaaaatggtggagttatgaaaaatggtggtggtgaatgttatgtatacaataggaacctactgggaggaacgtcgtatgaatggcctagtgtaacaccatctcattttgtatctcctcaaatgcaacaacgtccagctgcagcagacaggttgcatcttgatgttggttacagatggccaactcaatttaaccaaccctttcttcctgccaaccatcaggtgaggaatccgccaattgatgctggacacaatcaaatgttaccttctctagcagttccactaagttttgactggcctccagtttttagaggttatggtaaaaatgcttctgtaagctatgatccattgtataccccacagatgcaatcttctgcttggtcagggttccctgctcaactagtgcaaagagggggtatttgcagtgacagtgatgttgcggatgatactgaaagctattggttttctgaagaagaatcagatagtcgtgcacattctggaagagatattaatcaatactttggtggaggtgtgatgtactggagtcctgcagaacatgcaggaactggtttttccaggccaccatctcttagttcagatgatagtgcctgggcttggcatgaggctgatgttatacgagttgttgatgatgtagctaatggtattccatctacatacacaaatggtgtatcatcaccaccctccactccatcttgttctcaaaatgaatctttggatccagctgctcacttgataacagggaatgagatcaataatgaagctctgacttctccatcttcggtgcaagatagtcctgaagataaaataatgcaagttgcaaaggctgtgtcttgtggcagtgaagtagttaaggcagatacattgccatatgccatgctgcggccgatagttgttcctagtatatcacgaaggtcatcacgatctgagattaagggtgctcatgatcacaggaggagcccatgtgtaccatcaacaaggagggacatacctattctaagaagacctccatcaccagtagtacttagtgttcctcgcgtacctaggccaccacctccttcacctgctggagagtcaagaaaacgagggttccctatcgttagatccggcagctcaagtcctcgacattgggggatgagaggtttattttctgaagacaaaatttttcatagggctcagttttgcttggatggtcctgaagttgtatggccttcatggggtaacaagggtacttctggtacattggtgcaaacaattgaggatactgttttgcaggaccaccttgttaagatttcacagctatcttgtgatcaacatccagatgtggcattgcctgtacagccactagatatgctaaatggttcgtctcacaaggcatccctctctttgatgcacaatgctctacatgaagaaatagatcaattctgtaagcaggttgctgctggtaatctggtgaggaggccctatataaactgggctgtcaaaagagtcacccgttgcctgcaggttctgtggcctcgctcccgtacaaatctatttggctcaaatgccactggtctggctcttccaactagtgatgttgatcttgtggttagtcttcctcctgtccgaaacctggaacctattaaagaagctggaattttggaaggccgtaatggcatcaaggaaacatgtctacagcatgcagcaaggtgtcttactaaccaggactgggttagaagtgattcccttaaaacagttgaaaacacagctatacctgtgatcatgcttgtagcggatgtaccctgtgacacgaatatgtccaatgagtattcttcagtactagatggctcacaagactattcagttaacatgcttggagaacaagggagtcctcctcggtctgacacctctagttcagaaggcagcaacatgctgatgtgctcaaaattgaataaggatgattgtgatattgtgcagtcaattcgtcttgatataagtttcaaatcgccatcccatacaggactgcagactactgagttggtacgtgagttgagccagcaatttcctgcagttatacctcttgccttgattctcaagaagtttttggctgaccggagtttggaccacccctattcaggtggtctgagctcttactgtttggtgctgttaattgttcgttttctccagcatgagcatcatcttggtcgacctattaataaaaatctgggcagccttttgatggatttcttgtacttctttgggaacatatttgatccacgccatatgcgcatttctatccaaggaagtggaatttatttgaatcgagaaagagggcaaagcattgacccgattcacatagatgatccacattgccctgctaacaatgtgggcaggaattgtttccgcattcaccaatgtattaagaatgagctactgcagttcagttcagaatgtagcatgcctgtatcttcattcaatatactaaagaaaataatcccaagtattgattctgatgagctgtagctataaaaaagaggtacgattccacagaatacaattgatgacagggtggaatgacctgtgctgccttctagacacactgatgtctatgcagctgctcagaagcctcagtgtggcaagtttgatacctctggaatagaccaaaaaatagaccggcaagatggcaatattcaaacgtgagctcttgtgtgttcatgcaatggcacatgatgccttgctccctgatcgagcttcttgatgttcagatctctgactgaggtaaattggcttactcaagaacaaggtggtgaattggctttctcatgaacaaggcgttgctgcacacagactactgacgtggctgttcttgcacctttctgaataagcccattcatgtaatgtttggtaaatgcaaaccgcatgattatccgcttgatactgtgattgatagatgcttcacctcgtgccaatattctgtgttccaatgccaagtcacatattctgagcagcaactggagatttgctcatgtaccgattcttcaaggtcctaggatcatttggggtgatgaagattgtgaaatacatgtggaggggtacttatatggagatgcatggtcttagtaattaagcggtcaagaacttatggtcacctgatgaaaacaaggatggttgtgaagagaacggagtagtggcatcagctatcagggaaagggaagtgctattgacatcatggctgacccctttcagattatcgcgctgagatcttcctggcgaggattgggagctacgagccagatatccttgacggaaatgtttgcttggacagcgtaaaccggaaagtaccggcgatgatattgatgatgataatcgcactgctctctattgtcatactgttgtctgcactcttcagcgacatgtcttgtgccttttcaacgtgcgaaatgtgagcaattgctcttgtaaagctgcactatttcactaaaacattattgtttgggttatttagatccatggtattactatttatctatttggaaacttacattacaattttccctggatgtacccgatccatgccatttcctacgcttctccactcggcagattgttgaatcgtatcccaaaatctctcccattgtcgtctccatgaattgctcatctcacctctctaccatggagggtttagggtttatatctttctatcaggttaaactggttggtgtatataacttaatatggtattagatgtctcgaatttaaatcctagttagtataattaaataaaaataaata

SEQ ID NO: 61638 - DNA, 5822 bp, Zea Mays
cgcaaaccaagcaagaccggaagagcgcccaggcccaccacagcggccactcctcccccattcccgagtcccgaccaaccaccggcaccgacgcggccgctccccagcatggcctccaccgccgccgcgccgcgcaccacgaaggagctcatggacgccctcaccgcgcacctctctctctaccacgccgccgcgaaccctagccccgccaccgctgctgcctctacctcctcctcgtcaccgcgcgctgcgatcctccggtggctcgcctccctctcccccgccgcgcgcgctgcggctgccacctccctcctctcccccgccgcggctgccgcgctgctctccatggtccgccggctccgcctccgcggccactcctccttcttcgtgctccactcctcgtccccgtccacctccgcgcgcggagccgaggagccaaccgtcctctcgcgcctctcccggggcctcctcgcccgcgccgccgccagctcccgggcgcaggcgctcctcttcgccaacaccctcctcttcccctcgtcgcccgcatcgtcgcggcgccccgacgtgatcaccgtcgccgaagccttcgtcgctgacctcgacggctttgtcgcagccatggatgagatctctggcgggaggttcctctgctgcggggagggggaagtggacctggccgcgctggcgtgtcaagatttcccggagctgccctggcttaatgccaaggggtactacgtgatcgaggagtttctggccaataggttggatatcgcactgcgaatgtcgtgggcagcggcagggggtgggtcagctggagggagaaaggcggtgagaattgggaagagtgcgaaggagaaggctgggcttgctgcaaacgcgttctggagggagaagggcattctgtcttgcagcaagaagtctgtattttataaagagttgaaaagactgaaactagttgaggagatagtctgtttgaagagcaacattacttgctgcagcggtgatgcaatctttttcacttcattagtgtcggctgctactgctgctggtgatgtacttatgaaattacaagggcttctcatggtggtgtcgacagaaagtataaatcttgaacttattggggatgaagcccccaaaaagaaagatgttgaaaagaccagtggaggttctcggaaaggaaagaagaagtctaacaccttgaaaaagctaacgacatctgctaagccatctaaggataatggatgcagtagttcagataatcgcaattgtagtcctttaccaaaccattgtgctccatctgttgaaggcactgctgctggacctccatctgaaaaaactccttacaaggaaattgtaccaacaacgaaggaacaaactgtctcgttggatggttgcaaaaatcaatgtaacaaaaagaagaacaagcggaaagggaaaacaaaactatcaaatccgatgaggcctgagagcccaagatctaccaaattaaaaacagttgttccccatagtgctgcagaggccttgcatgaagctgctaaagaggctgatgtctcacctcatcacccatcgtatgtccatccttccaagaacgagatctctgaagctgttagctgttctgacccttccattttatctaatggaacaaaggtaatatccaccagtaagggcacaaaacttgaagacacattgtattctcctagagttcactcatcacttgctacagaacgttttcagagtgcccatgatgatgccttcaaagtggctgtgcaggcctcatcgtaccttagccaaagtgaatccttggttcagtcatcctcttgtctaccttccagaagcaatgaggtctcttctactaatctgtatggaagttcagttgactccttggtaagatctgcacaggaaaaaactgaatgtgatgggaaacatgtggatcataaatctgaagtgacaaaggacagaattttaccttctgctattcctactgacatgcttcaaagtgctataagtaaaaatggtggagttatgaaaaatggtggtggtgaatgttatgtatacaataggaacctactgggaggaacgtcgtatgaatggcctagtgtaacaccatctcattttgtatctcctcaaatgcaacaacgtccagctgcagcagacaggttgcatcttgatgttggttacagatggccaactcaatttaaccaaccctttcttcctgccaaccatcaggtgaggaatccgccaattgatgctggacacaatcaaatgttaccttctctagcagttccactaagttttgactggcctccagtttttagaggttatggtaaaaatgcttctgtaagctatgatccattgtataccccacagatgcaatcttctgcttggtcagggttccctgctcaactagtgcaaagagggggtatttgcagtgacagtgatgttgcggatgatactgaaagctattggttttctgaagaagaatcagatagtcgtgcacattctggaagagatattaatcaatactttggtggaggtgtgatgtactggagtcctgcagaacatgcaggaactggtttttccaggccaccatctcttagttcagatgatagtgcctgggcttggcatgaggctgatgttatacgagttgttgatgatgtagctaatggtattccatctacatacacaaatggtgtatcatcaccaccctccactccatcttgttctcaaaatgaatctttggatccagctgctcacttgataacagggaatgagatcaataatgaagctctgacttctccatcttcggtgcaagatagtcctgaagataaaataatgcaagttgcaaaggctgtgtcttgtggcagtgaagtagttaaggcagatacattgccatatgccatgctgcggccgatagttgttcctagtatatcacgaaggtcatcacgatctgagattaagggtgctcatgatcacaggaggagcccatgtgtaccatcaacaaggagggacatacctattctaagaagacctccatcaccagtagtacttagtgttcctcgcgtacctaggccaccacctccttcacctgctggagagtcaagaaaacgagggttccctatcgttagatccggcagctcaagtcctcgacattgggggatgagaggtttattttctgaagacaaaatttttcatagggctcagttttgcttggatggtcctgaagttgtatggccttcatggggtaacaagggtacttctggtacattggtgcaaacaattgaggatactgttttgcaggaccaccttgttaagatttcacagctatcttgtgatcaacatatgtggcattgcctgtacagccactagatatgctaaatggttcgtctcacaaggcatccctctctttgatgcacaatgctctacatgaagaaatagatcaattctgtaagcaggttgctgctggtaatctggtgaggaggccctatataaactgggctgtcaaaagagtcacccgttgcctgcaggttctgtggcctcgctcccgtacaaatctatttggctcaaatgccactggtctggctcttccaactagtgatgttgatcttgtggttagtcttcctcctgtccgaaacctggaacctattaaagaagctggaattttggaaggccgtaatggcatcaaggaaacatgtctacagcatgcagcaaggtgtcttactaaccaggactgggttagaagtgattcccttaaaacagttgaaaacacagctatacctgtgatcatgcttgtagcggatgtaccctgtgacacgaatatgtccaatgagtattcttcagtactagatggctcacaagactattcagttaacatgcttggagaacaagggagtcctcctcggtctgacacctctagttcagaaggcagcaacatgctgatgtgctcaaaattgaataaggatgattgtgatattgtgcagtcaattcgtcttgatataagtttcaaatcgccatcccatacaggactgcagactactgagttggtacgtgagttgagccagcaatttcctgcagttatacctcttgccttgattctcaagaagtttttggctgaccggagtttggaccacccctattcaggtggtctgagctcttactgtttggtgctgttaattgttcgttttctccagcatgagcatcatcttggtcgacctattaataaaaatctgggcagccttttgatggatttcttgtacttctttgggaacatatttgatccacgccatatgcgcatttctatccaaggaagtggaatttatttgaatcgagaaagagggcaaagcattgacccgattcacatagatgatccacattgccctgctaacaatgtgggcaggaattgtttccgcattcaccaatgtattaaggcatttgctgatgcgtttgctgttcttgagaatgagctactgcagttcagttcagaatgtagcatgcctgtatcttcattcaatatactaaagaaaataatcccaagtattgattctgatgagctgtagctataaaaaagaggtacgattccacagaatacaattgatgacagggtggaatgacctgtgctgccttctagacacactgatgtctatgcagctgctcagaagcctcagtgtggcaagtttgatacctctggaatagaccaaaaaatagaccggcaagatggcaatattcaaacgtgagctcttgtgtgttcatgcaatggcacatgatgccttgctccctgatcgagcttcttgatgttcagatctctgactgaggtaaattggcttactcaagaacaaggtggtgaattggctttctcatgaacaaggcgttgctgcacacagactactgacgtggctgttcttgcacctttctgaataagcccattcatgtaatgtttggtaaatgcaaaccgcatgattatccgcttgatactgtgattgatagatgcttcacctcgtgccaatattctgtgttccaatgccaagtcacatattctgagcagcaactggagatttgctcatgtaccgattcttcaaggtcctaggatcatttggggtgatgaagattgtgaaatacatgtggaggggtacttatatggagatgcatggtcttagtaattaagcggtcaagaacttatggtcacctgatgaaaacaaggatggttgtgaagagaacggagtagtggcatcagctatcagggaaagggaagtgctattgacatcatggctgacccctttcagattatcgcgctgagatcttcctggcgaggattgggagctacgagccagatatccttgacggaaatgtttgcttggacagcgtaaaccggaaagtaccggcgatgatattgatgatgataatcgcactgctctctattgtcatactgttgtctgcactcttcagcgacatgtcttgtgccttttcaacgtgcgaaatgtgagcaattgctcttgtaaagctgcactatttcactaaaacattattgtttgggttatttagatccatggtattactatttatctatttggaaacttacattacaattttccctggatgtacccgatccatgccatttcctacgcttctccactcggcagattgttgaatcgtatcccaaaatctctcccattgtcgtctccatgaattgctcatctcacctctctaccatggagggtttagggtttatatctttctatcaggttaaactggttggtgtatataacttaatatggtattagatgtctcgaatttaaatcctagttagtataattaaataaaaataaata

SEQ ID NO: 61639 - DNA, 6057 bp, Zea Mays
cgcaaaccaagcaagaccggaagagcgcccaggcccaccacagcggccactcctcccccattcccgagtcccgaccaaccaccggcaccgacgcggccgctccccagcatggcctccaccgccgccgcgccgcgcaccacgaaggagctcatggacgccctcaccgcgcacctctctctctaccacgccgccgcgaaccctagccccgccaccgctgctgcctctacctcctcctcgtcaccgcgcgctgcgatcctccggtggctcgcctccctctcccccgccgcgcgcgctgcggctgccacctccctcctctcccccgccgcggctgccgcgctgctctccatggtccgccggctccgcctccgcggccactcctccttcttcgtgctccactcctcgtccccgtccacctccgcgcgcggagccgaggagccaaccgtcctctcgcgcctctcccggggcctcctcgcccgcgccgccgccagctcccgggcgcaggcgctcctcttcgccaacaccctcctcttcccctcgtcgcccgcatcgtcgcggcgccccgacgtgatcaccgtcgccgaagccttcgtcgctgacctcgacggctttgtcgcagccatggatgagatctctggcgggaggttcctctgctgcggggagggggaagtggacctggccgcgctggcgtgtcaagatttcccggagctgccctggcttaatgccaaggggtactacgtgatcgaggagtttctggccaataggttggatatcgcactgcgaatgtcgtgggcagcggcagggggtgggtcagctggagggagaaaggcggtgagaattgggaagagtgcgaaggagaaggctgggcttgctgcaaacgcgttctggagggagaagggatatgcggattggtggatgagactggagcctcggatgagagcaagtctcatgggggtattcttcgggaaaggtgcaatggccctggcaaatgagatggttgaaggatcagacagtgcctcaagggataatttaggtgaaccaggatcattcgtggcaaacgaatcttgtgaatgtacacggcagtctctgttcagaaagaattgtgcttcttccgttgatggtgcaaacattctgtcttgcagcaagaagtctgtattttataaagagttgaaaagactgaaactagttgaggagatagtctgtttgaagagcaacattacttgctgcagcggtgatgcaatctttttcacttcattagtgtcggctgctactgctgctggtgatgtacttatgaaattacaagggcttctcatggtggtgtcgacagaaagtataaatcttgaacttattggggatgaagcccccaaaaagaaagatgttgaaaagaccagtggaggttctcggaaaggaaagaagaagtctaacaccttgaaaaagctaacgacatctgctaagccatctaaggataatggatgcagtagttcagataatcgcaattgtagtcctttaccaaaccattgtgctccatctgttgaaggcactgctgctggacctccatctgaaaaaactccttacaaggaaattgtaccaacaacgaaggttgaacaaactgtctcgttggatggttgcaaaaatcaatgtaacaaaaagaagaacaagcggaaagggaaaacaaaactatcaaatccgatgaggcctgagagcccaagatctaccaaattaaaaacagttgttccccatagtgctgcagaggccttgcatgaagctgctaaagaggctgatgtctcacctcatcacccatcgtatgtccatccttccaagaacgagatctctgaagctgttagctgttctgacccttccattttatctaatggaacaaaggtaatatccaccagtaagggcacaaaacttgaagacacattgtattctcctagagttcactcatcacttgctacagaacgttttcagagtgcccatgatgatgccttcaaagtggctgtgcaggcctcatcgtaccttagccaaagtgaatccttggttcagtcatcctcttgtctaccttccagaagcaatgaggtctcttctactaatctgtatggaagttcagttgactccttggtaagatctgcacaggaaaaaactgaatgtgatgggaaacatgtggatcataaatctgaagtgacaaaggacagaattttaccttctgctattcctactgacatgcttcaaagtgctataagtaaaaatggtggagttatgaaaaatggtggtggtgaatgttatgtatacaataggaacctactgggaggaacgtcgtatgaatggcctagtgtaacaccatctcattttgtatctcctcaaatgcaacaacgtccagctgcagcagacaggttgcatcttgatgttggttacagatggccaactcaatttaaccaaccctttcttcctgccaaccatcaggtgaggaatccgccaattgatgctggacacaatcaaatgttaccttctctagcagttccactaagttttgactggcctccagtttttagaggttatggtaaaaatgcttctgtaagctatgatccattgtataccccacagatgcaatcttctgcttggtcagggttccctgctcaactagtgcaaagagggggtatttgcagtgacagtgatgttgcggatgatactgaaagctattggttttctgaagaagaatcagatagtcgtgcacattctggaagagatattaatcaatactttggtggaggtgtgatgtactggagtcctgcagaacatgcaggaactggtttttccaggccaccatctcttagttcagatgatagtgcctgggcttggcatgaggctgatgttatacgagttgttgatgatgtagctaatggtattccatctacatacacaaatggtgtatcatcaccaccctccactccatcttgttctcaaaatgaatctttggatccagctgctcacttgataacagggaatgagatcaataatgaagctctgacttctccatcttcggtgcaagatagtcctgaagataaaataatgcaagttgcaaaggctgtgtcttgtggcagtgaagtagttaaggcagatacattgccatatgccatgctgcggccgatagttgttcctagtatatcacgaaggtcatcacgatctgagattaagggtgctcatgatcacaggaggagcccatgtgtaccatcaacaaggagggacatacctattctaagaagacctccatcaccagtagtacttagtgttcctcgcgtacctaggccaccacctccttcacctgctggagagtcaagaaaacgagggttccctatcgttagatccggcagctcaagtcctcgacattgggggatgagaggtttattttctgaagacaaaatttttcatagggctcagttttgcttggatggtcctgaagttgtatggccttcatggggtaacaagggtacttctggtacattggtgcaaacaattgaggatactgttttgcaggaccaccttgttaagatttcacagctatcttgtgatcaacatccagatgtggcattgcctgtacagccactagatatgctaaatggttcgtctcacaaggcatccctctctttgatgcacaatgctctacatgaagaaatagatcaattctgtaagcaggttgctgctggtaatctggtgaggaggccctatataaactgggctgtcaaaagagtcacccgttgcctgcaggttctgtggcctcgctcccgtacaaatctatttggctcaaatgccactggtctggctcttccaactagtgatgttgatcttgtggttagtcttcctcctgtccgaaacctggaacctattaaagaagctggaattttggaaggccgtaatggcatcaaggaaacatgtctacagcatgcagcaaggtgtcttactaaccaggactgggttagaagtgattcccttaaaacagttgaaaacacagctatacctgtgatcatgcttgtagcggatgtaccctgtgacacgaatatgtccaatgagtattcttcagtactagatggctcacaagactattcagttaacatgcttggagaacaagggagtcctcctcggtctgacacctctagttcagaaggcagcaacatgctgatgtgctcaaaattgaataaggatgattgtgatattgtgcagtcaattcgtcttgatataagtttcaaatcgccatcccatacaggactgcagactactgagttggtacgtgagttgagccagcaatttcctgcagttatacctcttgccttgattctcaagaagtttttggctgaccggagtttggaccacccctattcaggtggtctgagctcttactgtttggtgctgttaattgttcgttttctccagcatgagcatcatcttggtcgacctattaataaaaatctgggcagccttttgatggatttcttgtacttctttgggaacatatttgatccacgccatatgcgcatttctatccaaggaagtggaatttatttgaatcgagaaagagggcaaagcattgacccgattcacatagatgatccacattgccctgctaacaatgtgggcaggaattgtttccgcattcaccaatgtattaaggcatttgctgatgcgtttgctgttcttgagaatgagctactgcagttcagttcagaatgtagcatgcctgtatcttcattcaatatactaaagaaaataatcccaagtattgattctgatgagctgtagctataaaaaagaggtacgattccacagaatacaattgatgacagggtggaatgacctgtgctgccttctagacacactgatgtctatgcagctgctcagaagcctcagtgtggcaagtttgatacctctggaatagaccaaaaaatagaccggcaagatggcaatattcaaacgtgagctcttgtgtgttcatgcaatggcacatgatgccttgctccctgatcgagcttcttgatgttcagatctctgactgaggtaaattggcttactcaagaacaaggtggtgaattggctttctcatgaacaaggcgttgctgcacacagactactgacgtggctgttcttgcacctttctgaataagcccattcatgtaatgtttggtaaatgcaaaccgcatgattatccgcttgatactgtgattgatagatgcttcacctcgtgccaatattctgtgttccaatgccaagtcacatattctgagcagcaactggagatttgctcatgtaccgattcttcaaggtcctaggatcatttggggtgatgaagattgtgaaatacatgtggaggggtacttatatggagatgcatggtcttagtaattaagcggtcaagaacttatggtcacctgatgaaaacaaggatggttgtgaagagaacggagtagtggcatcagctatcagggaaagggaagtgctattgacatcatggctgacccctttcagattatcgcgctgagatcttcctggcgaggattgggagctacgagccagatatccttgacggaaatgtttgcttggacagcgtaaaccggaaagtaccggcgatgatattgatgatgataatcgcactgctctctattgtcatactgttgtctgcactcttcagcgacatgtcttgtgccttttcaacgtgcgaaatgtgagcaattgctcttgtaaagctgcactatttcactaaaacattattgtttgggttatttagatccatggtattactatttatctatttggaaacttacattacaattttccctggatgtacccgatccatgccatttcctacgcttctccactcggcagattgttgaatcgtatcccaaaatctctcccattgtcgtctccatgaattgctcatctcacctctctaccatggagggtttagggtttatatctttctatcaggttaaactggttggtgtatataacttaatatggtattagatgtctcgaatttaaatcctagttagtataattaaataaaaataaata

SEQ ID NO: 61640 - DNA, 5888 bp, Zea Mays
ccgcaaaccaagcaagaccggaagagcgcccaggcccaccacagcggccactcctcccccattcccgagtcccgaccaaccaccggcaccgacgcggccgctccccagcatggcctccaccgccgccgcgccgcgcaccacgaaggagctcatggacgccctcaccgcgcacctctctctctaccacgccgccgcgaaccctagccccgccaccgctgctgcctctacctcctcctcgtcaccgcgcgctgcgatcctccggtggctcgcctccctctcccccgccgcgcgcgctgcggctgccacctccctcctctcccccgccgcggctgccgcgctgctctccatggtccgccggctccgcctccgcggccactcctccttcttcgtgctccactcctcgtccccgtccacctccgcgcgcggagccgaggagccaaccgtcctctcgcgcctctcccggggcctcctcgcccgcgccgccgccagctcccgggcgcaggcgctcctcttcgccaacaccctcctcttcccctcgtcgcccgcatcgtcgcggcgccccgacgtgatcaccgtcgccgaagccttcgtcgctgacctcgacggctttgtcgcagccatggatgagatctctggcgggaggttcctctgctgcggggagggggaagtggacctggccgcgctggcgtgtcaagatttcccggagctgccctggcttaatgccaaggggtactacgtgatcgaggagtttctggccaataggttggatatcgcactgcgaatgtcgtgggcagcggcagggggtgggtcagctggagggagaaaggcggtgagaattgggaagagtgcgaaggagaaggctgggcttgctgcaaacgcgttctggagggagaagggcattctgtcttgcagcaagaagtctgtattttataaagagttgaaaagactgaaactagttgaggagatagtctgtttgaagagcaacattacttgctgcagcggtgatgcaatctttttcacttcattagtgtcggctgctactgctgctggtgatgtacttatgaaattacaagggcttctcatggtggtgtcgacagaaagtataaatcttgaacttattggggatgaagcccccaaaaagaaagatgttgaaaagaccagtggaggttctcggaaaggaaagaagaagtctaacaccttgaaaaagctaacgacatctgctaagccatctaagttaacctttttccaggataatggatgcagtagttcagataatcgcaattgtagtcctttaccaaaccattgtgctccatctgttgaaggcactgctgctggacctccatctgaaaaaactccttacaaggaaattgtaccaacaacgaaggttgtaagcattactttgccaatctgttttgtttggttgttcatttattcatgacttatgagggacatctcgatattttaggaacaaactgtctcgttggatggttgcaaaaatcaatgtaacaaaaagaagaacaagcggaaagggaaaacaaaactatcaaatccgatgaggcctgagagcccaagatctaccaaattaaaaacagttgttccccatagtgctgcagaggccttgcatgaagctgctaaagaggctgatgtctcacctcatcacccatcgtatgtccatccttccaagaacgagatctctgaagctgttagctgttctgacccttccattttatctaatggaacaaaggtaatatccaccagtaagggcacaaaacttgaagacacattgtattctcctagagttcactcatcacttgctacagaacgttttcagagtgcccatgatgatgccttcaaagtggctgtgcaggcctcatcgtaccttagccaaagtgaatccttggttcagtcatcctcttgtctaccttccagaagcaatgaggtctcttctactaatctgtatggaagttcagttgactccttggtaagatctgcacaggaaaaaactgaatgtgatgggaaacatgtggatcataaatctgaagtgacaaaggacagaattttaccttctgctattcctactgacatgcttcaaagtgctataagtaaaaatggtggagttatgaaaaatggtggtggtgaatgttatgtatacaataggaacctactgggaggaacgtcgtatgaatggcctagtgtaacaccatctcattttgtatctcctcaaatgcaacaacgtccagctgcagcagacaggttgcatcttgatgttggttacagatggccaactcaatttaaccaaccctttcttcctgccaaccatcaggtgaggaatccgccaattgatgctggacacaatcaaatgttaccttctctagcagttccactaagttttgactggcctccagtttttagaggttatggtaaaaatgcttctgtaagctatgatccattgtataccccacagatgcaatcttctgcttggtcagggttccctgctcaactagtgcaaagagggggtatttgcagtgacagtgatgttgcggatgatactgaaagctattggttttctgaagaagaatcagatagtcgtgcacattctggaagagatattaatcaatactttggtggaggtgtgatgtactggagtcctgcagaacatgcaggaactggtttttccaggccaccatctcttagttcagatgatagtgcctgggcttggcatgaggctgatgttatacgagttgttgatgatgtagctaatggtattccatctacatacacaaatggtgtatcatcaccaccctccactccatcttgttctcaaaatgaatctttggatccagctgctcacttgataacagggaatgagatcaataatgaagctctgacttctccatcttcggtgcaagatagtcctgaagataaaataatgcaagttgcaaaggctgtgtcttgtggcagtgaagtagttaaggcagatacattgccatatgccatgctgcggccgatagttgttcctagtatatcacgaaggtcatcacgatctgagattaagggtgctcatgatcacaggaggagcccatgtgtaccatcaacaaggagggacatacctattctaagaagacctccatcaccagtagtacttagtgttcctcgcgtacctaggccaccacctccttcacctgctggagagtcaagaaaacgagggttccctatcgttagatccggcagctcaagtcctcgacattgggggatgagaggtttattttctgaagacaaaatttttcatagggctcagttttgcttggatggtcctgaagttgtatggccttcatggggtaacaagggtacttctggtacattggtgcaaacaattgaggatactgttttgcaggaccaccttgttaagatttcacagctatcttgtgatcaacatgtaagggtgtagtttcaaatcatccctcaatagtgagaatgattgtttattcaacttttctgtctttctaaaatatacttctgcagccagatgtggcattgcctgtacagccactagatatgctaaatggttcgtctcacaaggcatccctctctttgatgcacaatgctctacatgaagaaatagatcaattctgtaagcaggttctgtggcctcgctcccgtacaaatctatttggctcaaatgccactggtctggctcttccaactagtgatgttgatcttgtggttagtcttcctcctgtccgaaacctggaacctattaaagaagctggaattttggaaggccgtaatggcatcaaggaaacatgtctacagcatgcagcaaggtgtcttactaaccaggactgggttagaagtgattcccttaaaacagttgaaaacacagctatacctgtgatcatgcttgtagcggatgtaccctgtgacacgaatatgtccaatgagtattcttcagtactagatggctcacaagactattcagttaacatgcttggagaacaagggagtcctcctcggtctgacacctctagttcagaaggcagcaacatgctgatgtgctcaaaattgaataaggatgattgtgatattgtgcagtcaattcgtcttgatataagtttcaaatcgccatcccatacaggactgcagactactgagttggtacgtgagttgagccagcaatttcctgcagttatacctcttgccttgattctcaagaagtttttggctgaccggagtttggaccacccctattcaggtggtctgagctcttactgtttggtgctgttaattgttcgttttctccagcatgagcatcatcttggtcgacctattaataaaaatctgggcagccttttgatggatttcttgtacttctttgggaacatatttgatccacgccatatgcgcatttctatccaaggaagtggaatttatttgaatcgagaaagagggcaaagcattgacccgattcacatagatgatccacattgccctgctaacaatgtgggcaggaattgtttccgcattcaccaatgtattaaggcatttgctgatgcgtttgctgttcttgagaatgagctactgcagttcagttcagaatgtagcatgcctgtatcttcattcaatatactaaagaaaataatcccaagtattgattctgatgagctgtagctataaaaaagaggtacgattccacagaatacaattgatgacagggtggaatgacctgtgctgccttctagacacactgatgtctatgcagctgctcagaagcctcagtgtggcaagtttgatacctctggaatagaccaaaaaatagaccggcaagatggcaatattcaaacgtgagctcttgtgtgttcatgcaatggcacatgatgccttgctccctgatcgagcttcttgatgttcagatctctgactgaggtaaattggcttactcaagaacaaggtggtgaattggctttctcatgaacaaggcgttgctgcacacagactactgacgtggctgttcttgcacctttctgaataagcccattcatgtaatgtttggtaaatgcaaaccgcatgattatccgcttgatactgtgattgatagatgcttcacctcgtgccaatattctgtgttccaatgccaagtcacatattctgagcagcaactggagatttgctcatgtaccgattcttcaaggtcctaggatcatttggggtgatgaagattgtgaaatacatgtggaggggtacttatatgatgaaaacaaggatggttgtgaagagaacggagtagtggcatcagctatcagggaaagggaagtgctattgacatcatggctgacccctttcagattatcgcgctgagatcttcctggcgaggattgggagctacgagccagatatccttgacggaaatgtttgcttggacagcgtaaaccggaaagtaccggcgatgatattgatgatgataatcgcactgctctctattgtcatactgttgtctgcactcttcagcgacatgtcttgtgccttttcaacgtgcgaaatgtgagcaattgctcttgtaaagctgcactatttcactaaaacattattgtttgggttatttagatccatggtattactatttatctatttggaaacttacattacaattttccctggatgtacccgatccatgccatttcctacgcttctccactcggcagattgttgaatcgtatcccaaaatctctcccattgtcgtctccatgaattgctcatctcacctctctaccatggagggtttagggtttatatctttctatcaggttaaactggttggtgtatataacttaatatggtattagatgtctcgaatttaaatcctagttagtataattaaataaaaataaata

SEQ ID NO: 61641 - DNA, 5830 bp, Zea Mays
ccgcaaaccaagcaagaccggaagagcgcccaggcccaccacagcggccactcctcccccattcccgagtcccgaccaaccaccggcaccgacgcggccgctccccagcatggcctccaccgccgccgcgccgcgcaccacgaaggagctcatggacgccctcaccgcgcacctctctctctaccacgccgccgcgaaccctagccccgccaccgctgctgcctctacctcctcctcgtcaccgcgcgctgcgatcctccggtggctcgcctccctctcccccgccgcgcgcgctgcggctgccacctccctcctctcccccgccgcggctgccgcgctgctctccatggtccgccggctccgcctccgcggccactcctccttcttcgtgctccactcctcgtccccgtccacctccgcgcgcggagccgaggagccaaccgtcctctcgcgcctctcccggggcctcctcgcccgcgccgccgccagctcccgggcgcaggcgctcctcttcgccaacaccctcctcttcccctcgtcgcccgcatcgtcgcggcgccccgacgtgatcaccgtcgccgaagccttcgtcgctgacctcgacggctttgtcgcagccatggatgagatctctggcgggaggttcctctgctgcggggagggggaagtggacctggccgcgctggcgtgtcaagatttcccggagctgccctggcttaatgccaaggggtactacgtgatcgaggagtttctggccaataggttggatatcgcactgcgaatgtcgtgggcagcggcagggggtgggtcagctggagggagaaaggcggtgagaattgggaagagtgcgaaggagaaggctgggcttgctgcaaacgcgttctggagggagaagggcattctgtcttgcagcaagaagtctgtattttataaagagttgaaaagactgaaactagttgaggagatagtctgtttgaagagcaacattacttgctgcagcggtgatgcaatctttttcacttcattagtgtcggctgctactgctgctggtgatgtacttatgaaattacaagggcttctcatggtggtgtcgacagaaagtataaatcttgaacttattggggatgaagcccccaaaaagaaagatgttgaaaagaccagtggaggttctcggaaaggaaagaagaagtctaacaccttgaaaaagctaacgacatctgctaagccatctaaggataatggatgcagtagttcagataatcgcaattgtagtcctttaccaaaccattgtgctccatctgttgaaggcactgctgctggacctccatctgaaaaaactccttacaaggaaattgtaccaacaacgaaggttgaacaaactgtctcgttggatggttgcaaaaatcaatgtaacaaaaagaagaacaagcggaaagggaaaacaaaactatcaaatccgatgaggcctgagagcccaagatctaccaaattaaaaacagttgttccccatagtgctgcagaggccttgcatgaagctgctaaagaggctgatgtctcacctcatcacccatcgtatgtccatccttccaagaacgagatctctgaagctgttagctgttctgacccttccattttatctaatggaacaaaggtaatatccaccagtaagggcacaaaacttgaagacacattgtattctcctagagttcactcatcacttgctacagaacgttttcagagtgcccatgatgatgccttcaaagtggctgtgcaggcctcatcgtaccttagccaaagtgaatccttggttcagtcatcctcttgtctaccttccagaagcaatgaggtctcttctactaatctgtatggaagttcagttgactccttggtaagatctgcacaggaaaaaactgaatgtgatgggaaacatgtggatcataaatctgaagtgacaaaggacagaattttaccttctgctattcctactgacatgcttcaaagtgctataagtaaaaatggtggagttatgaaaaatggtggtggtgaatgttatgtatacaataggaacctactgggaggaacgtcgtatgaatggcctagtgtaacaccatctcattttgtatctcctcaaatgcaacaacgtccagctgcagcagacaggttgcatcttgatgttggttacagatggccaactcaatttaaccaaccctttcttcctgccaaccatcaggtgaggaatccgccaattgatgctggacacaatcaaatgttaccttctctagcagttccactaagttttgactggcctccagtttttagaggttatggtaaaaatgcttctgtaagctatgatccattgtataccccacagatgcaatcttctgcttggtcagggttccctgctcaactagtgcaaagagggggtatttgcagtgacagtgatgttgcggatgatactgaaagctattggttttctgaagaagaatcagatagtcgtgcacattctggaagagatattaatcaatactttggtggaggtgtgatgtactggagtcctgcagaacatgcaggaactggtttttccaggccaccatctcttagttcagatgatagtgcctgggcttggcatgaggctgatgttatacgagttgttgatgatgtagctaatggtattccatctacatacacaaatggtgtatcatcaccaccctccactccatcttgttctcaaaatgaatctttggatccagctgctcacttgataacagggaatgagatcaataatgaagctctgacttctccatcttcggtgcaagatagtcctgaagataaaataatgcaagttgcaaaggctgtgtcttgtggcagtgaagtagttaaggcagatacattgccatatgccatgctgcggccgatagttgttcctagtatatcacgaaggtcatcacgatctgagattaagggtgctcatgatcacaggaggagcccatgtgtaccatcaacaaggagggacatacctattctaagaagacctccatcaccagtagtacttagtgttcctcgcgtacctaggccaccacctccttcacctgctggagagtcaagaaaacgagggttccctatcgttagatccggcagctcaagtcctcgacattgggggatgagaggtttattttctgaagacaaaatttttcatagggctcagttttgcttggatggtcctgaagttgtatggccttcatggggtaacaagggtacttctggtacattggtgcaaacaattgaggatactgttttgcaggaccaccttgttaagatttcacagctatcttgtgatcaacatccagatgtggcattgcctgtacagccactagatatgctaaatggttcgtctcacaaggcatccctctctttgatgcacaatgctctacatgaagaaatagatcaattctgtaagcaggttgctgctggtaatctggtgaggaggccctatataaactgggctgtcaaaagagtcacccgttgcctgcaggttctgtggcctcgctcccgtacaaatctatttggctcaaatgccactggtctggctcttccaactagtgatgttgatcttgtggttagtcttcctcctgtccgaaacctggaacctattaaagaagctggaattttggaaggccgtaatggcatcaaggaaacatgtctacagcatgcagcaaggtgtcttactaaccaggactgggttagaagtgattcccttaaaacagttgaaaacacagctatacctgtgatcatgcttgtagcggatgtaccctgtgacacgaatatgtccaatgagtattcttcagtactagatggctcacaagactattcagttaacatgcttggagaacaagggagtcctcctcggtctgacacctctagttcagaaggcagcaacatgctgatgtgctcaaaattgaataaggatgattgtgatattgtgcagtcaattcgtcttgatataagtttcaaatcgccatcccatacaggactgcagactactgagttggtacgtgagttgagccagcaatttcctgcagttatacctcttgccttgattctcaagaagtttttggctgaccggagtttggaccacccctattcaggtggtctgagctcttactgtttggtgctgttaattgttcgttttctccagcatgagcatcatcttggtcgacctattaataaaaatctgggcagccttttgatggatttcttgtacttctttgggaacatatttgatccacgccatatgcgcatttctatccaaggaagtggaatttatttgaatcgagaaagagggcaaagcattgacccgattcacatagatgatccacattgccctgctaacaatgtgggcaggaattgtttccgcattcaccaatgtattaaggcatttgctgatgcgtttgctgttcttgagaatgagctactgcagttcagttcagaatgtagcatgcctgtatcttcattcaatatactaaagaaaataatcccaagtattgattctgatgagctgtagctataaaaaagaggtacgattccacagaatacaattgatgacagggtggaatgacctgtgctgccttctagacacactgatgtctatgcagctgctcagaagcctcagtgtggcaagtttgatacctctggaatagaccaaaaaatagaccggcaagatggcaatattcaaacgtgagctcttgtgtgttcatgcaatggcacatgatgccttgctccctgatcgagcttcttgatgttcagatctctgactgaggtaaattggcttactcaagaacaaggtggtgaattggctttctcatgaacaaggcgttgctgcacacagactactgacgtggctgttcttgcacctttctgaataagcccattcatgtaatgtttggtaaatgcaaaccgcatgattatccgcttgatactgtgattgatagatgcttcacctcgtgccaatattctgtgttccaatgccaagtcacatattctgagcagcaactggagatttgctcatgtaccgattcttcaaggtcctaggatcatttggggtgatgaagattgtgaaatacatgtggaggggtacttatatggagatgcatggtcttagtaattaagcggtcaagaacttatggtcacctgatgaaaacaaggatggttgtgaagagaacggagtagtggcatcagctatcagggaaagggaagtgctattgacatcatggctgacccctttcagattatcgcgctgagatcttcctggcgaggattgggagctacgagccagatatccttgacggaaatgtttgcttggacagcgtaaaccggaaagtaccggcgatgatattgatgatgataatcgcactgctctctattgtcatactgttgtctgcactcttcagcgacatgtcttgtgccttttcaacgtgcgaaatgtgagcaattgctcttgtaaagctgcactatttcactaaaacattattgtttgggttatttagatccatggtattactatttatctatttggaaacttacattacaattttccctggatgtacccgatccatgccatttcctacgcttctccactcggcagattgttgaatcgtatcccaaaatctctcccattgtcgtctccatgaattgctcatctcacctctctaccatggagggtttagggtttatatctttctatcaggttaaactggttggtgtatataacttaatatggtattagatgtctcgaatttaaatcctagttagtataattaaataaaaataaata

SEQ ID NO: 61642 - DNA, 5673 bp, Zea Mays
caaaactctctccgctgctccgcaaaccaagcaagaccggaagagcgcccaggcccaccacagcggccactcctcccccattcccgagtcccgaccaaccaccggcaccgacgcggccgctccccagcatggcctccaccgccgccgcgccgcgcaccacgaaggagctcatggacgccctcaccgcgcacctctctctctaccacgccgccgcgaaccctagccccgccaccgctgctgcctctacctcctcctcgtcaccgcgcgctgcgatcctccggtggctcgcctccctctcccccgccgcgcgcgctgcggctgccacctccctcctctcccccgccgcggctgccgcgctgctctccatggtccgccggctccgcctccgcggccactcctccttcttcgtgctccactcctcgtccccgtccacctccgcgcgcggagccgaggagccaaccgtcctctcgcgcctctcccggggcctcctcgcccgcgccgccgccagctcccgggcgcaggcgctcctcttcgccaacaccctcctcttcccctcgtcgcccgcatcgtcgcggcgccccgacgtgatcaccgtcgccgaagccttcgtcgctgacctcgacggctttgtcgcagccatggatgagatctctggcgggaggttcctctgctgcggggagggggaagtggacctggccgcgctggcgtgtcaagatttcccggagctgccctggcttaatgccaaggggtactacgtgatcgaggagtttctggccaataggttggatatcgcactgcgaatgtcgtgggcagcggcagggggtgggtcagctggagggagaaaggcggtgagaattgggaagagtgcgaaggagaaggctgggcttgctgcaaacgcgttctggagggagaagggcattctgtcttgcagcaagaagtctgtattttataaagagttgaaaagactgaaactagttgaggagatagtctgtttgaagagcaacattacttgctgcagcggtgatgcaatctttttcacttcattagtgtcggctgctactgctgctggtgatgtacttatgaaattacaagggcttctcatggtggtgtcgacagaaagtataaatcttgaacttattggggatgaagcccccaaaaagaaagatgttgaaaagaccagtggaggttctcggaaaggaaagaagaagtctaacaccttgaaaaagctaacgacatctgctaagccatctaaggataatggatgcagtagttcagataatcgcaattgtagtcctttaccaaaccattgtgctccatctgttgaaggcactgctgctggacctccatctgaaaaaactccttacaaggaaattgtaccaacaacgaaggttgaacaaactgtctcgttggatggttgcaaaaatcaatgtaacaaaaagaagaacaagcggaaagggaaaacaaaactatcaaatccgatgaggcctgagagcccaagatctaccaaattaaaaacagttgttccccatagtgctgcagaggccttgcatgaagctgctaaagaggctgatgtctcacctcatcacccatcgtatgtccatccttccaagaacgagatctctgaagctgttagctgttctgacccttccattttatctaatggaacaaaggtaatatccaccagtaagggcacaaaacttgaagacacattgtattctcctagagttcactcatcacttgctacagaacgttttcagagtgcccatgatgatgccttcaaagtggctgtgcaggcctcatcgtaccttagccaaagtgaatccttggttcagtcatcctcttgtctaccttccagaagcaatgaggtctcttctactaatctgtatggaagttcagttgactccttggtaagatctgcacaggaaaaaactgaatgtgatgggaaacatgtggatcataaatctgaagtgacaaaggacagaattttaccttctgctattcctactgacatgcttcaaagtgctataagtaaaaatggtggagttatgaaaaatggtggtggtgaatgttatgtatacaataggaacctactgggaggaacgtcgtatgaatggcctagtgtaacaccatctcattttgtatctcctcaaatgcaacaacgtccagctgcagcagacaggttgcatcttgatgttggttacagatggccaactcaatttaaccaaccctttcttcctgccaaccatcaggtgaggaatccgccaattgatgctggacacaatcaaatgttaccttctctagcagttccactaagttttgactggcctccagtttttagaggttatggtaaaaatgcttctgtaagctatgatccattgtataccccacagatgcaatcttctgcttggtcagggttccctgctcaactagtgcaaagagggggtatttgcagtgacagtgatgttgcggatgatactgaaagctattggttttctgaagaagaatcagatagtcgtgcacattctggaagagatattaatcaatactttggtggaggtgtgatgtactggagtcctgcagaacatgcaggaactggtttttccaggccaccatctcttagttcagatgatagtgcctgggcttggcatgaggctgatgttatacgagttgttgatgatgtagctaatggtattccatctacatacacaaatggtgtatcatcaccaccctccactccatcttgttctcaaaatgaatctttggatccagctgctcacttgataacagggaatgagatcaataatgaagctctgacttctccatcttcggtgcaagatagtcctgaagataaaataatgcaagttgcaaaggctgtgtcttgtggcagtgaagtagttaaggcagatacattgccatatgccatgctgcggccgatagttgttcctagtatatcacgaaggtcatcacgatctgagattaagggtgctcatgatcacaggaggagcccatgtgtaccatcaacaaggagggacatacctattctaagaagacctccatcaccagtagtacttagtgttcctcgcgtacctaggccaccacctccttcacctgctggagagtcaagaaaacgagggttccctatcgttagatccggcagctcaagtcctcgacattgggggatgagaggtttattttctgaagacaaaatttttcatagggctcagttttgcttggatggtcctgaagttgtatggccttcatggggtaacaagggtacttctggtacattggtgcaaacaattgaggatactgttttgcaggaccaccttgttaagatttcacagctatcttgtgatcaacatatgtggcattgcctgtacagccactagatatgctaaatggttcgtctcacaaggcatccctctctttgatgcacaatgctctacatgaagaaatagatcaattctgtaagcaggttgctgctggtaatctggtgaggaggccctatataaactgggctgtcaaaagagtcacccgttgcctgcaggttctgtggcctcgctcccgtacaaatctatttggctcaaatgccactggtctggctcttccaactagtgatgttgatcttgtggttagtcttcctcctgtccgaaacctggaacctattaaagaagctggaattttggaaggccgtaatggcatcaaggaaacatgtctacagcatgcagcaaggtgtcttactaaccaggactgggttagaagtgattcccttaaaacagttgaaaacacagctatacctgtgatcatgcttgtagcggatgtaccctgtgacacgaatatgtccaatgagtattcttcagtactagatggctcacaagactattcagttaacatgcttggagaacaagggagtcctcctcggtctgacacctctagttcagaaggcagcaacatgctgatgtgctcaaaattgaataaggatgattgtgatattgtgcagtcaattcgtcttgatataagtttcaaatcgccatcccatacaggactgcagactactgagttggtacgtgagttgagccagcaatttcctgcagttatacctcttgccttgattctcaagaagtttttggctgaccggagtttggaccacccctattcaggtggtctgagctcttactgtttggtgctgttaattgttcgttttctccagcatgagcatcatcttggtcgacctattaataaaaatctgggcagccttttgatggatttcttgtacttctttgggaacatatttgatccacgccatatgcgcatttctatccaaggaagtggaatttatttgaatcgagaaagagggcaaagcattgacccgattcacatagatgatccacattgccctgctaacaatgtgggcaggaattgtttccgcattcaccaatgtattaaggcatttgctgatgcgtttgctgttcttgagaatgagctactgcagttcagttcagaatgtagcatgcctgtatcttcattcaatatactaaagaaaataatcccaagtattgattctgatgagctgtagctataaaaaagaggtacgattccacagaatacaattgatgacagggtggaatgacctgtgctgccttctagacacactgatgtctatgcagctgctcagaagcctcagtgtggcaagtttgatacctctggaatagaccaaaaaatagaccggcaagatggcaatattcaaacgtgagctcttgtgtgttcatgcaatggcacatgatgccttgctccctgatcgagcttcttgatgttcagatctctgactgagatgcttcacctcgtgccaatattctgtgttccaatgccaagtcacatattctgagcagcaactggagatttgctcatgtaccgattcttcaaggtcctaggatcatttggggtgatgaagattgtgaaatacatgtggaggggtacttatatggagatgcatggtcttagtaattaagcggtcaagaacttatggtcacctgatgaaaacaaggatggttgtgaagagaacggagtagtggcatcagctatcagggaaagggaagtgctattgacatcatggctgacccctttcagattatcgcgctgagatcttcctggcgaggattgggagctacgagccagatatccttgacggaaatgtttgcttggacagcgtaaaccggaaagtaccggcgatgatattgatgatgataatcgcactgctctctattgtcatactgttgtctgcactcttcagcgacatgtcttgtgccttttcaacgtgcgaaatgtgagcaattgctcttgtaaagctgcactatttcactaaaacattattgtttgggttatttagatccatggtattactatttatctatttggaaacttacattacaattttccctggatgtacccgatccatgccatttcctacgcttctccactcggcagattgttgaatcgtatcccaaaatctctcccattgtcgtctccatgaattgctcatctcacctctctaccatggagggtttagggtttatatctttctatcaggttaaactggttggtgtatataacttaatatggtattagatgtctcgaatttaaatcctagttagtataattaaataaaaataaata

SEQ ID NO: 61643 - DNA, 5908 bp, Zea Mays
caaaactctctccgctgctccgcaaaccaagcaagaccggaagagcgcccaggcccaccacagcggccactcctcccccattcccgagtcccgaccaaccaccggcaccgacgcggccgctccccagcatggcctccaccgccgccgcgccgcgcaccacgaaggagctcatggacgccctcaccgcgcacctctctctctaccacgccgccgcgaaccctagccccgccaccgctgctgcctctacctcctcctcgtcaccgcgcgctgcgatcctccggtggctcgcctccctctcccccgccgcgcgcgctgcggctgccacctccctcctctcccccgccgcggctgccgcgctgctctccatggtccgccggctccgcctccgcggccactcctccttcttcgtgctccactcctcgtccccgtccacctccgcgcgcggagccgaggagccaaccgtcctctcgcgcctctcccggggcctcctcgcccgcgccgccgccagctcccgggcgcaggcgctcctcttcgccaacaccctcctcttcccctcgtcgcccgcatcgtcgcggcgccccgacgtgatcaccgtcgccgaagccttcgtcgctgacctcgacggctttgtcgcagccatggatgagatctctggcgggaggttcctctgctgcggggagggggaagtggacctggccgcgctggcgtgtcaagatttcccggagctgccctggcttaatgccaaggggtactacgtgatcgaggagtttctggccaataggttggatatcgcactgcgaatgtcgtgggcagcggcagggggtgggtcagctggagggagaaaggcggtgagaattgggaagagtgcgaaggagaaggctgggcttgctgcaaacgcgttctggagggagaagggcattctgtcttgcagcaagaagtctgtattttataaagagttgaaaagactgaaactagttgaggagatagtctgtttgaagagcaacattacttgctgcagcggtgatgcaatctttttcacttcattagtgtcggctgctactgctgctggtgatgtacttatgaaattacaagggcttctcatggtggtgtcgacagaaagtataaatcttgaacttattggggatgaagcccccaaaaagaaagatgttgaaaagaccagtggaggttctcggaaaggaaagaagaagtctaacaccttgaaaaagctaacgacatctgctaagccatctaaggataatggatgcagtagttcagataatcgcaattgtagtcctttaccaaaccattgtgctccatctgttgaaggcactgctgctggacctccatctgaaaaaactccttacaaggaaattgtaccaacaacgaaggttgaacaaactgtctcgttggatggttgcaaaaatcaatgtaacaaaaagaagaacaagcggaaagggaaaacaaaactatcaaatccgatgaggcctgagagcccaagatctaccaaattaaaaacagttgttccccatagtgctgcagaggccttgcatgaagctgctaaagaggctgatgtctcacctcatcacccatcgtatgtccatccttccaagaacgagatctctgaagctgttagctgttctgacccttccattttatctaatggaacaaaggtaatatccaccagtaagggcacaaaacttgaagacacattgtattctcctagagttcactcatcacttgctacagaacgttttcagagtgcccatgatgatgccttcaaagtggctgtgcaggcctcatcgtaccttagccaaagtgaatccttggttcagtcatcctcttgtctaccttccagaagcaatgaggtctcttctactaatctgtatggaagttcagttgactccttggtaagatctgcacaggaaaaaactgaatgtgatgggaaacatgtggatcataaatctgaagtgacaaaggacagaattttaccttctgctattcctactgacatgcttcaaagtgctataagtaaaaatggtggagttatgaaaaatggtggtggtgaatgttatgtatacaataggaacctactgggaggaacgtcgtatgaatggcctagtgtaacaccatctcattttgtatctcctcaaatgcaacaacgtccagctgcagcagacaggttgcatcttgatgttggttacagatggccaactcaatttaaccaaccctttcttcctgccaaccatcaggtgaggaatccgccaattgatgctggacacaatcaaatgttaccttctctagcagttccactaagttttgactggcctccagtttttagaggttatggtaaaaatgcttctgtaagctatgatccattgtataccccacagatgcaatcttctgcttggtcagggttccctgctcaactagtgcaaagagggggtatttgcagtgacagtgatgttgcggatgatactgaaagctattggttttctgaagaagaatcagatagtcgtgcacattctggaagagatattaatcaatactttggtggaggtgtgatgtactggagtcctgcagaacatgcaggaactggtttttccaggccaccatctcttagttcagatgatagtgcctgggcttggcatgaggctgatgttatacgagttgttgatgatgtagctaatggtattccatctacatacacaaatggtgtatcatcaccaccctccactccatcttgttctcaaaatgaatctttggatccagctgctcacttgataacagggaatgagatcaataatgaagctctgacttctccatcttcggtgcaagatagtcctgaagataaaataatgcaagttgcaaaggctgtgtcttgtggcagtgaagtagttaaggcagatacattgccatatgccatgctgcggccgatagttgttcctagtatatcacgaaggtcatcacgatctgagattaagggtgctcatgatcacaggaggagcccatgtgtaccatcaacaaggagggacatacctattctaagaagacctccatcaccagtagtacttagtgttcctcgcgtacctaggccaccacctccttcacctgctggagagtcaagaaaacgagggttccctatcgttagatccggcagctcaagtcctcgacattgggggatgagaggtttattttctgaagacaaaatttttcatagggctcagttttgcttggatggtcctgaagttgtatggccttcatggggtaacaagggtacttctggtacattggtgcaaacaattgaggatactgttttgcaggaccaccttgttaagatttcacagctatcttgtgatcaacatccagatgtggcattgcctgtacagccactagatatgctaaatggttcgtctcacaaggcatccctctctttgatgcacaatgctctacatgaagaaatagatcaattctgtaagcaggttgctgctggtaatctggtgaggaggccctatataaactgggctgtcaaaagagtcacccgttgcctgcaggttctgtggcctcgctcccgtacaaatctatttggctcaaatgccactggtctggctcttccaactagtgatgttgatcttgtggttagtcttcctcctgtccgaaacctggaacctattaaagaagctggaattttggaaggccgtaatggcatcaaggaaacatgtctacagcatgcagcaaggtgtcttactaaccaggactgggttagaagtgattcccttaaaacagttgaaaacacagctatacctgtgatcatgcttgtagcggatgtaccctgtgacacgaatatgtccaatgagtattcttcagtactagatggctcacaagactattcagttaacatgcttggagaacaagggagtcctcctcggtctgacacctctagttcagaaggcagcaacatgctgatgtgctcaaaattgaataaggatgattgtgatattgtgcagtcaattcgtcttgatataagtttcaaatcgccatcccatacaggactgcagactactgagttggtaaatcagaagttcattatctatctgaatattttctctactctccataaaagttacttgtacgtgagttgagccagcaatttcctgcagttatacctcttgccttgattctcaagaagtttttggctgaccggagtttggaccacccctattcaggtggtctgagctcttactgtttggtgctgttaattgttcgttttctccagcatgagcatcatcttggtcgacctattaataaaaatctgggcagccttttgatggatttcttgtacttctttgggaacatatttgatccacgccatatgcgcatttctatccaaggaagtggaatttatttgaatcgagaaagagggcaaagcattgacccgattcacatagatgatccacattgccctgctaacaatgtgggcaggaattgtttccgcattcaccaatgtattaaggcatttgctgatgcgtttgctgttcttgagaatgagctactgcagttcagttcagaatgtagcatgcctgtatcttcattcaatatactaaagaaaataatcccaagtattgattctgatgagctgtagctataaaaaagaggtacgattccacagaatacaattgatgacagggtggaatgacctgtgctgccttctagacacactgatgtctatgcagctgctcagaagcctcagtgtggcaagtttgatacctctggaatagaccaaaaaatagaccggcaagatggcaatattcaaacgtgagctcttgtgtgttcatgcaatggcacatgatgccttgctccctgatcgagcttcttgatgttcagatctctgactgaggtaaattggcttactcaagaacaaggtggtgaattggctttctcatgaacaaggcgttgctgcacacagactactgacgtggctgttcttgcacctttctgaataagcccattcatgtaatgtttggtaaatgcaaaccgcatgattatccgcttgatactgtgattgatagatgcttcacctcgtgccaatattctgtgttccaatgccaagtcacatattctgagcagcaactggagatttgctcatgtaccgattcttcaaggtcctaggatcatttggggtgatgaagattgtgaaatacatgtggaggggtacttatatggagatgcatggtcttagtaattaagcggtcaagaacttatggtcacctgatgaaaacaaggatggttgtgaagagaacggagtagtggcatcagctatcagggaaagggaagtgctattgacatcatggctgacccctttcagattatcgcgctgagatcttcctggcgaggattgggagctacgagccagatatccttgacggaaatgtttgcttggacagcgtaaaccggaaagtaccggcgatgatattgatgatgataatcgcactgctctctattgtcatactgttgtctgcactcttcagcgacatgtcttgtgccttttcaacgtgcgaaatgtgagcaattgctcttgtaaagctgcactatttcactaaaacattattgtttgggttatttagatccatggtattactatttatctatttggaaacttacattacaattttccctggatgtacccgatccatgccatttcctacgcttctccactcggcagattgttgaatcgtatcccaaaatctctcccattgtcgtctccatgaattgctcatctcacctctctaccatggagggtttagggtttatatctttctatcaggttaaactggttggtgtatataacttaatatggtattagatgtctcgaatttaaatcctagttagtataattaaataaaaataaata

SEQ ID NO: 61644 - DNA, 4602 bp, Zea Mays
agcgcccaggcccaccacagcggccactcctcccccattcccgagtcccgaccaaccaccggcaccgacgcggccgctccccagcatggcctccaccgccgccgcgccgcgcaccacgaaggagctcatggacgccctcaccgcgcacctctctctctaccacgccgccgcgaaccctagccccgccaccgctgctgcctctacctcctcctcgtcaccgcgcgctgcgatcctccggtggctcgcctccctctcccccgccgcgcgcgctgcggctgccacctccctcctctcccccgccgcggctgccgcgctgctctccatggtccgccggctccgcctccgcggccactcctccttcttcgtgctccactcctcgtccccgtccacctccgcgcgcggagccgaggagccaaccgtcctctcgcgcctctcccggggcctcctcgcccgcgccgccgccagctcccgggcgcaggcgctcctcttcgccaacaccctcctcttcccctcgtcgcccgcatcgtcgcggcgccccgacgtgatcaccgtcgccgaagccttcgtcgctgacctcgacggctttgtcgcagccatggatgagatctctggcgggaggttcctctgctgcggggagggggaagtggacctggccgcgctggcgtgtcaagatttcccggagctgccctggcttaatgccaaggggtactacgtgatcgaggagtttctggccaataggttggatatcgcactgcgaatgtcgtgggcagcggcagggggtgggtcagctggagggagaaaggcggtgagaattgggaagagtgcgaaggagaaggctgggcttgctgcaaacgcgttctggagggagaagggatatgcggattggtggatgagactggagcctcggatgagagcaagtctcatgggggtattcttcgggaaaggtgcaatggccctggcaaatgagatggttgaaggatcagacagtgcctcaagggataatttaggtgaaccaggatcattcgtggcaaacgaatcttgtgaatgtacacggcagtctctgttcagaaagaattgtgcttcttccgttgatggtgcaaacattctgtcttgcagcaagaagtctgtattttataaagagttgaaaagactgaaactagttgaggagatagtctgtttgaagagcaacattacttgctgcagcggtgatgcaatctttttcacttcattagtgtcggctgctactgctgctggtgatgtacttatgaaattacaagggcttctcatggtggtgtcgacagaaagtataaatcttgaacttattggggatgaagcccccaaaaagaaagatgttgaaaagaccagtggaggttctcggaaaggaaagaagaagtctaacaccttgaaaaagctaacgacatctgctaagccatctaaggataatggatgcagtagttcagataatcgcaattgtagtcctttaccaaaccattgtgctccatctgttgaaggcactgctgctggacctccatctgaaaaaactccttacaaggaaattgtaccaacaacgaaggaacaaactgtctcgttggatggttgcaaaaatcaatgtaacaaaaagaagaacaagcggaaagggaaaacaaaactatcaaatccgatgaggcctgagagcccaagatctaccaaattaaaaacagttgttccccatagtgctgcagaggccttgcatgaagctgctaaagaggctgatgtctcacctcatcacccatcgtatgtccatccttccaagaacgagatctctgaagctgttagctgttctgacccttccattttatctaatggaacaaagaacgttttcagagtgcccatgatgatgccttcaaagtggctgtgcaggcctcatcgtaccttagccaaagtgaatccttggttcagtcatcctcttgtctaccttccagaagcaatgaggtctcttctactaatctgtatggaagttcagttgactccttggtaagatctgcacaggaaaaaactgaatgtgatgggaaacatgtggatcataaatctgaagtgacaaaggacagaattttaccttctgctattcctactgacatgcttcaaagtgctataagtaaaaatggtggagttatgaaaaatggtggtggtgaatgttatgtatacaataggaacctactgggaggaacgtcgtatgaatggcctagtgtaacaccatctcattttgtatctcctcaaatgcaacaacgtccagctgcagcagacaggttgcatcttgatgttggttacagatggccaactcaatttaaccaaccctttcttcctgccaaccatcaggtgaggaatccgccaattgatgctggacacaatcaaatgttaccttctctagcagttccactaagttttgactggcctccagtttttagaggttatggtaaaaatgcttctgtaagctatgatccattgtataccccacagatgcaatcttctgcttggtcagggttccctgctcaactagtgcaaagagggggtatttgcagtgacagtgatgttgcggatgatactgaaagctattggttttctgaagaagaatcagatagtcgtgcacattctggaagagatattaatcaatactttggtggaggtgtgatgtactggagtcctgcagaacatgcaggaactggtttttccaggccaccatctcttagttcagatgatagtgcctgggcttggcatgaggctgatgttatacgagttgttgatgatgtagctaatggtattccatctacatacacaaatggtgtatcatcaccaccctccactccatcttgttctcaaaatgaatctttggatccagctgctcacttgataacagggaatgagatcaataatgaagctctgacttctccatcttcggtgcaagatagtcctgaagataaaataatgcaagttgcaaaggctgtgtcttgtggcagtgaagtagttaaggcagatacattgccatatgccatgctgcggccgatagttgttcctagtatatcacgaaggtcatcacgatctgagattaagggtgctcatgatcacaggaggagcccatgtgtaccatcaacaaggagggacatacctattctaagaagacctccatcaccagtagtacttagtgttcctcgcgtacctaggccaccacctccttcacctgctggagagtcaagaaaacgagggttccctatcgttagatccggcagctcaagtcctcgacattgggggatgagaggtttattttctgaagacaaaatttttcatagggctcagttttgcttggatggtcctgaagttgtatggccttcatggggtaacaagggtacttctggtacattggtgcaaacaattgaggatactgttttgcaggaccaccttgttaagatttcacagctatcttgtgatcaacatccagatgtggcattgcctgtacagccactagatatgctaaatggttcgtctcacaaggcatccctctctttgatgcacaatgctctacatgaagaaatagatcaattctgtaagcaggttgctgctggtaatctggtgaggaggccctatataaactgggctgtcaaaagagtcacccgttgcctgcaggttctgtggcctcgctcccgtacaaatctatttggctcaaatgccactggtctggctcttccaactagtgatgttgatcttgtggttagtcttcctcctgtccgaaacctggaacctattaaagaagctggaattttggaaggccgtaatggcatcaaggaaacatgtctacagcatgcagcaaggtgtcttactaaccaggactgggttagaagtgattcccttaaaacagttgaaaacacagctatacctgtgatcatgcttgtagcggatgtaccctgtgacacgaatatgtccaatgagtattcttcagtactagatggctcacaagactattcagttaacatgcttggagaacaagggagtcctcctcggtctgacacctctagttcagaaggcagcaacatgctgatgtgctcaaaattgaataaggatgattgtgatattgtgcagtcaattcgtcttgatataagtttcaaatcgccatcccatacaggactgcagactactgagttggtacgtgagttgagccagcaatttcctgcagttatacctcttgccttgattctcaagaagtttttggctgaccggagtttggaccacccctattcaggtggtctgagctcttactgtttggtccgcagccacccttcgccgtgttgctgcagcaaccacaaacatctccatcctcttgcaaccatggtagggacctcatcgtatgttgaggagtgcgcccacgtcaaggaggtcgtggtctttcgcaagaagattgacgacatgctcgctgcgactcaggccggaaaaggaggctgccaacgcatgcgctcacatcaaggcagccactttctcctcgaacaggagaaaattgtcgtcgccctagagcagatggtcgtcgtcgcccgccagggtatgggcctataacaccccacggtaaccgtccctgca

SEQ ID NO: 61645 - DNA, 1486 bp, Zea Mays
gtgagtttgtcgatatctacggacaagtaagaaaagatggcgctgccatccatgagtcttgtggcaaagggtgtgcttcccttctcagcacgtacctcgagtggtgtcacacaaaggccggtgtcagtgactgcttccttggagcacaaaaccagcgatgccagaaggaagttcctaaaacttgcgcttgggaaccttggagttggactgcccaccttgttgggcgctaagaaagctctcgctgatgagcaaggcgtctcgtcctcgaggatgtcttattcgaggttccttgagtatcttgacaaggatagagtccgtgtgcagcttcctggtctaagccaggagcttcttcaaaaaacacctgggttcagcggagcagacttggcaaaccttctgaatgaagcagccattctggctggaagacggggaaggacagcaatttcttcaaaagagattgatgattctattgacagaattgtagctggtatggaagggaccgtgatgacagacgggaagagcaaaagtcttgttgcttaccatgaagttgggcatgcaatttgcggaactttgacgcctggccatgatcctgtccaaaaggttaccttagttccaaggggtcaagctcgtggtcttacatggtttatcccgatggatgacccaacactcatctccaggcagcaactttttgccagaattgttggcggccttggtggtagagctgctgaggaggtcatatttggagagcctgaggtgaccactggagctgctggtgacttgcagcaaattactggcttagccaagcagatggttgtgacattcggtatgtctgaaattggtccatggtctctgatggagggtggagcgcagagtggggacgtcatcatgagaatgatggcaaggaactccatgtcagagaagctcgcggaggacattgattcggccgtgaagcagttgtcggatgaggcctacgagatcgctttgaggcacattagaaacaacagggaggccattgacaaaatcgttgaggtgctcattgagaaggagacagtgaccggagacgagttccgggcgatcctttctgagtttgccgagatccctgttgagaaccgggttcccccagccacaccggcggccgcgctcccagcctaaaccctagccttgtaggggaggattttcttgttgtatggtgttcatattttggattcttggtgtacactaactctactaaatctgccggattttcggtacacgacatgtaagatgtaacttactcatggtgaattaatagtaaaatgtaattagattaaaataataggcctggcgcaacattttcagtttgtagcttcgcttctggcgagcgaaatctcttgctatatgttccacggttcctacttcataaaactatatgttctaattaagaacttgccattttgtttttggaactgatgggatcgggatcagcaagttgccacatttttaaaatgca

SEQ ID NO: 61646 - DNA, 2338 bp, Zea Mays
aggttgccctcttgagtgagtttgtcgatatctacggacaagtaagaaaagatggcgctgccatccatgagtcttgtggcaaagggtgtgcttcccttctcagcacgtacctcgagtggtgtcacacaaaggccggtgtcagtgactgcttccttggagcacaaaaccagcgatgccagaaggaagttcctaaaacttgcgcttgggaaccttggagttggactgcccaccttgttgggcgctaagaaagctctcgctgatgagcaaggcgtctcgtcctcgaggatgtcttattcgaggttccttgagtatcttgacaaggatagagtccgtgtgcagcttcctggtctaagccaggagcttcttcaaaagttgagggagaagaacatcgattttgctgctcacagcaaccaggaggactctggttctcttctgttcaaccttattggaaatttggcattcccgcttatccttatcggtggtctgtttttactttcaagaagggcacagggtggcctcggtggacccaatggtcctggctttccccttggttttggtcaatctagggccaagtttcagatggaacccaacactggtgttacatttgatgatgttgctggtgtcgatgaagcgaagcaagacttcatggaagtggttgagttcttgaagaaacccgaaaggttcactgctgttggtgctcgcattcctaagggtgttctgcttgtcggtcctcctgggacgggtaaaactttgcttgccaaggcaattgcaggagaggctggcgtgccatttttctcaatttcaggttctgaatttgtggagatgtttgttggtgttggagcttccagagttcgtgaccttttcaagaaggccaaggagaatgctccttgcatagtgtttgttgatgaaattgatgctgttggaaggcaaagaggtacaggtattggtggtggaaatgatgaaagggagcagactctcaatcaactactaactgagatggatggtttcgagggcaacactggaattattgttattgctgccactaaccgggctgacatattggattccgctttacttagacctgggcgttttgatagacaggtgtctgtcgacgttcctgatgtacgtggaaggacagagattctaaaagtgcatggtagcaacaagaaatttgattctgatgtttctcttgatgtcatagcaatgagaacacctgggttcagcggagcagacttggcaaaccttctgaatgaagcagccattctggctggaagacggggaaggacagcaatttcttcaaaagagattgatgattctattgacagaattgtagctggtatggaagggaccgtgatgacagacgggaagagcaaaagtcttgttgcttaccatgaagttgggcatgcaatttgcggaactttgacgcctggccatgatcctgtccaaaaggttaccttagttccaaggggtcaagctcgtggtcttacatggtttatcccgatggatgacccaacactcatctccaggcagcaactttttgccagaattgttggcggccttggtggtagagctgctgaggaggtcatatttggagagcctgaggtgaccactggagctgctggtgacttgcagcaaattactggcttagccaagcagatggttgtgacattcggtatgtctgaaattggtccatggtctctgatggagggtggagcgcagagtggggacgtcatcatgagaatgatggcaaggaactccatgtcagagaagctcgcggaggacattgattcggccgtgaagcagttgtcggatgaggcctacgagatcgctttgaggcacattagaaacaacagggaggccattgacaaaatcgttgaggtgctcattgagaaggagacagtgaccggagacgagttccgggcgatcctttctgagtttgccgagatccctgttgagaaccgggttcccccagccacaccggcggccgcgctcccagcctaaaccctagccttgtaggggaggattttcttgttgtatggtgttcatattttggattcttggtgtacactaactctactaaatctgccggattttcggtacacgacatgtaagatgtaacttactcatggtgaattaatagtaaaatgtaattagattaaaataataggcctggcgcaacattttcagtttgtagcttcgcttctggcgagcgaaatctcttgctatatgttccacggttcctacttcataaaactatatgttctaattaagaacttgccattttgtttttggaactgatgggatcgggatcagcaagttgccacatttttaaaatgca

SEQ ID NO: 61647 - DNA, 2406 bp, Zea Mays
tgcgcatcttcgatttgtgggttctgtaagaaaagatggcgctgccatccatgagtcttgtggcaaagggtgtgcttcccttctcagcacgtacctcgagtggtgtcacacaaaggccggtgtcagtgactgcttccttggagcacaaaaccagcgatgccagaaggaagttcctaaaacttgcgcttgggaaccttggagttggactgcccaccttgttgggcgctaagaaagctctcgctgatgagcaaggcgtctcgtcctcgaggatgtcttattcgaggttccttgagtatcttgacaaggatagagtgaagaaggttgatttgtttgagaatgggacaattgctattgtggaggccatttctcctgagcttggtaaccgcgtgcaaagagtccgtgtgcagcttcctggtctaagccaggagcttcttcaaaagttgagggagaagaacatcgattttgctgctcacagcaaccaggaggactctggttctcttctgttcaaccttattggaaatttggcattcccgcttatccttatcggtggtctgtttttactttcaagaagggcacagggtggcctcggtggacccaatggtcctggctttccccttggttttggtcaatctagggccaagtttcagatggaacccaacactggtgttacatttgatgatgttgctggtgtcgatgaagcgaagcaagacttcatggaagtggttgagttcttgaagaaacccgaaaggttcactgctgttggtgctcgcattcctaagggtgttctgcttgtcggtcctcctgggacgggtaaaactttgcttgccaaggcaattgcaggagaggctggcgtgccatttttctcaatttcaggttctgaatttgtggagatgtttgttggtgttggagcttccagagttcgtgaccttttcaagaaggccaaggagaatgctccttgcatagtgtttgttgatgaaattgatgctgttggaaggcaaagaggtacaggtattggtggtggaaatgatgaaagggagcagactctcaatcaactactaactgagatggatggtttcgagggcaacactggaattattgttattgctgccactaaccgggctgacatattggattccgctttacttagacctgggcgttttgatagacaggtgtctgtcgacgttcctgatgtacgtggaaggacagagattctaaaagtgcatggtagcaacaagaaatttgattctgatgtttctcttgatgtcatagcaatgagaacacctgggttcagcggagcagacttggcaaaccttctgaatgaagcagccattctggctggaagacggggaaggacagcaatttcttcaaaagagattgatgattctattgacagaattgtagctggtatggaagggaccgtgatgacagacgggaagagcaaaagtcttgttgcttaccatgaagttgggcatgcaatttgcggaactttgacgcctggccatgatcctgtccaaaaggttaccttagttccaaggggtcaagctcgtggtcttacatggtttatcccgatggatgacccaacactcatctccaggcagcaactttttgccagaattgttggcggccttggtggtagagctgctgaggaggtcatatttggagagcctgaggtgaccactggagctgctggtgacttgcagcaaattactggcttagccaagcagatggttgtgacattcggtatgtctgaaattggtccatggtctctgatggagggtggagcgcagagtggggacgtcatcatgagaatgatggcaaggaactccatgtcagagaagctcgcggaggacattgattcggccgtgaagcagttgtcggatgaggcctacgagatcgctttgaggcacattagaaacaacagggaggccattgacaaaatcgttgaggtgctcattgagaaggagacagtgaccggagacgagttccgggcgatcctttctgagtttgccgagatccctgttgagaaccgggttcccccagccacaccggcggccgcgctcccagcctaaaccctagccttgtaggggaggattttcttgttgtatggtgttcatattttggattcttggtgtacactaactctactaaatctgccggattttcggtacacgacatgtaagatgtaacttactcatggtgaattaatagtaaaatgtaattagattaaaataataggcctggcgcaacattttcagtttgtagcttcgcttctggcgagcgaaatctcttgctatatgttccacggttcctacttcataaaactatatgttctaattaagaacttgccattttgtttttggaactgatgggatcgggatcagcaagttgccacatttttaaaatgca

SEQ ID NO: 61648 - DNA, 1814 bp, Zea Mays
ggttaactgatatgcggtcctcagaccctgcatgtgttgcaagtcgtggagtggcttcatgccacccaaacacaggagttgcaatgtgaaatcatgaattcgtctggaagtagaaacgggcgctctgggttacaattacaaacagctaccgctgctaccagccactagccgtcgccctccttccaatcttacgcgaatcaagtcattaaaaataaaaaaacataataaaaaacgacacaagaaaagcacaaactccaatcgctctggacatttcatagatttttgcactggccaggaggaattccggacatttcacccgcctcaagacctggcgactactcccgtctatgtcatgtgggctcatctcttccttatcgacgctgtggccgcccagccgcccacgttgcctcctccccgagacaatccccacgccaccgcgcaccggagacgaacctgaggagagaaaaatctgcgcccgtcagtgtgctcgcctacttctacgctccgctcgttcccccaaatagttcctcggcttcgctcctttcccctccctgctccggctccggttcgcacacaggtgtctgtcgacgttcctgatgtacgtggaaggacagagattctaaaagtgcatggtagcaacaagaaatttgattctgatgtttctcttgatgtcatagcaatgagaacacctgggttcagcggagcagacttggcaaaccttctgaatgaagcagccattctggctggaagacggggaaggacagcaatttcttcaaaagagattgatgattctattgacagaattgtagctggtatggaagggaccgtgatgacagacgggaagagcaaaagtcttgttgcttaccatgaagttgggcatgcaatttgcggaactttgacgcctggccatgatcctgtccaaaaggttaccttagttccaaggggtcaagctcgtggtcttacatggtttatcccgatggatgacccaacactcatctccaggcagcaactttttgccagaattgttggcggccttggtggtagagctgctgaggaggtcatatttggagagcctgaggtgaccactggagctgctggtgacttgcagcaaattactggcttagccaagcagatggttgtgacattcggtatgtctgaaattggtccatggtctctgatggagggtggagcgcagagtggggacgtcatcatgagaatgatggcaaggaactccatgtcagagaagctcgcggaggacattgattcggccgtgaagcagttgtcggatgaggcctacgagatcgctttgaggcacattagaaacaacagggaggccattgacaaaatcgttgaggtgctcattgagaaggagacagtgaccggagacgagttccgggcgatcctttctgagtttgccgagatccctgttgagaaccgggttcccccagccacaccggcggccgcgctcccagcctaaaccctagccttgtaggggaggattttcttgttgtatggtgttcatattttggattcttggtgtacactaactctactaaatctgccggattttcggtacacgacatgtaagatgtaacttactcatggtgaattaatagtaaaatgtaattagattaaaataataggcctggcgcaacattttcagtttgtagcttcgcttctggcgagcgaaatctcttgctatatgttccacggttcctacttcataaaactatatgttctaattaagaacttgccattttgtttttggaactgatgggatcgggatcagcaagttgccacatttttaaaatgca

SEQ ID NO: 61649 - DNA, 2036 bp, Zea Mays
ggttaactgatatgcggtcctcagaccctgcatgtgttgcaagtcgtggagtggcttcatgccacccaaacacaggagttgcaatgtgaaatcatgaattcgtctggaagtagaaacgggcgctctgggttacaattacaaacagctaccgctgctaccagccactagccgtcgccctccttccaatcttacgcgaatcaagtcattaaaaataaaaaaacataataaaaaacgacacaagaaaagcacaaactccaatcgctctggacatttcatagatttttgcactggccaggaggaattccggacatttcacccgcctcaagacctggcgactactcccgtctatgtcatgtgggctcatctcttccttatcgacgctgtggccgcccagccgcccacgttgcctcctccccgagacaatccccacgccaccgcgcaccggagacgaacctgaggagagaaaaatctgcgcccgtcagtgtgctcgcctacttctacgctccgctcgttcccccaaatagttcctcggcttcgctcctttcccctccctgctccggctccggttcgcacacagtaagaaaagatggcgctgccatccatgagtcttgtggcaaagggtgtgcttcccttctcagcacgtacctcgagtggtgtcacacaaaggccggtgtcagtgactgcttccttggagcacaaaaccagcgatgccagaaggaagttcctaaaacttgcgcttgggaaccttggagttggactgcccaccttgttgggcgctaagaaagctctcgctgatgagcaaggcgtctcgtcctcgaggatgtcttattcgaggttccttgagtatcttgacaaggatagagtccgtgtgcagcttcctggtctaagccaggagcttcttcaaaaaacacctgggttcagcggagcagacttggcaaaccttctgaatgaagcagccattctggctggaagacggggaaggacagcaatttcttcaaaagagattgatgattctattgacagaattgtagctggtatggaagggaccgtgatgacagacgggaagagcaaaagtcttgttgcttaccatgaagttgggcatgcaatttgcggaactttgacgcctggccatgatcctgtccaaaaggttaccttagttccaaggggtcaagctcgtggtcttacatggtttatcccgatggatgacccaacactcatctccaggcagcaactttttgccagaattgttggcggccttggtggtagagctgctgaggaggtcatatttggagagcctgaggtgaccactggagctgctggtgacttgcagcaaattactggcttagccaagcagatggttgtgacattcggtatgtctgaaattggtccatggtctctgatggagggtggagcgcagagtggggacgtcatcatgagaatgatggcaaggaactccatgtcagagaagctcgcggaggacattgattcggccgtgaagcagttgtcggatgaggcctacgagatcgctttgaggcacattagaaacaacagggaggccattgacaaaatcgttgaggtgctcattgagaaggagacagtgaccggagacgagttccgggcgatcctttctgagtttgccgagatccctgttgagaaccgggttcccccagccacaccggcggccgcgctcccagcctaaaccctagccttgtaggggaggattttcttgttgtatggtgttcatattttggattcttggtgtacactaactctactaaatctgccggattttcggtacacgacatgtaagatgtaacttactcatggtgaattaatagtaaaatgtaattagattaaaataataggcctggcgcaacattttcagtttgtagcttcgcttctggcgagcgaaatctcttgctatatgttccacggttcctacttcataaaactatatgttctaattaagaacttgccattttgtttttggaactgatgggatcgggatcagcaagttgccacatttttaaaatgca

SEQ ID NO: 61650 - DNA, 1334 bp, Zea Mays
gaaaatgcaagttttttttgtttgtaaaaggaatcccattaagtttactgctgctaccatttaaagggcagaactgccggtcttcaagctctttgttactcctgatcatctgtggcacaattgtcatcgggcaaaatgccatcagtttatctctacatccctaacattatcgggtattttaggatcatcataaatttcattgcatttgcggtttgctattccaacaaggctctctttgctgtcttgtacttcttcagctttgtccttgatggtgtggatggttggtttgcacggaagtttaatcaagcatcaacatttggagcagtgttggacatggttacagatagggttagcactgcttgtttattggcccttctttcccagttttacagacctggtttagtcttcttgatattgctcgggttggatattacgagccactggtttcagatgtacagttctttcttgtcaggtaagactagccacaaggatgtaaaacacacaggcaattggcttctgaaattatattatgggtacaggccattcatggccttctgctgtgtttcttgtgaggttttgtatattatcctctttctctttgctgatgagaagtcaacaagcttgcttagtgcatgcaaaggtctcctgaaccaaagccccatcattatcttggtgtttatttccacattagttggctgggcagtgaaacaagtcaccaatgtcatccagatgaaaacggctgcggatgcatgtgttgtgtacgacctgaagcgcagcaaatgaaaagcatgaagggaaaactctacggtttaactcagtcctgtgtggacgtatccaaagggaaaaactctccgaggggatacgtcttacgttccttgacatctttctgatgatgccttacgtggggccagaggatgacatgccgtgggaagagcagcatgtcataaagagaaccaacgcaaacaattgttttgtgaaggcggctattgatttgttgtcaagagtgttttattatgtcatacaaatgatgaattgatgatggtacctttgttacctgggctagccctttgtgtcaacatgaaagatgcttacgagccacatgttcccttctgaaatgaaggttttgagttgcaaaaatttacatattcccttctgaaagccagcaactgcacctcgagagggtttaatggttacttttaccccccaaaataggcactagctattattcggatgatttcccttttgctccttattaaacatcctttggttcagttttattgatagttttaatttttttacatgatctcccttagttcaaaaaaataaaattaaaa

SEQ ID NO: 61651 - DNA, 1789 bp, Zea Mays
tttgaagcacatctttttaaggtgttgccgaatagagagattgaatacctatcgttaaaatataattcataatcacaactgacgatgtgatatcgtgttagttattgagtaatttttgtagcctctttttgtgtcaacctccatctacatggctgctttgttctctagtgttttaaaacttctacccagaaagtagttaaaaatgatatgaggatgcccgaaaatgaatatattgacacaacaccaatatttatgttgaatcttatacagcaggaagggaggtgagcacctattgtaggtgtgggattaatctggacttggataaatgaagtataatgcaagaaatgtgggcaaataataccttggctgtgtggtggagaacaaggtgttttgcaactaacggctcttacgtttacaagtttgtgttttctttaacccttgaacattgaagtgaattgtgttgccacattgtttatgcattataggaatcccattaagtttactgctgctaccatttaaagggcagaactgccggtcttcaagctctttgttactcctgatcatctgtggcacaattgtcatcgggcaaaatgccatcagtttatctctacatccctaacattatcgggtattttaggatcatcataaatttcattgcatttgcggtttgctattccaacaaggctctctttgctgtcttgtacttcttcagctttgtccttgatggtgtggatggttggtttgcacggaagtttaatcaagcatcaacatttggagcagtgttggacatggttacagatagggttagcactgcttgtttattggcccttctttcccagttttacagacctggtttagtcttcttgatattgctcgggttggatattacgagccactggtttcagatgtacagttctttcttgtcaggtaagactagccacaaggatgtaaaacacacaggcaattggcttctgaaattatattatgggtacaggccattcatggccttctgctgtgtttcttgtgaggttttgtatattatcctctttctctttgctgatgagaagtcaacaagcttgcttagtgcatgcaaaggtctcctgaaccaaagccccatcattatcttggtgtttatttccacattagttggctgggcagtgaaacaagtcaccaatgtcatccagatgaaaacggctgcggatgcatgtgttgtgtacgacctgaagcgcagcaaatgaaaagcatgaagggaaaactctacggtttaactcagtcctgtgtggacgtatccaaagggaaaaactctccgaggggatacgtcttacgttccttgacatctttctgatgatgccttacgtggggccagaggatgacatgccgtgggaagagcagcatgtcataaagagaaccaacgcaaacaattgttttgtgaaggcggctattgatttgttgtcaagagtgttttattatgtcatacaaatgatgaattgatgatggtacctttgttacctgggctagccctttgtgtcaacatgaaagatgcttacgagccacatgttcccttctgaaatgaaggttttgagttgcaaaaatttacatattcccttctgaaagccagcaactgcacctcgagagggtttaatggttacttttaccccccaaaataggcactagctattattcggatgatttcccttttgctccttattaaacatcctttggttcagttttattgatagttttaatttttttacatgatctcccttagttcaaaaaaataaaattaaaa

SEQ ID NO: 61652 - DNA, 1912 bp, Zea Mays
acaccgggccgccacacaaaatccccacacctgcctgcgtatcgcgctgcccacccaccgcacatccccgcctcccgccggccggccgcccgcctaacgactcgcggtcaccgcctgcgggccaccgtccgcccccagctcgcttacgatattgtacgttcgtggcgcggagcaccgtggtgttggcctagtacgtcgatttcacggtgacttcaccaccattgccgcccagtggctgcagaagctccccgccagcaacaagttcacctacaactgcgacggccacaccttcagttacctcatagagaaaggatttaaaagaaaagaaaaagaaaaccgagagataaaaaaagagaagtctgacccaattgccctggaagcattgcaatctcctgccgtcctgtgttcacacactgtttgccatattctctcgttcaccttgcctggccctgctcgattcggccactttcatggagccaggtgtctgcatcactggggcggggcctagtgtcagcgcaaccaaacacgccggtgactgtcgccacccttctcccagctgtcaggtcttcgttgggccctttgcccacgacgagcacctgccacaccaagaatcccattaagtttactgctgctaccatttaaagggcagaactgccggtcttcaagctctttgttactcctgatcatctgtggcacaattgtcatcgggcaaaatgccatcagtttatctctacatccctaacattatcgggtattttaggatcatcataaatttcattgcatttgcggtttgctattccaacaaggctctctttgctgtcttgtacttcttcagctttgtccttgatggtgtggatggttggtttgcacggaagtttaatcaagcatcaacatttggagcagtgttggacatggttacagatagggttagcactgcttgtttattggcccttctttcccagttttacagacctggtttagtcttcttgatattgctcgggttggatattacgagccactggtttcagatgtacagttctttcttgtcaggtaagactagccacaaggatgtaaaacacacaggcaattggcttctgaaattatattatgggtacaggccattcatggccttctgctgtgtttcttgtgaggttttgtatattatcctctttctctttgctgatgagaagtcaacaagcttgcttagtgcatgcaaaggtctcctgaaccaaagccccatcattatcttggtgtttatttccacattagttggctgggcagtgaaacaagtcaccaatgtcatccagatgaaaacggctgcggatgcatgtgttgtgtacgacctgaagcgcagcaaatgaaaagcatgaagggaaaactctacggtttaactcagtcctgtgtggacgtatccaaagggaaaaactctccgaggggatacgtcttacgttccttgacatctttctgatgatgccttacgtggggccagaggatgacatgccgtgggaagagcagcatgtcataaagagaaccaacgcaaacaattgttttgtgaaggcggctattgatttgttgtcaagagtgttttattatgtcatacaaatgatgaattgatgatggtacctttgttacctgggctagccctttgtgtcaacatgaaagatgcttacgagccacatgttcccttctgaaatgaaggttttgagttgcaaaaatttacatattcccttctgaaagccagcaactgcacctcgagagggtttaatggttacttttaccccccaaaataggcactagctattattcggatgatttcccttttgctccttattaaacatcctttggttcagttttattgatagttttaatttttttacatgatctcccttagttcaaaaaaataaaattaaaa

SEQ ID NO: 61653 - DNA, 3069 bp, Zea Mays
acaccgggccgccacacaaaatccccacacctgcctgcgtatcgcgctgcccacccaccgcacatccccgcctcccgccggccggccgcccgcctaacgactcgcggtcaccgcctgcgggccaccgtccgcccccagctcgcttacgatattgtacgttcgtggcgcggagcaccgtggtgttggcctagtacgtcgatttcacggtgacttcaccaccattgccgcccagtggctgcagaagctccccgccagcaacaagttcacctacaactgcgacggccacaccttcagttacctcatagagaaaggatttagtgtgggattaatctggacttggataaatgaagtataatgcaagaaatgtgggcaaataataccttggctgtgtggtggagaacaaggtgttttgcaactaacggctcttacgtttacaagtttgtgttttctttaacccttgaacattgaagtgaattgtgttgccacattgtttatgcattataggtatgaaagtatatttatcctggcaaaagattatgttagtttttgtgcctaaagaccatttatttcttttagttctttaaatgaatagctctagctttgcatgtactgaaattcattatgctcttgctgtacttgtagctgcttgctaatgtcaactaaaactacctgttgccaacttgatgagttgtgtgttaagcttgtttctctgaacatgtttttttgcctaattgtcatggcaaaagaaagaaaagaaaaagaaaaccgagagataaaaaaagagaagtctgacccaattgccctggaagcattgcaatctcctgccgtcctgtgttcacacactgtttgccatattctctcgttcaccttgcctggccctgctcgattcggccactttcatggagccaggtgtctgcatcactggggcggggcctagtgtcagcgcaaccaaacacgccggtgactgtcgccacccttctcccagctgtcaggtcttcgttgggccctttgcccacgacgagcacctgccacaccaagtaggcatgccccctctttcctttcttctgtgtaaaactgtgcacccgaaccctaattaaacctatttggctatctgtatttggatcggatgtattatgcctactagcttggtggtgctggtgcacatgttgtattggctccacccctggctgatgttgttagattagatcaactccgtgatgccaaaaccatgcatatatgggtttaaatatgatatctgatgcttttagatttatactaacaaagaagcaaatgcttcaatcatgcctagttccatctatacttgccactattcagatattttgccagaagagacctgggtttcagattcaaattttcatgtcatctgttcagaacttgcaattctgtgattcctcagattagtgacctgtagtctggagccactatactcatttatactgctatgtgcaaataaataaatgcttgctttcatctcctattttttttttttttttggaaaaccagcgggtgtgttgatatttccttgggacatgaaaatgcaagttttttttgtttgtaaaaggtacaagggttatagtagcactgtgttaattggactcatattttgattcccttgtaaaaacattattttttggtttaatatataaacgatacacttatctgacaggaatcccattaagtttactgctgctaccatttaaagggcagaactgccggtcttcaagctctttgttactcctgatcatctgtggcacaattgtcatcgggcaaaatgccatcagtttatctctacatccctaacattatcgggtattttaggatcatcataaatttcattgcatttgcggtttgctattccaacaaggctctctttgctgtcttgtacttcttcagctttgtccttgatggtgtggatggttggtttgcacggaagtttaatcaagcatcaacatttggagcagtgttggacatggttacagataggtactccttgaatgaatctttaaaatctgcaggttttacaggtatcaaaagcagaagagcttgtattgatttgtcttgaatctcaatgtctagtacaaatcctaattgcaaacattgtaacagacctggtttagtcttcttgatattgctcgggttggatattacgagccactggtttcagatgtacagttctttcttgtcaggtaagactagccacaaggatgtaaaacacacaggcaattggcttctgaaattatattatgggtacaggccattcatggccttctgctgtgtttcttgtgaggttttgtatattatcctctttctctttgctgatgagaagtcaacaagcttgcttagtgcatgcaaaggtctcctgaaccaaagccccatcattatcttggtgtttatttccacattagttggctgggcagtgaaacaagtcaccaatgtcatccagatgaaaacggctgcggatgcatgtgttgtgtacgacctgaagcgcagcaaatgaaaagcatgaagggaaaactctacggtttaactcagtcctgtgtggacgtatccaaagggaaaaactctccgaggggatacgtcttacgttccttgacatctttctgatgatgccttacgtggggccagaggatgacatgccgtgggaagagcagcatgtcataaagagaaccaacgcaaacaattgttttgtgaaggcggctattgatttgttgtcaagagtgttttattatgtcatacaaatgatgaattgatgatggtacctttgttacctgggctagccctttgtgtcaacatgaaagatgcttacgagccacatgttcccttctgaaatgaaggttttgagttgcaaaaatttacatattcccttctgaaagccagcaactgcacctcgagagggtttaatggttacttttaccccccaaaataggcactagctattattcggatgatttcccttttgctccttattaaacatcctttggttcagttttattgatagttttaatttttttacatgatctcccttagttcaaaaaaataaaattaaaa

SEQ ID NO: 61654 - DNA, 1833 bp, Zea Mays
acaccgggccgccacacaaaatccccacacctgcctgcgtatcgcgctgcccacccaccgcacatccccgcctcccgccggccggccgcccgcctaacgactcgcggtcaccgcctgcgggccaccgtccgcccccagctcgcttacgatattgtacgttcgtggcgcggagcaccgtggtgttggcctagtacgtcgatttcacggtgacttcaccaccattgccgcccagtggctgcagaagctccccgccagcaacaagttcacctacaactgcgacggccacaccttcagttacctcatagagaaaggatttagtgagtagctttcatcccgtcgctccgctccgccttattccatcggaatctgcaccgccgcgggctcgaatcgggttcggcttgcttggatctcgcggggttcgcctcgatccgctagatggtatcaggtgtgggattaatctggacttggataaatgaagtataatgcaagaaatgtgggcaaataataccttggctgtgtggtggagaacaaggtgttttgcaactaacggctcttacgtttacaagtttgtgttttctttaacccttgaacattgaagtgaattgtgttgccacattgtttatgcattataggaatcccattaagtttactgctgctaccatttaaagggcagaactgccggtcttcaagctctttgttactcctgatcatctgtggcacaattgtcatcgggcaaaatgccatcagtttatctctacatccctaacattatcgggtattttaggatcatcataaatttcattgcatttgcggtttgctattccaacaaggctctctttgctgtcttgtacttcttcagctttgtccttgatggtgtggatggttggtttgcacggaagtttaatcaagcatcaacatttggagcagtgttggacatggttacagataggtactccttgaatgaatctttaaaatctgcaggttttacagacctggtttagtcttcttgatattgctcgggttggatattacgagccactggtttcagatgtacagttctttcttgtcaggtaagactagccacaaggatgtaaaacacacaggcaattggcttctgaaattatattatgggtacaggccattcatggccttctgctgtgtttcttgtgaggttttgtatattatcctctttctctttgctgatgagaagtcaacaagcttgcttagtatgaaaacggctgcggatgcatgtgttgtgtacgacctgaagcgcagcaaatgaaaagcatgaagggaaaactctacggtttaactcagtcctgtgtggacgtatccaaagggaaaaactctccgaggggatacgtcttacgttccttgacatctttctgatgatgccttacgtggggccagaggatgacatgccgtgggaagagcagcatgtcataaagagaaccaacgcaaacaattgttttgtgaaggcggctattgatttgttgtcaagagtgttttattatgtcatacaaatgatgaattgatgatggtacctttgttacctgggctagccctttgtgtcaacatgaaagatgcttacgagccacatgttcccttctgaaatgaaggttttgagttgcaaaaatttacatattcccttctgaaagccagcaactgcacctcgagagggtttaatggttacttttaccccccaaaataggcactagctattattcggatgatttcccttttgctccttattaaacatcctttggttcagttttattgatagttttaatttttttacatgatctcccttagttcaaaaaaataaaattaaaa

SEQ ID NO: 61655 - DNA, 1853 bp, Zea Mays
acaccgggccgccacacaaaatccccacacctgcctgcgtatcgcgctgcccacccaccgcacatccccgcctcccgccggccggccgcccgcctaacgactcgcggtcaccgcctgcgggccaccgtccgcccccagctcgcttacgatattgtacgttcgtggcgcggagcaccgtggtgttggcctagtacgtcgatttcacggtgacttcaccaccattgccgcccagtggctgcagaagctccccgccagcaacaagttcacctacaactgcgacggccacaccttcagttacctcatagagaaaggatttagtgtgggattaatctggacttggataaatgaagtataatgcaagaaatgtgggcaaataataccttggctgtgtggtggagaacaaggtgttttgcaactaacggctcttacgtttacaagtttgtgttttctttaacccttgaacattgaagtgaattgtgttgccacattgtttatgcattataggaatcccattaagtttactgctgctaccatttaaagggcagaactgccggtcttcaagctctttgttactcctgatcatctgtggcacaattgtcatcgggcaaaatgccatcagtttatctctacatccctaacattatcgggtattttaggatcatcataaatttcattgcatttgcggtttgctattccaacaaggctctctttgctgtcttgtacttcttcagctttgtccttgatggtgtggatggttggtttgcacggaagtttaatcaagcatcaacatttggagcagtgttggacatggttacagatagttttacaggtatcaaaagcagaagagcttgtattgatttgtcttgaatctcaatgtctagtacaaatcctaattgcaaacattgtaacagacctggtttagtcttcttgatattgctcgggttggatattacgagccactggtttcagatgtacagttctttcttgtcaggtaagactagccacaaggatgtaaaacacacaggcaattggcttctgaaattatattatgggtacaggccattcatggccttctgctgtgtttcttgtgaggttttgtatattatcctctttctctttgctgatgagaagtcaacaagcttgcttagtgcatgcaaaggtctcctgaaccaaagccccatcattatcttggtgtttatttccacattagttggctgggcagtgaaacaagtcaccaatgtcatccagatgaaaacggctgcggatgcatgtgttgtgtacgacctgaagcgcagcaaatgaaaagcatgaagggaaaactctacggtttaactcagtcctgtgtggacgtatccaaagggaaaaactctccgaggggatacgtcttacgttccttgacatctttctgatgatgccttacgtggggccagaggatgacatgccgtgggaagagcagcatgtcataaagagaaccaacgcaaacaattgttttgtgaaggcggctattgatttgttgtcaagagtgttttattatgtcatacaaatgatgaattgatgatggtacctttgttacctgggctagccctttgtgtcaacatgaaagatgcttacgagccacatgttcccttctgaaatgaaggttttgagttgcaaaaatttacatattcccttctgaaagccagcaactgcacctcgagagggtttaatggttacttttaccccccaaaataggcactagctattattcggatgatttcccttttgctccttattaaacatcctttggttcagttttattgatagttttaatttttttacatgatctcccttagttcaaaaaaataaaattaaaa

SEQ ID NO: 61656 - DNA, 1804 bp, Zea Mays
acaccgggccgccacacaaaatccccacacctgcctgcgtatcgcgctgcccacccaccgcacatccccgcctcccgccggccggccgcccgcctaacgactcgcggtcaccgcctgcgggccaccgtccgcccccagctcgcttacgatattgtacgttcgtggcgcggagcaccgtggtgttggcctagtacgtcgatttcacggtgacttcaccaccattgccgcccagtggctgcagaagctccccgccagcaacaagttcacctacaactgcgacggccacaccttcagttacctcatagagaaaggatttagtgtgggattaatctggacttggataaatgaagtataatgcaagaaatgtgggcaaataataccttggctgtgtggtggagaacaaggtgttttgcaactaacggctcttacgtttacaagtttgtgttttctttaacccttgaacattgaagtgaattgtgttgccacattgtttatgcattataggaatcccattaagtttactgctgctaccatttaaagggcagaactgccggtcttcaagctctttgttactcctgatcatctgtggcacaattgtcatcgggcaaaatgccatcagtttatctctacatccctaacattatcgggtattttaggatcatcataaatttcattgcatttgcggtttgctattccaacaaggctctctttgctgtcttgtacttcttcagctttgtccttgatggtgtggatggttggtttgcacggaagtttaatcaagcatcaacatttggagcagtgttggacatggttacagataggtactccttgaatgaatctttaaaatctgcaggttttacagacctggtttagtcttcttgatattgctcgggttggatattacgagccactggtttcagatgtacagttctttcttgtcaggtaagactagccacaaggatgtaaaacacacaggcaattggcttctgaaattatattatgggtacaggccattcatggccttctgctgtgtttcttgtgaggttttgtatattatcctctttctctttgctgatgagaagtcaacaagcttgcttagtgcatgcaaaggtctcctgaaccaaagccccatcattatcttggtgtttatttccacattagttggctgggcagtgaaacaagtcaccaatgtcatccagatgaaaacggctgcggatgcatgtgttgtgtacgacctgaagcgcagcaaatgaaaagcatgaagggaaaactctacggtttaactcagtcctgtgtggacgtatccaaagggaaaaactctccgaggggatacgtcttacgttccttgacatctttctgatgatgccttacgtggggccagaggatgacatgccgtgggaagagcagcatgtcataaagagaaccaacgcaaacaattgttttgtgaaggcggctattgatttgttgtcaagagtgttttattatgtcatacaaatgatgaattgatgatggtacctttgttacctgggctagccctttgtgtcaacatgaaagatgcttacgagccacatgttcccttctgaaatgaaggttttgagttgcaaaaatttacatattcccttctgaaagccagcaactgcacctcgagagggtttaatggttacttttaccccccaaaataggcactagctattattcggatgatttcccttttgctccttattaaacatcctttggttcagttttattgatagttttaatttttttacatgatctcccttagttcaaaaaaataaaattaaaa

SEQ ID NO: 61657 - DNA, 823 bp, Zea Mays
ctactacttatgaggaatctttccatgaaccttaggagtcccgactttgagcaacatcggaggttgctatcatcatatagctatggtggcgcggaccatgtcaaatctgaagccatggaaaatcttggatctcctcagagtggccatcttccatccctggtaacaagcgaatgagagcacacttccaatttgcggtcggagctttggttgtttacacgggacattcctgtgcgctcccagcaatggagttgtggagacggctggtctgtttatgaatgctagagacgtatcgtggcagtaacatctgtatagcttccaataaatggtctgaccctaggcaagttttgctttttcgcgtacgtgtagatagccagttttgtgtgctcatgcaattttttcctgggtggggcctagatcgtatgtttttttatatacacactattggacgcgtgatgtaaatatgtgcaatctttgtaatgcttgaggtactataattatataatggatatgttatgatcgaaaatcagaaaggtaaaacaaaaataccgtcttatatcacacataatctcatcaaagaacaacatttatatgataattatatatcattatgagtcatataattatataacacgagtaataataggtatataaaaacataacaagtcaatatcaatgtataattagttaaacaattgcataagcacattaatagttcataaaagtcaaccatatataacacagctaaaaattgtattgtacaaatatagctcaaagctcagtatcatcacccatgatattaggattgttattaatatatttattt

SEQ ID NO: 61658 - DNA, 2251 bp, Zea Mays
acatgacagacgcaactgccgcagcccattccccggctcggctcggcacaggatccggccggccttttcactaaactcgcttcatccgctcagcctccaaccaaccgagagaagccagagaaaaggttactccgcagaaagcaaaaccctagcccactccggcgcgccaccggccgatggtttcgatgagcaccacgccgaagccgcttgactccgccgtcgtcagcgcagccgttgacggcggggatgagggtggtggtggaggcggtggcgggaagaagcaggcgcacggggcggtgatggcgccgccaccgatggtggtcccggccgcggcgcccgcggccgaggaggaggttcggaaggtcaggaagccgtacaccatcaccaagtcgcgggagagctggacggagccggagcacgacaagttcctcgaggccctgcagctttttgatcgtgattggaagaaaattgaagcatatgttggctcaaagactgttatacagataaggagccatgcacagaagtacttcctgaaggttcagaagaatggtacgggcgagcatctgcccccacccaggccaaaacgaaaggcagctcatccatatccacagaaggcatctaaaaatgtttctcaagctattttatcacaagaacaacctacccagagggagcaaggttctgtcatgcctatggatactgctactgtgagaaacacaaatgcgaatgtggcggtgccttcctgggacaatactcttgctcaacctttcagcgctggtcatgttcaaggtgcagctgcaacaaataactgttcaagtagcatggagagtccatctggtacttggccaacttctgaagcagtcgagcaagaaaatatggttccaccactccgtgccatgccagattttgcccaagtatacaacttcctgggaagcatatttgatccggatacaagtgggcatttgcagaggttaaaagcgatggatccagttgatattgaaacggcactactacttatgaggaatctttccatgaaccttaggagtcccgactttgagcaacatgttgtctttggcgatattgattaaaatgttagtcacagaatcatagcagggtggaggaagtaagaatcatagcagggtggaggaagtagcgccaatcatctagcattctatgtgacccatggataccacaaaagctaaaagacagacacaattagacctgctatgttgtatggtgttgaatattgacctacaaaaagacgccatttagtagataagtgttgcgaaaatgtgtatcttgcattggatttatgggtatacaataagagattgagcccggaacgatatatatgtgataagctaggtgtggcataagttgaacaaaagtttgtttaacaccgattgagatggtttggacatatccaacggaaacctccataggcagtgcaatcctaattcctaaggtgcgacagtaataggagaagagcggaggttgctatcatcatatagctatggtggcgcggaccatgtcaaatctgaagccatggaaaatcttggatctcctcagagtggccatcttccatccctggtaacaagcgaatgagagcacacttccaatttgcggtcggagctttggttgtttacacgggacattcctgtgcgctcccagcaatggagttgtggagacggctggtctgtttatgaatgctagagacgtatcgtggcagtaacatctgtatagcttccaataaatggtctgaccctaggcaagttttgctttttcgcgtacgtgtagatagccagttttgtgtgctcatgcaattttttcctgggtggggcctagatcgtatgtttttttatatacacactattggacgcgtgatgtaaatatgtgcaatctttgtaatgcttgaggtactataattatataatggatatgttatgatcgaaaatcagaaaggtaaaacaaaaataccgtcttatatcacacataatctcatcaaagaacaacatttatatgataattatatatcattatgagtcatataattatataacacgagtaataataggtatataaaaacataacaagtcaatatcaatgtataattagttaaacaattgcataagcacattaatagttcataaaagtcaaccatatataacacagctaaaaattgtattgtacaaatatagctcaaagctcagtatcatcacccatgatattaggattgttattaatatatttattt

SEQ ID NO: 61659 - DNA, 2260 bp, Zea Mays
acatgacagacgcaactgccgcagcccattccccggctcggctcggcacaggatccggccggccttttcactaaactcgcttcatccgctcagcctccaaccaaccgagagaagccagagaaaaggttactccgcagaaagcaaaaccctagcccactccggcgcgccaccggccgatggtttcgatgagcaccacgccgaagccgcttgactccgccgtcgtcagcgcagccgttgacggcggggatgagggtggtggtggaggcggtggcgggaagaagcaggcgcacggggcggtgatggcgccgccaccgatggtggtcccggccgcggcgcccgcggccgaggaggaggttcggaaggtcaggaagccgtacaccatcaccaagtcgcgggagagctggacggagccggagcacgacaagttcctcgaggccctgcagctttttgatcgtgattggaagaaaattgaagcatatgttggctcaaagactgttatacagataaggagccatgcacagaagtacttcctgaaggttcagaagaatggtacgggcgagcatctgcccccacccaggccaaaacgaaaggcagctcatccatatccacagaaggcatctaaaaatgctcctgcagtttctcaagctattttatcacaagaacaacctacccagagggagcaaggttctgtcatgcctatggatactgctactgtgagaaacacaaatgcgaatgtggcggtgccttcctgggacaatactcttgctcaacctttcagcgctggtcatgttcaaggtgcagctgcaacaaataactgttcaagtagcatggagagtccatctggtacttggccaacttctgaagcagtcgagcaagaaaatatggttccaccactccgtgccatgccagattttgcccaagtatacaacttcctgggaagcatatttgatccggatacaagtgggcatttgcagaggttaaaagcgatggatccagttgatattgaaacggcactactacttatgaggaatctttccatgaaccttaggagtcccgactttgagcaacatgttgtctttggcgatattgattaaaatgttagtcacagaatcatagcagggtggaggaagtaagaatcatagcagggtggaggaagtagcgccaatcatctagcattctatgtgacccatggataccacaaaagctaaaagacagacacaattagacctgctatgttgtatggtgttgaatattgacctacaaaaagacgccatttagtagataagtgttgcgaaaatgtgtatcttgcattggatttatgggtatacaataagagattgagcccggaacgatatatatgtgataagctaggtgtggcataagttgaacaaaagtttgtttaacaccgattgagatggtttggacatatccaacggaaacctccataggcagtgcaatcctaattcctaaggtgcgacagtaataggagaagagcggaggttgctatcatcatatagctatggtggcgcggaccatgtcaaatctgaagccatggaaaatcttggatctcctcagagtggccatcttccatccctggtaacaagcgaatgagagcacacttccaatttgcggtcggagctttggttgtttacacgggacattcctgtgcgctcccagcaatggagttgtggagacggctggtctgtttatgaatgctagagacgtatcgtggcagtaacatctgtatagcttccaataaatggtctgaccctaggcaagttttgctttttcgcgtacgtgtagatagccagttttgtgtgctcatgcaattttttcctgggtggggcctagatcgtatgtttttttatatacacactattggacgcgtgatgtaaatatgtgcaatctttgtaatgcttgaggtactataattatataatggatatgttatgatcgaaaatcagaaaggtaaaacaaaaataccgtcttatatcacacataatctcatcaaagaacaacatttatatgataattatatatcattatgagtcatataattatataacacgagtaataataggtatataaaaacataacaagtcaatatcaatgtataattagttaaacaattgcataagcacattaatagttcataaaagtcaaccatatataacacagctaaaaattgtattgtacaaatatagctcaaagctcagtatcatcacccatgatattaggattgttattaatatatttattt

SEQ ID NO: 61660 - DNA, 365 bp, Zea Mays
aagtgatgtcaaacatctaacgttctatgtgacaagagggtattgtagaagctaaaaaggcaagttttatagggcggcgattaggcttgctatgttgtacggtacagaatgttggcctataaaaatgtcatattcaacagataagtgttgcggaaatacgtatgttgtgttgcatttgtggcctacaaaaaagggattgaatctataacgataatatgcggtaggctaggggtagcaccaattaaaaaaaattgtacaacaacgattgagatggtttgaccatatctgatgaagacctctagagactctagtgcgtaatgggatcgtaagacaggatagtaatgggaagaaaagcagaggaaaac

SEQ ID NO: 61661 - DNA, 308 bp, Zea Mays
actaaagttgactcgatcggcactaaacgaccatgatagccgattcaatcctttcacccagcagctagtaagtgacggacgtgctctgtttcttcttcactcagattccacggatttcgctcctcaacacacataggcacataaacacaatttatgttagcaaatatacgtcgatcgatgaaacggcaaagcaagaatgaaacctcaccgagggtcgacggtgtcgtggatgggctgcgcaaaataccaaacatcccatgacgctaatagggttgtccatgacacggcactccacttggacattttat

SEQ ID NO: 61662 - DNA, 1770 bp, Zea Mays
ataaattgggatgctgaagcgatgccaatgtggttgcttgtgttttaaactccttcaaactccgcatgtaacaaacaatatatcaatatgtaacaacagcagaataatgagctagatagtaaatatacaacttaatacaataagcttgattgacacatcagcagattagactactgtagaacacataataatgttcaattcaccatttatataatttttaagttataacaaccatttcaagttagctctgcatttactccaaaatatttcctgagtaatggtatattaattatggggccagattagacctgctgcggtcctaattagcattcaaaaaagtaatggtatattaattatggggccagactagcatatgtcagcacagtaggcatttgatcacatgcccacaaaatgaacctgatactctagcctaaattcagatccttaacagaataattaatgatgcaaaattaccgacaggagcagataacttaccgctaggcgcgcacaacccaccaacctgtgacgacttgagcacgacaggagcagatacagcggtcatccatgccatggcgaggggagcaggaggtgtgtgtggaggaacaactggcgttggcgagctccgaccaccaggggggcacgtgcacgggagcagggaggggcgccatgggaaggacctcggccggctgggaggagtagagagaaactaaataaaacacacaagtttgaccaaaagatattgatcaaggagagaaactgaataaaacacacccacgaggatgtggatcatcagtgactacaatggatagcaagggaatagacttcacagggttctgactgtcactgtccaaccaaaaatttaagaggaaatcacacctactttaattaagaaaaaaacatgcagaattctgggcatgtatattgttggtaaaggtgggggttggcatgccaaaagaagatggagatggcaatttgaacatatgatggtcaattaacagaggaacacatttaaagttctaaatttaaatttctaatgaaggcagccgcgtagttgtaaaattaaagtgttacaggtaggagtaggtggtaaaactgaacagcaaacctaactcaatgattcgatccaacctaaaacacagtaaactgcaagtgcagtagaacggagcttctttatggtattgaattggaagatgggactcggcacggctaaatccgagcaggggccagggcgcgcgcagggagctccacggcgcgtggcacgggagctggaggccgagctggagctgaagggggcgccgaccatggaagagggcagagggaggtcgaggagaaggaacggagcgtgccatgaatggagctcgaaattcggcgcgtggagggacttcaggaggaggaagccgagcgccagccaggggaatgagggcaccggtcggacctgaggaagaagatgagggcagaggacgccggcttggaggagcagggaaggcaccgagctgggcgacggcgggcgacctgggcgagcgcggatcggcgcgacggggacgaaggccgggcgcagggacgcggcagcagggagatgagcggccgagcacctggggcgaggtggagcgcagcaaggaagaagaggagggagagagaaacgtgtgtgagggagacaagggagagggagacgagacgcggctggggcttgctgggagcaggcttccgtcggcggggagatgaagacggcaaggcgagcgcggctgtaaaaatcccacggagataggatcg

SEQ ID NO: 61663 - DNA, 836 bp, Zea Mays
tgaatcgctcgcgtgctcagccacgctcacgtctcccgggcacgtctgcggcagcaccactccacacccacactccgcccatcggctgccatggcgaccagggcggcggcggcagccacgctcacggcggctacgtcctctcttcttaggcgctctacctcgctgcggccgcagggtctccgggtcccccaccgcgtgcctccccaaaggtttgtgcgccatattgcttcatcatcaaacgaggaagctgctgccagagcagccgccgccactgctgacgctggaggaccaaccattttcgacaagatcattgcgaaggaaatcccttcgagcatcgtatatgaagatgaaaatgtgctggcatttagagatattaatccacaagcccctgtgcacgttctagtcatcccaaaagcgagagatgggctaaccggattagacaaggctgagccaaggcatacagaaatcctgggccggctcctttacgcagcgaaagtagtggcagaaaaggaaggtgtagcgagtgggtaccgtgttgtcatcaacaatggtgctgaaggatgccaatctgtctatcatctgcacctgcatgtacttggtggaaggcagatgaagtggccccctggttaaattacgaagggtgacatgtttgatttcctgtacccctctgtgagttgagtttgctgcttgtatgactgttgttgcaaagggagaaagagtggttggtgtactagtatctgcccctgtgatgatggcccctttgagcactcatctctggaagtactgagcttatgcagcattttgctaagggaaaaaaaaacttgtgcaaaaaaaaa

SEQ ID NO: 61664 - DNA, 1904 bp, Zea Mays
aaaacggcagcgtcacgaggagggggggtgggcgcgcgagggaccatgcatttatgcagtgcctctgcttaataacagccgacctccgtcgtccgtgcatggctcgcgcagtcgcgctctggtttcgtctcggcccgccgtcccgtccctttgccttccttcgcacacgcgaaaactatagctgcactgcacgctctcctcacactctccctcctcttctgctcgtctgcgcgtcccaaaactttgctgctgtgagaggttgaagctgccagcatgatctggctgctcagacgccggcgggcgtctcgagtgctcgctcgatcgtcggtgacgcttggattcaccagatcatgttgcagcttcactctctcgcagccagcaaacgcaaggcgtcgtgtagggaggcgactgacagatgagttccttcgccaccggtatgtgcttgtttaatctttattgttaaatcaagcatcatgaatgccacatgagtaggattcgtgtatgcttcccggcctgtcgaaacaacaacaacaacaacgtgttggcatttggtagttgctggtttctcagcaaggcatcaggatgagctgacaatgtaggctttagaattatgcatactattactcattcagtttttttttccatctcttttcactaaataaaggaagctcattgcttaaccacaagcagagattaaaagagggagacatgtcaattattcagttttttcaaaccaatagttatttttttcttctttgcgtcatgaattattgtttattgtatatgttcagtttagtgtagctatatctctatccacctttgctacatccgtcggtgcatttttcaaatcttatgccatagtagaataatttcgaattttatcttgatttgattaccgctaggttctgtttaattcttttctctcaagaagatcactaagaagttgccatcgtcggtcactgtttctactagttgttggtaattaatttaccttgccactttactacctggtgcaagcgtctgaatatttcaactcagtagctggtgcaccaacttcgctcgaaactcatccaattcaatttttttagttttatctttaattctttaaatttagacgatataactatggcataaccgccaatttaaacaaatcatgtgcttactcgtctactgctaggcactaagtaagaaataattaattcaatttttcagagttacaatcggagctcaacataaatacacaaatgactacgatacaagaggttcctggctccacttttgccacgtcttaggtcaccacagagcctatatgaggcaacaagtccaagaactaatttaattacacctacggacaaaacacaacctacactaaacataaacctatggatagagcacaagtctacaaagccaaaaaaaattgtttggtattcttctattttttcttgtgtttttttttgtaaatttttgaagttcaactaaaaaagaaagatagaaaaaaaatactcctcaccgccggcgtcgagatgtccaagccaggcaagcacccctccaatcccgcggacgcgcgaaggcaagatgagccggaggcagatgagatgcggcggcagagaaggttggggaagaaacgagcgaagggagaggagcgtacctgggaggggaatggacgcgctgtgctcacgagcgtacgggttcgggtgtttttttggagcccaaggatccttgatattggaggaatattctttttttggagccactcgattatgtctacaatgaaaccaaacaccctatatactggaacagaacggctccataccacaataccctccaaccaaacgctacctaactagaacggcccagacctggccacaagcccacccgtggccagctaagacgttgtagctcag

SEQ ID NO: 61665 - DNA, 1858 bp, Zea Mays
ggtgttttggctgacgcttgggaacctgcggtgcggcagacgacgaagaagcggcgcgacggtcagttttcctttttcccgctcccgcttttcaacacccccactccctcctcgtcgcttgccacaagtcctcgggcgtccgtcgatcataccgcataccgccggcgcagtcctcgccggcgctggacggggtgaagttttagatcaccagaggggcatttttctctcatcgggcagtagaagttttggatcttatccagctagcctccaatccatcatggatcatgacggcacgaacctggctgtcaatgaggctgtgcgctcggtgcagctgctcaagattgacggctacagcgccaccgctaccatgagcgagttggatttcatcaaatccagaaggaacctcgctggccacgagtgggaggtccttttctatcctcagttcagccgttacggtggctgcatagctttgaagctcgtccttgtcagtgaacccccgagggacaaggacaagctgctgagggcgagcctgagatgccgccttgtatgccctagccagccgcatctccatgcctccatagagaagagcgtgtcccatgtatttaccagtgactctagatgctcgtctgaagttatcctcatcccaaaatatgagctaccatcatcaggttacctcgtgaacgattcactgaccgtggaatgcacggtcaccgtgctacgcgacttggacgccacggctaaggtgctgtccctgccagtgccactgccaccaccctccgacctacaccagcacttcgatgagctgttgcagagcaagaatggagcggacgtcacgttccgtgtctccgggaagtcattcgccgcccacaaggccattctcgccgcaaggtccccggttttcatggctcagttcttcggaggcatgaaggaaagaagctctgctcatgtggagatcagagacatggactctgctgcgttcagttccatgcttcacttcatctataccgacatggtcccagagctcgacggtgcccaggagcctgaggcggcagcgatcatggctcagcacctactggtatgggctgaacaggctgaagctgatatgtgaatgcaagctctctggtggcatcgacatcggcacggcggcttcgacgttggctctcgccgaacagcacgactgctcgctgctcaaagccaagtgtctcgagttcatcaccaggtcgcctgagacacttgaagctgtcctggcaactgatggatacgcgcatctggcggcaagctgtcccttggttctggctgaactactgatggctgcgcgtggaaggaagatctgagctggatgatggttttcgttgacagtcctattattactagtttttaattatcccttcctcgtatgatgagttgcttggcttctcatattttggttatggtttcccaagatgtatggcctaaagcatgatgaactagtgcttgcagttgatttcccccgtttaagtctgagcttattttccacttgtgcttgtcatgcatgcacagacaaacgaaccgggcagctagcattttctgtggctagatctcagtctccgttttgtgcctgtcatttggtgcttaattgtatcagttgccttttctactgcttgacatgcaagtatgcgcacagcgcacgcatgacattagcagactgctgctgcgggcttcagtagcaagtagtacaaaagatttagattaaaattctaacgtatttaaccctagattttaattgaatatattagatccgcatagttatattggacaggatgacgtaacatatttacttagttttctaaaatacttattttttggtcttggtcacatc

SEQ ID NO: 61666 - DNA, 1857 bp, Zea Mays
ggtgttttggctgacgcttgggaacctgcggtgcggcagacgacgaagaagcggcgcgacggtcagttttcctttttcccgctcccgcttttcaacacccccactccctcctcgtcgcttgccacaagtcctcgggcgtccgtcgatcataccgcataccgccggcgcagtcctcgccggcgctggacggggtgaagttttagatcaccagaggggcatttttctctcatcgggcagtagaagttttggatcttatccagctagcctccaatccatcatggatcatgacggcacgaacctggctgtcaatgaggctgtgcgctcggtgcagctgctcaagattgacggctacagcgccaccgctaccatgagcgagttggatttcatcaaatccagaaggaacctcgctggccacgagtgggaggtccttttctatcctcagttcagccgttacggtggctgcatagctttgaagctcgtccttgtcagtgaacccccgagggacaaggacaagctgctgagggcgagcctgagatgccgccttgtatgccctagccagccgcatctccatgcctccatagagaagagcgtgtcccatgtatttaccagtgactctagatgctcgtctgaagttatcctcatcccaaaatatgagctaccatcatcaggttacctcgtgaacgattcactgaccgtggaatgcacggtcaccgtgctacgcgacttggacgccacggctaaggtgctgtccctgccagtgccactgccaccaccctccgacctacaccagcacttcgatgagctgttgcagagcaagaatggagcggacgtcacgttccgtgtctccgggaagtcattcgccgcccacaaggccattctcgccgcaaggtccccggttttcatggctcagttcttcggaggcatgaaggaaagaagctctgctcatgtggagatcagagacatggactctgctgcgttcagttccatgcttcacttcatctataccgacatggtcccagagctcgacggtgcccaggagcctgaggcggcagcgatcatggctcagcacctactggtagctgctgacatgctgaagctgatatgtgaatgcaagctctctggtggcatcgacatcggcacggcggcttcgacgttggctctcgccgaacagcacgactgctcgctgctcaaagccaagtgtctcgagttcatcaccaggtcgcctgagacacttgaagctgtcctggcaactgatggatacgcgcatctggcggcaagctgtcccttggttctggctgaactactgatggctgcgcgtggaaggaagatctgagctggatgatggttttcgttgacagtcctattattactagtttttaattatcccttcctcgtatgatgagttgcttggcttctcatattttggttatggtttcccaagatgtatggcctaaagcatgatgaactagtgcttgcagttgatttcccccgtttaagtctgagcttattttccacttgtgcttgtcatgcatgcacagacaaacgaaccgggcagctagcattttctgtggctagatctcagtctccgttttgtgcctgtcatttggtgcttaattgtatcagttgccttttctactgcttgacatgcaagtatgcgcacagcgcacgcatgacattagcagactgctgctgcgggcttcagtagcaagtagtacaaaagatttagattaaaattctaacgtatttaaccctagattttaattgaatatattagatccgcatagttatattggacaggatgacgtaacatatttacttagttttctaaaatacttattttttggtcttggtcacatc

SEQ ID NO: 61667 - DNA, 1866 bp, Zea Mays
ggtgttttggctgacgcttgggaacctgcggtgcggcagacgacgaagaagcggcgcgacggtcagttttcctttttcccgctcccgcttttcaacacccccactccctcctcgtcgcttgccacaagtcctcgggcgtccgtcgatcataccgcataccgccggcgcagtcctcgccggcgctggacggggtgaagatcaccagaggggcatttttctctcatcgggcagtagaagttttggatcttatccagctagcctccaatccatcatggatcatgacggcacgaacctggctgtcaatgaggctgtgcgctcggtgcagctgctcaagattgacggctacagcgccaccgctaccatgagcgagttggatttcatcaaatccagaaggaacctcgctggccacgagtgggaggtccttttctatcctcagttcagccgttacggtggctgcatagctttgaagctcgtccttgtcagtgaacccccgagggacaaggacaagctgctgagggcgagcctgagatgccgccttgtatgccctagccagccgcatctccatgcctccatagagaagagcgtgtcccatgtatttaccagtgactctagatgctcgtctgaagttatcctcatcccaaaatatgagctaccatcatcaggttacctcgtgaacgattcactgaccgtggaatgcacggtcaccgtgctacgcgacttggacgccacggctaaggtgctgtccctgccagtgccactgccaccaccctccgacctacaccagcacttcgatgagctgttgcagagcaagaatggagcggacgtcacgttccgtgtctccgggaagtcattcgccgcccacaaggccattctcgccgcaaggtccccggttttcatggctcagttcttcggaggcatgaaggaaagaagctctgctcatgtggagatcagagacatggactctgctgcgttcagttccatgcttcacttcatctataccgacatggtcccagagctcgacggtgcccaggagcctgaggcggcagcgatcatggctcagcacctactggtagctgctgacatgtatgggctgaacaggctgaagctgatatgtgaatgcaagctctctggtggcatcgacatcggcacggcggcttcgacgttggctctcgccgaacagcacgactgctcgctgctcaaagccaagtgtctcgagttcatcaccaggtcgcctgagacacttgaagctgtcctggcaactgatggatacgcgcatctggcggcaagctgtcccttggttctggctgaactactgatggctgcgcgtggaaggaagatctgagctggatgatggttttcgttgacagtcctattattactagtttttaattatcccttcctcgtatgatgagttgcttggcttctcatattttggttatggtttcccaagatgtatggcctaaagcatgatgaactagtgcttgcagttgatttcccccgtttaagtctgagcttattttccacttgtgcttgtcatgcatgcacagacaaacgaaccgggcagctagcattttctgtggctagatctcagtctccgttttgtgcctgtcatttggtgcttaattgtatcagttgccttttctactgcttgacatgcaagtatgcgcacagcgcacgcatgacattagcagactgctgctgcgggcttcagtagcaagtagtacaaaagatttagattaaaattctaacgtatttaaccctagattttaattgaatatattagatccgcatagttatattggacaggatgacgtaacatatttacttagttttctaaaatacttattttttggtcttggtcacatc

SEQ ID NO: 61668 - DNA, 3578 bp, Zea Mays
ctgctctcgctcgcctcgcagatcgcaacccacccttagcctgcaaggaactcccctcttgcgttgcgccctcgcccgccctcctctgtaagttgtgcactgcattgttgtcgcgctggcaatctggggccgaaaagcaaaagcgggtgggtttgagctagctagggcaggctcagctcaggcggcgcgcaacgcaatggggcgtgggaaggtggagatgaggagggtcgagaaccgggtgagccgccaggtgaccttctccaagcgccgcaaggggctgctgaagaaggccgacgagctcgccgtgctctgcggcgtggacgtcggcgtcgtcgtcttctccgagcgcggcaagctgttcgagtactcctcgccgaccaggtccgcgggtgatcaaaatcgatcggtgtgggttttggttgtgtgttggtttttttggggtttggttaagtatgcgtgatcgcggaaacctttatttcgggtccctatcaagttgctgctggattggagttcactatcgagttgattttcttcgacacacgcgtgcgtgactatgtgttccgccttgcgcagcctttcactccctctcaaatgttggcttgggagtcagcacacgccgatcagttcttccaagtttgcataagaagtagcccatgatcgattagcgaaagataggaatattccagagtcttgcaatctgcagatccctaacaccaacactctccaccgttaccatttttgcgaagcttggtggatctgattcgccggtacgaggcggccaccagcacgcgactcttgcatcaggacgcacgctgctgcaccgatcaccagtctgatcatcagcagcagcagatggccgctgagatcagccagctgcggagtgagtgcgagcagctggaggccagcctgaatgcgtacacgggagaagacctgtcgtccgtgacttcggtggtcgagctcctcgagctcgagcagcggctggagtcggccatcggcaaagtccgtgcaaggaaggatgagctgctcgtcaacctgaccgaggagcttcaggtcaagaccgaagagcacgggcgccacgacggcccaccagccgccgcgggcgtggaggcgacagtggcggagccgccgctgccacagtcgccgtcgttcgcgtacctcctggccctggaggagaagtccgcggcgagcacaatgctgcgtctgtggccgccgacggacgaggacgccgacggcggcgggagctccagcccacgcgatctacacctgtggtaacagaacgtaatgcagatcgaaggcacagtagactggttgccccgcctggccggccatggacgtgtgtcgatcagctgggtggacttgatgacatgacagatttacttagtttgctaaagtacataactaaaacaaacaagttagttaaagaaaggaagtagcatgcttaagtagtactaataggttatctatagttaatgctcaagtgaccatacctttttccatgtcttggtcacatcaagctaaataaagaccatgacatagccaagacaacaaatccaagtttcagtgactttactagtgtttttttataaggcacctttactaatgctgctccgaactaaacatgggaatggatgtccatagaccacccaccacctactgttcgtgctaattttgtggttatggttatgacttcaaaattttggagttgaggtgttttcttttggagttggacgttcgattgctgatttcgatgactctcagaggcccagattaatggactttctgactagtacaaaccgtggttctcgccatgacgaaccaaccagcgtcgtggcgtgggacggcgtccgactcaagtctgtcaaagcacaaagcaggcccagcggcaggccacatccgtcggacccttgccttctcggagaagctttcacacacctctccttgctctggaagccatgtacggcggcgaactctcctcttggcttctggatcttacctggcctccatcatggaacatgacggcacgaacctgctggctgtcaatgaggttctgcgctcggtacagctgctcaagattgacggctactgcgccaccgctaccatgagcgagctggagttcatcaaatccagatggtgcaccaatggccacgagtgggaggtccgtttccatcctacttacaagtggaacgggcggtgggtagcggtgaagctcatacttatcagtgaacctctgagggacaagctgagggtgagcctgagctgccggatgagacccaacaacttccagcgggatctcggtgcctcttatgagcagagtttgtcccatatatttcccagtgactccaaatgctcgcctgtacttctcctcatgtcaagggctgagctaggatcatcagattacctcgtggaggattcgctgaccgtggaatgcacgctcaccgagctacgtggcttcgacgcctctgtgaaggatccgcccctgccagtgccacagccacagccactgcgctcggacctacaccagcacctcggcgagctcctgcagagcaaggacggagcggacgtcacgttccgtgtctccggggagtccttcgccgcacacagggtcattctcgccgcgaggtccccggttttcaaggccgagttcttcggaggcatgaaggaaagaagctctgcttatgtggagatcagagacatggacgctgctgtgttcaggtccatgcttcacttcatctataccgacatggtcccagagctcgacggtgcccaggaccaggagcctgaggcggcggcgggcggcggccatggctcagcacctactcgtagctgctgacaggtatgggctgaacgggctgaagctgatatgtgaatgcaagctctctggtggcatcaacatcggcacagcggctgcgacgttggctctcgccgagcagcgcaactgcccgctgctcaaagccaagtgtcttgagttcgtcactaagtcgcctgagactcttgatgctgtcctggcgactgacggctacgcgcatctggtggaaagctgccctctggtgctgactgaactagtgagggctgcgcgtggaaggaagatctgagctcgcgatgatggttttcattgacagtcctagtattactagtatcttcctcatataatgattgagttgcttggcttcacatgcatgctatggtatggttatggtttccctaagatgtaatgaacctggagttatggttatggtttccctaagcatgatgaactagtctttgcagttgattccctccccactttcaatctgagctgcttaattcagcccttgttagccacctgtgcttgtcatgcacatgagatgggcagctagcattcattttctgtggctaagatctcgtctctgttttgtgcttattatcatttggtgcttaattgtatcagctgccttttctcgtgcttgacatgcatatataatatgcgcacgcatgacatgagcagactgctgctgcttcagttgcaagttgcagctagtgcaaaaagattcagaaaacccgttttttattagagcagtcagtttgggggagaagggcga

SEQ ID NO: 61669 - DNA, 3522 bp, Zea Mays
ctgctctcgctcgcctcgcagatcgcaacccacccttagcctgcaaggaactcccctcttgcgttgcgccctcgcccgccctcctctgtaagttgtgcactgcattgttgtcgcgctggcaatctggggccgaaaagcaaaagcgggtgggtttgagctagctagggcaggctcagctcaggcggcgcgcaacgcaatggggcgtgggaaggtggagatgaggagggtcgagaaccgggtgagccgccaggtgaccttctccaagcgccgcaaggggctgctgaagaaggccgacgagctcgccgtgctctgcggcgtggacgtcggcgtcgtcgtcttctccgagcgcggcaagctgttcgagtactcctcgccgaccagcctttcactccctctcaaatgttggcttgggagtcagcacacgccgatcagttcttccaagtttgcataagaagtagcccatgatcgattagcgaaagataggaatattccagagtcttgcaatctgcagatccctaacaccaacactctccaccgttaccatttttgcgaagcttggtggatctgattcgccggtacgaggcggccaccagcacgcgactcttgcatcaggacgcacgctgctgcaccgatcaccagtctgatcatcaggtacgcatctaccagatcgacgtccagacccaacgcagcagcttcagtatcttcgtcagcctgttcatgcgccatctctattcttgcctcgtttttctctctctctctctctccaatgctgctgcagcagcagcagcagatggccgctgagatcagccagctgcggagtgagtgcgagcagctggaggccagcctgaatgcgtacacgggagaagacctgtcgtccgtgacttcggtggtcgagctcctcgagctcgagcagcggctggagtcggccatcggcaaagtccgtgcaaggaaggatgagctgctcgtcaacctgaccgaggagcttcaggtcaagaccgaagagcacgggcgccacgacggcccaccagccgccgcgggcgtggaggcgacagtggcggagccgccgctgccacagtcgccgtcgttcgcgtacctcctggccctggaggagaagtccgcggcgagcacaatgctgcgtctgtggccgccgacggacgaggacgccgacggcggcgggagctccagcccacgcgatctacacctgtggtaacagaacgtgtacgcaatgcagatcgaaggcacagtagactggttgccccgcctggccggccatggacgtgtgtcgatcagctgggtggacttgatgacatgacagatttacttagtttgctaaagtacataactaaaacaaacaagttagttaaagaaaggaagtagcatgcttaagtagtactaataggttatctatagttaatgctcaagtgaccatacctttttccatgtcttggtcacatcaagctaaataaagaccatgacatagccaagacaacaaatccaagtttcagtgactttactagtgtttttttataaggcacctttactaatgctgctccgaactaaacatgggaatggatgtccatagaccacccaccacctactgttcgtgctaattttgtggttatggttatgacttcaaaattttggagttgaggtgttttcttttggagttggacgttcgattgctgatttcgatgactctcagaggcccagattaatggactttctgactagtacaaaccgtggttctcgccatgacgaaccaaccagcgtcgtggcgtgggacggcgtccgactcaagtctgtcaaagcacaaagcaggcccagcggcaggccacatccgtcggacccttgccttctcggagaagctttcacacacctctccttgctctggaagccatgtacggcggcgaactctcctcttggcttctggatcttacctggcctccatcatggaacatgacggcacgaacctgctggctgtcaatgaggttctgcgctcggtacagctgctcaagattgacggctactgcgccaccgctaccatgagcgagctggagttcatcaaatccagatggtgcaccaatggccacgagtgggaggtccgtttccatcctacttacaagtggaacgggcggtgggtagcggtgaagctcatacttatcagtgaacctctgagggacaagctgagggtgagcctgagctgccggatgagacccaacaacttccagcgggatctcggtgcctcttatgagcagagtttgtcccatatatttcccagtgactccaaatgctcgcctgtacttctcctcatgtcaagggctgagctaggatcatcagattacctcgtggaggattcgctgaccgtggaatgcacgctcaccgagctacgtggcttcgacgcctctgtgaaggatccgcccctgccagtgccacagccacagccactgcgctcggacctacaccagcacctcggcgagctcctgcagagcaaggacggagcggacgtcacgttccgtgtctccggggagtccttcgccgcacacagggtcattctcgccgcgaggtccccggttttcaaggccgagttcttcggaggcatgaaggaaagaagctctgcttatgtggagatcagagacatggacgctgctgtgttcaggtccatgcttcacttcatctataccgacatggtcccagagctcgacggtgcccaggaccaggagcctgaggcggcggcgggcggcggccatggctcagcacctactcgtagctgctgacaggtatgggctgaacgggctgaagctgatatgtgaatgcaagctctctggtggcatcaacatcggcacagcggctgcgacgttggctctcgccgagcagcgcaactgcccgctgctcaaagccaagtgtcttgagttcgtcactaagtcgcctgagactcttgatgctgtcctggcgactgacggctacgcgcatctggtggaaagctgccctctggtgctgactgaactagtgagggctgcgcgtggaaggaagatctgagctcgcgatgatggttttcattgacagtcctagtattactagtatcttcctcatataatgattgagttgcttggcttcacatgcatgctatggtatggttatggtttccctaagatgtaatgaacctggagttatggttatggtttccctaagcatgatgaactagtctttgcagttgattccctccccactttcaatctgagctgcttaattcagcccttgttagccacctgtgcttgtcatgcacatgagatgggcagctagcattcattttctgtggctaagatctcgtctctgttttgtgcttattatcatttggtgcttaattgtatcagctgccttttctcgtgcttgacatgcatatataatatgcgcacgcatgacatgagcagactgctgctgcttcagttgcaagttgcagctagtgcaaaaagattcagaaaacccgttttttattagagcagtcagtttgggggagaagggcga

SEQ ID NO: 61670 - DNA, 3206 bp, Zea Mays
ctgctctcgctcgcctcgcagatcgcaacccacccttagcctgcaaggaactcccctcttgcgttgcgccctcgcccgccctcctctgtaagttgtgcactgcattgttgtcgcgctggcaatctggggccgaaaagcaaaagcgggtgggtttgagctagctagggcaggctcagctcaggcggcgcgcaacgcaatggggcgtgggaaggtggagatgaggagggtcgagaaccgggtgagccgccaggtgaccttctccaagcgccgcaaggggctgctgaagaaggccgacgagctcgccgtgctctgcggcgtggacgtcggcgtcgtcgtcttctccgagcgcggcaagctgttcgagtactcctcgccgaccagcttggtggatctgattcgccggtacgaggcggccaccagcacgcgactcttgcatcaggacgcacgctgctgcaccgatcaccagtctgatcatcagcagcagcagatggccgctgagatcagccagctgcggagtgagtgcgagcagctggaggccagcctgaatgcgtacacgggagaagacctgtcgtccgtgacttcggtggtcgagctcctcgagctcgagcagcggctggagtcggccatcggcaaagtccgtgcaaggaaggatgagctgctcgtcaacctgaccgaggagcttcaggtcaagaccgaagagcacgggcgccacgacggcccaccagccgccgcgggcgtggaggcgacagtggcggagccgccgctgccacagtcgccgtcgttcgcgtacctcctggccctggaggagaagtccgcggcgagcacaatgctgcgtctgtggccgccgacggacgaggacgccgacggcggcgggagctccagcccacgcgatctacacctgtggtaacagaacgtatcgaaggcacagtagactggttgccccgcctggccggccatggacgtgtgtcgatcagctgggtggacttgatgacatgacagatttacttagtttgctaaagtacataactaaaacaaacaagttagttaaagaaaggaagtagcatgcttaagtagtactaataggttatctatagttaatgctcaagtgaccatacctttttccatgtcttggtcacatcaagctaaataaagaccatgacatagccaagacaacaaatccaagtttcagtgactttactagtgtttttttataaggcacctttactaatgctgctccgaactaaacatgggaatggatgtccatagaccacccaccacctactgttcgtgctaattttgtggttatggttatgacttcaaaattttggagttgaggtgttttcttttggagttggacgttcgattgctgatttcgatgactctcagaggcccagattaatggactttctgactagtacaaaccgtggttctcgccatgacgaaccaaccagcgtcgtggcgtgggacggcgtccgactcaagtctgtcaaagcacaaagcaggcccagcggcaggccacatccgtcggacccttgccttctcggagaagctttcacacacctctccttgctctggaagccatgtacggcggcgaactctcctcttggcttctggatcttacctggcctccatcatggaacatgacggcacgaacctgctggctgtcaatgaggttctgcgctcggtacagctgctcaagattgacggctactgcgccaccgctaccatgagcgagctggagttcatcaaatccagatggtgcaccaatggccacgagtgggaggtccgtttccatcctacttacaagtggaacgggcggtgggtagcggtgaagctcatacttatcagtgaacctctgagggacaagctgagggtgagcctgagctgccggatgagacccaacaacttccagcgggatctcggtgcctcttatgagcagagtttgtcccatatatttcccagtgactccaaatgctcgcctgtacttctcctcatgtcaagggctgagctaggatcatcagattacctcgtggaggattcgctgaccgtggaatgcacgctcaccgagctacgtggcttcgacgcctctgtgaaggatccgcccctgccagtgccacagccacagccactgcgctcggacctacaccagcacctcggcgagctcctgcagagcaaggacggagcggacgtcacgttccgtgtctccggggagtccttcgccgcacacagggtcattctcgccgcgaggtccccggttttcaaggccgagttcttcggaggcatgaaggaaagaagctctgcttatgtggagatcagagacatggacgctgctgtgttcaggtccatgcttcacttcatctataccgacatggtcccagagctcgacggtgcccaggaccaggagcctgaggcggcggcgggcggcggccatggctcagcacctactcgtagctgctgacaggtatgggctgaacgggctgaagctgatatgtgaatgcaagctctctggtggcatcaacatcggcacagcggctgcgacgttggctctcgccgagcagcgcaactgcccgctgctcaaagccaagtgtcttgagttcgtcactaagtcgcctgagactcttgatgctgtcctggcgactgacggctacgcgcatctggtggaaagctgccctctggtgctgactgaactagtgagggctgcgcgtggaaggaagatctgagctcgcgatgatggttttcattgacagtcctagtattactagtatcttcctcatataatgattgagttgcttggcttcacatgcatgctatggtatggttatggtttccctaagatgtaatgaacctggagttatggttatggtttccctaagcatgatgaactagtctttgcagttgattccctccccactttcaatctgagctgcttaattcagcccttgttagccacctgtgcttgtcatgcacatgagatgggcagctagcattcattttctgtggctaagatctcgtctctgttttgtgcttattatcatttggtgcttaattgtatcagctgccttttctcgtgcttgacatgcatatataatatgcgcacgcatgacatgagcagactgctgctgcttcagttgcaagttgcagctagtgcaaaaagattcagaaaacccgttttttattagagcagtcagtttgggggagaagggcga

SEQ ID NO: 61671 - DNA, 3571 bp, Zea Mays
ctgctctcgctcgcctcgcagatcgcaacccacccttagcctgcaaggaactcccctcttgcgttgcgccctcgcccgccctcctctgtaagttgtgcactgcattgttgtcgcgctggcaatctggggccgaaaagcaaaagcgggtgggtttgagctagctagggcaggctcagctcaggcggcgcgcaacgcaatggggcgtgggaaggtggagatgaggagggtcgagaaccgggtgagccgccaggtgaccttctccaagcgccgcaaggggctgctgaagaaggccgacgagctcgccgtgctctgcggcgtggacgtcggcgtcgtcgtcttctccgagcgcggcaagctgttcgagtactcctcgccgaccaggtccgcgggtgatcaaaatcgatcggtgtgggttttggttgtgtgttggtttttttggggtttggttaagtatgcgtgatcgcggaaacctttatttcgggtccctatcaagttgctgctggattggagttcactatcgagttgattttcttcgacacacgcgtgcgtgactatgtgttccgccttgcgcagcctttcactccctctcaaatgttggcttgggagtcagcacacgccgatcagttcttccaagtttgcataagaagtagcccatgatcgattagcgaaagataggaatattccagagtcttgcaatctgcagatccctaacaccaacactctccaccgttaccatttttgcgaagcttggtggatctgattcgccggtacgaggcggccaccagcacgcgactcttgcatcaggacgcacgctgctgcaccgatcaccagtctgatcatcagcagcagcagatggccgctgagatcagccagctgcggagtgagtgcgagcagctggaggccagcctgaatgcgtacacgggagaagacctgtcgtccgtgacttcggtggtcgagctcctcgagctcgagcagcggctggagtcggccatcggcaaagtccgtgcaaggaaggatgagctgctcgtcaacctgaccgaggagcttcaggtcaagaccgaagagcacgggcgccacgacggcccaccagccgccgcgggcgtggaggcgacagtggcggagccgccgctgccacagtcgccgtcgttcgcgtacctcctggccctggaggagaagtccgcggcgagcacaatgctgcgtctgtggccgccgacggacgaggacgccgacggcggcgggagctccagcccacgcgatctacacctgtggtaacagaacgtatcgaaggcacagtagactggttgccccgcctggccggccatggacgtgtgtcgatcagctgggtggacttgatgacatgacagatttacttagtttgctaaagtacataactaaaacaaacaagttagttaaagaaaggaagtagcatgcttaagtagtactaataggttatctatagttaatgctcaagtgaccatacctttttccatgtcttggtcacatcaagctaaataaagaccatgacatagccaagacaacaaatccaagtttcagtgactttactagtgtttttttataaggcacctttactaatgctgctccgaactaaacatgggaatggatgtccatagaccacccaccacctactgttcgtgctaattttgtggttatggttatgacttcaaaattttggagttgaggtgttttcttttggagttggacgttcgattgctgatttcgatgactctcagaggcccagattaatggactttctgactagtacaaaccgtggttctcgccatgacgaaccaaccagcgtcgtggcgtgggacggcgtccgactcaagtctgtcaaagcacaaagcaggcccagcggcaggccacatccgtcggacccttgccttctcggagaagctttcacacacctctccttgctctggaagccatgtacggcggcgaactctcctcttggcttctggatcttacctggcctccatcatggaacatgacggcacgaacctgctggctgtcaatgaggttctgcgctcggtacagctgctcaagattgacggctactgcgccaccgctaccatgagcgagctggagttcatcaaatccagatggtgcaccaatggccacgagtgggaggtccgtttccatcctacttacaagtggaacgggcggtgggtagcggtgaagctcatacttatcagtgaacctctgagggacaagctgagggtgagcctgagctgccggatgagacccaacaacttccagcgggatctcggtgcctcttatgagcagagtttgtcccatatatttcccagtgactccaaatgctcgcctgtacttctcctcatgtcaagggctgagctaggatcatcagattacctcgtggaggattcgctgaccgtggaatgcacgctcaccgagctacgtggcttcgacgcctctgtgaaggatccgcccctgccagtgccacagccacagccactgcgctcggacctacaccagcacctcggcgagctcctgcagagcaaggacggagcggacgtcacgttccgtgtctccggggagtccttcgccgcacacagggtcattctcgccgcgaggtccccggttttcaaggccgagttcttcggaggcatgaaggaaagaagctctgcttatgtggagatcagagacatggacgctgctgtgttcaggtccatgcttcacttcatctataccgacatggtcccagagctcgacggtgcccaggaccaggagcctgaggcggcggcgggcggcggccatggctcagcacctactcgtagctgctgacaggtatgggctgaacgggctgaagctgatatgtgaatgcaagctctctggtggcatcaacatcggcacagcggctgcgacgttggctctcgccgagcagcgcaactgcccgctgctcaaagccaagtgtcttgagttcgtcactaagtcgcctgagactcttgatgctgtcctggcgactgacggctacgcgcatctggtggaaagctgccctctggtgctgactgaactagtgagggctgcgcgtggaaggaagatctgagctcgcgatgatggttttcattgacagtcctagtattactagtatcttcctcatataatgattgagttgcttggcttcacatgcatgctatggtatggttatggtttccctaagatgtaatgaacctggagttatggttatggtttccctaagcatgatgaactagtctttgcagttgattccctccccactttcaatctgagctgcttaattcagcccttgttagccacctgtgcttgtcatgcacatgagatgggcagctagcattcattttctgtggctaagatctcgtctctgttttgtgcttattatcatttggtgcttaattgtatcagctgccttttctcgtgcttgacatgcatatataatatgcgcacgcatgacatgagcagactgctgctgcttcagttgcaagttgcagctagtgcaaaaagattcagaaaacccgttttttattagagcagtcagtttgggggagaagggcga

SEQ ID NO: 61672 - DNA, 3219 bp, Zea Mays
ctgctctcgctcgcctcgcagatcgcaacccacccttagcctgcaaggaactcccctcttgcgttgcgccctcgcccgccctcctctgtaagttgtgcactgcattgttgtcgcgctggcaatctggggccgaaaagcaaaagcgggtgggtttgagctagctagggcaggctcagctcaggcggcgcgcaacgcaatggggcgtgggaaggtggagatgaggagggtcgagaaccgggtgagccgccaggtgaccttctccaagcgccgcaaggggctgctgaagaaggccgacgagctcgccgtgctctgcggcgtggacgtcggcgtcgtcgtcttctccgagcgcggcaagctgttcgagtactcctcgccgaccagcttggtggatctgattcgccggtacgaggcggccaccagcacgcgactcttgcatcaggacgcacgctgctgcaccgatcaccagtctgatcatcagcagcagcagatggccgctgagatcagccagctgcggagtgagtgcgagcagctggaggccagcctgaatgcgtacacgggagaagacctgtcgtccgtgacttcggtggtcgagctcctcgagctcgagcagcggctggagtcggccatcggcaaagtccgtgcaaggaaggatgagctgctcgtcaacctgaccgaggagcttcaggtcaagaccgaagagcacgggcgccacgacggcccaccagccgccgcgggcgtggaggcgacagtggcggagccgccgctgccacagtcgccgtcgttcgcgtacctcctggccctggaggagaagtccgcggcgagcacaatgctgcgtctgtggccgccgacggacgaggacgccgacggcggcgggagctccagcccacgcgatctacacctgtggtaacagaacgtgtacgcaatgcagatcgaaggcacagtagactggttgccccgcctggccggccatggacgtgtgtcgatcagctgggtggacttgatgacatgacagatttacttagtttgctaaagtacataactaaaacaaacaagttagttaaagaaaggaagtagcatgcttaagtagtactaataggttatctatagttaatgctcaagtgaccatacctttttccatgtcttggtcacatcaagctaaataaagaccatgacatagccaagacaacaaatccaagtttcagtgactttactagtgtttttttataaggcacctttactaatgctgctccgaactaaacatgggaatggatgtccatagaccacccaccacctactgttcgtgctaattttgtggttatggttatgacttcaaaattttggagttgaggtgttttcttttggagttggacgttcgattgctgatttcgatgactctcagaggcccagattaatggactttctgactagtacaaaccgtggttctcgccatgacgaaccaaccagcgtcgtggcgtgggacggcgtccgactcaagtctgtcaaagcacaaagcaggcccagcggcaggccacatccgtcggacccttgccttctcggagaagctttcacacacctctccttgctctggaagccatgtacggcggcgaactctcctcttggcttctggatcttacctggcctccatcatggaacatgacggcacgaacctgctggctgtcaatgaggttctgcgctcggtacagctgctcaagattgacggctactgcgccaccgctaccatgagcgagctggagttcatcaaatccagatggtgcaccaatggccacgagtgggaggtccgtttccatcctacttacaagtggaacgggcggtgggtagcggtgaagctcatacttatcagtgaacctctgagggacaagctgagggtgagcctgagctgccggatgagacccaacaacttccagcgggatctcggtgcctcttatgagcagagtttgtcccatatatttcccagtgactccaaatgctcgcctgtacttctcctcatgtcaagggctgagctaggatcatcagattacctcgtggaggattcgctgaccgtggaatgcacgctcaccgagctacgtggcttcgacgcctctgtgaaggatccgcccctgccagtgccacagccacagccactgcgctcggacctacaccagcacctcggcgagctcctgcagagcaaggacggagcggacgtcacgttccgtgtctccggggagtccttcgccgcacacagggtcattctcgccgcgaggtccccggttttcaaggccgagttcttcggaggcatgaaggaaagaagctctgcttatgtggagatcagagacatggacgctgctgtgttcaggtccatgcttcacttcatctataccgacatggtcccagagctcgacggtgcccaggaccaggagcctgaggcggcggcgggcggcggccatggctcagcacctactcgtagctgctgacaggtatgggctgaacgggctgaagctgatatgtgaatgcaagctctctggtggcatcaacatcggcacagcggctgcgacgttggctctcgccgagcagcgcaactgcccgctgctcaaagccaagtgtcttgagttcgtcactaagtcgcctgagactcttgatgctgtcctggcgactgacggctacgcgcatctggtggaaagctgccctctggtgctgactgaactagtgagggctgcgcgtggaaggaagatctgagctcgcgatgatggttttcattgacagtcctagtattactagtatcttcctcatataatgattgagttgcttggcttcacatgcatgctatggtatggttatggtttccctaagatgtaatgaacctggagttatggttatggtttccctaagcatgatgaactagtctttgcagttgattccctccccactttcaatctgagctgcttaattcagcccttgttagccacctgtgcttgtcatgcacatgagatgggcagctagcattcattttctgtggctaagatctcgtctctgttttgtgcttattatcatttggtgcttaattgtatcagctgccttttctcgtgcttgacatgcatatataatatgcgcacgcatgacatgagcagactgctgctgcttcagttgcaagttgcagctagtgcaaaaagattcagaaaacccgttttttattagagcagtcagtttgggggagaagggcga

SEQ ID NO: 61673 - DNA, 3263 bp, Zea Mays
agctctctggcacggctcctcgttcacgctctctgatcgcttcagctcagctgctctcgctcgcctcgcagatcgcaacccacccttagcctgcaaggaactcccctcttgcgttgcgccctcgcccgccctcctctgtaagttgtgcactgcattgttgtcgcgctggcaatctggggccgaaaagcaaaagcgggtgggtttgagctagctagggcaggctcagctcaggcggcgcgcaacgcaatggggcgtgggaaggtggagatgaggagggtcgagaaccgggtgagccgccaggtgaccttctccaagcgccgcaaggggctgctgaagaaggccgacgagctcgccgtgctctgcggcgtggacgtcggcgtcgtcgtcttctccgagcgcggcaagctgttcgagtactcctcgccgaccagcttggtggatctgattcgccggtacgaggcggccaccagcacgcgactcttgcatcaggacgcacgctgctgcaccgatcaccagtctgatcatcagcagcagcagatggccgctgagatcagccagctgcggagtgagtgcgagcagctggaggccagcctgaatgcgtacacgggagaagacctgtcgtccgtgacttcggtggtcgagctcctcgagctcgagcagcggctggagtcggccatcggcaaagtccgtgcaaggaaggatgagctgctcgtcaacctgaccgaggagcttcaggtcaagaccgaagagcacgggcgccacgacggcccaccagccgccgcgggcgtggaggcgacagtggcggagccgccgctgccacagtcgccgtcgttcgcgtacctcctggccctggaggagaagtccgcggcgagcacaatgctgcgtctgtggccgccgacggacgaggacgccgacggcggcgggagctccagcccacgcgatctacacctgtggtaacagaacgtaatgcagatcgaaggcacagtagactggttgccccgcctggccggccatggacgtgtgtcgatcagctgggtggacttgatgacatgacagatttacttagtttgctaaagtacataactaaaacaaacaagttagttaaagaaaggaagtagcatgcttaagtagtactaataggttatctatagttaatgctcaagtgaccatacctttttccatgtcttggtcacatcaagctaaataaagaccatgacatagccaagacaacaaatccaagtttcagtgactttactagtgtttttttataaggcacctttactaatgctgctccgaactaaacatgggaatggatgtccatagaccacccaccacctactgttcgtgctaattttgtggttatggttatgacttcaaaattttggagttgaggtgttttcttttggagttggacgttcgattgctgatttcgatgactctcagaggcccagattaatggactttctgactagtacaaaccgtggttctcgccatgacgaaccaaccagcgtcgtggcgtgggacggcgtccgactcaagtctgtcaaagcacaaagcaggcccagcggcaggccacatccgtcggacccttgccttctcggagaagctttcacacacctctccttgctctggaagccatgtacggcggcgaactctcctcttggcttctggatcttacctggcctccatcatggaacatgacggcacgaacctgctggctgtcaatgaggttctgcgctcggtacagctgctcaagattgacggctactgcgccaccgctaccatgagcgagctggagttcatcaaatccagatggtgcaccaatggccacgagtgggaggtccgtttccatcctacttacaagtggaacgggcggtgggtagcggtgaagctcatacttatcagtgaacctctgagggacaagctgagggtgagcctgagctgccggatgagacccaacaacttccagcgggatctcggtgcctcttatgagcagagtttgtcccatatatttcccagtgactccaaatgctcgcctgtacttctcctcatgtcaagggctgagctaggatcatcagattacctcgtggaggattcgctgaccgtggaatgcacgctcaccgagctacgtggcttcgacgcctctgtgaaggatccgcccctgccagtgccacagccacagccactgcgctcggacctacaccagcacctcggcgagctcctgcagagcaaggacggagcggacgtcacgttccgtgtctccggggagtccttcgccgcacacagggtcattctcgccgcgaggtccccggttttcaaggccgagttcttcggaggcatgaaggaaagaagctctgcttatgtggagatcagagacatggacgctgctgtgttcaggtccatgcttcacttcatctataccgacatggtcccagagctcgacggtgcccaggaccaggagcctgaggcggcggcgggcggcggccatggctcagcacctactcgtagctgctgacaggtatgggctgaacgggctgaagctgatatgtgaatgcaagctctctggtggcatcaacatcggcacagcggctgcgacgttggctctcgccgagcagcgcaactgcccgctgctcaaagccaagtgtcttgagttcgtcactaagtcgcctgagactcttgatgctgtcctggcgactgacggctacgcgcatctggtggaaagctgccctctggtgctgactgaactagtgagggctgcgcgtggaaggaagatctgagctcgcgatgatggttttcattgacagtcctagtattactagtatcttcctcatataatgattgagttgcttggcttcacatgcatgctatggtatggttatggtttccctaagatgtaatgaacctggagttatggttatggtttccctaagcatgatgaactagtctttgcagttgattccctccccactttcaatctgagctgcttaattcagcccttgttagccacctgtgcttgtcatgcacatgagatgggcagctagcattcattttctgtggctaagatctcgtctctgttttgtgcttattatcatttggtgcttaattgtatcagctgccttttctcgtgcttgacatgcatatataatatgcgcacgcatgacatgagcagactgctgctgcttcagttgcaagttgcagctagtgcaaaaagattcagaaaacccgttttttattagagcagtcagtttgggggagaagggcga

SEQ ID NO: 61674 - DNA, 1144 bp, Zea Mays
agataagttctccagtggagttggttttgcatagctctggaaagatcatagatttttgggcaatagcaagtggacatggaaccatcctctcagcctcagcctgcgatgggtgtcgccgccggtgggtcacaagtgtatcctgcgtctgcctacccgcctgcagcaacagtagctcctcctgctgttgcatctgctggtttacagtcagtgcaaccattcccagccaaccctgcccatatgagtgctcagcaccagattgtctaccaacaagctcaacagttccaccaacagctccagcagcagcaacagcagcagcttcagcagttctgggtcgaacgcatgactgaaatcgaggcaacagctgatttcaggaaccacaacttgccacttgcgaggataaagaagatcatgaaggccgacgaagatgtccgcatgatctcagccgaagctcccgtggtcttcgcaaaagcttgcgagatattcatactggagctgacgctgaggtcgtggatgcacaccgaggagaacaagcgccgcaccttgcagaagaacgacattgccgcagccatcaccaggaccgacatttacgacttcttggtcgacattgttcccagggatgagatgaaggacgacggaatcgggcttcctaggcccgggctgccacccatgggagccccagctgacgcatatccatactactacatgccacagcagcaggtgcctggtcctgggatggtttatggcgcccagcaaggccacccggtgacgtatctgtggcaggatcctcaggaacagcaggagcaagctcctgaagagcagcagtctctgcatgaaagggactgaggatgtcgctcaagctatcacctgatttttcagagctctcattttaggttctctaaactgcaggttttcgttggctaatatcgttgggtatcaaactgaaacaggtagggtgtagcatcatggtagtttgatttctgctgtggtgttagttggagggataatgattagcggctagtggattaaagttacccataccgtttcctttcgttccaaaagttcgccttcatgaggcctctgatatgaaaaatgctgggtgttaatgcttctatgctctgcttgtgttgtgcagttcatgcttctc

SEQ ID NO: 61675 - DNA, 2858 bp, Zea Mays
cgcctcggccgaatcagagggtgaaccaccacgctagtgctggccgtagtgtcatccccacccctccccttctacttcgctaggaatccccatcccatccacctccatagacatgccctagggcttcttcgatgtgcctagagctggcaaacaaaggaggcacatctgcagtttgtcaagagctgccttgccatgagatacgaggcactgttgcttagagatgctaaatactgcaacgaccttcacttgcaagtgtcccgtcaggagtggttaacttttgcaatggattgtcttgataatggcttctacaccattgcctccaaggcacttggactctgctaattccattgaggagaaggacaagatcattgagataacaggactccagaacttggccaagtcattatctacacaacattgtgacacgcgcagcgatagatcatcagcgcgcggttctagacttcactggcatgagttcattgcgaccaaccagcctcttcgtgagtattgcgacgcttccagaggctgtcgagcgataaacagagaaaaggctatatatctctctcagacttggctgctggggcggcgctatccatggcgaagtgggcgtcggccgcgagggctacgacgatgacgatagaccgacttgacgctctcaacaggtttgggatgttactaggagtcaagtttttgttgagatgagggagcatgagcgacgtgtgtggtcggtggacttctcaattatggacccaacaaaattggtcagtgggagtgatgatggatctgtgaagctgcgggatatgaatcaggctgggagtattggcactattaaaacaagggcaaatgtgtgttttgtgcaatttcaacctgatactgctcgctccattgccatcggctctgcagaccacaaaatttactgctatgatctacgtcacatacgagctccttattgtacactagttgggcacacaaagactgtaagctatgttaagtatctggatgcatcgacaatagtatctgcatctactgacaactcattgaagctttgggacttatcgatgagtacaggaaggataattgacagtccagttcaaacatttaaggggcatacaaatacaaaggttggataaaacttccacatgtacttgttctcttttcataatattcgtctacaagtggttagtgtctggttttatcttttgtaagtgtaactagtagaatgtctgatgaaaagaatatggtagtttaattttgaaagttgtactgttgcaatgaaacactagggtacggttggttacttcacttgctttgctcaccttgtctcgtccagcaaggtgagctttgccagcatgggcgagccaatcttgctctcctccaccaacaagcaaaaatcttgctagcacaagccccaaagcgaactcaccaaggaaacaaacgctagttctatcttgatttatgtatgagcaaggaaatgaaatctggctggagaaccaaacacactctactctaatactgtatatgtatggattatcctattgtgacaattatcggtgctatcctttatacaactatagtgccttttacaactgtatctgatcgatttgtgaggttatgaacaaatcatcaacattggtgatccagatgttcttttcctttttttctcataccaactatcaagggacatggtggaaacacagagggcactataacaatatgtatccattatagcactataacacagagggcactataccaaatttgattacttcgacattctgttgtgatatattgaatattgtgcttgtattgtgctgttaatgaactgttatggaggcttcccatccggggagggagaaaaataaaactgggtattaaaaaaaattattcagtaagggtgtcggtccccacattcttatatggcacagctaggctggggaccgcgcgcacagtaagagtgtccgccacgtcactggccgacactcttaacataagagtgtcagttgcatgctgaaccgacactcttaacgtaagagtgtcggtccccgcacttttatacgaataagagcgtctattttagagtgttggcttatttcagtaagagtgtgtgtttttgcccgacactctttaccttgtttcttgtagtgtttgagatgactaaggatcgatatctgtcttaagatttgtcttttccttacaagtgaagagattgcatggttcaatgaagtaataacctatgatctatgggccaggtctttgatgagtaccttaacttgcatgatagcatactcatacagtaatattgttgcatgtcgctcttaacaaatttcattcaggaactgggccatgctgatgttcaaaagagttgtcagaagttcatgacatctggtatttattatatcttcttttgtagtgggctggtgtggtctgcttagcagcaggtagcactacaaccagcaatgtatggatgaattgaaggtagtaaagaacgcagacaatcttatagaaactctgcatcttgaaactggcatgattgacaaagaagctggatgaatcctttggattggtgtcttcttatcaccaagcagtaatgtgaagcaagtttatttgttgactaagaacagatgagcacaaatcagtgaagagttcgttgcactagagatggaggatggataggtggtagatttcaatatggctttgatactattgtttccctttacaatctttgtacagaacaagaaaaatgacgttgtatgtggatactattgtaattcaagaatttatttctgaataataaatatatttgtttataatttgtgtatggatttggcataatatataaatttacagctatattgatt

SEQ ID NO: 61676 - DNA, 1710 bp, Zea Mays
ccctaatctcccctccccatccacgatgcaacaactgtgcccgcctcggccgaatcagagggtgaaccaccacgctagtgctggccgtagtgtcatccccacccctccccttctacttcgctaggaatccccatcccatccacctccatagacatgccctagggcttcttcgatgtgcctagagctggcaaacaaaggaggcacatctgcagtttgtcaagagctgccttgccatgagatacgaggcactgttgcttagagatgctaaatactgcaacgaccttcacttgcaagtgtcccgtcaggagtggttaacttttgcaatggattgtcttgataatggcttctacaccattgcctccaaggcacttggactctgctaattccattgaggagaaggacaagatcattgagataacaggactccagaacttggccaagtcattatctacacaacattgtgacacgcgcagcgatagatcatcagcgcgcggttctagacttcactggcatgagttcattgcgaccaaccagcctcttcgtgagtattgcgacgcttccagaggctgtcgagcgataaacagagaaaaggctatatatctctctcagacttggctgctggggcggcgctatccatggcgaagtgggcgtcggccgcgagggctacgacgatgacgatagaccgacttgacgctctcaacaggtttgggatgttactaggagtcaagtttttgttgagatgagggagcatgagcgacgtgtgtggtcggtggacttctcaattatggacccaacaaaattggtcagtgggagtgatgatggatctgtgaagctgcgggatatgaatcaggcaattttattcttgcacctactgctgggagtattggcactattaaaacaagggcaaatgtgtgttttgtgcaatttcaacctgatactgctcgctccattgccatcggctctgcagaccacaaaatttactgctatgatctacgtcacatacgagctccttattgtacactagttgggcacacaaagactgtaagctatgttaagtatctggatgcatcgacaatagtatctgcatctactgacaactcattgaagctttgggacttatcgatgagtacaggaaggataattgacagtccagttcaaacatttaaggggcatacaaatacaaaggaactgggccatgctgatgttcaaaagagttgtcagaagttcatgacatctggtatttattatatcttcttttgtagtgggctggtgtggtctgcttagcagcaggtagcactacaaccagcaatgtatggatgaattgaaggtagtaaagaacgcagacaatcttatagaaactctgcatcttgaaactggcatgattgacaaagaagctggatgaatcctttggattggtgtcttcttatcaccaagcagtaatgtgaagcaagtttatttgttgactaagaacagatgagcacaaatcagtgaagagttcgttgcactagagatggaggatggataggtggtagatttcaatatggctttgatactattgtttccctttacaatctttgtacagaacaagaaaaatgacgttgtatgtggatactattgtaattcaagaatttatttctgaataataaatatatttgtttataatttgtgtatggatttggcataatatataaatttacagctatattgatt

SEQ ID NO: 61677 - DNA, 1687 bp, Zea Mays
ccctaatctcccctccccatccacgatgcaacaactgtgcccgcctcggccgaatcagagggtgaaccaccacgctagtgctggccgtagtgtcatccccacccctccccttctacttcgctaggaatccccatcccatccacctccatagacatgccctagggcttcttcgatgtgcctagagctggcaaacaaaggaggcacatctgcagtttgtcaagagctgccttgccatgagatacgaggcactgttgcttagagatgctaaatactgcaacgaccttcacttgcaagtgtcccgtcaggagtggttaacttttgcaatggattgtcttgataatggcttctacaccattgcctccaaggcacttggactctgctaattccattgaggagaaggacaagatcattgagataacaggactccagaacttggccaagtcattatctacacaacattgtgacacgcgcagcgatagatcatcagcgcgcggttctagacttcactggcatgagttcattgcgaccaaccagcctcttcgtgagtattgcgacgcttccagaggctgtcgagcgataaacagagaaaaggctatatatctctctcagacttggctgctggggcggcgctatccatggcgaagtgggcgtcggccgcgagggctacgacgatgacgatagaccgacttgacgctctcaacaggtttgggatgttactaggagtcaagtttttgttgagatgagggagcatgagcgacgtgtgtggtcggtggacttctcaattatggacccaacaaaattggtcagtgggagtgatgatggatctgtgaagctgcgggatatgaatcaggctgggagtattggcactattaaaacaagggcaaatgtgtgttttgtgcaatttcaacctgatactgctcgctccattgccatcggctctgcagaccacaaaatttactgctatgatctacgtcacatacgagctccttattgtacactagttgggcacacaaagactgtaagctatgttaagtatctggatgcatcgacaatagtatctgcatctactgacaactcattgaagctttgggacttatcgatgagtacaggaaggataattgacagtccagttcaaacatttaaggggcatacaaatacaaaggaactgggccatgctgatgttcaaaagagttgtcagaagttcatgacatctggtatttattatatcttcttttgtagtgggctggtgtggtctgcttagcagcaggtagcactacaaccagcaatgtatggatgaattgaaggtagtaaagaacgcagacaatcttatagaaactctgcatcttgaaactggcatgattgacaaagaagctggatgaatcctttggattggtgtcttcttatcaccaagcagtaatgtgaagcaagtttatttgttgactaagaacagatgagcacaaatcagtgaagagttcgttgcactagagatggaggatggataggtggtagatttcaatatggctttgatactattgtttccctttacaatctttgtacagaacaagaaaaatgacgttgtatgtggatactattgtaattcaagaatttatttctgaataataaatatatttgtttataatttgtgtatggatttggcataatatataaatttacagctatattgatt

SEQ ID NO: 61678 - DNA, 1508 bp, Zea Mays
cagagaaatggctacatatctctcttagacttggctgctggggcggcgctatccatggcgaagtgggcgtcggccgcgagggctacgacgacgacagaccgacttgacgctctcaacagagctgccttgccatgagatacgaggcactgttgcttagagatgctaaatactgcaacgaccttcacttgcaagtgtcccgtcaggagtggttaacttttgcaatggattgtcttgataatggcttctacaccattgcctccaaggcacttggactctgctaattccattgaggagaaggacaagatcattgagataacaggactccagaacttggccaagtcattatctacacaacattgtgacacgcgcagcgatagatcatcagcgcgcggttctagacttcactggcatgagttcattgcgaccaaccagcctcttcgtgagtattgcgacgcttccagaggctgtcgagcgataaacagagaaaaggctatatatctctctcagacttggctgctggggcggcgctatccatggcgaagtgggcgtcggccgcgagggctacgacgatgacgatagaccgacttgacgctctcaacaggtttgggatgttactaggagtcaagtttttgttgagatgagggagcatgagcgacgtgtgtggtcggtggacttctcaattatggacccaacaaaattggtcagtgggagtgatgatggatctgtgaagctgcgggatatgaatcaggctgggagtattggcactattaaaacaagggcaaatgtgtgttttgtgcaatttcaacctgatactgctcgctccattgccatcggctctgcagaccacaaaatttactgctatgatctacgtcacatacgagctccttattgtacactagttgggcacacaaagactgtaagctatgttaagtatctggatgcatcgacaatagtatctgcatctactgacaactcattgaagctttgggacttatcgatgagtacaggaaggataattgacagtccagttcaaacatttaaggggcatacaaatacaaagtgggctggtgtggtctgcttagcagcaggtagcactacaaccagcaatgtatggatgaattgaaggtagtaaagaacgcagacaatcttatagaaactctgcatcttgaaactggcatgattgacaaagaagctggatgaatcctttggattggtgtcttcttatcaccaagcagtaatgtgaagcaagtttatttgttgactaagaacagatgagcacaaatcagtgaagagttcgttgcactagagatggaggatggataggtggtagatttcaatatggctttgatactattgtttccctttacaatctttgtacagaacaagaaaaatgacgttgtatgtggatactattgtaattcaagaatttatttctgaataataaatatatttgtttataatttgtgtatggatttggcataatatataaatttacagctatattgatt

SEQ ID NO: 61679 - DNA, 2799 bp, Zea Mays
aacagagaaatggctacatatctctcttagacttggctgctggggcggcgctatccatggcgaagtgggcgtcggccgcgagggctacgacgacgacagaccgacttgacgctctcaacagagctgccttgccatgagatacgaggcactgttgcttagagatgctaaatactgcaacgaccttcacttgcaagtgtcccgtcaggagtggttaacttttgcaatggattgtcttgataatggcttctacaccattgcctccaaggcacttggactctgctaattccattgaggagaaggacaagatcattgagataacaggactccagaacttggccaagtcattatctacacaacattgtgacacgcgcagcgatagatcatcagcgcgcggttctagacttcactggcatgagttcattgcgaccaaccagcctcttcgtgagtattgcgacgcttccagaggctgtcgagcgataaacagagaaaaggctatatatctctctcagacttggctgctggggcggcgctatccatggcgaagtgggcgtcggccgcgagggctacgacgatgacgatagaccgacttgacgctctcaacaggtttgggatgttactaggagtcaagtttttgttgagatgagggagcatgagcgacgtgtgtggtcggtggacttctcaattatggacccaacaaaattggtcagtgggagtgatgatggatctgtgaagctgcgggatatgaatcaggctgggagtattggcactattaaaacaagggcaaatgtgtgttttgtgcaatttcaacctgatactgctcgctccattgccatcggctctgcagaccacaaaatttactgctatgatctacgtcacatacgagctccttattgtacactagttgggcacacaaagactgtaagctatgttaagtatctggatgcatcgacaatagtatctgcatctactgacaactcattgaagctttgggacttatcgatgagtacaggaaggataattgacagtccagttcaaacatttaaggggcatacaaatacaaaggttggataaaacttccacatgtacttgttctcttttcataatattcgtctacaagtggttagtgtctggttttatcttttgtaagtgtaactagtagaatgtctgatgaaaagaatatggtagtttaattttgaaagttgtactgttgcaatgaaacactagggtacggttggttacttcacttgctttgctcaccttgtctcgtccagcaaggtgagctttgccagcatgggcgagccaatcttgctctcctccaccaacaagcaaaaatcttgctagcacaagccccaaagcgaactcaccaaggaaacaaacgctagttctatcttgatttatgtatgagcaaggaaatgaaatctggctggagaaccaaacacactctactctaatactgtatatgtatggattatcctattgtgacaattatcggtgctatcctttatacaactatagtgccttttacaactgtatctgatcgatttgtgaggttatgaacaaatcatcaacattggtgatccagatgttcttttcctttttttctcataccaactatcaagggacatggtggaaacacagagggcactataacaatatgtatccattatagcactataacacagagggcactataccaaatttgattacttcgacattctgttgtgatatattgaatattgtgcttgtattgtgctgttaatgaactgttatggaggcttcccatccggggagggagaaaaataaaactgggtattaaaaaaaattattcagtaagggtgtcggtccccacattcttatatggcacagctaggctggggaccgcgcgcacagtaagagtgtccgccacgtcactggccgacactcttaacataagagtgtcagttgcatgctgaaccgacactcttaacgtaagagtgtcggtccccgcacttttatacgaataagagcgtctattttagagtgttggcttatttcagtaagagtgtgtgtttttgcccgacactctttaccttgtttcttgtagtgtttgagatgactaaggatcgatatctgtcttaagatttgtcttttccttacaagtgaagagattgcatggttcaatgaagtaataacctatgatctatgggccaggtctttgatgagtaccttaacttgcatgatagcatactcatacagtaatattgttgcatgtcgctcttaacaaatttcattcaggaactgggccatgctgatgttcaaaagagttgtcagaagttcatgacatctggtatttattatatcttcttttgtagtgggctggtgtggtctgcttagcagcaggtagcactacaaccagcaatgtatggatgaattgaaggtagtaaagaacgcagacaatcttatagaaactctgcatcttgaaactggcatgattgacaaagaagctggatgaatcctttggattggtgtcttcttatcaccaagcagtaatgtgaagcaagtttatttgttgactaagaacagatgagcacaaatcagtgaagagttcgttgcactagagatggaggatggataggtggtagatttcaatatggctttgatactattgtttccctttacaatctttgtacagaacaagaaaaatgacgttgtatgtggatactattgtaattcaagaatttatttctgaataataaatatatttgtttataatttgtgtatggatttggcataatatataaatttacagctatattgatt

SEQ ID NO: 61680 - DNA, 2823 bp, Zea Mays
aaacagagaaatggctacatatctctcttagacttggctgctggggcggcgctatccatggcgaagtgggcgtcggccgcgagggctacgacgacgacagaccgacttgacgctctcaacagagctgccttgccatgagatacgaggcactgttgcttagagatgctaaatactgcaacgaccttcacttgcaagtgtcccgtcaggagtggttaacttttgcaatggattgtcttgataatggcttctacaccattgcctccaaggcacttggactctgctaattccattgaggagaaggacaagatcattgagataacaggactccagaacttggccaagtcattatctacacaacattgtgacacgcgcagcgatagatcatcagcgcgcggttctagacttcactggcatgagttcattgcgaccaaccagcctcttcgtgagtattgcgacgcttccagaggctgtcgagcgataaacagagaaaaggctatatatctctctcagacttggctgctggggcggcgctatccatggcgaagtgggcgtcggccgcgagggctacgacgatgacgatagaccgacttgacgctctcaacaggtttgggatgttactaggagtcaagtttttgttgagatgagggagcatgagcgacgtgtgtggtcggtggacttctcaattatggacccaacaaaattggtcagtgggagtgatgatggatctgtgaagctgcgggatatgaatcaggcaattttattcttgcacctactgctgggagtattggcactattaaaacaagggcaaatgtgtgttttgtgcaatttcaacctgatactgctcgctccattgccatcggctctgcagaccacaaaatttactgctatgatctacgtcacatacgagctccttattgtacactagttgggcacacaaagactgtaagctatgttaagtatctggatgcatcgacaatagtatctgcatctactgacaactcattgaagctttgggacttatcgatgagtacaggaaggataattgacagtccagttcaaacatttaaggggcatacaaatacaaaggttggataaaacttccacatgtacttgttctcttttcataatattcgtctacaagtggttagtgtctggttttatcttttgtaagtgtaactagtagaatgtctgatgaaaagaatatggtagtttaattttgaaagttgtactgttgcaatgaaacactagggtacggttggttacttcacttgctttgctcaccttgtctcgtccagcaaggtgagctttgccagcatgggcgagccaatcttgctctcctccaccaacaagcaaaaatcttgctagcacaagccccaaagcgaactcaccaaggaaacaaacgctagttctatcttgatttatgtatgagcaaggaaatgaaatctggctggagaaccaaacacactctactctaatactgtatatgtatggattatcctattgtgacaattatcggtgctatcctttatacaactatagtgccttttacaactgtatctgatcgatttgtgaggttatgaacaaatcatcaacattggtgatccagatgttcttttcctttttttctcataccaactatcaagggacatggtggaaacacagagggcactataacaatatgtatccattatagcactataacacagagggcactataccaaatttgattacttcgacattctgttgtgatatattgaatattgtgcttgtattgtgctgttaatgaactgttatggaggcttcccatccggggagggagaaaaataaaactgggtattaaaaaaaattattcagtaagggtgtcggtccccacattcttatatggcacagctaggctggggaccgcgcgcacagtaagagtgtccgccacgtcactggccgacactcttaacataagagtgtcagttgcatgctgaaccgacactcttaacgtaagagtgtcggtccccgcacttttatacgaataagagcgtctattttagagtgttggcttatttcagtaagagtgtgtgtttttgcccgacactctttaccttgtttcttgtagtgtttgagatgactaaggatcgatatctgtcttaagatttgtcttttccttacaagtgaagagattgcatggttcaatgaagtaataacctatgatctatgggccaggtctttgatgagtaccttaacttgcatgatagcatactcatacagtaatattgttgcatgtcgctcttaacaaatttcattcaggaactgggccatgctgatgttcaaaagagttgtcagaagttcatgacatctggtatttattatatcttcttttgtagtgggctggtgtggtctgcttagcagcaggtagcactacaaccagcaatgtatggatgaattgaaggtagtaaagaacgcagacaatcttatagaaactctgcatcttgaaactggcatgattgacaaagaagctggatgaatcctttggattggtgtcttcttatcaccaagcagtaatgtgaagcaagtttatttgttgactaagaacagatgagcacaaatcagtgaagagttcgttgcactagagatggaggatggataggtggtagatttcaatatggctttgatactattgtttccctttacaatctttgtacagaacaagaaaaatgacgttgtatgtggatactattgtaattcaagaatttatttctgaataataaatatatttgtttataatttgtgtatggatttggcataatatataaatttacagctatattgatt

SEQ ID NO: 61681 - DNA, 1631 bp, Zea Mays
cgcttccagaggccgtcgagcgataaacagagaaatggctacatatctctcttagacttggctgctggggcggcgctatccatggcgaagtgggcgtcggccgcgagggctacgacgacgacagaccgacttgacgctctcaacagagctgccttgccatgagatacgaggcactgttgcttagagatgctaaatactgcaacgaccttcacttgcaagtgtcccgtcaggagtggttaacttttgcaatggattgtcttgataatggcttctacaccattgcctccaagcgagttttatccacccaaggcacttggactctgctaattccattgaggagaaggacaagatcattgagataacaggactccagaacttggccaagtcattatctacacaacattgtgacacgcgcagcgatagatcatcagcgcgcggttctagacttcactggcatgagttcattgcgaccaaccagcctcttcgtgagtattgcgacgcttccagaggctgtcgagcgataaacagagaaaaggctatatatctctctcagacttggctgctggggcggcgctatccatggcgaagtgggcgtcggccgcgagggctacgacgatgacgatagaccgacttgacgctctcaacaggtttgggatgttactaggagtcaagtttttgttgagatgagggagcatgagcgacgtgtgtggtcggtggacttctcaattatggacccaacaaaattggtcagtgggagtgatgatggatctgtgaagctgcgggatatgaatcaggctgggagtattggcactattaaaacaagggcaaatgtgtgttttgtgcaatttcaacctgatactgctcgctccattgccatcggctctgcagaccacaaaatttactgctatgatctacgtcacatacgagctccttattgtacactagttgggcacacaaagactgtaagctatgttaagtatctggatgcatcgacaatagtatctgcatctactgacaactcattgaagctttgggacttatcgatgagtacaggaaggataattgacagtccagttcaaacatttaaggggcatacaaatacaaaggaactgggccatgctgatgttcaaaagagttgtcagaagttcatgacatctggtatttattatatcttcttttgtagtgggctggtgtggtctgcttagcagcaggtagcactacaaccagcaatgtatggatgaattgaaggtagtaaagaacgcagacaatcttatagaaactctgcatcttgaaactggcatgattgacaaagaagctggatgaatcctttggattggtgtcttcttatcaccaagcagtaatgtgaagcaagtttatttgttgactaagaacagatgagcacaaatcagtgaagagttcgttgcactagagatggaggatggataggtggtagatttcaatatggctttgatactattgtttccctttacaatctttgtacagaacaagaaaaatgacgttgtatgtggatactattgtaattcaagaatttatttctgaataataaatatatttgtttataatttgtgtatggatttggcataatatataaatttacagctatattgatt

SEQ ID NO: 61682 - DNA, 1772 bp, Zea Mays
atggggatgctggcttctgctctgagttctttcaacaagaaaagcacgttgttgcagatgcttacctcactggcgaagacagtaggcaggattccagcttcgtgggggagacatgcgtggagcatcggaagcgaagatccaaggagagcggtccatgctctcaaggctgggacggctctcacgctggtgtccctcctgtacatactcgagcctttcttccaagggatcggaaagaacgcaatgtgggctgtcatgaccgtagtcgtcgtgctcgaattcactgcaggagcaaccatatgcaaagggctgaatagagggctgggaacagtgctggcaggctgtctagcacttctcatcgagctcgtagcagccggaaccgggaaggttctgcgcgctttcatcgtgggggcttcggtgttcatagtaggatttgccgccacatataccagattcttcccagcgatcaagaagagctacgactacggtgtgctgatcttcctcctgaccttcaacctgatcacggtgtcaagctaccggcagcaggacgtggtgtcgttgacgagagaccgcctgagtactatcgccattggctgcgcgatatgcctgttcatgagtctcttggtgttgcccaactggtccggagaagacctccacagtagcaccgttggcaaattccaaggattggcgacgtcaattgaagaaaggttgcagcttgtgtgaatgagtatttccgagaccaggatgaaggcgacgacgttcttggcaagcaggaagcaagagcttccattcagatcggctatagagcagtcttggactcaaagtccagtgatgagaccctagcacactatgcgagctgggagccaagacactcgatgcattgttacagctacccatggcagaagtacgtgaagctcgggtccgtgctcaggcacttcgcctacacggttgctgcacttcatgggtgtctggaatctgaggttcagactccgccgtccgtgagatcgctgttccgaggcccatgcacaagagttgcacgagaagtagccaaggtcctgcaggagcttgcagcgagcataaagcatcaccggcggtgcgcccccgacgtgctctccgaccatctccacgaagcgctgcaggatctgaactccgccatcaggtcacagccgcggctcttcctcggctccaagcacgcgtgcgccgccaacaagcgggtgctgctgatggaactgaactccgggtccgggaagctttccgcgtcgagagcagctcttcgctcgttcaagaccgacgcgacagcgctgtccgagacgaggaacgcccggtcagaccaaccgccgccgccgtcggatcgcagcgagaggagcggcggcttgctgcggccgacgctcagcaagatcgccatcacgagcctcgagttctccgaggcgctgccgttcgccgcgttcgcgtcgctgctggtggagatggtggtgcggctggagctggtgatagaggaagtgaagaacctggagcgggttgcgaacttcagagagctcgctactgggcataatcacctgatcgtcgatctcggtagcaaggagaagacgaggaacagtaatgctgcggcgttacaccctgtttctgctgcagctgaatgagggctccattctgagattgtaggctggaatatttctgttcatttcctatataaaaagcagccgtctgggaagagagatgcattttactctttttcatagaaaacatggatagtggatttccaataatactctctc

SEQ ID NO: 61683 - DNA, 1835 bp, Zea Mays
ggagaaacatccgttgtttcttagctcgtggcgccattgcattggtatcttcgtcttcgttgtagacatggggatgctggcttctgctctgagttctttcaacaagaaaagcacgttgttgcagatgcttacctcactggcgaagacagtaggcaggattccagcttcgtgggggagacatgcgtggagcatcggaagcgaagatccaaggagagcggtccatgctctcaaggctgggacggctctcacgctggtgtccctcctgtacatactcgagcctttcttccaagggatcggaaagaacgcaatgtgggctgtcatgaccgtagtcgtcgtgctcgaattcactgcaggagcaaccatatgcaaagggctgaatagagggctgggaacagtgctggcaggctgtctagcacttctcatcgagctcgtagcagccggaaccgggaaggttctgcgcgctttcatcgtgggggcttcggtgttcatagtaggatttgccgccacatataccagattcttcccagcgatcaagaagagctacgactacggtgtgctgatcttcctcctgaccttcaacctgatcacggtgtcaagctaccggcagcaggacgtggtgtcgttgacgagagaccgcctgagtactatcgccattggctgcgcgatatgcctgttcatgagtctcttggtgttgcccaactggtccggagaagacctccacagtagcaccgttggcaaattccaaggattggcgacgtcaattgaaggttgcagcttgtgtgaatgagtatttccgagaccaggatgaaggcgacgacgttcttggcaagcaggaagcaagagcttccattcagatcggctatagagcagtcttggactcaaagtccagtgatgagaccctagcacactatgcgagctgggagccaagacactcgatgcattgttacagctacccatggcagaagtacgtgaagctcgggtccgtgctcaggcacttcgcctacacggttgctgcacttcatgggtgtctggaatctgaggttcagactccgccgtccgtgagatcgctgttccgaggcccatgcacaagagttgcacgagaagtagccaaggtcctgcaggagcttgcagcgagcataaagcatcaccggcggtgcgcccccgacgtgctctccgaccatctccacgaagcgctgcaggatctgaactccgccatcaggtcacagccgcggctcttcctcggctccaagcacgcgtgcgccgccaacaagcgggtgctgctgatggaactgaactccgggtccgggaagctttccgcgtcgagagcagctcttcgctcgttcaagaccgacgcgacagcgctgtccgagacgaggaacgcccggtcagaccaaccgccgccgccgtcggatcgcagcgagaggagcggcggcttgctgcggccgacgctcagcaagatcgccatcacgagcctcgagttctccgaggcgctgccgttcgccgcgttcgcgtcgctgctggtggagatggtggtgcggctggagctggtgatagaggaagtgaagaacctggagcgggttgcgaacttcagagagctcgctactgggcataatcacctgatcgtcgatctcggtagcaaggagaagacgaggaacagtaatgctgcggcgttacaccctgtttctgctgcagctgaatgagggctccattctgagattgtaggctggaatatttctgttcatttcctatataaaaagcagccgtctgggaagagagatgcattttactctttttcatagaaaacatggatagtggatttccaataatactctctc

SEQ ID NO: 61684 - DNA, 2055 bp, Zea Mays
atgtccaccccccaccccccaaactgtcgacgccgactcgacacgaacccaaccggccaaccacctcccctgctggtcagaactccgcaagtccgcatcaattcgcactcccagcttcctttaccttcgcagcaagcaagccggtagcagcaagctagatcgcggggaagcgactcgcctccaccatcggcgctgctccggcgcggagaagcgtcctctcgcggcggctgggaagaccagtctccgccagtcccggcggctgcttccgtgaggtgcccttggctcctgggcgacgggctcgtggcggccggcgagatgaacagccatgcggccggaacaagcaacgggggacccggggatgcggccgcagccaggaggaacaccaggatgcccaagtattccaagttcacacagcaggagttgccagcttgcaagccgattcttactccaaaatgggttgtctctgttttcttcatcgtcggggtcatctttgttcccattggtgttgtttcactgctagctgcgagagatgttgttgagattattgatcggtatgatgaggcatgtgtgccaggcaacatgactgagaacaagcttgcttacatccagaatgagaccttatccaaagagtgcataaggaatcttacggttacaaaggatatgaagcagcctatttttgtgtattatgaacttggtaacttctaccagaaccataggaggtatgtaaagagccgaaacgatgcacagctaagagatgctagtaaagctaaccagacatccgcttgtgaacctgagaagaccacagctaatgggcaaccaattgttccttgcggcctcattgcttggagcttgtttaatgatacatataatttcactcgtggtaatgagaacttgacagtggacaagaaagatatttcctggaagagcgatagggaacataaatttggtaaagatgtctatccgagcaacttccagaatggcgcacttaaaggtggagcaacacttgacccaaagatcccgcacttcctacattcagaaagttatatgggagaatatacattgacctcaaggagaatgacacaataacagtgacattgaataacaactacaatacatatagcttcggtggcaagaaaaagctggtcctctccactgcaacttggcttggggggaagaacgattttcttggctttgcataccttatagttggcgggctctgcattttcctggcatttgcattcaccttgctgtacttcgtaaaaccaaggaaactgggagaccacaactacttatcctggaacagacgccatgcaggacgctaagatgttttggaaccccaagtgtcctaactacttaagtgcaacttgtatgaaatgaaatgccctgaaccagaaatctcgttgggcacagactggatcagactagaacttcatgtacatttttttacaaagggtctaggtggctacgtgattttgtttcttttgttctatagagctgcatgtagcagtgatcatgagaatacatattgatgtctaatggcttgcttcgtggtacgtgcactctgagggcctgttcggtccagtggatttgagcattcggaacgactcctagctggattgtttgtctaatttatataaggtttgatcggttggaacgatttttagtgaaatccggcgtaaacgaacatgccacaaacggtttcctctaatagtgttttgtgtaatgtccgcaatgggggaatattacaaacttctgtataaattgaccactgtatgatgtttgtttgtatactacgatttctctactacttattaatgcggtaaggggtagactgccattctcattctctgttctgccttttcgattccccatccccacacagtctattctctgttctgcctttccgatgttcggtacgatttctctactacttattaaggcggtaaggggtaggcattctcatgttcggtcaccattctctgtttcctttctcattctcccctccccacaaagtttattctcattcctacgtacatctcatgcctagctaaaatt

SEQ ID NO: 61685 - DNA, 1330 bp, Zea Mays
atgtccaccccccaccccccaaactgtcgacgccgactcgacacgaacccaaccggccaaccacctcccctgctggtcagaactccgcaagtccgcatcaattcgcactcccagcttcctttaccttcgcagcaagcaagccggtagcagcaagctagatcgcggggaagcgactcgcctccaccatcggcgctgctccggcgcggagaagcgtcctctcgcggcggctgggaagaccagtctccgccagtcccggcggctgcttccgtgaggtgcccttggctcctgggcgacgggctcgtggcggccggcgagatgaacagccatgcggccggaacaagcaacgggggacccggggatgcggccgcagccaggaggaacaccaggatgcccaaggcaagggacggcgcgataatacatgctgggattccaagttcacacagcaggagttgccagcttgcaagccgattcttactccaaaatgggttgtctctgttttcttcatcgtcggggtcatctttgttcccattggtgttgtttcactgctagctgcgagagatgttgttgagattattgatcggtatgatgaggcatgtgtgccaggcaacatgactgagaacaagcttgcttacatccagaatgagaccttatccaaagagtgcataaggaatcttacggttacaaaggatatgaagcagcctatttttgtgtattatgaacttggtaacttctaccagaaccataggaggtatgtaaagagccgaaacgatgcacagctaagagatgctagtaaagctaaccagacatccgcttgtgaacctgagaagaccacagctaatgggcaaccaattgttccttgcggcctcattgcttggagcttgtttaatgatacatataatttcactcgtggtaatgagaacttgacagtggacaagaaagatatttcctggaagagcgatagggaacataaatttggtaaagatgtctatccgagcaacttccagaatggcgcacttaaaggtggagcaacacttgacccaaagatcccgcacttcctacattcagaaagttatatgggagaatatacattgacctcaaggagaatgacacaataacagtgacattgaataacaactacaatacatatagcttcggtggcaagaaaaagctggtcctctccactgcaacttggcttggggggaagaacgattttcttggctttgcataccttatagttggcgggctctgcattttcctggcatttgcattcaccttgctgtacttcgtaaaaccaagccgtactgtgaatgtgatgcttgctgtgaagtaa

SEQ ID NO: 61686 - DNA, 1229 bp, Zea Mays
atgtccaccccccaccccccaaactgtcgacgccgactcgacacgaacccaaccggccaaccacctcccctgctggtcagaactccgcaagtccgcatcaattcgcactcccagcttcctttaccttcgcagcaagcaagccggtagcagcaagctagatcgcggggaagcgactcgcctccaccatcggcgctgctccggcgcggagaagcgtcctctcgcggcggctgggaagaccagtctccgccagtcccggcggctgcttccgtgaggtgcccttggattccaagttcacacagcaggagttgccagcttgcaagccgattcttactccaaaatgggttgtctctgttttcttcatcgtcggggtcatctttgttcccattggtgttgtttcactgctagctgcgagagatgttgttgagattattgatcggtatgatgaggcatgtgtgccaggcaacatgactgagaacaagcttgcttacatccagaatgagaccttatccaaagagtgcataaggaatcttacggttacaaaggatatgaagcagcctatttttgtgtattatgaacttggtaacttctaccagaaccataggaggtatgtaaagagccgaaacgatgcacagctaagagatgctagtaaagctaaccagacatccgcttgtgaacctgagaagaccacagctaatgggcaaccaattgttccttgcggcctcattgcttggagcttgtttaatgatacatataatttcactcgtggtaatgagaacttgacagtggacaagaaagatatttcctggaagagcgatagggaacataaatttggtaaagatgtctatccgagcaacttccagaatggcgcacttaaaggtggagcaacacttgacccaaagatcccgttgagtgagcaagaggatctcatcgtttggatgcggactgcagcacttcctacattcagaaagttatatgggagaatatacattgacctcaaggagaatgacacaataacagtgacattgaataacaactacaatacatatagcttcggtggcaagaaaaagctggtcctctccactgcaacttggcttggggggaagaacgattttcttggctttgcataccttatagttggcgggctctgcattttcctggcatttgcattcaccttgctgtacttcgtaaaaccaagccgtactgtgaatgtgatgcttgctgtgaagtaa

SEQ ID NO: 61687 - DNA, 5603 bp, Zea Mays
aggccggccaccacctccccacacgtttccctcagaccgagcaaagacgaaaatggcggcggcggttcctctcccctgaccagagccagggcgtgccactgccatgtcgccactgacaaaggcggcgtcggcggcggcggcggcggagtttctcatctcttccggattggatacagggcgtgccatgcctgcgtctcagatctcacgattggcatgcgccctgacttctcgctcttcgtatctccccctccctctcccggcccgtgctagcgtcggaggaattgtattgtcgtagatctgttgctccataaatgccttccctatctgtggccgagcgcaaccaagaaacgaggtatggccggagggagaggtagggctggtcggctggacctggtcggctggacgttgccggactggacttttccctgttggagagggggtagcgaggagggctgccgcaccgacgcgagcacgaggacgccgcggagggccgcgacccgaggccactggcgaggacggactgcagagcgctcgcagcggacgacccacgagcagagaagcgagctgcttacgaagctagatagaggatttggaacggcggcggccggcggacaagcgggctgaaggagtgcggcttgtgggtgactcggcaaggctacgagcttcatcgaacaagaagacacgcgggtcaaggtatcacgccataccggatgctccaccgctgttccctatccacatcatctgccgcatccatctcatctcgaaaaaacttcgcatgcatctgtttcctgtgccatcccttatgataaccttcgcatctccttcgtgtggcatataggcaatcgacaggattgagaagaaacggtaataccacttctgagcggtgccttccatgctgaacgatgccatccagacgtgtactgatcggccggagtggaagaacaactcacatttgtgcagccagcccaagggatcttcagtgccgtcatattttgggaatccaagcttctgcgctcctggagggggtgggccgtgcctgaagtcagcgccattggaggttttggaggaatcgctgaaggtctgtttcttgtctgctaacacctgggattgtagacggttcacagtgacagagatgcggccttgttctgcttgtggtgtattcacggtgtcgttgagagcgcaattgtactgtccaaggggctctgggtgatgacgggatcctctcctggcgctgagtcgttcatcgtgagaacaggccgaccggcggcagcagaagagaagatcaggcggaaggattgtctagtccaataccaaatgataggcacagggttacgagcagatttggtttggtaggtttcgagatgaagacgagggcaaggtctagcagtgccaactctaggtgtgctgctgcttacactgcgcggtggtggagctggtcatgttggcggccgtgcaatgcaagtgcccgccacgcccgcgtccaggaaggagacagggttttgacaggaaaggaagatgttcgtgcaataacaaaggaagctcgatctgtggtagaaccacacactaacaaaataaaaagggtaactatgtatcattgtattaagaagatgaaaggggtaaagagccttggaaggtacaaaatggcacaccacacactttctctttttcttatttatcttctagcatgtatttggcatatagatgcagatgaatctcaatttgttaagtctcacggttgatgttgatttatagatgttttaattgttataggattgtcaagcaaagaaaataagcaaaataacctagtatagttctagccattggaagattgaaagacagattgatagtacaaaatgaaagcaatatcaaatttgagagggcgtacttcactgttacatacaaatatatggcaatatcccatcctctcgaacatttcttaacgcaaaatcataaaacacacttttcttgaagatatcatccacagatattgtgtctttgttcaaacttgaagtactttgatttaagtggaatgcttctccactacctgaaccttctacagtttcttaccacagctgcaggagctgtacctggttggcacacatgcacaaacctgggcacatatttaccaatttgttcctggatcacacaaatttatatgcagttatgcattcaacttctatcagtaactcataaatgtcagggaagaggcaggacaaaccttcctaatcgagcatgcttagtagaggtgagagaatgaccccacccaacatagcccaaagcactataccagaatcaaagcgaaggagacatcgtctttaacaaggcgatacaagcatagacatgggccagaagacaccatgtaacagacaggttttttggacatcacactgaattgcagacaaaatatgagaactgaaaacttcagctaacaagagtcttttgaccccaccaaaaatctcagctgaagacttcacttgccatattttggatttcctgacttccaagttccaccattttttttggccttcttttctgcagaatagcccaagaatccaatcagaagcaacaagcaaaaatcacatcagcaggttcaataatgctcctgttgttaaaacaaacttcatttctaagcttccaaatagcccagagaacatcccccaccctgagcgtgattaaatttttaacatcatgaccaaaattactcagccaatcaccaaaaagggagtcaaagccctgaggacatcttttcagatccagggccacttgcaccaccctccagacaaagatagccacaggcaattaaagaagaggtgattagtagattccaaaacgcgacaaaaactcattggatatctacctacaattttctgttaccaaactctcacacgcacttatgccgaacaactagaagctgacaccaccctctcccttacctgatcttgatcagtcataaggcaaacaatgattattagcttatagtatattaagttaataattaatacttacagttgtgaacttgtgatattaaggccctcccagagcagaaagcagcaatatttctgtctctgttaattagcttgccacgtatgtggcatactggcttgtaatttatcgaggagagagaaaaaatttaaagcaatggtttttaattaagaaatcgtagtatcatctgtccaccttccagttgacagtgtcctatgggctcggctgaccaaccacatttgttaatcccttcattactatcttcttttgtgctttacatagataacttctacatgccaaaacatacttcaaagatacatttttagaggtagtgtcttttcctgtacaaaatttcgcaagaatttaataacaagtgatgtacagttcgcggtaaatatgcaaggaacttgaataatgctataagcctataacctgactcagatgatgaggacgccatagccatcttcacaactttccagccacgacaggggctagccttttggcatgtaaatctttcaccgatttcaaatgcttctatggtatgagaaacacttgaaatattaatgggatgcacacttcttcctcgaacacttgggatgtttatgtcagggcatgcaggaaaataatccctcacagacatcattgggggaatatggcatgactgagtgggcagctgtggatcttgctgagtacatatgtgatgggtccgttggctttagagttagaccattgtctgattctgatcgcgtgaaggtttgaatcattaccttacctacttgatagcaacttcggtttatgcttagttggtgctgcgttactgttttgtgttccattgtaggtcaaaaaagccctaagaattgtgaacgttgaggtaactcacaggggaaacatgcgtagaaaatgtcgcatttctggcctcacctcacaagcaacaagagagctatcgtatgtgtgttccattgctggtatgagctaatagcttaaagaataatgcagtgacatgatttgttggtttctctgtgtttctcgatctacgtgggatctttatagaatactactatagtactatgttagccccataggttgagttttttctagtcaatagtaaaagcgaattacatttttcgagatatcgtaaaacacactccgttctaaaatagtagtcgttttagttcttaatttctatgtctatatttaaatggatgaaaatgaatctagacacatataaaacatatacgtcaaatgttgtatgaatctaatccctctgttctaatttaaaattcgttttagctttctattggattcatataataattagtgtatatgtttttatatatgtgtttagatttattatcatttatttgaaaatagacataaatagcaagtgataaaacgaactctattatgggatatggagggagtattaattaactaaaataaatagcaagttaacggagggagtattgaagtgctctctgaaatcgcgactcgttctgcataattggattcttttgtattattagagtttgtgttattaattggaacatgagtataaagaaactcggtccgtccagttatataaaaccctagtagaaaagaaaaccctcatcaaaaaccctagtagaaaagaaaaccctcatcaaaaagacgaatagacaaacctcggtggggcttccggtgggcggcggccgctgccttcttggtattggcctccgctttctttcgtgccgcagcgcaccacaggctgtgagaattcatcgcggccaatgatgaataatactctccttcagcgccacaggcgctgcaggtcgggccagcactacgggccgaggctacaggccaagcacatcatggcgttcttggctcttgcaagcattaggtcgtttatgagaccacactgggtagccttcattagcgaagttgaggcggaggctgtgaaaattgttaggaagtatttggcaaagactgagatgacgaagagcttggagacccacgatggctatattcttatgaaccgagtcttcaaaatgaatgagatggaatactggccatatcccaaggatgcagaggaaggggaagaagattgtttagttgttactgtgaatggtaaggaggttgcggactgttgcgatgataggggcagtttgaaacgaaaaacactatctactggaggtggtgtagaggaaaaagcgaagggatcaaaatctccagatgaaatggagactgcacgtgagtacatttctggtttgagtgccgcggcgactgattttgctgaggaactagcggagactacgggtgaagttacatcgcctgagtctctactggtggcgcatgcgaggtcagccacagtttctgagggtaaatatatttctgatgctactggcgaggacttcgaacaaaataggctagctaaatctctcgatattttccttatggggatgagccttgtggccaaaccacacagcgagccccccaaggtggttgttggtgtggtggaggatccatgggcgatattttgctcgattgttgaaattggtggagacccggggtctgctgcatcaagtgcagttgctggcacgactgtcatgacactgcgaagggttgcagaagatgcacgatga

SEQ ID NO: 61688 - DNA, 4602 bp, Zea Mays
aggccggccaccacctccccacacgtttccctcagaccgagcaaagacgaaaatggcggcggcggttcctctcccctgaccagagccagggcgtgccactgccatgtcgccactgacaaaggcggcgtcggcggcggcggcggcggagtttctcatctcttccggattggatacagggcgtgccatgcctgcgtctcagatctcacgattggcatgcgccctgacttctcgctcttcgtatctccccctccctctcccggcccgtgctagcgtcggaggaattgtattgtcgtagatctgttgctccataaatgccttccctatctgtggccgagcgcaaccaagaaacgaggtatggccggagggagaggtagggctggtcggctggacctggtcggctggacgttgccggactggacttttccctgttggagagggggtagcgaggagggctgccgcaccgacgcgagcacgaggacgccgcggagggccgcgacccgaggccactggcgaggacggactgcagagcgctcgcagcggacgacccacgagcagagaagcgagctgcttacgaagctagatagaggatttggaacggcggcggccggcggacaagcgggctgaaggagtgcggcttgtgggtgactcggcaaggctacgagcttcatcgaacaagaagacacgcgggtcaaggtatcacgccataccggatgctccaccgctgttccctatccacatcatctgccgcatccatctcatctcgaaaaaacttcgcatgcatctgtttcctgtgccatcccttatgataaccttcgcatctccttcgtgtggcatataggcaatcgacaggattgagaagacgtgtactgatcggccggagtggaagaacaactcacatttgtgcagccagcccaagggatcttcagtgccgtcatattttgggaatccaagcttctgcgctcctggagggggtgggccgtgcctgaagtcagcgccattggaggttttggaggaatcgctgaaggtctgtttcttgtctgctaacacctgggattgtagacggttcacagtgacagagatgcggccttgttctgcttgtggtgtattcacggtgtcgttgagagcgcaattgtactgtccaaggggctctgggtgatgacgggatcctctcctggcgctgagtcgttcatcgtgagaacaggccgaccggcggcagcagaagagaagatcaggcggaaggattgtctagtccaataccaaatgataggcacagggttacgagcagatttggtttggtaggtttcgagatgaagacgagggcaaggtctagcagtgccaactctaggtgtgctgctgcttacactgcgcggtggtggagctggtcatgttggcggccgtgcaatgcaagtgcccgccacgcccgcgtccaggaaggagacagggttttgacaggaaaggaagatgttcgtgcaataacaaaggaagctcgatctgtggtagaaccacacactaacaaaataaaaagggtaactatgtatcattgtattaagaagatgaaaggggtaaagagccttggaaggtacaaaatggcacaccacacactttctctttttcttatttatcttctagcatgtatttggcatatagatgcagatgaatctcaatttgttaagtctcacggttgatgttgatttatagatgttttaattgttataggattgtcaagcaaagaaaataagcaaaataacctagtatagttctagccattggaagattgaaagacagattgatagtacaaaatgaaagcaatatcaaatttgagagggcgtacttcactgttacatacaaatatatggcaatatcccatcctctcgaacatttcttaacgcaaaatcataaaacacacttttcttgaagatatcatccacagatattgtgtctttgttcaaacttgaagtactttgatttaagtggaatgcttctccactacctgaaccttctacagtttcttaccacagctgcaggagctgtacctggttggcacacatgcacaaacctgggcacatatttaccaatttgttcctggatcacacaaatttatatgcagttatgcattcaacttctatcagtaactcataaatgtcagggaagaggcaggacaaaccttcctaatcgagcatgcttagtagaggtgagagaatgaccccacccaacatagcccaaagcactataccagaatcaaagcgaaggagacatcgtctttaacaaggcgatacaagcatagacatgggccagaagacaccatgtaacagacaggttttttggacatcacactgaattgcagacaaaatatgagaactgaaaacttcagctaacaagagtcttttgaccccaccaaaaatctcagctgaagacttcacttgccatattttggatttcctgacttccaagttccaccattttttttggccttcttttctgcagaatagcccaagaatccaatcagaagcaacaagcaaaaatcacatcagcaggttcaataatgctcctgttgttaaaacaaacttcatttctaagcttccaaatagcccagagaacatcccccaccctgagcgtgattaaatttttaacatcatgaccaaaattactcagccaatcaccaaaaagggagtcaaagccctgaggacatcttttcagatccagggccacttgcaccaccctccagacaaagatagccacaggcaattaaagaagaggtgattagtagattccaaaacgcgacaaaaactcattggatatctacctacaattttctgttaccaaactctcacacgcacttatgccgaacaactagaagctgacaccaccctctcccttacctgatcttgatcagtcataaggcaaacaatgattattagcttatagtatattaagttaataattaatacttacagttgtgaacttgtgatattaaggccctcccagagcagaaagcagcaatatttctgtctctgttaattagcttgccacgtatgtggcatactggcttgtaatttatcgaggagagagaaaaaatttaaagcaatggtttttaattaagaaatcgtagtatcatctgtccaccttccagttgacagtgtcctatgggctcggctgaccaaccacatttgttaatcccttcattactatcttcttttgtgctttacatagataacttctacatgccaaaacatacttcaaagatacatttttagaggtagtgtcttttcctgtacaaaatttcgcaagaatttaataacaagtgatgtacagttcgcggtaaatatgcaaggaacttgaataatgctataagcctataacctgactcagatgatgaggacgccatagccatcttcacaactttccagccacgacaggggctagccttttggcatgtaaatctttcaccgatttcaaatgcttctatggtatgagaaacacttgaaatattaatgggatgcacacttcttcctcgaacacttgggatgtttatgtcagggcatgcaggaaaataatccctcacagacatcattgggggaatatggcatgactgagtgggcagctgtggatcttgctgagtacatatgtgatgggtccgttggctttagagttagaccattgtctgattctgatcgcgtgaaggtcaaaaaagccctaagaattgtgaacgttgagcgcaccacaggctgtgagaattcatcgcggccaatgatgaataatactctccttcagcgccacaggcgctgcaggtcgggccagcactacgggccgaggctacaggccaagcacatcatggcgttcttggctcttgcaagcattaggtcgtttatgagaccacactgggtagccttcattagcgaagttgaggcggaggctgtgaaaattgttaggaagtatttggcaaagactgagatgacgaagagcttggagacccacgatggctatattcttatgaaccgagtcttcaaaatgaatgagatggaatactggccatatcccaaggatgcagaggaaggggaagaagattgtttagttgttactgtgaatggtaaggaggttgcggactgttgcgatgataggggcagtttgaaacgaaaaacactatctactggaggtggtgtagaggaaaaagcgaagggatcaaaatctccagatgaaatggagactgcacgtgagtacatttctggtttgagtgccgcggcgactgattttgctgaggaactagcggagactacgggtgaagttacatcgcctgagtctctactggtggcgcatgcgaggtcagccacagtttctgagggtaaatatatttctgatgctactggcgaggacttcgaacaaaataggctagctaaatctctcgatattttccttatggggatgagccttgtggccaaaccacacagcgagccccccaaggtggttgttggtgtggtggaggatccatgggcgatattttgctcgattgttgaaattggtggagacccggggtctgctgcatcaagtgcagttgctggcacgactgtcatgacactgcgaagggttgcagaagatgcacgatga

SEQ ID NO: 61689 - DNA, 6197 bp, Zea Mays
aggccggccaccacctccccacacgtttccctcagaccgagcaaagacgaaaatggcggcggcggttcctctcccctgaccagagccagggcgtgccactgccatgtcgccactgacaaaggcggcgtcggcggcggcggcggcggagtttctcatctcttccggattggatacagggcgtgccatgcctgcgtctcagatctcacgattggcatgcgccctgacttctcgctcttcgtatctccccctccctctcccggcccgtgctagcgtcggaggaattgtattgtcgtagatctgttgctccataaatgccttccctatctgtggccgagcgcaaccaagaaacgaggtatggccggagggagaggtagggctggtcggctggacctggtcggctggacgttgccggactggacttttccctgttggagagggggtagcgaggagggctgccgcaccgacgcgagcacgaggacgccgcggagggccgcgacccgaggccactggcgaggacggactgcagagcgctcgcagcggacgacccacgagcagagaagcgagctgcttacgaagctagatagaggatttggaacggcggcggccggcggacaagcgggctgaaggagtgcggcttgtgggtgactcggcaaggctacgagcttcatcgaacaagaagacacgcgggtcaagaaacggtaataccacttctgagcggtgccttccatgctgaacgatgccatccagacgtgtactgatcggccggagtggaagaacaactcacatttgtgcagccagcccaagggatcttcagtgccgtcatattttgggaatccaagcttctgcgctcctggagggggtgggccgtgcctgaagtcagcgccattggaggttttggaggaatcgctgaaggtctgtttcttgtctgctaacacctgggattgtagacggttcacagtgacagagatgcggccttgttctgcttgtggtgtattcacggtgtcgttgagagcgcaattgtactgtccaaggggctctgggtgatgacgggatcctctcctggcgctgagtcgttcatcgtgagaacaggccgaccggcggcagcagaagagaagatcaggcggaaggattgtctagtccaataccaaatgataggcacagggttacgagcagatttggtttggtaggtttcgagatgaagacgagggcaaggtctagcagtgccaactctaggtgtgctgctgcttacactgcgcggtggtggagctggtcatgttggcggccgtgcaatgcaagtgcccgccacgcccgcgtccaggaaggagacagggttttgacaggaaaggaagatgttcgtgcaataacaaaggaagctcgatctgtggtagaaccacacactaacaaaataaaaaggtgatctcccttcactcctaatctattgtccttaaagctagacaataatcccttggtagaggtaactgtaactcaaccttcagtattttttcttgaacgcatagggtaactatgtatcattgtattaagaagatgaaaggggtaaagagccttggaaggtacaaaatggcacaccacacactttctctttttcttatttatcttctagcatgtatttggcatatagatgcagatgaatctcaatttgttaagtctcacggttgatgttgatttatagatgttttaattgttataggattgtcaagcaaagaaaataagcaaaataacctagtatagttctagccattggaagattgaaagacagattgatagtacaaaatgaaagcaatatcaaatttgagagggcgtacttcactgttacatacaaatatatggcaatatcccatcctctcgaacatttcttaacgcaaaatcataaaacacacttttcttgaagatatcatccacagatattgtgtctttgttcaaacttgaagtactttgatttaagtggaatgcttctccactacctgaaccttctacagtttcttaccacagctgcaggagctgtacctggttggcacacatgcacaaacctgggcacatatttaccaatttgttcctggatcacacaaatttatatgcagttatgcattcaacttctatcagtaactcataaatgtcagggaagaggcaggacaaaccttcctaatcgagcatgcttagtagaggtgagagaatgaccccacccaacatagcccaaagcactataccagaatcaaagcgaaggagacatcgtctttaacaaggcgatacaagcatagacatgggccagaagacaccatgtaacagacaggttttttggacatcacactgaattgcagacaaaatatgagaactgaaaacttcagctaacaagagtcttttgaccccaccaaaaatctcagctgaagacttcacttgccatattttggatttcctgacttccaagttccaccattttttttggccttcttttctgcagaatagcccaagaatccaatcagaagcaacaagcaaaaatcacatcagcaggttcaataatgctcctgttgttaaaacaaacttcatttctaagcttccaaatagcccagagaacatcccccaccctgagcgtgattaaatttttaacatcatgaccaaaattactcagccaatcaccaaaaagggagtcaaagccctgaggacatcttttcagatccagggccacttgcaccaccctccagacaaagatagccacaggcaattaaagaagaggtgattagtagattccaaaacgcgacaaaaactcattggatatctacctacaattttctgttaccaaactctcacacgcacttatgccgaacaactagaagctgacaccaccctctcccttacctgatcttgatcagtcataaggcaaacaatgattattagcttatagtatattaagttaataattaatacttacagttgtgaacttgtgatattaaggccctcccagagcagaaagcagcaatatttctgtctctgttaattagcttgccacgtatgtggcatactggcttgtaatttatcgaggagagagaaaaaatttaaagcaatggtttttaattaagaaatcgtagtatcatctgtccaccttccagttgacagtgtcctatgggctcggctgaccaaccacatttgttaatcccttcattactatcttcttttgtgctttacatagataacttctacatgccaaaacatacttcaaagatacatttttagaggtagtgtcttttcctgtacaaaatttcgcaagaatttaataacaagtgatgtacagttcgcggtaaatatgcaaggaacttgaataatgctataagcctataacctgactcagatgatgaggacgccatagccatcttcacaactttccagccacgacaggggctagccttttggcatgtaaatctttcaccgatttcaaatgcttctatggtatgagaaacacttgaaatattaatgggatgcacacttcttcctcgaacacttgggatgtttatgtcagggcatgcaggaaaataatccctcacagacatcattgggggaatatggcatgactgagtgggcagctgtggtacattggtggccatgcttctcggcagcaactcattgctagccctatgatccagctggagtgtgactccatttaagatttccctattactatcatcatgtgcttcagacttgttattgtcgtttctcagtgagtccactgtccaaaacgtgtttttatgtggatcaaccatagttttttagcccttacagacttgccttccatattcttgcatgtggctgcacgagtagtatgtcccccttaatccttaataatcatggccattgtattttttttactattcaccaaaaattggatgcttgtttagagatttgttttgttgctaaaatgtccataggtgatgtatgatattttctgatttttgcaatagactgaatttcttaggtaaagccagctaggacatttgctcatgattttggtgctgtcttaggaaacacctgcctgttgcatagtttgcagataattataaacaattttacattgtggacaggatcttgctgagtacatatgtgatgggtccgttggctttagaggttttcctattttaaagcacaacacagggacctagagagcagattcattaatgcttggtaagaattcagttagagctttccgctgagaaatagcgtgagcatattttttcttgaaagaaaaccagttaaatcatgtcactgtaaatttttaataaatatacctcagttagaccattgtctgattctgatcgcgtgaaggtttgaatcattaccttacctacttgatagcaacttcggtttatgcttagttggtgctgcgttactgttttgtgttccattgtaggtcaaaaaagccctaagaattgtgaacgttgaggtaactcacaggggaaacatgcgtagaaaatgtcgcatttctggcctcacctcacaagcaacaagagagctatcgtatgtgtgttccattgctggtatgagctaatagcttaaagaataatgcagtgacatgatttgttggtttctctgtgtttctcgatctacgtgggatctttatagaatactactatagtactatgttagccccataggttgagttttttctagtcaatagtaaaagcgaattacatttttcgagatatcgtaaaacacactccgttctaaaatagtagtcgttttagttcttaatttctatgtctatatttaaatggatgaaaatgaatctagacacatataaaacatatacgtcaaatgttgtatgaatctaatccctctgttctaatttaaaattcgttttagctttctattggattcatataataattagtgtatatgtttttatatatgtgtttagatttattatcatttatttgaaaatagacataaatagcaagtgataaaacgaactctattatgggatatggagggagtattaattaactaaaataaatagcaagttaacggagggagtattgaagtgctctctgaaatcgcgactcgttctgcataattggattcttttgtattattagagtttgtgttattaattggaacatgagtataaagaaactcggtccgtccagttatataaaaccctagtagaaaagaaaaccctcatcaaaaaccctagtagaaaagaaaaccctcatcaaaaagacgaatagacaaacctcggtggggcttccggtgggcggcggccgctgccttcttggtattggcctccgctttctttcgtgccgcagcgcaccacaggctgtgagaattcatcgcggccaatgatgaataatactctccttcagcgccacaggcgctgcaggtcgggccagcactacgggccgaggctacaggccaagcacatcatggcgttcttggctcttgcaagcattaggtcgtttatgagaccacactgggtagccttcattagcgaagttgaggcggaggctgtgaaaattgttaggaagtatttggcaaagactgagatgacgaagagcttggagacccacgatggctatattcttatgaaccgagtcttcaaaatgaatgagatggaatactggccatatcccaaggatgcagaggaaggggaagaagattgtttagttgttactgtgaatggtaaggaggttgcggactgttgcgatgataggggcagtttgaaacgaaaaacactatctactggaggtggtgtagaggaaaaagcgaagggatcaaaatctccagatgaaatggagactgcacgtgagtacatttctggtttgagtgccgcggcgactgattttgctgaggaactagcggagactacgggtgaagttacatcgcctgagtctctactggtggcgcatgcgaggtcagccacagtttctgagggtaaatatatttctgatgctactggcgaggacttcgaacaaaataggctagctaaatctctcgatattttccttatggggatgagccttgtggccaaaccacacagcgagccccccaaggtggttgttggtgtggtggaggatccatgggcgatattttgctcgattgttgaaattggtggagacccggggtctgctgcatcaagtgcagttgctggcacgactgtcatgacactgcgaagggttgcagaagatgcacgatga

SEQ ID NO: 61690 - DNA, 4656 bp, Zea Mays
aggccggccaccacctccccacacgtttccctcagaccgagcaaagacgaaaatggcggcggcggttcctctcccctgaccagagccagggcgtgccactgccatgtcgccactgacaaaggcggcgtcggcggcggcggcggcggagtttctcatctcttccggattggatacagggcgtgccatgcctgcgtctcagatctcacgattggcatgcgccctgacttctcgctcttcgtatctccccctccctctcccggcccgtgctagcgtcggaggaattgtattgtcgtagatctgttgctccataaatgccttccctatctgtggccgagcgcaaccaagaaacgaggtatggccggagggagaggtagggctggtcggctggacctggtcggctggacgttgccggactggacttttccctgttggagagggggtagcgaggagggctgccgcaccgacgcgagcacgaggacgccgcggagggccgcgacccgaggccactggcgaggacggactgcagagcgctcgcagcggacgacccacgagcagagaagcgagctgcttacgaagctagatagaggatttggaacggcggcggccggcggacaagcgggctgaaggagtgcggcttgtgggtgactcggcaaggctacgagcttcatcgaacaagaagacacgcgggtcaaggtatcacgccataccggatgctccaccgctgttccctatccacatcatctgccgcatccatctcatctcgaaaaaacttcgcatgcatctgtttcctgtgccatcccttatgataaccttcgcatctccttcgtgtggcatataggcaatcgacaggattgagaagaaacggtaataccacttctgagcggtgccttccatgctgaacgatgccatccagacgtgtactgatcggccggagtggaagaacaactcacatttgtgcagccagcccaagggatcttcagtgccgtcatattttgggaatccaagcttctgcgctcctggagggggtgggccgtgcctgaagtcagcgccattggaggttttggaggaatcgctgaaggtctgtttcttgtctgctaacacctgggattgtagacggttcacagtgacagagatgcggccttgttctgcttgtggtgtattcacggtgtcgttgagagcgcaattgtactgtccaaggggctctgggtgatgacgggatcctctcctggcgctgagtcgttcatcgtgagaacaggccgaccggcggcagcagaagagaagatcaggcggaaggattgtctagtccaataccaaatgataggcacagggttacgagcagatttggtttggtaggtttcgagatgaagacgagggcaaggtctagcagtgccaactctaggtgtgctgctgcttacactgcgcggtggtggagctggtcatgttggcggccgtgcaatgcaagtgcccgccacgcccgcgtccaggaaggagacagggttttgacaggaaaggaagatgttcgtgcaataacaaaggaagctcgatctgtggtagaaccacacactaacaaaataaaaagggtaactatgtatcattgtattaagaagatgaaaggggtaaagagccttggaaggtacaaaatggcacaccacacactttctctttttcttatttatcttctagcatgtatttggcatatagatgcagatgaatctcaatttgttaagtctcacggttgatgttgatttatagatgttttaattgttataggattgtcaagcaaagaaaataagcaaaataacctagtatagttctagccattggaagattgaaagacagattgatagtacaaaatgaaagcaatatcaaatttgagagggcgtacttcactgttacatacaaatatatggcaatatcccatcctctcgaacatttcttaacgcaaaatcataaaacacacttttcttgaagatatcatccacagatattgtgtctttgttcaaacttgaagtactttgatttaagtggaatgcttctccactacctgaaccttctacagtttcttaccacagctgcaggagctgtacctggttggcacacatgcacaaacctgggcacatatttaccaatttgttcctggatcacacaaatttatatgcagttatgcattcaacttctatcagtaactcataaatgtcagggaagaggcaggacaaaccttcctaatcgagcatgcttagtagaggtgagagaatgaccccacccaacatagcccaaagcactataccagaatcaaagcgaaggagacatcgtctttaacaaggcgatacaagcatagacatgggccagaagacaccatgtaacagacaggttttttggacatcacactgaattgcagacaaaatatgagaactgaaaacttcagctaacaagagtcttttgaccccaccaaaaatctcagctgaagacttcacttgccatattttggatttcctgacttccaagttccaccattttttttggccttcttttctgcagaatagcccaagaatccaatcagaagcaacaagcaaaaatcacatcagcaggttcaataatgctcctgttgttaaaacaaacttcatttctaagcttccaaatagcccagagaacatcccccaccctgagcgtgattaaatttttaacatcatgaccaaaattactcagccaatcaccaaaaagggagtcaaagccctgaggacatcttttcagatccagggccacttgcaccaccctccagacaaagatagccacaggcaattaaagaagaggtgattagtagattccaaaacgcgacaaaaactcattggatatctacctacaattttctgttaccaaactctcacacgcacttatgccgaacaactagaagctgacaccaccctctcccttacctgatcttgatcagtcataaggcaaacaatgattattagcttatagtatattaagttaataattaatacttacagttgtgaacttgtgatattaaggccctcccagagcagaaagcagcaatatttctgtctctgttaattagcttgccacgtatgtggcatactggcttgtaatttatcgaggagagagaaaaaatttaaagcaatggtttttaattaagaaatcgtagtatcatctgtccaccttccagttgacagtgtcctatgggctcggctgaccaaccacatttgttaatcccttcattactatcttcttttgtgctttacatagataacttctacatgccaaaacatacttcaaagatacatttttagaggtagtgtcttttcctgtacaaaatttcgcaagaatttaataacaagtgatgtacagttcgcggtaaatatgcaaggaacttgaataatgctataagcctataacctgactcagatgatgaggacgccatagccatcttcacaactttccagccacgacaggggctagccttttggcatgtaaatctttcaccgatttcaaatgcttctatggtatgagaaacacttgaaatattaatgggatgcacacttcttcctcgaacacttgggatgtttatgtcagggcatgcaggaaaataatccctcacagacatcattgggggaatatggcatgactgagtgggcagctgtggatcttgctgagtacatatgtgatgggtccgttggctttagagttagaccattgtctgattctgatcgcgtgaaggtcaaaaaagccctaagaattgtgaacgttgagcgcaccacaggctgtgagaattcatcgcggccaatgatgaataatactctccttcagcgccacaggcgctgcaggtcgggccagcactacgggccgaggctacaggccaagcacatcatggcgttcttggctcttgcaagcattaggtcgtttatgagaccacactgggtagccttcattagcgaagttgaggcggaggctgtgaaaattgttaggaagtatttggcaaagactgagatgacgaagagcttggagacccacgatggctatattcttatgaaccgagtcttcaaaatgaatgagatggaatactggccatatcccaaggatgcagaggaaggggaagaagattgtttagttgttactgtgaatggtaaggaggttgcggactgttgcgatgataggggcagtttgaaacgaaaaacactatctactggaggtggtgtagaggaaaaagcgaagggatcaaaatctccagatgaaatggagactgcacgtgagtacatttctggtttgagtgccgcggcgactgattttgctgaggaactagcggagactacgggtgaagttacatcgcctgagtctctactggtggcgcatgcgaggtcagccacagtttctgagggtaaatatatttctgatgctactggcgaggacttcgaacaaaataggctagctaaatctctcgatattttccttatggggatgagccttgtggccaaaccacacagcgagccccccaaggtggttgttggtgtggtggaggatccatgggcgatattttgctcgattgttgaaattggtggagacccggggtctgctgcatcaagtgcagttgctggcacgactgtcatgacactgcgaagggttgcagaagatgcacgatga

SEQ ID NO: 61691 - DNA, 2455 bp, Zea Mays
gtcaccacagccgcatctctcgctcttctttcttgtcccgggctcccggctccatagtcgccgttacatcggacaagggcatcttgcggtgaagcatctaatctgagcagtcagtcgtccccccgctcgcggccgggctactgctggtcgtcaagtactcaagttgtaggcgtgcagccggggcgccggccgctagctgctgtcagcacgcgcacacagcagcagggtggtcgcccgcggccggtagccggcacgcggtcgcgacaagccgatagcaacagcaagccaggcccaagttcagtccccagagagcggcaagctaggtctgtcatcttctctggagggttcagaaccaccgagaattagctgtctttgaggagtacaataggaatggatgatgctcaagggtatcaagaaggagatgatcatgagttagtgctgaagaaacaagaatggatcaaaacacaagacatgctcaagagtaaacttattcttgaagatgaatttgcctggagtttaccttcggtgggctcaggtttagatgaacctgagtggtgcaaactgaagtatattggtgggactgacatcagcttcttgaaggaagacccatccacagcatgtgccgcggtggtagtcctcaatgccgatactttagaagttgtccatgaagagttcaatgttgttcgactgcaagtgccatatattcctggttttcttgcattcagagagtctagagccaagggattctagtatgatcaatccaaaatcatagatcttgagaaaggctccagttcttcttggactcttggaaaagctgaagatcaatgcacctcatttctgcccacagttgctcatggttgatggaaatggattgctccatccgcgaggttttggtttagcttgtcatctcggcgttcttgcagacattcctactattggagttggaaaaaatctacatcaggtagatggccttaaccaatcagaagttagaagactgctcggatcaaaagagaactgcaacagggaactggttttgttgacgggacagtctgggacaaaatggggcatggtacaacctaccatcatggtgggcatgctattgaacgccggccgcagcaatggccgcggcggcaggaggactagcatccagtcaccgccgcaggtcctctcctctgttcccttactcgtctacgagtacgaggatcccgccggctctactcctaccgctgccgcaaagatgctcatgtacagcctgcctgagcggagcatcgtctacacgcacgacagcaggcctcaggccatggagggcaacttcttcagcacgcctcaaggctggctggtcatccttgggcatggagaagtgacgtcggaggcctccatgtggcatccgctcaccggggagaccatcaccctcccacccatacatgacgaccaccacatccccaccaactgcaagtgcctgctcacccacaactccgccgcccacccggactgcgccgtcgtgcttctcgacgtcgccgatcctctcatgtggttctgccgtgtcaatggcggggctgaccggaggtggggacagcacacctacgacattggcgactacgagttccccgatgagttccgcaccccctctacgcccaccaagaacgtcatcagaagcgtcgccgcgcttaaagggaagctgcatttttgcttcatggaatcgcaccaaaacaagatgtgcgtcgttgacttagatttcccgtccgatcatggccaccctcccaccgcagagttccacgagtttgatgtctccccagagttcggcatcaagtttcctgacggcgtctgctctgccagcatccacttggtagagtccatggacgagctttttgccgtctgcgtcttctatgtcggttttgatcccaccaacgttagtgccgctggaatcttcaagatggaggactcctgcggcgaggaaaccgtggcctggcaccgggtggatgatatcggtgacagggcttttctcttgatgggcaccaacatggcaacttggtgctctgcaagcaccaataacctgaaaggcagcaccctctacttcttcctccacttcttacttggcgacagggacctatacatctatgatgtacaggagcagtccctggagactgtccaggttcacgaccagctagatttgaaggtcgtgcacacagaaccatactggattaatgtacctccgttttagtattagcccattacattatattctactcttttagttaatatagcttcctgctactcttttagttaatattgattcagtaaaataaataaataatttgctcccgttttggcactattctttcgtgtatggatggctgagttggatgacctgaatgcatgtatgcatgattcagccgcggcgatcgtgaagtcctgttgtaaataccgtgttcctgagcctattaacttctaaaat

SEQ ID NO: 61692 - DNA, 976 bp, Zea Mays
gtcaccacagccgcatctctcgctcttctttcttgtcccgggctcccggctccatagtcgccgttacatcggacaagggcatcttgcggtgaagcatctaatctgagcagtcagtcgtccccccgctcgcggccgggctactgctggtcgtcaagtactcaagttgtaggcgtgcagccggggcgccggccgctagctgctgtcagcacgcgcacacagcagcagggtggtcgcccgcggccggtagccggcacgcggtcgcgacaagccgatagcaacagcaagccaggcccaagttcagtccccagagagcggcaaggtctgtcatcttctctggagggttcagaaccaccgagaattagctgtctttgaggagtacaataggaatggatgatgctcaagggtatcaagaaggagatgatcatgagttagtgctgaagaaacaagaatggatcaaaacacaagacatgctcaagagtaaacttattcttgaagatgaatttgcctggagtttaccttcggtgggctcaggtttagatgaacctgagtggtgcaaactgaagtatattggtgggactgacatcagcttcttgaaggaagacccatccacagcatgtgccgcggtggtagtcctcaatgccgatactttagaagttgtccatgaagagttcaatgttgttcgactgcaagtgccatatattcctggttttcttgcattcagagagtctagagccaagggattctagtatgatcaatccaaaatcatagatcttgagaaaggctccagttcttcttggactcttggaaaagctgaagatcaatgcacctcatttctgcccacaggttgcataaggggccaataggaaattaaaaaggcatatgctgttctttattatcatgtaaatacactcactgactactggagctacacatttgaagaattatactgttcaagcgattacatttcatgactaca

SEQ ID NO: 61693 - DNA, 973 bp, Zea Mays
ctcaatcgttaccacgtcaccacagccgcctctctcgctcttctttcttgtcccgggctcccggctccatagtcgccgttacatcggacaagggatcttgcggtgaagcatctaatctgagcagtcagtcgtccccccgctcgcggccgggctactgctggtcgtcaagtactcaagttgtaggcgtgcagccgggccgccggccgctagctgctgtcagcacgcgcacacagcagcagggtggtcgcccgcggccggtagccggcacgcggtcgcgacaagccgatagcaacagcaagccaggcccaagttcagtccccagagagcggcaagctaggtctgtcatcttctctggagggttcagaaccaccgagaattagctgtctttgaggagtacaataggaatggatgatgctcaagggtatcaagaaggagatgatcatgacttagtgatgcagaaacaagaatggatcaaaacacaagacatgctcaagagtaaacttattcttgaagatgaatttgcctggagtttaccttcggtgggctcaggtttagatgaacctgagtggtgcaaactgaagtatattggtgggactgacatcagcttcttgaaggaagacccatccacagcatgtgccgcggtggtagtcctcaatgccgatactttagaagttgtccatgaagagttcaatgttgttcgactgcaagtgccatatattcctggttttcttgcattcagagaggctccagttcttcttggactcttggaaaaggtgaagatcaatgcacctcatttctgcccacagttgctcatggttgatggaaatggattgctccatccgcgagctacatcaggtagatggccttaaccaatcagaagttagaagactgctcggatcaaaagagaactgcaacagggaactggttttgttgactggacagtctgggacaaaatggggcatggtaagagatt

SEQ ID NO: 61694 - DNA, 874 bp, Zea Mays
gtcaccacagccgcctctctcgctcttctttcttgtcccgggctcccggctccatagtcgccgttacatcggacaagggatcttgcggtgaagcatctaatctgagcagtcagtcgtccccccgctcgcggccgggctactgctggtcgtcaagtactcaagttgtaggcgtgcagccgggccgccggccgctagctgctgtcagcacgcgcacacagcagcagggtggtcgcccgcggccggtagccggcacgcggtcgcgacaagccgatagcaacagcaagccaggcccaagttcagtccccagagagcggcaagctaggtctgtcatcttctctggagggttcagaaccaccgagaattagctgtctttgaggagtacaataggaatggatgatgctcaagggtatcaagaaggagatgatcatgacttagtgatgcagaaacaagaatggatcaaaacacaagacatgctcaagagtaaacttattcttgaagatgaatttgcctggagtttaccttcggtgggctcaggtttagatgaacctgagtggtgcaaactgaagtatattggtgggactgacatcagcttcttgaaggaagacccatccacagcatgtgccgcggtggtagtcctcaatgccgatactttagaagttgtccatgaagagttcaatgttgttcgactgcaagtgccatatattcctggttttcttgcattcagagaggctccagttcttcttggactcttggaaaaggtgaagatcaatgcacctcatttctgcccacagttgctcatggttgatggaaatggattgctccatccgcgagcaggttttggtttagcttgtcatctcggcgttcttgcagacat

SEQ ID NO: 61695 - DNA, 963 bp, Zea Mays
gtcaccacagccgcctctctcgctcttctttcttgtcccgggctcccggctccatagtcgccgttacatcggacaagggatcttgcggtgaagcatctaatctgagcagtcagtcgtccccccgctcgcggccgggctactgctggtcgtcaagtactcaagttgtaggcgtgcagccgggccgccggccgctagctgctgtcagcacgcgcacacagcagcagggtggtcgcccgcggccggtagccggcacgcggtcgcgacaagccgatagcaacagcaagccaggcccaagttcagtccccagagagcggcaagagtgaagaggaccaagacataaattctatttttgatgaagatatgagaggcgatggcgaagtggcgaaccgaaaccttcattaattagctaggtctgtcatcttctctggagggttcagaaccaccgagaattagctgtctttgaggagtacaataggaatggatgatgctcaagggtatcaagaaggagatgatcatgacttagtgatgcagaaacaagaatggatcaaaacacaagacatgctcaagagtaaacttattcttgaagatgaatttgcctggagtttaccttcggtgggctcaggtttagatgaacctgagtggtgcaaactgaagtatattggtgggactgacatcagcttcttgaaggaagacccatccacagcatgtgccgcggtggtagtcctcaatgccgatactttagaagttgtccatgaagagttcaatgttgttcgactgcaagtgccatatattcctggttttcttgcattcagagaggctccagttcttcttggactcttggaaaaggtgaagatcaatgcacctcatttctgcccacaggttgcataaggggccaataggaaattaaacaaggcatatgctgttctttattatcatttgctcatggttgatggaaatggattg

SEQ ID NO: 61696 - DNA, 824 bp, Zea Mays
gtcaccacagccgcctctctcgctcttctttcttgtcccgggctcccggctccatagtcgccgttacatcggacaagggatcttgcggtgaagcatctaatctgagcagtcagtcgtccccccgctcgcggccgggctactgctggtcgtcaagtactcaagttgtaggcgtgcagccgggccgccggccgctagctgctgtcagcacgcgcacacagcagcagggtggtcgcccgcggccggtagccggcacgcggtcgcgacaagccgatagcaacagcaagccaggcccaagttcagtccccagagagcggcaagctaggtctgtcatcttctctggagggttcagaaccaccgagaattagctgtctttgaggagtacaataggaatggatgatgctcaagggtatcaagaaggagatgatcatgacttagtgatgcagaaacaagaatggatcaaaacacaagacatgctcaagagtaaacttattcttgaagatgaatttgcctggagtttaccttcggtgggctcaggtttagatgaacctgagtggtgcaaactgaagtatattggtgggactgacatcagcttcttgaaggaagacccatccacagcatgtgccgcggtggtagtcctcaatgccgatactttagaagttgtccatgaagagttcaatgttgttcgactgcaagtgccatatattcctggttttcttgcattcagagaggctccagttcttcttggactcttggaaaaggtgaagatcaatgcacctcatttctgcccacaggttgcataaggggccaataggaaattaaacaag

SEQ ID NO: 61697 - DNA, 1051 bp, Zea Mays
gtcaccacagccgcctctctcgctcttctttcttgtcccgggctcccggctccatagtcgccgttacatcggacaagggatcttgcggtgaagcatctaatctgagcagtcagtcgtccccccgctcgcggccgggctactgctggtcgtcaagtactcaagttgtaggcgtgcagccgggccgccggccgctagctgctgtcagcacgcgcacacagcagcagggtggtcgcccgcggccggtagccggcacgcggtcgcgacaagccgatagcaacagcaagccaggcccaagttcagtccccagagagcggcaagctaggtctgtcatcttctctggagggttcagaaccaccgagaattagctgtctttgaggagtacaataggaatggatgatgctcaagggtatcaagaaggagatgatcatgacttagtgatgcagaaacaagaatggatcaaaacacaagacatgctcaagagtaaacttattcttgaagatgaatttgcctggagtttaccttcggtgggctcaggtttagatgaacctgagtggtgcaaactgaagtatattggtgggactgacatcagcttcttgaaggaagacccatccacagcatgtgccgcggtggtagtcctcaatgccgatactttagaagttgtccatgaagagttcaatgttgttcgactgcaagtgccatatattcctggttttcttgcattcagagaggctccagttcttcttggactcttggaaaaggtgaagatcaatgcacctcatttctgcccacagcttctgcatccagcaggttttggtttagcttgtcatctcggcgttcttgcagacattcctactattggagttggaaaaaatctacatcaggtagatggccttaaccaatcagaagttagaagactgctcggatcaaaagagaactgcaacagggaactggttttgttgacgggacagtctgggacaaaatggggcatggcaaataaccgacagcagttaatggcggcgtcggcccaactgagcccgcatcagaggacgcg

SEQ ID NO: 61698 - DNA, 836 bp, Zea Mays
cgtcaccacagccgcctctctcgctcttctttcttgtcccgggctcccggctccatagtcgccgttacatcggacaagggatcttgcggtgaagcatctaatctgagcagtcagtcgtccccccgctcgcggccgggctactgctggtcgtcaagtactcaagttgtaggcgtgcagccgggccgccggccgctagctgctgtcagcacgcgcacacagcagcagggtggtcgcccgcggccggtagccggcacgcggtcgcgacaagccgatagcaacagcaagccaggcccaagttcagtccccagagagcggcaagctaggtctgtcatcttctctggagggttcagaaccaccgagaattagctgtctttgaggagtacaataggaatggatgatgctcaagggtatcaagaaggagatgatcatgacttagtgatgcagaaacaagaatggatcaaaacacaagacatgctcaagagtaaacttattcttgaagatgaatttgcctggagtttaccttcggtgggctcaggtttagatgaacctgagtggtgcaaactgaagtatattggtgggactgacatcagcttcttgaaggaagacccatccacagcatgtgccgcggtggtagtcctcaatgccgatactttagaagttgtccatgaagagttcaatgttgttcgactgcaagtgccatatattcctggttttcttgcattcagagaggctccagttcttcttggactcttggaaaaggtgaagatcaatgcacctcatttctgcccacagttgctcatggttgatggaaatggattgctccatccgcgagctac

SEQ ID NO: 61699 - DNA, 771 bp, Zea Mays
gtcaccacagccgcctctctcgctcttctttcttgtcccgggctcccggctccatagtcgccgttacatcggacaagggatcttgcggtgaagcatctaatctgagcagtcagtcgtccccccgctcgcggccgggctactgctggtcgtcaagtactcaagttgtaggcgtgcagccgggccgccggccgctagctgctgtcagcacgcgcacacagcagcagggtggtcgcccgcggccggtagccggcacgcggtcgcgacaagccgatagcaacagcaagccaggcccaagttcagtccccagagagcggcaagctaggtctgtcatcttctctggagggttcagaaccaccgagaattagctgtctttgaggagtacaataggaatggatgatgctcaagggtatcaagaaggagatgatcatgacttagtgatgcagaaacaagaatggatcaaaacacaagacatgctcaagagtaaacttattcttgaagatgaatttgcctggagtttaccttcggtgggctcaggtttagatgaacctgagtggtgcaaactgaagtatattggtgggactgacatcagcttcttgaaggaagacccatccacagcatgtgccgcggtggtagtcctcaatgccgatactttagaagttgtccatgaagagttcaatgttgttcgactgcaagtgccatatattcctggttttcttgcattcagagagagccaagggattctagtatgatcaatccaaaatcatagatctt

SEQ ID NO: 61700 - DNA, 3710 bp, Zea Mays
atcaaatttaggtgagactgtgagagagtcccgcggcgcccacgcgcgcgacctgcgcgggagacccgatcaagccgaaaccgaaagcgaccgtacgccaccaggcctaccaaaacgacgcgagcccgtgcctctcccgtccccacttcggccttcccttcgcctccccgtccgtccgcccgtccgtccatccgccgcgcgctaaacttgggggaggtgcccagctggctggttcgccgctcggcgaacggtgatcgcgtggcccgtggcgacgctggggaggacggcggggggcacgcacggcacggccggctggcatgggttccgggacgtggcgcaaggcctacggcgcgctcaaggactccaccaaggtcggcctcgccaacttcaacagcgagtacaaggatctggacatcgccattgtgaaggcgacgaaccacgtggagtgcccgcccaaggagcgccactttaggaggatactcttcgcgacgtcggcgcaccggccgcaagccgacgtcgcctattcgatatgcacgctggctaggaggctgtccaagaccaagagctggatagttgcactgaaaacgttgatagtgatacacaggctgctcagagaaggcgacggcacattcaaggaggatttcctcacgtattcgtatagaggaaacgttctgcagatcccgcagttcaaggacgactccagcccattagcttgggactgctccgcctgggttcgcacgtacgcgctctacctggacgagcggctcgagtgcttcaggatcctcaagtacgacgtcgaactagatcggctgctcaagttaccccatgcttctggcaaggcgcacagcagaacaagatccctgccgctcgcggaacttctggtccagttgccagcgttgcagaagctgcttctcaggcttatttactgccagcctgaaggtgcagcctgcacaaactacctcgtacaatatgcgctggctcttgttttgaaggaaagtttcaagatatactgctcaatcaatgatggcatcattaaccttgttgacatgtattttgagatgccgaagtatgatgcaatcaaggcccttgaaatctataaacgagctggtcagcaggcagaaaaactctctaacttctatgaccactgcaaacttcttgagctggccaggactttccaatttcccactctgaggcagccgcctccttcatttcttgtgacaatggaagagtatatcagagaagcaccccgtgccgatactgagagcaagagtttgggagccgagaaaccagtggaagatgaaaagtatgaacctgcagagcctgaagcggagccacaaccatctgttgatcctttggaagaagcagtggaacctcagccacgggcgactactgggaatctattaaacttggatgaagaagtaaaccccatgattgcagaccttgaaacaagcaatgcactggctcttgctattgtggcaccaggtaatgaaaacaagatgccaacttctcaagacttatttgcccttgacaaggctggatgggaattggcactggttactgcaccaagtaaccacacaaatcaacaagtggacaatcaattggctgggggatttgacaagctattgctagacagtctttacgaagacgaggcaaggaggcagcaaatagccagtgtgacctacactggaagtactgcagcaaacccatttgaccacaatgatccatttgccatgtcaaacagctttgcaccaccatcaaatgtgcagttagctatgatggcagagcagcagcaatattaccatgcacagcagcagcagtattatcagatacagcagcagcaccagatggtgatgttgccgcctcaaacataccagcagcagtcgcagtattctgccccttctcaatctggattatccaatccttttggtgatccattcagtagcctcgtcacgatggctaatccaccaaagcaaagcaattcaaatttagtctgaattgttttttttttgtgtctactgctcccactaattcagaccatacacaacattgacaattttgaggagcaacttgtacagttcaaaaactttgaatactgtatcttaacgatgcgctgtactgcagtagtgctcacatttggaaactattatgatctgaaatgttaatataatacacagttttgagttgtacaccatatcagctaatatgagagcatgtttaccatcatacattccagatgccggatagcatagagaagacggtgaaatcgtagtttttatttaagactagtcttattacaagatcacatgaattcaggacaaatttattttatacagtagctcacaaattcagaaggtcaggcctgatgcagtgatgggagctgtctgaggtcgtgggttcgcagcagctggggagccctttctccagaaggtactcatgtggggagccttcggcactggatttgcccacaagtagctcacgaattcattacttcatgacaccactaaatgacatgaaagtgacaccttttccagacccccttcatccagtgcaataacatagctcatccattcattcctcttgaacttgattggcatccatatttgggatctccacttcatctggaaagcagcctgcatatatgtcgatactccgtgtaaggcagatgctatagaaactgttagagtatattaggcatgttataatatattaggcaactactaatatggttggtttaggattgattataatcctggataacatttcttgtatctaagataacattccttgtatctaagataatcttccttatctctaggatagccttcttgtcttcaagtcatgtactcctatatattctctctaaagacttgttccatatggattgagtaggtttagatccatagcaagtcaaaatacaactcaatcagttcaatccacatcgaattgaaataaccaaacaaggcctaaaggctcgatgcaatacatccaacatattatacgcaatctctccttgcagaaacaaagcataacgataaaatgtctcgaaattgttctgatttctagaagttcttatgcacgcgtttcagttcagaattgagcacatccgaatagcgaaatggagatcccaaatagtcagataccttcgatgaaataggtcgagcacgggtaaccgcgggaggaggcggcgacggcgcgggcctcgtcggcagagagtccccgcctcggcgctgccgaggagcccatgaacccgccagcgtggccgataagcgcgagaacccccagggccgcgccggcgggccggggcggagcgaagtaggatgtcccgggccggaagggcgcccagtcgggctcggccatccgcgccatggcgctgtcgatcgcctcctccaaccgccgggactgctcggaggcgtccgtcgcaggtgaagaaggccccgcggcgtcctcttcaagaaccttcaccgcgcgccggcgagtgtggttgtgccggcggctcagaaccacgccgggctggggctggggctgggccccgaggcggcgcgccaggaccgctgaccgggagcagagcacgcgtgccatggatgccttcacgtaacgcgtacggagtcagagttggcgcccgggagacggagcagcagcagcctgtgagcgcttgcgtccgacggcgagctggtgtgcgcgtcgcgaaggttgggggatcgttgggattt

SEQ ID NO: 61701 - DNA, 3970 bp, Zea Mays
atcaaatttaggtgagactgtgagagagtcccgcggcgcccacgcgcgcgacctgcgcgggagacccgatcaagccgaaaccgaaagcgaccgtacgccaccaggcctaccaaaacgacgcgagcccgtgcctctcccgtccccacttcggccttcccttcgcctccccgtccgtccgcccgtccgtccatccgccgcgcgctaaacttgggggaggtgcccagctggctggttcgccgctcggcgaacggtgatcgcgtggcccgtggcgacgctggggaggacggcggggggcacgcacggcacggccggctggcatgggttccgggacgtggcgcaaggcctacggcgcgctcaaggactccaccaaggtcggcctcgccaacttcaacagcgagtacaaggatctggacatcgccattgtgaaggcgacgaaccacgtggagtgcccgcccaaggagcgccactttaggaggatactcttcgcgacgtcggcgcaccggccgcaagccgacgtcgcctattcgatatgcacgctggctaggaggctgtccaagaccaagagctggatagttgcactgaaaacgttgatagtgatacacaggctgctcagagaaggcgacggcacattcaaggaggatttcctcacgtattcgtatagaggaaacgttctgcagatcccgcagttcaaggacgactccagcccattagcttgggactgctccgcctgggttcgcacgtacgcgctctacctggacgagcggctcgagtgcttcaggatcctcaagtacgacgtcgaactagatcggctgctcaagttaccccatgcttctggcaaggcgcacagcagaacaagatccctgccgctcgcggaacttctggtccagttgccagcgttgcagaagctgcttctcaggcttatttactgccagcctgaaggtgcagcctgcacaaactacctcgtacaatatgcgctggctcttgttttgaaggaaagtttcaagatatactgctcaatcaatgatggcatcattaaccttgttgacatgtattttgagatgccgaagtatgatgcaatcaaggcccttgaaatctataaacgagctggtcagcaggcagaaaaactctctaacttctatgaccactgcaaacttcttgagctggccaggactttccaatttcccactctgaggcaggcatgtcccgacattcgttactgattttaatagataaatcttcaggaaagataatactacatcactgactataccaaagttaagtgtaaaaatgtcagtcgtttgaatcctatttggaaattggaacgacttaaattttgtcctctgcacactgtactgtactaatagtcattcactgtgttgatcggctactaatcaccactatgcagccgcctccttcatttcttgtgacaatggaagagtatatcagagaagcaccccgtgccgatactgagagcaagagtttggaaaactatgaagagaatcaacctagtgataatgaagcagcatctccacagggagccgagaaaccagtggaagatgaaaagtatgaacctgcagagcctgaagcggagccacaaccatctgttgatcctttggaagaagcagtggaacctcagccacgggcgactactgggaatctattaaacttggatgaagaagtaaaccccatgattgcagaccttgaaacaagcaatgcactggctcttgctattgtggcaccaggtaatgaaaacaagatgccaacttctcaagacttatttgcccttgacaaggctggatgggaattggcactggttactgcaccaagtaaccacacaaatcaacaagtggacaatcaattggctgggggatttgacaagctattgctagacagtctttacgaagacgaggcaaggaggcagcaaatagccagtgtgacctacactggaagtactgcagcaaacccatttgaccacaatgatccatttgccatgtcaaacagctttgcaccaccatcaaatgtgcagttagctatgatggcagagcagcagcaatattaccatgcacagcagcagcagtattatcagatacagcagcagcaccagatggtgatgttgccgcctcaaacataccagcagcagtcgcagtattctgccccttctcaatctggattatccaatccttttggtgatccattcagtagcctcgtcacgatggctaatccaccaaagcaaagcaattcaaatttagtctgaattgttttttttttgtgtctactgctcccactaattcagaccatacacaacattgacaattttgaggagcaacttgtacagttcaaaaactttgaatactgtatcttaacgatgcgctgtactgcagtagtgctcacatttggaaactattatgatctgaaatgttaatataatacacagttttgagttgtacaccatatcagctaatatgagagcatgtttaccatcatacattccagatgccggatagcatagagaagacggtgaaatcgtagtttttatttaagactagtcttattacaagatcacatgaattcaggacaaatttattttatacagtagctcacaaattcagaaggtcaggcctgatgcagtgatgggagctgtctgaggtcgtgggttcgcagcagctggggagccctttctccagaaggtactcatgtggggagccttcggcactggatttgcccacaagtagctcacgaattcattacttcatgacaccactaaatgacatgaaagtgacaccttttccagacccccttcatccagtgcaataacatagctcatccattcattcctcttgaacttgattggcatccatatttgggatctccacttcatctggaaagcagcctgcatatatgtcgatactccgtgtaaggcagatgctatagaaactgttagagtatattaggcatgttataatatattaggcaactactaatatggttggtttaggattgattataatcctggataacatttcttgtatctaagataacattccttgtatctaagataatcttccttatctctaggatagccttcttgtcttcaagtcatgtactcctatatattctctctaaagacttgttccatatggattgagtaggtttagatccatagcaagtcaaaatacaactcaatcagttcaatccacatcgaattgaaataaccaaacaaggcctaaaggctcgatgcaatacatccaacatattatacgcaatctctccttgcagaaacaaagcataacgataaaatgtctcgaaattgttctgatttctagaagttcttatgcacgcgtttcagttcagaattgagcacatccgaatagcgaaatggagatcccaaatagtcagataccttcgatgaaataggtcgagcacgggtaaccgcgggaggaggcggcgacggcgcgggcctcgtcggcagagagtccccgcctcggcgctgccgaggagcccatgaacccgccagcgtggccgataagcgcgagaacccccagggccgcgccggcgggccggggcggagcgaagtaggatgtcccgggccggaagggcgcccagtcgggctcggccatccgcgccatggcgctgtcgatcgcctcctccaaccgccgggactgctcggaggcgtccgtcgcaggtgaagaaggccccgcggcgtcctcttcaagaaccttcaccgcgcgccggcgagtgtggttgtgccggcggctcagaaccacgccgggctggggctggggctgggccccgaggcggcgcgccaggaccgctgaccgggagcagagcacgcgtgccatggatgccttcacgtaacgcgtacggagtcagagttggcgcccgggagacggagcagcagcagcctgtgagcgcttgcgtccgacggcgagctggtgtgcgcgtcgcgaaggttgggggatcgttgggattt

SEQ ID NO: 61702 - DNA, 3729 bp, Zea Mays
atcaaatttaggtgagactgtgagagagtcccgcggcgcccacgcgcgcgacctgcgcgggagacccgatcaagccgaaaccgaaagcgaccgtacgccaccaggcctaccaaaacgacgcgagcccgtgcctctcccgtccccacttcggccttcccttcgcctccccgtccgtccgcccgtccgtccatccgccgcgcgctaaacttgggggaggtgcccagctggctggttcgccgctcggcgaacggtgatcgcgtggcccgtggcgacgctggggaggacggcggggggcacgcacggcacggccggctggcatgggttccgggacgtggcgcaaggcctacggcgcgctcaaggactccaccaaggtcggcctcgccaacttcaacagcgagtacaaggatctggacatcgccattgtgaaggcgacgaaccacgtggagtgcccgcccaaggagcgccactttaggaggatactcttcgcgacgtcggcgcaccggccgcaagccgacgtcgcctattcgatatgcacgctggctaggaggctgtccaagaccaagagctggatagctgctcagagaaggcgacggcacattcaaggaggatttcctcacgtattcgtatagaggaaacgttctgcagatcccgcagttcaaggacgactccagcccattagcttgggactgctccgcctgggttcgcacgtacgcgctctacctggacgagcggctcgagtgcttcaggatcctcaagtacgacgtcgaactagatcggctgctcaagttaccccatgcttctggcaaggcgcacagcagaacaagatccctgccgctcgcggaacttctggtccagttgccagcgttgcagaagctgcttctcaggcttatttactgccagcctgaaggtgcagcctgcacaaactacctcgtacaatatgcgctggctcttgttttgaaggaaagtttcaagatatactgctcaatcaatgatggcatcattaaccttgttgacatgtattttgagatgccgaagtatgatgcaatcaaggcccttgaaatctataaacgagctggtcagcaggcagaaaaactctctaacttctatgaccactgcaaacttcttgagctggccaggactttccaatttcccactctgaggcagccgcctccttcatttcttgtgacaatggaagagtatatcagagaagcaccccgtgccgatactgagagcaagagtttggaaaactatgaagagaatcaacctagtgataatgaagcagcatctccacagggagccgagaaaccagtggaagatgaaaagtatgaacctgcagagcctgaagcggagccacaaccatctgttgatcctttggaagaagcagtggaacctcagccacgggcgactactgggaatctattaaacttggatgaagaagtaaaccccatgattgcagaccttgaaacaagcaatgcactggctcttgctattgtggcaccaggtaatgaaaacaagatgccaacttctcaagacttatttgcccttgacaaggctggatgggaattggcactggttactgcaccaagtaaccacacaaatcaacaagtggacaatcaattggctgggggatttgacaagctattgctagacagtctttacgaagacgaggcaaggaggcagcaaatagccagtgtgacctacactggaagtactgcagcaaacccatttgaccacaatgatccatttgccatgtcaaacagctttgcaccaccatcaaatgtgcagttagctatgatggcagagcagcagcaatattaccatgcacagcagcagcagtattatcagatacagcagcagcaccagatggtgatgttgccgcctcaaacataccagcagcagtcgcagtattctgccccttctcaatctggattatccaatccttttggtgatccattcagtagcctcgtcacgatggctaatccaccaaagcaaagcaattcaaatttagtctgaattgttttttttttgtgtctactgctcccactaattcagaccatacacaacattgacaattttgaggagcaacttgtacagttcaaaaactttgaatactgtatcttaacgatgcgctgtactgcagtagtgctcacatttggaaactattatgatctgaaatgttaatataatacacagttttgagttgtacaccatatcagctaatatgagagcatgtttaccatcatacattccagatgccggatagcatagagaagacggtgaaatcgtagtttttatttaagactagtcttattacaagatcacatgaattcaggacaaatttattttatacagtagctcacaaattcagaaggtcaggcctgatgcagtgatgggagctgtctgaggtcgtgggttcgcagcagctggggagccctttctccagaaggtactcatgtggggagccttcggcactggatttgcccacaagtagctcacgaattcattacttcatgacaccactaaatgacatgaaagtgacaccttttccagacccccttcatccagtgcaataacatagctcatccattcattcctcttgaacttgattggcatccatatttgggatctccacttcatctggaaagcagcctgcatatatgtcgatactccgtgtaaggcagatgctatagaaactgttagagtatattaggcatgttataatatattaggcaactactaatatggttggtttaggattgattataatcctggataacatttcttgtatctaagataacattccttgtatctaagataatcttccttatctctaggatagccttcttgtcttcaagtcatgtactcctatatattctctctaaagacttgttccatatggattgagtaggtttagatccatagcaagtcaaaatacaactcaatcagttcaatccacatcgaattgaaataaccaaacaaggcctaaaggctcgatgcaatacatccaacatattatacgcaatctctccttgcagaaacaaagcataacgataaaatgtctcgaaattgttctgatttctagaagttcttatgcacgcgtttcagttcagaattgagcacatccgaatagcgaaatggagatcccaaatagtcagataccttcgatgaaataggtcgagcacgggtaaccgcgggaggaggcggcgacggcgcgggcctcgtcggcagagagtccccgcctcggcgctgccgaggagcccatgaacccgccagcgtggccgataagcgcgagaacccccagggccgcgccggcgggccggggcggagcgaagtaggatgtcccgggccggaagggcgcccagtcgggctcggccatccgcgccatggcgctgtcgatcgcctcctccaaccgccgggactgctcggaggcgtccgtcgcaggtgaagaaggccccgcggcgtcctcttcaagaaccttcaccgcgcgccggcgagtgtggttgtgccggcggctcagaaccacgccgggctggggctggggctgggccccgaggcggcgcgccaggaccgctgaccgggagcagagcacgcgtgccatggatgccttcacgtaacgcgtacggagtcagagttggcgcccgggagacggagcagcagcagcctgtgagcgcttgcgtccgacggcgagctggtgtgcgcgtcgcgaaggttgggggatcgttgggattt

SEQ ID NO: 61703 - DNA, 1039 bp, Zea Mays
gggggacagaccttcgctgtggttttgcctgaagaaaaggatctcaacacagggtcatgaaaagggactgctgggcgtcggctggactgcccaggaacacgttgaaagcaacataactctgggagtttcttttttttagaggggggcttgaaccctggttgttggtatcataactggaagcaaaatcaccacaatagcggtgtcttctcaactttaatattatcaaatagtctctaatgttaataccacattctttatgcagtagagaagatgagtttgctgagcccactgaacttgatcgtagtaaaacgacaatgctgagtttcgaggataagaaaaccagtatcggtaactggatccagtgccgggaagttctagacacaggagttgtttgtggcaaatggcggagggcaccattgtttgttgttcaatcaagtgactgggactgttcgtgctcagttgtttgggatcctatccatgctgattgtgctgttccacaggaattggagaccgttaaagttcacgagcaactgaagtacataaataagctgaagaatcgtctaggtgacagcaatcagaaacgctgaaaaactgctgtccacagatgggtgtcgataccgtgtaccaattttcctcggatgcctcggatgaagtgagagccagtagatatgaaatccgtgtctacgcatgacatcttgacacataaaaatgctccttccagtcaaccggcatacgttatacgagtttcagtgtcgtgtgtaaataagagaaagaaaaggcattttaaaaacaaaagccatagcaaaagcaaaaaaaggaggaggagaagaaaatactcgatgctgctggagaactacaactcggtgagatggaaacagaaaggtctgggttgtatcatgaggtgtaaactggggtggtgggcgtgtggccgtgtttgtgtgtgtgtttacagttttgtcacctccgctgcttgaattatgatgaccgaagaatggatcacaatgctatagtttgatttcttttacaaaaaaaagctgaa

SEQ ID NO: 61704 - DNA, 2044 bp, Zea Mays
tttctcagcaccttcttgtgccgttcttcacccgtcgtctcctttccgcagcaaccatcagcgtccaacctcctctctcaccctctccgtttgcaacaaccgcccaacgccaggtgcccagatcggcgtcccttccagccattttccgcgtccttcgccggtgtcgaagcacccatcagtgtacctgcttcagttaatagttatctgatatctacccttggccaaagcaagctatctattgtgcctgtgatttttgttgggagctgtcatagttcagtttttggtaggaacggtcacagctctactcaactgaaggcatggctgtaaaatctagtagaagttcagatgaaagctatatagagcctctcctatgctggaagaaggaattcagatcatctgtaattaaaattgttgattcgtccttaaactcgagtttgatgtctgccgacagtatttgttcaattcctgcttcagaatatggtttctattttaataaacgaatgaagatggatgaggaatatgatcaccttctgacaaatggaaatatgaaagatagtagcacggcaaacttcacaaccactggatatgtctcatctccagagcgcaacatggatggtcaatcatgtatggttagttcaactacagaatttttagcaggatcacattctaatgttaatactggtcagccatcatcctcatcaagtgcaccatcttatatcagtcagagtattaaagaagcttgggagtgttcattgcctgatacaaatactccaaaaccattaacagagttaatatcagcgagggacctttgcatctccatcctcaaaaggaaaatatgttccgccaaagactcagaactaagcagaacatcaagtactatagaccgtgatgataatctaaacaatcctttatttgaatgcacaaaatgcggtctgatggaagatccatccaaaatgttaatttgtgattgttgtgaaggagcatttcatttattgtgttgcaatccacatgtcaagaaaataccagaggaagagtggtattgtttggcatgtaaaagaaagaaacctaagagacaacgtggaaagtttgcaaatcccaaagttgaatcatccaagggcattcaaagaccccgccgaggtcttggtcctattcgagatatgttactggattctgaatcatatgaaagtggggttcggattggtactaagtttcaagcagaagttccaaaatggtctggtcctatttctagtagagaagatgagtttgctgagcccactgaacttgatcgtagtaaaacgacaatgctgagtttcgaggataagaaaaccagtatcggtaactggatccagtgccgggaagttctagacacaggagttgtttgtggcaaatggcggagggcaccattgtttgttgttcaatcaagtgactgggactgttcgtgctcagttgtttgggatcctatccatgctgattgtgctgttccacaggaattggagaccgttaaagttcacgagcaactgaagtacataaataagaatcgtctaggtgacagcaatcagaaacgctgaaaaacggtactcttgctgtcctgcaccagtgctgtccacagatgggtgtcgataccgtgtaccaattttcctcggatgcctcggatgaagtgagagccagtagatatgaaatccgtgtctacgcatgacatcttgacacataaaaatgctccttccagtcaaccggcatacgttatacgagtttcagtgtcgtgtgtaaataagagaaagaaaaggcattttaaaaacaaaagccatagcaaaagcaaaaaaaggaggaggagaagaaaatactcgatgctgctggagaactacaactcggtgagatggaaacagaaaggtctgggttgtatcatgaggtgtaaactggggtggtgggcgtgtggccgtgtttgtgtgtgtgtttacagttttgtcacctccgctgcttgaattatgatgaccgaagaatggatcacaatgctatagtttgatttcttttacaaaaaaaagctgaa

SEQ ID NO: 61705 - DNA, 1989 bp, Zea Mays
tttctcagcaccttcttgtgccgttcttcacccgtcgtctcctttccgcagcaaccatcagcgtccaacctcctctctcaccctctccgtttgcaacaaccgcccaacgccaggtgcccagatcggcgtcccttccagccattttccgcgtccttcgccggtgtcgaagcacccatcagtgtacctgcttcagttaatagttatctgatatctacccttggccaaagcaagctatctattgtgcctgtgatttttgttgggagctgtcatagttcagtttttggtaggaacggtcacagctctactcaactgaaggcatggctgtaaaatctagtagaagttcagatgaaagctatatagagcctctcctatgctggaagaaggaattcagatcatctgtaattaaaattgttgattcgtccttaaactcgagtttgatgtctgccgacagtatttgttcaattcctgcttcagaatatggtttctattttaataaacgaatgaagatggatgaggaatatgatcaccttctgacaaatggaaatatgaaagatagtagcacggcaaacttcacaaccactggatatgtctcatctccagagcgcaacatggatggtcaatcatgtatggttagttcaactacagaatttttagcaggatcacattctaatgttaatactggtcagccatcatcctcatcaagtgcaccatcttatatcagtcagagtattaaagaagcttgggagtgttcattgcctgatacaaatactccaaaaccattaacagagttaatatcagcgagggacctttgcatctccatcctcaaaaggaaaatatgttccgccaaagactcagaactaagcagaacatcaagtactatagaccgtgatgataatctaaacaatcctttatttgaatgcacaaaatgcggtctgatggaagatccatccaaaatgttaatttgtgattgttgtgaaggagcatttcatttattgtgttgcaatccacatgtcaagaaaataccagaggaagagtggtattgtttggcatgtaaaagaaagaaacctaagagacaacgtggaaagtttgcaaatcccaaagttgaatcatccaagggcattcaaagaccccgccgaggtcttggtcctattcgagatatgttactggattctgaatcatatgaaagtggggttcggattggtactaagtttcaagcagaagttccaaaatggtctggtcctatttctagttcgaggataagaaaaccagtatcggtaactggatccagtgccgggaagttctagacacaggagttgtttgtggcaaatggcggagggcaccattgtttgttgttcaatcaagtgactgggactgttcgtgctcagttgtttgggatcctatccatgctgattgtgctgttccacaggaattggagaccgttaaagttcacgagcaactgaagtacataaataagctgaagaatcgtctaggtgacagcaatcagaaacgctgaaaaacggtactcttgctgtcctgcaccagtgctgtccacagatgggtgtcgataccgtgtaccaattttcctcggatgcctcggatgaagtgagagccagtagatatgaaatccgtgtctacgcatgacatcttgacacataaaaatgctccttccagtcaaccggcatacgttatacgagtttcagtgtcgtgtgtaaataagagaaagaaaaggcattttaaaaacaaaagccatagcaaaagcaaaaaaaggaggaggagaagaaaatactcgatgctgctggagaactacaactcggtgagatggaaacagaaaggtctgggttgtatcatgaggtgtaaactggggtggtgggcgtgtggccgtgtttgtgtgtgtgtttacagttttgtcacctccgctgcttgaattatgatgaccgaagaatggatcacaatgctatagtttgatttcttttacaaaaaaaagctgaa

SEQ ID NO: 61706 - DNA, 2050 bp, Zea Mays
tttctcagcaccttcttgtgccgttcttcacccgtcgtctcctttccgcagcaaccatcagcgtccaacctcctctctcaccctctccgtttgcaacaaccgcccaacgccaggtgcccagatcggcgtcccttccagccattttccgcgtccttcgccggtgtcgaagcacccatcagcagtgtacctgcttcagttaatagttatctgatatctacccttggccaaagcaagctatctattgtgcctgtgatttttgttgggagctgtcatagttcagtttttggtaggaacggtcacagctctactcaactgaaggcatggctgtaaaatctagtagaagttcagatgaaagctatatagagcctctcctatgctggaagaaggaattcagatcatctgtaattaaaattgttgattcgtccttaaactcgagtttgatgtctgccgacagtatttgttcaattcctgcttcagaatatggtttctattttaataaacgaatgaagatggatgaggaatatgatcaccttctgacaaatggaaatatgaaagatagtagcacggcaaacttcacaaccactggatatgtctcatctccagagcgcaacatggatggtcaatcatgtatggttagttcaactacagaatttttagcaggatcacattctaatgttaatactggtcagccatcatcctcatcaagtgcaccatcttatatcagtcagagtattaaagaagcttgggagtgttcattgcctgatacaaatactccaaaaccattaacagagttaatatcagcgagggacctttgcatctccatcctcaaaaggaaaatatgttccgccaaagactcagaactaagcagaacatcaagtactatagaccgtgatgataatctaaacaatcctttatttgaatgcacaaaatgcggtctgatggaagatccatccaaaatgttaatttgtgattgttgtgaaggagcatttcatttattgtgttgcaatccacatgtcaagaaaataccagaggaagagtggtattgtttggcatgtaaaagaaagaaacctaagagacaacgtggaaagtttgcaaatcccaaagttgaatcatccaagggcattcaaagaccccgccgaggtcttggtcctattcgagatatgttactggattctgaatcatatgaaagtggggttcggattggtactaagtttcaagcagaagttccaaaatggtctggtcctatttctagagaagatgagtttgctgagcccactgaacttgatcgtagtaaaacgacaatgctgagtttcgaggataagaaaaccagtatcggtaactggatccagtgccgggaagttctagacacaggagttgtttgtggcaaatggcggagggcaccattgtttgttgttcaatcaagtgactgggactgttcgtgctcagttgtttgggatcctatccatgctgattgtgctgttccacaggaattggagaccgttaaagttcacgagcaactgaagtacataaataagctgaagaatcgtctaggtgacagcaatcagaaacgctgaaaaacggtactcttgctgtcctgcaccagtgctgtccacagatgggtgtcgataccgtgtaccaattttcctcggatgcctcggatgaagtgagagccagtagatatgaaatccgtgtctacgcatgacatcttgacacataaaaatgctccttccagtcaaccggcatacgttatacgagtttcagtgtcgtgtgtaaataagagaaagaaaaggcattttaaaaacaaaagccatagcaaaagcaaaaaaaggaggaggagaagaaaatactcgatgctgctggagaactacaactcggtgagatggaaacagaaaggtctgggttgtatcatgaggtgtaaactggggtggtgggcgtgtggccgtgtttgtgtgtgtgtttacagttttgtcacctccgctgcttgaattatgatgaccgaagaatggatcacaatgctatagtttgatttcttttacaaaaaaaagctgaa

SEQ ID NO: 61707 - DNA, 1945 bp, Zea Mays
tttctcagcaccttcttgtgccgttcttcacccgtcgtctcctttccgcagcaaccatcagcgtccaacctcctctctcaccctctccgtttgcaacaaccgcccaacgccaggtgcccagatcggcgtcccttccagccattttccgcgtccttcgccggtgtcgaagcacccatcagtgtacctgcttcagttaatagttatctgatatctacccttggccaaagcaagctatctattgtgcctgtgatttttgttgggagctgtcatagttcagtttttggtaggaacggtcacagctctactcaactgaaggcatggctgtaaaatctagtagaagttcagatgaaagctatatagagcctctcctatgctggaagaaggaattcagatcatctgtaattaaaattgttgattcgtccttaaactcgagtttgatgtctgccgacagtatttgttcaattcctgcttcagaatatggtttctattttaataaacgaatgaagatggatgaggaatatgatcaccttctgacaaatggaaatatgaaagatagtagcacggcaaacttcacaaccactggatatgtctcatctccagagcgcaacatggatggtcaatcatgtatggttagttcaactacagaatttttagcaggatcacattctaatgttaatactggtcagccatcatcctcatcaagtgcaccatcttatatcagtcagagtattaaagaagcttgggagtgttcattgcctgatacaaatactccaaaaccattaacagagttaatatcagcgagggacctttgcatctccatcctcaaaaggaaaatatgttccgccaaagactcagaactaagcagaacatcaagtactatagaccgtgatgataatctaaacaatcctttatttgaatgcacaaaatgcggtctgatggaagatccatccaaaatgttaatttgtgattgttgtgaaggagcatttcatttattgtgttgcaatccacatgtcaagaaaataccagaggaagagtggtattgtttggcatgtaaaagaaagaaacctaagagacaacgtggaaagtttgcaaatcccaaagttgaatcatccaagggcattcaaagaccccgccgaggtcttggtcctattcgagatatgttactggattctgaatcatatgaaagtggggttcggattggtactaagtttcaagcagaagttccaaaatggtctggtcctatttctagttcgaggataagaaaaccagtatcggtaactggatccagtgccgggaagttctagacacaggagttgtttgtggcaaatggcggagggcaccattgtttgttgttcaatcaagtgactgggactgttcgtgctcagttgtttgggatcctatccatgctgattgtgctgttccacaggaattggagaccgttaaagttcacgagcaactgaagtacataaataagggtactcttgctgtcctgcaccagtgctgtccacagatgggtgtcgataccgtgtaccaattttcctcggatgcctcggatgaagtgagagccagtagatatgaaatccgtgtctacgcatgacatcttgacacataaaaatgctccttccagtcaaccggcatacgttatacgagtttcagtgtcgtgtgtaaataagagaaagaaaaggcattttaaaaacaaaagccatagcaaaagcaaaaaaaggaggaggagaagaaaatactcgatgctgctggagaactacaactcggtgagatggaaacagaaaggtctgggttgtatcatgaggtgtaaactggggtggtgggcgtgtggccgtgtttgtgtgtgtgtttacagttttgtcacctccgctgcttgaattatgatgaccgaagaatggatcacaatgctatagtttgatttcttttacaaaaaaaagctgaa

SEQ ID NO: 61708 - DNA, 2053 bp, Zea Mays
tttctcagcaccttcttgtgccgttcttcacccgtcgtctcctttccgcagcaaccatcagcgtccaacctcctctctcaccctctccgtttgcaacaaccgcccaacgccaggtgcccagatcggcgtcccttccagccattttccgcgtccttcgccggtgtcgaagcacccatcagcagtgtacctgcttcagttaatagttatctgatatctacccttggccaaagcaagctatctattgtgcctgtgatttttgttgggagctgtcatagttcagtttttggtaggaacggtcacagctctactcaactgaaggcatggctgtaaaatctagtagaagttcagatgaaagctatatagagcctctcctatgctggaagaaggaattcagatcatctgtaattaaaattgttgattcgtccttaaactcgagtttgatgtctgccgacagtatttgttcaattcctgcttcagaatatggtttctattttaataaacgaatgaagatggatgaggaatatgatcaccttctgacaaatggaaatatgaaagatagtagcacggcaaacttcacaaccactggatatgtctcatctccagagcgcaacatggatggtcaatcatgtatggttagttcaactacagaatttttagcaggatcacattctaatgttaatactggtcagccatcatcctcatcaagtgcaccatcttatatcagtcagagtattaaagaagcttgggagtgttcattgcctgatacaaatactccaaaaccattaacagagttaatatcagcgagggacctttgcatctccatcctcaaaaggaaaatatgttccgccaaagactcagaactaagcagaacatcaagtactatagaccgtgatgataatctaaacaatcctttatttgaatgcacaaaatgcggtctgatggaagatccatccaaaatgttaatttgtgattgttgtgaaggagcatttcatttattgtgttgcaatccacatgtcaagaaaataccagaggaagagtggtattgtttggcatgtaaaagaaagaaacctaagagacaacgtggaaagtttgcaaatcccaaagttgaatcatccaagggcattcaaagaccccgccgaggtcttggtcctattcgagatatgttactggattctgaatcatatgaaagtggggttcggattggtactaagtttcaagcagaagttccaaaatggtctggtcctatttctagtagagaagatgagtttgctgagcccactgaacttgatcgtagtaaaacgacaatgctgagtttcgaggataagaaaaccagtatcggtaactggatccagtgccgggaagttctagacacaggagttgtttgtggcaaatggcggagggcaccattgtttgttgttcaatcaagtgactgggactgttcgtgctcagttgtttgggatcctatccatgctgattgtgctgttccacaggaattggagaccgttaaagttcacgagcaactgaagtacataaataagctgaagaatcgtctaggtgacagcaatcagaaacgctgaaaaacggtactcttgctgtcctgcaccagtgctgtccacagatgggtgtcgataccgtgtaccaattttcctcggatgcctcggatgaagtgagagccagtagatatgaaatccgtgtctacgcatgacatcttgacacataaaaatgctccttccagtcaaccggcatacgttatacgagtttcagtgtcgtgtgtaaataagagaaagaaaaggcattttaaaaacaaaagccatagcaaaagcaaaaaaaggaggaggagaagaaaatactcgatgctgctggagaactacaactcggtgagatggaaacagaaaggtctgggttgtatcatgaggtgtaaactggggtggtgggcgtgtggccgtgtttgtgtgtgtgtttacagttttgtcacctccgctgcttgaattatgatgaccgaagaatggatcacaatgctatagtttgatttcttttacaaaaaaaagctgaa

SEQ ID NO: 61709 - DNA, 2050 bp, Zea Mays
tttctcagcaccttcttgtgccgttcttcacccgtcgtctcctttccgcagcaaccatcagcgtccaacctcctctctcaccctctccgtttgcaacaaccgcccaacgccaggtgcccagatcggcgtcccttccagccattttccgcgtccttcgccggtgtcgaagcacccatcagtgtacctgcttcagttaatagttatctgatatctacccttggccaaagcaagctatctattgtgcctgtgatttttgttgggagctgtcatagttcagtttttggtaggaacggtcacagctctactcaactgaaggcatggctgtaaaatctagtagaagttcagatgaaagctatatagagcctctcctatgctggaagaaggaattcagatcatctgtaattaaaattgttgattcgtccttaaactcgagtttgatgtctgccgacagtatttgttcaattcctgcttcagaatatggtttctattttaataaacgaatgaagatggatgaggaatatgatcaccttctgacaaatggaaatatgaaagatagtagcacggcaaacttcacaaccactggatatgtctcatctccagagcgcaacatggatggtcaatcatgtatggttagttcaactacagaatttttagcaggatcacattctaatgttaatactggtcagccatcatcctcatcaagtgcaccatcttatatcagtcagagtattaaagaagcttgggagtgttcattgcctgatacaaatactccaaaaccattaacagagttaatatcagcgagggacctttgcatctccatcctcaaaaggaaaatatgttccgccaaagactcagaactaagcagaacatcaagtactatagaccgtgatgataatctaaacaatcctttatttgaatgcacaaaatgcggtctgatggaagatccatccaaaatgttaatttgtgattgttgtgaaggagcatttcatttattgtgttgcaatccacatgtcaagaaaataccagaggaagagtggtattgtttggcatgtaaaagaaagaaacctaagagacaacgtggaaagtttgcaaatcccaaagttgaatcatccaagggcattcaaagaccccgccgaggtcttggtcctattcgagatatgttactggattctgaatcatatgaaagtggggttcggattggtactaagtttcaagcagaagttccaaaatggtctggtcctatttctagtagagaagatgagtttgctgagcccactgaacttgatcgtagtaaaacgacaatgctgagtttcgaggataagaaaaccagtatcggtaactggatccagtgccgggaagttctagacacaggagttgtttgtggcaaatggcggagggcaccattgtttgttgttcaatcaagtgactgggactgttcgtgctcagttgtttgggatcctatccatgctgattgtgctgttccacaggaattggagaccgttaaagttcacgagcaactgaagtacataaataagctgaagaatcgtctaggtgacagcaatcagaaacgctgaaaaacggtactcttgctgtcctgcaccagtgctgtccacagatgggtgtcgataccgtgtaccaattttcctcggatgcctcggatgaagtgagagccagtagatatgaaatccgtgtctacgcatgacatcttgacacataaaaatgctccttccagtcaaccggcatacgttatacgagtttcagtgtcgtgtgtaaataagagaaagaaaaggcattttaaaaacaaaagccatagcaaaagcaaaaaaaggaggaggagaagaaaatactcgatgctgctggagaactacaactcggtgagatggaaacagaaaggtctgggttgtatcatgaggtgtaaactggggtggtgggcgtgtggccgtgtttgtgtgtgtgtttacagttttgtcacctccgctgcttgaattatgatgaccgaagaatggatcacaatgctatagtttgatttcttttacaaaaaaaagctgaa

SEQ ID NO: 61710 - DNA, 2009 bp, Zea Mays
tttctcagcaccttcttgtgccgttcttcacccgtcgtctcctttccgcagcaaccatcagcgtccaacctcctctctcaccctctccgtttgcaacaaccgcccaacgccaggtgcccagatcggcgtcccttccagccattttccgcgtccttcgccggtgtcgaagcacccatcagcagtgtacctgcttcagttaatagttatctgatatctacccttggccaaagcaagctatctattgtgcctgtgatttttgttgggagctgtcatagttcagtttttggtaggaacggtcacagctctactcaactgaaggcatggctgtaaaatctagtagaagttcagatgaaagctatatagagcctctcctatgctggaagaaggaattcagatcatctgtaattaaaattgttgattcgtccttaaactcgagtttgatgtctgccgacagtatttgttcaattcctgcttcagaatatggtttctattttaataaacgaatgaagatggatgaggaatatgatcaccttctgacaaatggaaatatgaaagatagtagcacggcaaacttcacaaccactggatatgtctcatctccagagcgcaacatggatggtcaatcatgtatggttagttcaactacagaatttttagcaggatcacattctaatgttaatactggtcagccatcatcctcatcaagtgcaccatcttatatcagtcagagtattaaagaagcttgggagtgttcattgcctgatacaaatactccaaaaccattaacagagttaatatcagcgagggacctttgcatctccatcctcaaaaggaaaatatgttccgccaaagactcagaactaagcagaacatcaagtactatagaccgtgatgataatctaaacaatcctttatttgaatgcacaaaatgcggtctgatggaagatccatccaaaatgttaatttgtgattgttgtgaaggagcatttcatttattgtgttgcaatccacatgtcaagaaaataccagaggaagagtggtattgtttggcatgtaaaagaaagaaacctaagagacaacgtggaaagtttgcaaatcccaaagttgaatcatccaagggcattcaaagaccccgccgaggtcttggtcctattcgagatatgttactggattctgaatcatatgaaagtggggttcggattggtactaagtttcaagcagaagttccaaaatggtctggtcctatttctagtagagaagatgagtttgctgagcccactgaacttgatcgtagtaaaacgacaatgctgagtttcgaggataagaaaaccagtatcggtaactggatccagtgccgggaagttctagacacaggagttgtttgtggcaaatggcggagggcaccattgtttgttgttcaatcaagtgactgggactgttcgtgctcagttgtttgggatcctatccatgctgattgtgctgttccacaggaattggagaccgttaaagttcacgagcaactgaagtacataaataagggtactcttgctgtcctgcaccagtgctgtccacagatgggtgtcgataccgtgtaccaattttcctcggatgcctcggatgaagtgagagccagtagatatgaaatccgtgtctacgcatgacatcttgacacataaaaatgctccttccagtcaaccggcatacgttatacgagtttcagtgtcgtgtgtaaataagagaaagaaaaggcattttaaaaacaaaagccatagcaaaagcaaaaaaaggaggaggagaagaaaatactcgatgctgctggagaactacaactcggtgagatggaaacagaaaggtctgggttgtatcatgaggtgtaaactggggtggtgggcgtgtggccgtgtttgtgtgtgtgtttacagttttgtcacctccgctgcttgaattatgatgaccgaagaatggatcacaatgctatagtttgatttcttttacaaaaaaaagctgaa

SEQ ID NO: 61711 - DNA, 2047 bp, Zea Mays
tttctcagcaccttcttgtgccgttcttcacccgtcgtctcctttccgcagcaaccatcagcgtccaacctcctctctcaccctctccgtttgcaacaaccgcccaacgccaggtgcccagatcggcgtcccttccagccattttccgcgtccttcgccggtgtcgaagcacccatcagtgtacctgcttcagttaatagttatctgatatctacccttggccaaagcaagctatctattgtgcctgtgatttttgttgggagctgtcatagttcagtttttggtaggaacggtcacagctctactcaactgaaggcatggctgtaaaatctagtagaagttcagatgaaagctatatagagcctctcctatgctggaagaaggaattcagatcatctgtaattaaaattgttgattcgtccttaaactcgagtttgatgtctgccgacagtatttgttcaattcctgcttcagaatatggtttctattttaataaacgaatgaagatggatgaggaatatgatcaccttctgacaaatggaaatatgaaagatagtagcacggcaaacttcacaaccactggatatgtctcatctccagagcgcaacatggatggtcaatcatgtatggttagttcaactacagaatttttagcaggatcacattctaatgttaatactggtcagccatcatcctcatcaagtgcaccatcttatatcagtcagagtattaaagaagcttgggagtgttcattgcctgatacaaatactccaaaaccattaacagagttaatatcagcgagggacctttgcatctccatcctcaaaaggaaaatatgttccgccaaagactcagaactaagcagaacatcaagtactatagaccgtgatgataatctaaacaatcctttatttgaatgcacaaaatgcggtctgatggaagatccatccaaaatgttaatttgtgattgttgtgaaggagcatttcatttattgtgttgcaatccacatgtcaagaaaataccagaggaagagtggtattgtttggcatgtaaaagaaagaaacctaagagacaacgtggaaagtttgcaaatcccaaagttgaatcatccaagggcattcaaagaccccgccgaggtcttggtcctattcgagatatgttactggattctgaatcatatgaaagtggggttcggattggtactaagtttcaagcagaagttccaaaatggtctggtcctatttctagagaagatgagtttgctgagcccactgaacttgatcgtagtaaaacgacaatgctgagtttcgaggataagaaaaccagtatcggtaactggatccagtgccgggaagttctagacacaggagttgtttgtggcaaatggcggagggcaccattgtttgttgttcaatcaagtgactgggactgttcgtgctcagttgtttgggatcctatccatgctgattgtgctgttccacaggaattggagaccgttaaagttcacgagcaactgaagtacataaataagctgaagaatcgtctaggtgacagcaatcagaaacgctgaaaaacggtactcttgctgtcctgcaccagtgctgtccacagatgggtgtcgataccgtgtaccaattttcctcggatgcctcggatgaagtgagagccagtagatatgaaatccgtgtctacgcatgacatcttgacacataaaaatgctccttccagtcaaccggcatacgttatacgagtttcagtgtcgtgtgtaaataagagaaagaaaaggcattttaaaaacaaaagccatagcaaaagcaaaaaaaggaggaggagaagaaaatactcgatgctgctggagaactacaactcggtgagatggaaacagaaaggtctgggttgtatcatgaggtgtaaactggggtggtgggcgtgtggccgtgtttgtgtgtgtgtttacagttttgtcacctccgctgcttgaattatgatgaccgaagaatggatcacaatgctatagtttgatttcttttacaaaaaaaagctgaa

SEQ ID NO: 61712 - DNA, 1992 bp, Zea Mays
tttctcagcaccttcttgtgccgttcttcacccgtcgtctcctttccgcagcaaccatcagcgtccaacctcctctctcaccctctccgtttgcaacaaccgcccaacgccaggtgcccagatcggcgtcccttccagccattttccgcgtccttcgccggtgtcgaagcacccatcagcagtgtacctgcttcagttaatagttatctgatatctacccttggccaaagcaagctatctattgtgcctgtgatttttgttgggagctgtcatagttcagtttttggtaggaacggtcacagctctactcaactgaaggcatggctgtaaaatctagtagaagttcagatgaaagctatatagagcctctcctatgctggaagaaggaattcagatcatctgtaattaaaattgttgattcgtccttaaactcgagtttgatgtctgccgacagtatttgttcaattcctgcttcagaatatggtttctattttaataaacgaatgaagatggatgaggaatatgatcaccttctgacaaatggaaatatgaaagatagtagcacggcaaacttcacaaccactggatatgtctcatctccagagcgcaacatggatggtcaatcatgtatggttagttcaactacagaatttttagcaggatcacattctaatgttaatactggtcagccatcatcctcatcaagtgcaccatcttatatcagtcagagtattaaagaagcttgggagtgttcattgcctgatacaaatactccaaaaccattaacagagttaatatcagcgagggacctttgcatctccatcctcaaaaggaaaatatgttccgccaaagactcagaactaagcagaacatcaagtactatagaccgtgatgataatctaaacaatcctttatttgaatgcacaaaatgcggtctgatggaagatccatccaaaatgttaatttgtgattgttgtgaaggagcatttcatttattgtgttgcaatccacatgtcaagaaaataccagaggaagagtggtattgtttggcatgtaaaagaaagaaacctaagagacaacgtggaaagtttgcaaatcccaaagttgaatcatccaagggcattcaaagaccccgccgaggtcttggtcctattcgagatatgttactggattctgaatcatatgaaagtggggttcggattggtactaagtttcaagcagaagttccaaaatggtctggtcctatttctagttcgaggataagaaaaccagtatcggtaactggatccagtgccgggaagttctagacacaggagttgtttgtggcaaatggcggagggcaccattgtttgttgttcaatcaagtgactgggactgttcgtgctcagttgtttgggatcctatccatgctgattgtgctgttccacaggaattggagaccgttaaagttcacgagcaactgaagtacataaataagctgaagaatcgtctaggtgacagcaatcagaaacgctgaaaaacggtactcttgctgtcctgcaccagtgctgtccacagatgggtgtcgataccgtgtaccaattttcctcggatgcctcggatgaagtgagagccagtagatatgaaatccgtgtctacgcatgacatcttgacacataaaaatgctccttccagtcaaccggcatacgttatacgagtttcagtgtcgtgtgtaaataagagaaagaaaaggcattttaaaaacaaaagccatagcaaaagcaaaaaaaggaggaggagaagaaaatactcgatgctgctggagaactacaactcggtgagatggaaacagaaaggtctgggttgtatcatgaggtgtaaactggggtggtgggcgtgtggccgtgtttgtgtgtgtgtttacagttttgtcacctccgctgcttgaattatgatgaccgaagaatggatcacaatgctatagtttgatttcttttacaaaaaaaagctgaa

SEQ ID NO: 61713 - DNA, 2006 bp, Zea Mays
tttctcagcaccttcttgtgccgttcttcacccgtcgtctcctttccgcagcaaccatcagcgtccaacctcctctctcaccctctccgtttgcaacaaccgcccaacgccaggtgcccagatcggcgtcccttccagccattttccgcgtccttcgccggtgtcgaagcacccatcagtgtacctgcttcagttaatagttatctgatatctacccttggccaaagcaagctatctattgtgcctgtgatttttgttgggagctgtcatagttcagtttttggtaggaacggtcacagctctactcaactgaaggcatggctgtaaaatctagtagaagttcagatgaaagctatatagagcctctcctatgctggaagaaggaattcagatcatctgtaattaaaattgttgattcgtccttaaactcgagtttgatgtctgccgacagtatttgttcaattcctgcttcagaatatggtttctattttaataaacgaatgaagatggatgaggaatatgatcaccttctgacaaatggaaatatgaaagatagtagcacggcaaacttcacaaccactggatatgtctcatctccagagcgcaacatggatggtcaatcatgtatggttagttcaactacagaatttttagcaggatcacattctaatgttaatactggtcagccatcatcctcatcaagtgcaccatcttatatcagtcagagtattaaagaagcttgggagtgttcattgcctgatacaaatactccaaaaccattaacagagttaatatcagcgagggacctttgcatctccatcctcaaaaggaaaatatgttccgccaaagactcagaactaagcagaacatcaagtactatagaccgtgatgataatctaaacaatcctttatttgaatgcacaaaatgcggtctgatggaagatccatccaaaatgttaatttgtgattgttgtgaaggagcatttcatttattgtgttgcaatccacatgtcaagaaaataccagaggaagagtggtattgtttggcatgtaaaagaaagaaacctaagagacaacgtggaaagtttgcaaatcccaaagttgaatcatccaagggcattcaaagaccccgccgaggtcttggtcctattcgagatatgttactggattctgaatcatatgaaagtggggttcggattggtactaagtttcaagcagaagttccaaaatggtctggtcctatttctagtagagaagatgagtttgctgagcccactgaacttgatcgtagtaaaacgacaatgctgagtttcgaggataagaaaaccagtatcggtaactggatccagtgccgggaagttctagacacaggagttgtttgtggcaaatggcggagggcaccattgtttgttgttcaatcaagtgactgggactgttcgtgctcagttgtttgggatcctatccatgctgattgtgctgttccacaggaattggagaccgttaaagttcacgagcaactgaagtacataaataagggtactcttgctgtcctgcaccagtgctgtccacagatgggtgtcgataccgtgtaccaattttcctcggatgcctcggatgaagtgagagccagtagatatgaaatccgtgtctacgcatgacatcttgacacataaaaatgctccttccagtcaaccggcatacgttatacgagtttcagtgtcgtgtgtaaataagagaaagaaaaggcattttaaaaacaaaagccatagcaaaagcaaaaaaaggaggaggagaagaaaatactcgatgctgctggagaactacaactcggtgagatggaaacagaaaggtctgggttgtatcatgaggtgtaaactggggtggtgggcgtgtggccgtgtttgtgtgtgtgtttacagttttgtcacctccgctgcttgaattatgatgaccgaagaatggatcacaatgctatagtttgatttcttttacaaaaaaaagctgaa

SEQ ID NO: 61714 - DNA, 1932 bp, Zea Mays
ggaaaccatttctcagcaccttcttgtgccgttcttcacccgtcgtctcctttccgcagcaaccatcagcgtccaacctcctctctcaccctctccgtttgcaacaaccgcccaacgccaggtgcccagatcggcgtcccttccagccattttccgcgtccttcgccggtgtcgaagcacccatcagcagtgtacctgcttcagttaatagttatctgatatctacccttggccaaagcaagctatctattgtgcctgtgatttttgttgggagctgtcatagttcagtttttggtaggaacggtcacagctctactcaactgaaggcatggctgtaaaatctagtagaagttcagatgaaagctatatagagcctctcctatgctggaagaaggaattcagatcatctgtaattaaaattgttgattcgtccttaaactcgagtttgatgtctgccgacagtatttgttcaattcctgcttcagaatatggtttctattttaataaacgaatgaagatggatgaggaatatgatcaccttctgacaaatggaaatatgaaagatagtagcacggcaaacttcacaaccactggatatgtctcatctccagagcgcaacatggatggtcaatcatgtatggttagttcaactacagaatttttagcaggatcacattctaatgttaatactggtcagccatcatcctcatcaagtgcaccatcttatatcagtcagagtattaaagaagcttgggagtgttcattgcctgatacaaatactccaaaaccattaacagagttaatatcagcgagggacctttgcatctccatcctcaaaaggaaaatatgttccgccaaagactcagaactaagcagaacatcaagtactatagaccgtgatgataatctaaacaatcctttatttgaatgcacaaaatgcggtctgatggaagatccatccaaaatgttaatttgtgattgttgtgaaggagcatttcatttattgtgttgcaatccacatgtcaagaaaataccagaggaagagtggtattgtttggcatgtaaaagaaagaaacctaagagacaacgtggaaagtttgcaaatcccaaagttgaatcatccaagggcattcaaagaccccgccgaggtcttggtcctattcgagatatgttactggattctgaatcatatgaaagtggggttcggattggtactaagtttcaagcagaagttccaaaatggtctggtcctatttctagttcgaggataagaaaaccagtatcggtaactggatccagtgccgggaagttctagacacaggagttgtttgtggcaaatggcggagggcaccattgtttgttgttcaatcaagtgactgggactgttcgtgctcagttgtttgggatcctatccatgctgattgtgctgttccacaggaattggagaccgttaaagttcacgagcaactgaagtacataaataagtgctgtccacagatgggtgtcgataccgtgtaccaattttcctcggatgcctcggatgaagtgagagccagtagatatgaaatccgtgtctacgcatgacatcttgacacataaaaatgctccttccagtcaaccggcatacgttatacgagtttcagtgtcgtgtgtaaataagagaaagaaaaggcattttaaaaacaaaagccatagcaaaagcaaaaaaaggaggaggagaagaaaatactcgatgctgctggagaactacaactcggtgagatggaaacagaaaggtctgggttgtatcatgaggtgtaaactggggtggtgggcgtgtggccgtgtttgtgtgtgtgtttacagttttgtcacctccgctgcttgaattatgatgaccgaagaatggatcacaatgctatagtttgatttcttttacaaaaaaaagctgaa

SEQ ID NO: 61715 - DNA, 1596 bp, Zea Mays
aaaccatttctcagcaccttcttgtgccgttcttcacccgtcgtctcctttccgcagcaaccatcagcgtccaacctcctctctcaccctctccgtttgcaacaaccgcccaacgccaggtgcccagatcggcgtcccttccagccattttccgcgtccttcgccggtgtcgaagcacccatcagcagtgtacctgcttcagttaatagttatctgatatctacccttggccaaagcaagctatctattgtgcctgtgatttttgttgggagctgtcatagttcagtttttggtaggaacggtcacagctctactcaactgaaggcatggctgtaaaatctagtagaagttcagatgaaagctatatagagcctctcctatgctggaagaaggaattcagatcatctgtaattaaaattgttgattcgtccttaaactcgagtttgatgtctgccgacagtatttgttcaattcctgcttcagaatatggtttctattttaataaacgaatgaagatggatgaggaatatgatcaccttctgacaaatggaaatatgaaagatagtagcacggcaaacttcacaaccactggatatgtctcatctccagagcgcaacatggatggtcaatcatgtatggttagttcaactacagaatttttagcaggatcacattctaatgttaatactggtcagccatcatcctcatcaagtgcaccatcttatatcagtcagagtattaaagaagcttgggagtgttcattgcctgatacaaatactccaaaaccattaacagagttaatatcagcgagggacctttgcatctccatcctcaaaaggaaaatatgttccgccaaagactcagaactaagcagaacatcaagtactatagaccgtgatgataatctaaacaatcctttatttgaatgcacaaaatgcggtctgatggaagatccatccaaaatgttaatttgtgattgttgtgaaggagcatttcatttattgtgttgcaatccacatgtcaagaaaataccagaggaagagtggtattgtttggcatgtaaaagaaagaaacctaagagacaacgtggaaagtttgcaaatcccaaagttgaatcatccaagggcattcaaagaccccgccgaggtcttggtcctattcgagatatgttactggattctgaatcatatgaaagtggggttcggattggtactaagtttcaagcagaagttccaaaatggtctggtcctatttctagtagagaagatgagtttgctgagcccactgaacttgatcgtagtaaaacgacaatgctgagtttcgaggataagaaaaccagtatcggtaactggatccagtgccgggaagttctagacacaggagttgtttgtggcaaatggcggagggcaccattgtttgttgttcaatcaagtgactgggactgttcgtgctcagttgtttgggatcctatccatgctgattgtgctgttccacaggaattggagaccgttaaagttcacgagcaactgaagtacataaataagataaaccgatgagatgtgctttctctaataaaattgaacgcttcctatttat

SEQ ID NO: 61716 - DNA, 1294 bp, Zea Mays
tttctcagcaccttcttgtgccgttcttcacccgtcgtctcctttccgcagcaaccatcagcgtccaacctcctctctcaccctctccgtttgcaacaaccgcccaacgccaggtgcccagatcggcgtcccttccagccattttccgcgtccttcgccggtgtcgaagcacccatcagtgtacctgcttcagttaatagttatctgatatctacccttggccaaagcaagctatctattgtgcctgtgatttttgttgggagctgtcatagttcagtttttggtaggaacggtcacagctctactcaactgaaggcatggctgtaaaatctagtagaagttcagatgaaagctatatagagcctctcctatgctggaagaaggaattcagatcatctgtaattaaaattgttgattcgtccttaaactcgagtttgatgtctgccgacagtatttgttcaattcctgcttcagaatatggtttctattttaataaacgaatgaagatggatgaggaatatgatcaccttctgacaaatggaaatatgaaagatagtagcacggcaaacttcacaaccactggatatgtctcatctccagagcgcaacatggatggtcaatcatgtatggttagttcaactacagaatttttagcaggatcacattctaatgttaatactggtcagccatcatcctcatcaagtgcaccatcttatatcagtcagagtattaaagaagcttgggagtgttcattgcctgatacaaatactccaaaaccattaacagagttaatatcagcgagggacctttgcatctccatcctcaaaaggaaaatatgttccgccaaagactcagaactaagcagaacatcaagtactatagaccgtgatgataatctaaacaatcctttatttgaatgcacaaaatgcggtctgatggaagatccatccaaaatgttaatttgtgattgttgtgaaggagcatttcatttattgtgttgcaatccacatgtcaagaaaataccagaggaagagtggtattgtttggcatgtaaaagaaagaaacctaagagacaacgtggaaagtttgcaaatcccaaagttgaatcatccaagggcattcaaagaccccgccgaggtcttggtcctattcgagatatgttactggattctgaatcatatgaaagtggggttcggattggtactaagtttcaagcagaagttccaaaatggtctggtcctatttctagtccgcttttaaccttcatcttacatgacagtcctattttcaacct

SEQ ID NO: 61717 - DNA, 2457 bp, Zea Mays
atctagaagggtaggcttagtgtagtggtgagagctgtctcatcgagtcacctggtggaacgttcgaagcagtctctccatatttacgggtaaaggtttgcctcagtttatcccttccccatacaccactcgtatggaagccttcggcactagattttccctttaatgatattttaataaggttttcttcattggagaaagtaacacatgtttcatttaccatgatcttgcaaatgaacacttagtcaacactaaggaagcgttaaacagtttatgtcaagctcagcattcatgcagtacagccgctctactcttatacttgaattgaattactgaaaccaaactctgacctattatattgaaatattactttgatcgttaactgtttacattttttaatatactttcctgacttcggacaggaacatagagaataatattttttctggaccggtgcctgcgagcttgcttaacataccaaacttcaaaaaggacgggaatccattcaataccacatctgcatctccgccttcaacaggacccgacccaactctaacaccagcacctaacacttcaaattcaacgcccccagcaccagcacccccatctccttcaagagctactcccccgcctaaaacaacctcaaattatcctgaaggatcaactacccgagacagcacttcatcatctaggaaacacaatacatcaaccctcaagattgttggttttgttcttgctggagtagtgctgtttattgttatagtcttcctagtattattttgtctatccaagtaccaagggagacagtcgagatacgatcgtaatagaagtcagctgggaggggtgcatcatagggttgaaccgcaaatcaagccacctccagtgcaacaaagcaatgatattaaagaaggcgagacaccggacaggagggtccatcaactaagttcatctgcagcagcaatatacagatagtctcagagaggagaatgtgatcagagagagtagattaggaagggtttacctagcagagcttcctgatggcaagttattggaggttttaaagattggcaatgctaatggaagaatatcagtagatgacttcctagaacagattgaatgtatctcagatatcaagcatcctaacattcttgagttagtcggatactgtgctgaatatgggcagaggttactcgtatacgaacacttcagcagaacgacactggatgatgcaattcatgatggaaaggatactgaaagtgcactgtcatggaatgcccgcctccaggttgctcttggttcaggaaaagccttagagtatctccatcatagcttccattctccaattgtgcaccagaactttgaaccagctaatgtgctccttgataaaaagttctcagtgtgtgttgctgaatgtggactggcagaattgatgacatcaagttcagtcactcagctgtcaggtcggatgcgtgcatcactggactacgaagcacctgaattccaggattatggggtcatttcagaaaggggtgatgtctacagctttggtgtagtgatgctggaacttcttacggggcgtaaaccatatgatagttcacgcccgcgtcatgagcaacatcttgttagatgggccagttggcagcttcatgacattgaatccctatccaagatggtggacccacctatacgtggacatgttctgagaagcattgtcacattttgctgacataatcagccgctgtatccagcggcagccagagttcaggccaccaatgtctgatattgtacaagacctaactagacttgtaaatgctactggtgaggaatcagagtaaagaaaaaccatggggatatacaatacaaccctcgtgaccaagttgcgtgttgtacaaaattttgggaagataattgtcttgccacaatctgaggacaatattgtaaggatgtattttcttcagagatcattccacactaactcatgtcaaattggagtttcatttacacatggctggagagtggaggtacagcaatttgtgcacctggtcgttgatcatcaaatccatctttttgcatacatgatattgtacatagcaaggccctgaattcttgtaactaacagtcaggagttcgataaattggttagtctaaagctagtcatttaattattcgcttgttcatcatgttggatggatctactctcagcagtcgaagaaaaattgttcggccatttacttcttgtagagaatagagatgatttggttactgctgtaaaacccagttgtattctcctttcagctcttgcctgttgaaatttgaatgtttatctgtggatttattcccgcaatgctgaaaaaaacatgtagcgtgaattttgttcatagtggatatgtatgaagatgtaaaatttgtctggatgtaaaatttgttgttgaggcccaaacaaacatagggtctgtt

SEQ ID NO: 61718 - DNA, 2858 bp, Zea Mays
tggatccgtggatattgatagcatgcagacgcaggagaaaatcatgtctttgcaataaatgggctgtacatttcactgggatcaccacctcttcctggatggactggagatggtggagacccttgtggtgagggctggcagggtgttctgtgtaccggctcttctataactggaataaccatgaatgctgcaaacttgggaggacagctgggaagtttaggaaacttcaatgccatcaccagcatagagcttaacaacaataatattggtggaagcataccagaggacctacctgttactttgcagagtcttttcctctctgctaatcaaattactggaagcataccaagttcactgtcaaaactcgaaaacttatcagccatgtcagtcaacggcaaccatctaagtggaggcctaccagacacttttgattcactcaatagacttgtaaatttggatatttcttcgaataacttgactggcgtgttaccgtcgtcaatgaaaagtttggcatctttaacttcattgcacatgcaagacaatcaactgtctgggacccttaacgttttgcaaggtctcccactgaaagacttgaacatagagaataatattttttctggaccggtgcctgcgagcttgcttaacataccaaacttcaaaaaggacgggaatccattcaataccacatctgcatctccgccttcaacaggacccgacccaactctaacaccagcacctaacacttcaaattcaacgcccccagcaccagcacccccatctccttcaagagctactcccccgcctaaaacaacctcaaattatcctgaaggatcaactacccgagacagcacttcatcatctaggaaacacaatacatcaaccctcaagattgttggttttgttcttgctggagtagtgctgtttattgttatagtcttcctagtattattttgtctatccaagtaccaagggagacagtcgagatacgatcgtaatagaagtcagctgggaggggtgcatcatagggttgaaccgcaaatcaagccacctccagtgcaacaaagcaatgatattaaagaaggcgagacaccggacaggagggtccatcaactaagttcatctgcagcagctctcccaaagaagtctcctgaaaaccaaaaggagcacataattaattttgatcaaacagattcagatctgtttcatgtttctctaccacctcctcctccaccaccgccattaaccccaattgaaagagttgctgcaaatctcattgttccactagaaaagcgatatattcctccaccaaagacaagtagctcgacttcttccgcgtcattctctgttgcatctcttcagcaatatacagatagtctcagagaggagaatgtgatcagagagagtagattaggaagggtttacctagcagagcttcctgatggcaagttattggaggttttaaagattggcaatgctaatggaagaatatcagtagatgacttcctagaacagattgaatgtatctcagatatcaagcatcctaacattcttgagttagtcggatactgtgctgaatatgggcagaggttactcgtatacgaacacttcagcagaacgacactggatgatgcaattcatgatggaaaggatactgaaagtgcactgtcatggaatgcccgcctccaggttgctcttggttcaggaaaagccttagagtatctccatcatagcttccattctccaattgtgcaccagaactttgaaccagctaatgtgctccttgataaaaagttctcagtgtgtgttgctgaatgtggactggcagaattgatgacatcaagttcagtcactcagctgtcaggtcggatgcgtgcatcactggactacgaagcacctgaattccaggattatggggtcatttcagaaaggggtgatgtctacagctttggtgtagtgatgctggaacttcttacggggcgtaaaccatatgatagttcacgcccgcgtcatgagcaacatcttgttagatgggccagttggcagcttcatgacattgaatccctatccaagatggtggacccacctatacgtggacatgttctgagaagcattgtcacattttgctgacataatcagccgctgtatccagcggcagccagagttcaggccaccaatgtctgatattgtacaagacctaactagacttgtaaatgctactggtgaggaatcagagtaaagaaaaaccatggggatatacaatacaaccctcgtgaccaagttgcgtgttgtacaaaattttgggaagataattgtcttgccacaatctgaggacaatattgtaaggatgtattttcttcagagatcattccacactaactcatgtcaaattggagtttcatttacacatggctggagagtggaggtacagcaatttgtgcacctggtcgttgatcatcaaatccatctttttgcatacatgatattgtacatagcaaggccctgaattcttgtaactaacagtcaggagttcgataaattggttagtctaaagctagtcatttaattattcgcttgttcatcatgttggatggatctactctcagcagtcgaagaaaaattgttcggccatttacttcttgtagagaatagagatgatttggttactgctgtaaaacccagttgtattctcctttcagctcttgcctgttgaaatttgaatgtttatctgtggatttattcccgcaatgctgaaaaaaacatgtagcgtgaattttgttcatagtggatatgtatgaagatgtaaaatttgtctggatgtaaaatttgttgttgaggcccaaacaaacatagggtctgtt

SEQ ID NO: 61719 - DNA, 2809 bp, Zea Mays
ctcgcatgttggatccgtggatattgatagcatgcagacgcaggagaaaatcatgtctttgcaataaatgggctgtacatttcactgggatcaccacctcttcctggatggactggagatggtggagacccttgtggtgagggctggcagggtgttctgtgtaccggctcttctataactggaataaccatgaatgctgcaaacttgggaggacagctgggaagtttaggaaacttcaatgccatcaccagcattttcctctctgctaatcaaattactggaagcataccaagttcactgtcaaaactcgaaaacttatcagccatgtcagtcaacggcaaccatctaagtggaggcctaccagacacttttgattcactcaatagacttgtaaatttggatatttcttcgaataacttgactggcgtgttaccgtcgtcaatgaaaagtttggcatctttaacttcattgcacatgcaagacaatcaactgtctgggacccttaacgttttgcaaggtctcccactgaaagacttgaacatagagaataatattttttctggaccggtgcctgcgagcttgcttaacataccaaacttcaaaaaggacgggaatccattcaataccacatctgcatctccgccttcaacaggacccgacccaactctaacaccagcacctaacacttcaaattcaacgcccccagcaccagcacccccatctccttcaagagctactcccccgcctaaaacaacctcaaattatcctgaaggatcaactacccgagacagcacttcatcatctaggaaacacaatacatcaaccctcaagattgttggttttgttcttgctggagtagtgctgtttattgttatagtcttcctagtattattttgtctatccaagtaccaagggagacagtcgagatacgatcgtaatagaagtcagctgggaggggtgcatcatagggttgaaccgcaaatcaagccacctccagtgcaacaaagcaatgatattaaagaaggcgagacaccggacaggagggtccatcaactaagttcatctgcagcagctctcccaaagaagtctcctgaaaaccaaaaggagcacataattaattttgatcaaacagattcagatctgtttcatgtttctctaccacctcctcctccaccaccgccattaaccccaattgaaagagttgctgcaaatctcattgttccactagaaaagcgatatattcctccaccaaagacaagtagctcgacttcttccgcgtcattctctgttgcatctcttcagcaatatacagatagtctcagagaggagaatgtgatcagagagagtagattaggaagggtttacctagcagagcttcctgatggcaagttattggaggttttaaagattggcaatgctaatggaagaatatcagtagatgacttcctagaacagattgaatgtatctcagatatcaagcatcctaacattcttgagttagtcggatactgtgctgaatatgggcagaggttactcgtatacgaacacttcagcagaacgacactggatgatgcaattcatgatggaaaggatactgaaagtgcactgtcatggaatgcccgcctccaggttgctcttggttcaggaaaagccttagagtatctccatcatagcttccattctccaattgtgcaccagaactttgaaccagctaatgtgctccttgataaaaagttctcagtgtgtgttgctgaatgtggactggcagaattgatgacatcaagttcagtcactcagcattgcagctgtcaggtcggatgcgtgcatcactggactacgaagcacctgaattccaggattatggggtcatttcagaaaggggtgatgtctacagctttggtgtagtgatgctggaacttcttacggggcgtaaaccatatgatagttcacgcccgcgtcatgagcaacatcttgttagatgggccagttggcagcttcatgacattgaatccctatccaagatggtggacccacctatacgtggacatgttctgagaagcattgtcacattttgctgacataatcagccgctgtatccagcggcagccagagttcaggccaccaatgtctgatattgtacaagacctaactagacttgtaaatgctactggtgaggaatcagagtaaagaaaaaccatggggatatacaatacaaccctcgtgaccaagttgcgtgttgtacaaaattttgggaagataattgtcttgccacaatctgaggacaatattgtaaggatgtattttcttcagagatcattccacactaactcatgtcaaattggagtttcatttacacatggctggagagtggaggtacagcaatttgtgcacctggtcgttgatcatcaaatccatctttttgcatacatgatattgtacatagcaaggccctgaattcttgtaactaacagtcaggagttcgataaattggttagtctaaagctagtcatttaattattcgcttgttcatcatgttggatggatctactctcagcagtcgaagaaaaattgttcggccatttacttcttgtagagaatagagatgatttggttactgctgtaaaacccagttgtattctcctttcagctcttgcctgttgaaatttgaatgtttatctgtggatttattcccgcaatgctgaaaaaaacatgtagcgtgaattttgttcatagtggatatgtatgaagatgtaaaatttgtctggatgtaaaatttgttgttgaggcccaaacaaacatagggtctgtt

SEQ ID NO: 61720 - DNA, 3705 bp, Zea Mays
gccgaggctcgtgcgcgcggtcaccgacgctgccgacgtctttgcaataaatgggctgtacatttcactgggatcaccacctcttcctggatggactggagatggtggagacccttgtggtgagggctggcagggtgttctgtgtaccggctcttctataactggaataaccatgaatgctgcaaacttgggaggacagctgggaagtttaggaaacttcaatgccatcaccagcatgttgtctgtcttaccaatgactttatcttatctatagagagcttaacaacaataatattggtggaagcataccagaggacctacctgttactttgcagagtcttttcctctctgctaatcaaattactggaagcataccaagttcactgtcaaaactcgaaaacttatcagccatgtcagtcaacggcaaccatctaagtggaggcctaccagacacttttgattcactcaatagacttgtaaatttggatatttcttcgaataacttgactggcgtgttaccgtcgtcaatgaaaagtttggcatctttaacttcattgcacatgcaagacaatcaactgtctgggacccttaacgttttgcaaggtctcccactgaaagacttgtaatacctcaatctcatatctcttcttccatagttgttctgttacatttgtattgataattgaaggcatgccatttatcattatcttctcatttacataacttagcctatatgttgactttccctatggtacatggcattgcaatacaatgtgccgtcaatttccattgttgatttccaaagagtgtaacatttcatattggttccagacactacaagtttgacttgaacattagtttaacagatcatgattggctgatgtctacaatccagaagcttgtgctcggttgctaaaggaattagcatttttaacaaactatctcttgctgccttctcgtagtatgttgcacttgcacttctctcatgtgccgctcactgatatctggaggcaatgatatctagaagggtaggcttagtgtagtggtgagagctgtctcatcgagtcacctggtggaacgttcgaagcagtctctccatatttacgggtaaaggtttgcctcagtttatcccttccccatacaccactcgtatggaagccttcggcactagattttccctttaatgatattttaataaggttttcttcattggagaaagtaacacatgtttcatttaccatgatcttgcaaatgaacacttagtcaacactaaggaagcgttaaacagtttatgtcaagctcagcattcatgcagtacagccgctctactcttatacttgaattgaattactgaaaccaaactctgacctattatattgaaatattactttgatcgttaactgtttacattttttaatatactttcctgacttcggacaggaacatagagaataatattttttctggaccggtgcctgcgagcttgcttaacataccaaacttcaaaaaggacgggaatccattcaataccacatctgcatctccgccttcaacaggacccgacccaactctaacaccagcacctaacacttcaaattcaacgcccccagcaccagcacccccatctccttcaagagctactcccccgcctaaaacaacctcaaattatcctgaaggatcaactacccgagacagcacttcatcatctaggaaacacaatacatcaaccctcaagattgttggttttgttcttgctggagtagtgctgtttattgttatagtcttcctagtattattttgtctatccaagtaccaagggagacagtcgagatacgatcgtaatagaagtcagctgggaggggtgcatcatagggttgaaccgcaaatcaagccacctccagtgcaacaaagcaatgatattaaagaaggcgagacaccggacaggagggtccatcaactaagttcatctgcagcagctctcccaaagaagtctcctgaaaaccaaaaggagcacataattaattttgatcaaacagattcagatctgtttcatgtttctctaccacctcctcctccaccaccgccattaaccccaattgaaagagttgctgcaaatctcattgttccactagaaaagcgatatattcctccaccaaagacaagtagctcgacttcttccgcgtcattctctgttgcatctcttcagcaatatacagatagtctcagagaggagaatgtgatcagagagagtagattaggaagggtttacctagcagagcttcctgatggcaagttattggaggttttaaagattggcaatgctaatggaagaatatcagtagatgacttcctagaacagattgaatgtatctcagatatcaagcatcctaacattcttgagttagtcggatactgtgctgaatatgggcagaggttactcgtatacgaacacttcagcagaacgacactggatgatgcaattcatgatggaaaggatactgaaagtgcactgtcatggaatgcccgcctccaggttgctcttggttcaggaaaagccttagagtatctccatcatagcttccattctccaattgtgcaccagaactttgaaccagctaatgtgctccttgataaaaagttctcagtgtgtgttgctgaatgtggactggcagaattgatgacatcaagttcagtcactcagctgtcaggtcggatgcgtgcatcactggactacgaagcacctgaattccaggattatggggtcatttcagaaaggggtgatgtctacagctttggtgtagtgatgctggaacttcttacggggcgtaaaccatatgatagttcacgcccgcgtcatgagcaacatcttgttagatgggccagttggcagcttcatgacattgaatccctatccaagatggtggacccacctatacgtggacatgttctgagaagcattgtcacattttgctgacataatcagccgctgtatccagcggcagccagagttcaggccaccaatgtctgatattgtacaagacctaactagacttgtaaatgctactggtgaggaatcagagtaaagaaaaaccatggggatatacaatacaaccctcgtgaccaagttgcgtgttgtacaaaattttgggaagataattgtcttgccacaatctgaggacaatattgtaaggatgtattttcttcagagatcattccacactaactcatgtcaaattggagtttcatttacacatggctggagagtggaggtacagcaatttgtgcacctggtcgttgatcatcaaatccatctttttgcatacatgatattgtacatagcaaggccctgaattcttgtaactaacagtcaggagttcgataaattggttagtctaaagctagtcatttaattattcgcttgttcatcatgttggatggatctactctcagcagtcgaagaaaaattgttcggccatttacttcttgtagagaatagagatgatttggttactgctgtaaaacccagttgtattctcctttcagctcttgcctgttgaaatttgaatgtttatctgtggatttattcccgcaatgctgaaaaaaacatgtagcgtgaattttgttcatagtggatatgtatgaagatgtaaaatttgtctggatgtaaaatttgttgttgaggcccaaacaaacatagggtctgtt

SEQ ID NO: 61721 - DNA, 3033 bp, Zea Mays
gccgaggctcgtgcgcgcggtcaccgacgctgccgacgtctttgcaataaatgggctgtacatttcactgggatcaccacctcttcctggatggactggagatggtggagacccttgtggtgagggctggcagggtgttctgtgtaccggctcttctataactggaataaccatgaatgctgcaaacttgggaggacagctgggaagtttaggaaacttcaatgccatcaccagcattttcctctctgctaatcaaattactggaagcataccaagttcactgtcaaaactcgaaaacttatcagccatgtcagtcaacggcaaccatctaagtggaggcctaccagacacttttgattcactcaatagacttgtaaatttggatatttcttcgaataacttgactggcgtgttaccgtcgtcaatgaaaagtttggcatctttaacttcattgcacatgcaagacaatcaactgtctgggacccttaacgttttgcaaggtctcccactgaaagactttttaacagatcatgattggctgatgtctacaatccagaagcttgtgctcggttgctaaaggaattagcatttttaacaaactatctcttgctgccttctcgtagtatgttgcacttgcacttctctcatgtgccgctcactgatatctggaggcaatgatatctagaagggtaggcttagtgtagtggtgagagctgtctcatcgagtcacctggtggaacgttcgaagcagtctctccatatttacgggaacatagagaataatattttttctggaccggtgcctgcgagcttgcttaacataccaaacttcaaaaaggacgggaatccattcaataccacatctgcatctccgccttcaacaggacccgacccaactctaacaccagcacctaacacttcaaattcaacgcccccagcaccagcacccccatctccttcaagagctactcccccgcctaaaacaacctcaaattatcctgaaggatcaactacccgagacagcacttcatcatctaggaaacacaatacatcaaccctcaagattgttggttttgttcttgctggagtagtgctgtttattgttatagtcttcctagtattattttgtctatccaagtaccaagggagacagtcgagatacgatcgtaatagaagtcagctgggaggggtgcatcatagggttgaaccgcaaatcaagccacctccagtgcaacaaagcaatgatattaaagaaggcgagacaccggacaggagggtccatcaactaagttcatctgcagcagctctcccaaagaagtctcctgaaaaccaaaaggagcacataattaattttgatcaaacagattcagatctgtttcatgtttctctaccacctcctcctccaccaccgccattaaccccaattgaaagagttgctgcaaatctcattgttccactagaaaagcgatatattcctccaccaaagacaagtagctcgacttcttccgcgtcattctctgttgcatctcttcagcaatatacagatagtctcagagaggagaatgtgatcagagagagtagattaggaagggtttacctagcagagcttcctgatggcaagttattggaggttttaaagattggcaatgctaatggaagaatatcagtagatgacttcctagaacagattgaatgtatctcagatatcaagcatcctaacattcttgagttagtcggatactgtgctgaatatgggcagaggttactcgtatacgaacacttcagcagaacgacactggatgatgcaattcatgatggaaaggatactgaaagtgcactgtcatggaatgcccgcctccaggttgctcttggttcaggaaaagccttagagtatctccatcatagcttccattctccaattgtgcaccagaactttgaaccagctaatgtgctccttgataaaaagttctcagtgtgtgttgctgaatgtggactggcagaattgatgacatcaagttcagtcactcagctgtcaggtcggatgcgtgcatcactggactacgaagcacctgaattccaggattatggggtcatttcagaaaggggtgatgtctacagctttggtgtagtgatgctggaacttcttacggggcgtaaaccatatgatagttcacgcccgcgtcatgagcaacatcttgttagatgggccagttggcagcttcatgacattgaatccctatccaagatggtggacccacctatacgtggacatgttctgagaagcattgtcacattttgctgacataatcagccgctgtatccagcggcagccagagttcaggccaccaatgtctgatattgtacaagacctaactagacttgtaaatgctactggtgaggaatcagagtaaagaaaaaccatggggatatacaatacaaccctcgtgaccaagttgcgtgttgtacaaaattttgggaagataattgtcttgccacaatctgaggacaatattgtaaggatgtattttcttcagagatcattccacactaactcatgtcaaattggagtttcatttacacatggctggagagtggaggtacagcaatttgtgcacctggtcgttgatcatcaaatccatctttttgcatacatgatattgtacatagcaaggccctgaattcttgtaactaacagtcaggagttcgataaattggttagtctaaagctagtcatttaattattcgcttgttcatcatgttggatggatctactctcagcagtcgaagaaaaattgttcggccatttacttcttgtagagaatagagatgatttggttactgctgtaaaacccagttgtattctcctttcagctcttgcctgttgaaatttgaatgtttatctgtggatttattcccgcaatgctgaaaaaaacatgtagcgtgaattttgttcatagtggatatgtatgaagatgtaaaatttgtctggatgtaaaatttgttgttgaggcccaaacaaacatagggtctgtt

SEQ ID NO: 61722 - DNA, 3602 bp, Zea Mays
gccgaggctcgtgcgcgcggtcaccgacgctgccgacgtctttgcaataaatgggctgtacatttcactgggatcaccacctcttcctggatggactggagatggtggagacccttgtggtgagggctggcagggtgttctgtgtaccggctcttctataactggaataaccatgaatgctgcaaacttgggaggacagctgggaagtttaggaaacttcaatgccatcaccagcattttcctctctgctaatcaaattactggaagcataccaagttcactgtcaaaactcgaaaacttatcagccatgtcagtcaacggcaaccatctaagtggaggcctaccagacacttttgattcactcaatagacttgtaaatttggatatttcttcgaataacttgactggcgtgttaccgtcgtcaatgaaaagtttggcatctttaacttcattgcacatgcaagacaatcaactgtctgggacccttaacgttttgcaaggtctcccactgaaagacttgtaatacctcaatctcatatctcttcttccatagttgttctgttacatttgtattgataattgaaggcatgccatttatcattatcttctcatttacataacttagcctatatgttgactttccctatggtacatggcattgcaatacaatgtgccgtcaatttccattgttgatttccaaagagtgtaacatttcatattggttccagacactacaagtttgacttgaacattagtttaacagatcatgattggctgatgtctacaatccagaagcttgtgctcggttgctaaaggaattagcatttttaacaaactatctcttgctgccttctcgtagtatgttgcacttgcacttctctcatgtgccgctcactgatatctggaggcaatgatatctagaagggtaggcttagtgtagtggtgagagctgtctcatcgagtcacctggtggaacgttcgaagcagtctctccatatttacgggtaaaggtttgcctcagtttatcccttccccatacaccactcgtatggaagccttcggcactagattttccctttaatgatattttaataaggttttcttcattggagaaagtaacacatgtttcatttaccatgatcttgcaaatgaacacttagtcaacactaaggaagcgttaaacagtttatgtcaagctcagcattcatgcagtacagccgctctactcttatacttgaattgaattactgaaaccaaactctgacctattatattgaaatattactttgatcgttaactgtttacattttttaatatactttcctgacttcggacaggaacatagagaataatattttttctggaccggtgcctgcgagcttgcttaacataccaaacttcaaaaaggacgggaatccattcaataccacatctgcatctccgccttcaacaggacccgacccaactctaacaccagcacctaacacttcaaattcaacgcccccagcaccagcacccccatctccttcaagagctactcccccgcctaaaacaacctcaaattatcctgaaggatcaactacccgagacagcacttcatcatctaggaaacacaatacatcaaccctcaagattgttggttttgttcttgctggagtagtgctgtttattgttatagtcttcctagtattattttgtctatccaagtaccaagggagacagtcgagatacgatcgtaatagaagtcagctgggaggggtgcatcatagggttgaaccgcaaatcaagccacctccagtgcaacaaagcaatgatattaaagaaggcgagacaccggacaggagggtccatcaactaagttcatctgcagcagctctcccaaagaagtctcctgaaaaccaaaaggagcacataattaattttgatcaaacagattcagatctgtttcatgtttctctaccacctcctcctccaccaccgccattaaccccaattgaaagagttgctgcaaatctcattgttccactagaaaagcgatatattcctccaccaaagacaagtagctcgacttcttccgcgtcattctctgttgcatctcttcagcaatatacagatagtctcagagaggagaatgtgatcagagagagtagattaggaagggtttacctagcagagcttcctgatggcaagttattggaggttttaaagattggcaatgctaatggaagaatatcagtagatgacttcctagaacagattgaatgtatctcagatatcaagcatcctaacattcttgagttagtcggatactgtgctgaatatgggcagaggttactcgtatacgaacacttcagcagaacgacactggatgatgcaattcatgatggaaaggatactgaaagtgcactgtcatggaatgcccgcctccaggttgctcttggttcaggaaaagccttagagtatctccatcatagcttccattctccaattgtgcaccagaactttgaaccagctaatgtgctccttgataaaaagttctcagtgtgtgttgctgaatgtggactggcagaattgatgacatcaagttcagtcactcagctgtcaggtcggatgcgtgcatcactggactacgaagcacctgaattccaggattatggggtcatttcagaaaggggtgatgtctacagctttggtgtagtgatgctggaacttcttacggggcgtaaaccatatgatagttcacgcccgcgtcatgagcaacatcttgttagatgggccagttggcagcttcatgacattgaatccctatccaagatggtggacccacctatacgtggacatgttctgagaagcattgtcacattttgctgacataatcagccgctgtatccagcggcagccagagttcaggccaccaatgtctgatattgtacaagacctaactagacttgtaaatgctactggtgaggaatcagagtaaagaaaaaccatggggatatacaatacaaccctcgtgaccaagttgcgtgttgtacaaaattttgggaagataattgtcttgccacaatctgaggacaatattgtaaggatgtattttcttcagagatcattccacactaactcatgtcaaattggagtttcatttacacatggctggagagtggaggtacagcaatttgtgcacctggtcgttgatcatcaaatccatctttttgcatacatgatattgtacatagcaaggccctgaattcttgtaactaacagtcaggagttcgataaattggttagtctaaagctagtcatttaattattcgcttgttcatcatgttggatggatctactctcagcagtcgaagaaaaattgttcggccatttacttcttgtagagaatagagatgatttggttactgctgtaaaacccagttgtattctcctttcagctcttgcctgttgaaatttgaatgtttatctgtggatttattcccgcaatgctgaaaaaaacatgtagcgtgaattttgttcatagtggatatgtatgaagatgtaaaatttgtctggatgtaaaatttgttgttgaggcccaaacaaacatagggtctgtt

SEQ ID NO: 61723 - DNA, 3664 bp, Zea Mays
gccgaggctcgtgcgcgcggtcaccgacgctgccgacgtctttgcaataaatgggctgtacatttcactgggatcaccacctcttcctggatggactggagatggtggagacccttgtggtgagggctggcagggtgttctgtgtaccggctcttctataactggaataaccatgaatgctgcaaacttgggaggacagctgggaagtttaggaaacttcaatgccatcaccagcatagagcttaacaacaataatattggtggaagcataccagaggacctacctgttactttgcagatttcctctctgctaatcaaattactggaagcataccaagttcactgtcaaaactcgaaaacttatcagccatgtcagtcaacggcaaccatctaagtggaggcctaccagacacttttgattcactcaatagacttgtaaatttggatatttcttcgaataacttgactggcgtgttaccgtcgtcaatgaaaagtttggcatctttaacttcattgcacatgcaagacaatcaactgtctgggacccttaacgttttgcaaggtctcccactgaaagacttgtaatacctcaatctcatatctcttcttccatagttgttctgttacatttgtattgataattgaaggcatgccatttatcattatcttctcatttacataacttagcctatatgttgactttccctatggtacatggcattgcaatacaatgtgccgtcaatttccattgttgatttccaaagagtgtaacatttcatattggttccagacactacaagtttgacttgaacattagtttaacagatcatgattggctgatgtctacaatccagaagcttgtgctcggttgctaaaggaattagcatttttaacaaactatctcttgctgccttctcgtagtatgttgcacttgcacttctctcatgtgccgctcactgatatctggaggcaatgatatctagaagggtaggcttagtgtagtggtgagagctgtctcatcgagtcacctggtggaacgttcgaagcagtctctccatatttacgggtaaaggtttgcctcagtttatcccttccccatacaccactcgtatggaagccttcggcactagattttccctttaatgatattttaataaggttttcttcattggagaaagtaacacatgtttcatttaccatgatcttgcaaatgaacacttagtcaacactaaggaagcgttaaacagtttatgtcaagctcagcattcatgcagtacagccgctctactcttatacttgaattgaattactgaaaccaaactctgacctattatattgaaatattactttgatcgttaactgtttacattttttaatatactttcctgacttcggacaggaacatagagaataatattttttctggaccggtgcctgcgagcttgcttaacataccaaacttcaaaaaggacgggaatccattcaataccacatctgcatctccgccttcaacaggacccgacccaactctaacaccagcacctaacacttcaaattcaacgcccccagcaccagcacccccatctccttcaagagctactcccccgcctaaaacaacctcaaattatcctgaaggatcaactacccgagacagcacttcatcatctaggaaacacaatacatcaaccctcaagattgttggttttgttcttgctggagtagtgctgtttattgttatagtcttcctagtattattttgtctatccaagtaccaagggagacagtcgagatacgatcgtaatagaagtcagctgggaggggtgcatcatagggttgaaccgcaaatcaagccacctccagtgcaacaaagcaatgatattaaagaaggcgagacaccggacaggagggtccatcaactaagttcatctgcagcagctctcccaaagaagtctcctgaaaaccaaaaggagcacataattaattttgatcaaacagattcagatctgtttcatgtttctctaccacctcctcctccaccaccgccattaaccccaattgaaagagttgctgcaaatctcattgttccactagaaaagcgatatattcctccaccaaagacaagtagctcgacttcttccgcgtcattctctgttgcatctcttcagcaatatacagatagtctcagagaggagaatgtgatcagagagagtagattaggaagggtttacctagcagagcttcctgatggcaagttattggaggttttaaagattggcaatgctaatggaagaatatcagtagatgacttcctagaacagattgaatgtatctcagatatcaagcatcctaacattcttgagttagtcggatactgtgctgaatatgggcagaggttactcgtatacgaacacttcagcagaacgacactggatgatgcaattcatgatggaaaggatactgaaagtgcactgtcatggaatgcccgcctccaggttgctcttggttcaggaaaagccttagagtatctccatcatagcttccattctccaattgtgcaccagaactttgaaccagctaatgtgctccttgataaaaagttctcagtgtgtgttgctgaatgtggactggcagaattgatgacatcaagttcagtcactcagctgtcaggtcggatgcgtgcatcactggactacgaagcacctgaattccaggattatggggtcatttcagaaaggggtgatgtctacagctttggtgtagtgatgctggaacttcttacggggcgtaaaccatatgatagttcacgcccgcgtcatgagcaacatcttgttagatgggccagttggcagcttcatgacattgaatccctatccaagatggtggacccacctatacgtggacatgttctgagaagcattgtcacattttgctgacataatcagccgctgtatccagcggcagccagagttcaggccaccaatgtctgatattgtacaagacctaactagacttgtaaatgctactggtgaggaatcagagtaaagaaaaaccatggggatatacaatacaaccctcgtgaccaagttgcgtgttgtacaaaattttgggaagataattgtcttgccacaatctgaggacaatattgtaaggatgtattttcttcagagatcattccacactaactcatgtcaaattggagtttcatttacacatggctggagagtggaggtacagcaatttgtgcacctggtcgttgatcatcaaatccatctttttgcatacatgatattgtacatagcaaggccctgaattcttgtaactaacagtcaggagttcgataaattggttagtctaaagctagtcatttaattattcgcttgttcatcatgttggatggatctactctcagcagtcgaagaaaaattgttcggccatttacttcttgtagagaatagagatgatttggttactgctgtaaaacccagttgtattctcctttcagctcttgcctgttgaaatttgaatgtttatctgtggatttattcccgcaatgctgaaaaaaacatgtagcgtgaattttgttcatagtggatatgtatgaagatgtaaaatttgtctggatgtaaaatttgttgttgaggcccaaacaaacatagggtctgtt

SEQ ID NO: 61724 - DNA, 2928 bp, Zea Mays
gccgaggctcgtgcgcgcggtcaccgacgctgccgacgtctttgcaataaatgggctgtacatttcactgggatcaccacctcttcctggatggactggagatggtggagacccttgtggtgagggctggcagggtgttctgtgtaccggctcttctataactggaataaccatgaatgctgcaaacttgggaggacagctgggaagtttaggaaacttcaatgccatcaccagcatagagcttaacaacaataatattggtggaagcataccagaggacctacctgttactttgcagagtctgtatgttcatcgatcattcatgcagcccatttagcctttgagaccattaattcatggaattgtctttgtttctcttgctacagtttcctctctgctaatcaaattactggaagcataccaagttcactgtcaaaactcgaaaacttatcagccattcaacggcaaccatctaagtggaggcctaccagacacttttgattcactcaatagacttgtaaatttggatatttcttcgaataacttgactggcgtgttaccgtcgtcaatgaaaagtttggcatctttaacttcattgcacatgcaagacaatcaactgtctgggacccttaacgttttgcaaggtctcccactgaaagacttgaacatagagaataatattttttctggaccggtgcctgcgagcttgcttaacataccaaacttcaaaaaggacgggaatccattcaataccacatctgcatctccgccttcaacaggacccgacccaactctaacaccagcacctaacacttcaaattcaacgcccccagcaccagcacccccatctccttcaagagctactcccccgcctaaaacaacctcaaattatcctgaaggatcaactacccgagacagcacttcatcatctaggaaacacaatacatcaaccctcaagattgttggttttgttcttgctggagtagtgctgtttattgttatagtcttcctagtattattttgtctatccaagtaccaagggagacagtcgagatacgatcgtaatagaagtcagctgggaggggtgcatcatagggttgaaccgcaaatcaagccacctccagtgcaacaaagcaatgatattaaagaaggcgagacaccggacaggagggtccatcaactaagttcatctgcagcagctctcccaaagaagtctcctgaaaaccaaaaggagcacataattaattttgatcaaacagattcagatctgtttcatgtttctctaccacctcctcctccaccaccgccattaaccccaattgaaagagttgctgcaaatctcattgttccactagaaaagcgatatattcctccaccaaagacaagtagctcgacttcttccgcgtcattctctgttgcatctcttcagcaatatacagatagtctcagagaggagaatgtgatcagagagagtagattaggaagggtttacctagcagagcttcctgatggcaagttattggaggttttaaagattggcaatgctaatggaagaatatcagtagatgacttcctagaacagattgaatgtatctcagatatcaagcatcctaacattcttgagttagtcggatactgtgctgaatatgggcagaggttactcgtatacgaacacttcagcagaacgacactggatgatgcaattcatgatggaaaggatactgaaagtgcactgtcatggaatgcccgcctccaggttgctcttggttcaggaaaagccttagagtatctccatcatagcttccattctccaattgtgcaccagaactttgaaccagctaatgtgctccttgataaaaagttctcagtgtgtgttgctgaatgtggactggcagaattgatgacatcaagttcagtcactcagctgtcaggtcggatgcgtgcatcactggactacgaagcacctgaattccaggattatggggtcatttcagaaaggggtgatgtctacagctttggtgtagtgatgctggaacttcttacggggcgtaaaccatatgatagttcacgcccgcgtcatgagcaacatcttgttagatgggccagttggcagcttcatgacattgaatccctatccaagatggtggacccacctatacgtggacatgttctgagaagcattgtcacattttgctgacataatcagccgctgtatccagcggcagccagagttcaggccaccaatgtctgatattgtacaagacctaactagacttgtaaatgctactggtgaggaatcagagtaaagaaaaaccatggggatatacaatacaaccctcgtgaccaagttgcgtgttgtacaaaattttgggaagataattgtcttgccacaatctgaggacaatattgtaaggatgtattttcttcagagatcattccacactaactcatgtcaaattggagtttcatttacacatggctggagagtggaggtacagcaatttgtgcacctggtcgttgatcatcaaatccatctttttgcatacatgatattgtacatagcaaggccctgaattcttgtaactaacagtcaggagttcgataaattggttagtctaaagctagtcatttaattattcgcttgttcatcatgttggatggatctactctcagcagtcgaagaaaaattgttcggccatttacttcttgtagagaatagagatgatttggttactgctgtaaaacccagttgtattctcctttcagctcttgcctgttgaaatttgaatgtttatctgtggatttattcccgcaatgctgaaaaaaacatgtagcgtgaattttgttcatagtggatatgtatgaagatgtaaaatttgtctggatgtaaaatttgttgttgaggcccaaacaaacatagggtctgtt

SEQ ID NO: 61725 - DNA, 2789 bp, Zea Mays
gccgaggctcgtgcgcgcggtcaccgacgctgccgacgtctttgcaataaatgggctgtacatttcactgggatcaccacctcttcctggatggactggagatggtggagacccttgtggtgagggctggcagggtgttctgtgtaccggctcttctataactggaataaccatgaatgctgcaaacttgggaggacagctgggaagtttaggaaacttcaatgccatcaccagcattttcctctctgctaatcaaattactggaagcataccaagttcactgtcaaaactcgaaaacttatcagccatgtcagtcaacggcaaccatctaagtggaggcctaccagacacttttgattcactcaatagacttgtaaatttggatatttcttcgaataacttgactggcgtgttaccgtcgtcaatgaaaagtttggcatctttaacttcattgcacatgcaagacaatcaactgtctgggacccttaacgttttgcaaggtctcccactgaaagacttgaacatagagaataatattttttctggaccggtgcctgcgagcttgcttaacataccaaacttcaaaaaggacgggaatccattcaataccacatctgcatctccgccttcaacaggacccgacccaactctaacaccagcacctaacacttcaaattcaacgcccccagcaccagcacccccatctccttcaagagctactcccccgcctaaaacaacctcaaattatcctgaaggatcaactacccgagacagcacttcatcatctaggaaacacaatacatcaaccctcaagattgttggttttgttcttgctggagtagtgctgtttattgttatagtcttcctagtattattttgtctatccaagtaccaagggagacagtcgagatacgatcgtaatagaagtcagctgggaggggtgcatcatagggttgaaccgcaaatcaagccacctccagtgcaacaaagcaatgatattaaagaagttcaggcgagacaccggacaggagggtccatcaactaagttcatctgcagcagctctcccaaagaagtctcctgaaaaccaaaaggagcacataattaattttgatcaaacagattcagatctgtttcatgtttctctaccacctcctcctccaccaccgccattaaccccaattgaaagagttgctgcaaatctcattgttccactagaaaagcgatatattcctccaccaaagacaagtagctcgacttcttccgcgtcattctctgttgcatctcttcagcaatatacagatagtctcagagaggagaatgtgatcagagagagtagattaggaagggtttacctagcagagcttcctgatggcaagttattggaggttttaaagattggcaatgctaatggaagaatatcagtagatgacttcctagaacagattgaatgtatctcagatatcaagcatcctaacattcttgagttagtcggatactgtgctgaatatgggcagaggttactcgtatacgaacacttcagcagaacgacactggatgatgcaattcatgatggaaaggatactgaaagtgcactgtcatggaatgcccgcctccaggttgctcttggttcaggaaaagccttagagtatctccatcatagcttccattctccaattgtgcaccagaactttgaaccagctaatgtgctccttgataaaaagttctcagtgtgtgttgctgaatgtggactggcagaattgatgacatcaagttcagtcactcagctgtcaggtcggatgcgtgcatcactggactacgaagcacctgaattccaggattatggggtcatttcagaaaggggtgatgtctacagctttggtgtagtgatgctggaacttcttacggggcgtaaaccatatgatagttcacgcccgcgtcatgagcaacatcttgttagatgggccagttggcagcttcatgacattgaatccctatccaagatggtggacccacctatacgtggacatgttctgagaagcattgtcacattttgctgacataatcagccgctgtatccagcggcagccagagttcaggccaccaatgtctgatattgtacaagacctaactagacttgtaaatgctactggtgaggaatcagagtaaagaaaaaccatggggatatacaatacaaccctcgtgaccaagttgcgtgttgtacaaaattttgggaagataattgtcttgccacaatctgaggacaatattgtaaggatgtattttcttcagagatcattccacactaactcatgtcaaattggagtttcatttacacatggctggagagtggaggtacagcaatttgtgcacctggtcgttgatcatcaaatccatctttttgcatacatgatattgtacatagcaaggccctgaattcttgtaactaacagtcaggagttcgataaattggttagtctaaagctagtcatttaattattcgcttgttcatcatgttggatggatctactctcagcagtcgaagaaaaattgttcggccatttacttcttgtagagaatagagatgatttggttactgctgtaaaacccagttgtattctcctttcagctcttgcctgttgaaatttgaatgtttatctgtggatttattcccgcaatgctgaaaaaaacatgtagcgtgaattttgttcatagtggatatgtatgaagatgtaaaatttgtctggatgtaaaatttgttgttgaggcccaaacaaacatagggtctgtt

SEQ ID NO: 61726 - DNA, 3669 bp, Zea Mays
cgccgaggctcgtgcgcgcggtcaccgacgctgccgacgtctttgcaataaatgggctgtacatttcactgggatcaccacctcttcctggatggactggagatggtggagacccttgtggtgagggctggcagggtgttctgtgtaccggctcttctataactggaataaccatgaatgctgcaaacttgggaggacagctgggaagtttaggaaacttcaatgccatcaccagcatagagcttaacaacaataatattggtggaagcataccagaggacctacctgttactttgcagagtcttttcctctctgctaatcaaattactggaagcataccaagttcactgtcaaaactcgaaaacttatcagccatgtcagtcaacggcaaccatctaagtggaggcctaccagacacttttgattcactcaatagacttgtaaatttggatatttcttcgaataacttgactggcgtgttaccgtcgtcaatgaaaagtttggcatctttaacttcattgcacatgcaagacaatcaactgtctgggacccttaacgttttgcaaggtctcccactgaaagacttgtaatacctcaatctcatatctcttcttccatagttgttctgttacatttgtattgataattgaaggcatgccatttatcattatcttctcatttacataacttagcctatatgttgactttccctatggtacatggcattgcaatacaatgtgccgtcaatttccattgttgatttccaaagagtgtaacatttcatattggttccagacactacaagtttgacttgaacattagtttaacagatcatgattggctgatgtctacaatccagaagcttgtgctcggttgctaaaggaattagcatttttaacaaactatctcttgctgccttctcgtagtatgttgcacttgcacttctctcatgtgccgctcactgatatctggaggcaatgatatctagaagggtaggcttagtgtagtggtgagagctgtctcatcgagtcacctggtggaacgttcgaagcagtctctccatatttacgggtaaaggtttgcctcagtttatcccttccccatacaccactcgtatggaagccttcggcactagattttccctttaatgatattttaataaggttttcttcattggagaaagtaacacatgtttcatttaccatgatcttgcaaatgaacacttagtcaacactaaggaagcgttaaacagtttatgtcaagctcagcattcatgcagtacagccgctctactcttatacttgaattgaattactgaaaccaaactctgacctattatattgaaatattactttgatcgttaactgtttacattttttaatatactttcctgacttcggacaggaacatagagaataatattttttctggaccggtgcctgcgagcttgcttaacataccaaacttcaaaaaggacgggaatccattcaataccacatctgcatctccgccttcaacaggacccgacccaactctaacaccagcacctaacacttcaaattcaacgcccccagcaccagcacccccatctccttcaagagctactcccccgcctaaaacaacctcaaattatcctgaaggatcaactacccgagacagcacttcatcatctaggaaacacaatacatcaaccctcaagattgttggttttgttcttgctggagtagtgctgtttattgttatagtcttcctagtattattttgtctatccaagtaccaagggagacagtcgagatacgatcgtaatagaagtcagctgggaggggtgcatcatagggttgaaccgcaaatcaagccacctccagtgcaacaaagcaatgatattaaagaaggcgagacaccggacaggagggtccatcaactaagttcatctgcagcagctctcccaaagaagtctcctgaaaaccaaaaggagcacataattaattttgatcaaacagattcagatctgtttcatgtttctctaccacctcctcctccaccaccgccattaaccccaattgaaagagttgctgcaaatctcattgttccactagaaaagcgatatattcctccaccaaagacaagtagctcgacttcttccgcgtcattctctgttgcatctcttcagcaatatacagatagtctcagagaggagaatgtgatcagagagagtagattaggaagggtttacctagcagagcttcctgatggcaagttattggaggttttaaagattggcaatgctaatggaagaatatcagtagatgacttcctagaacagattgaatgtatctcagatatcaagcatcctaacattcttgagttagtcggatactgtgctgaatatgggcagaggttactcgtatacgaacacttcagcagaacgacactggatgatgcaattcatgatggaaaggatactgaaagtgcactgtcatggaatgcccgcctccaggttgctcttggttcaggaaaagccttagagtatctccatcatagcttccattctccaattgtgcaccagaactttgaaccagctaatgtgctccttgataaaaagttctcagtgtgtgttgctgaatgtggactggcagaattgatgacatcaagttcagtcactcagctgtcaggtcggatgcgtgcatcactggactacgaagcacctgaattccaggattatggggtcatttcagaaaggggtgatgtctacagctttggtgtagtgatgctggaacttcttacggggcgtaaaccatatgatagttcacgcccgcgtcatgagcaacatcttgttagatgggccagttggcagcttcatgacattgaatccctatccaagatggtggacccacctatacgtggacatgttctgagaagcattgtcacattttgctgacataatcagccgctgtatccagcggcagccagagttcaggccaccaatgtctgatattgtacaagacctaactagacttgtaaatgctactggtgaggaatcagagtaaagaaaaaccatggggatatacaatacaaccctcgtgaccaagttgcgtgttgtacaaaattttgggaagataattgtcttgccacaatctgaggacaatattgtaaggatgtattttcttcagagatcattccacactaactcatgtcaaattggagtttcatttacacatggctggagagtggaggtacagcaatttgtgcacctggtcgttgatcatcaaatccatctttttgcatacatgatattgtacatagcaaggccctgaattcttgtaactaacagtcaggagttcgataaattggttagtctaaagctagtcatttaattattcgcttgttcatcatgttggatggatctactctcagcagtcgaagaaaaattgttcggccatttacttcttgtagagaatagagatgatttggttactgctgtaaaacccagttgtattctcctttcagctcttgcctgttgaaatttgaatgtttatctgtggatttattcccgcaatgctgaaaaaaacatgtagcgtgaattttgttcatagtggatatgtatgaagatgtaaaatttgtctggatgtaaaatttgttgttgaggcccaaacaaacatagggtctgtt

SEQ ID NO: 61727 - DNA, 2863 bp, Zea Mays
gcattggcggcggccgcgccgaggctcgtgcgcgcggtcaccgacgctgccgacgtctttgcaataaatgggctgtacatttcactgggatcaccacctcttcctggatggactggagatggtggagacccttgtggtgagggctggcagggtgttctgtgtaccggctcttctataactggaataaccatgaatgctgcaaacttgggaggacagctgggaagtttaggaaacttcaatgccatcaccagcatagagcttaacaacaataatattggtggaagcataccagaggacctacctgttactttgcagatttcctctctgctaatcaaattactggaagcataccaagttcactgtcaaaactcgaaaacttatcagccatgtcagtcaacggcaaccatctaagtggaggcctaccagacacttttgattcactcaatagacttgtaaatttggatatttcttcgaataacttgactggcgtgttaccgtcgtcaatgaaaagtttggcatctttaacttcattgcacatgcaagacaatcaactgtctgggacccttaacgttttgcaaggtctcccactgaaagacttgaacatagagaataatattttttctggaccggtgcctgcgagcttgcttaacataccaaacttcaaaaaggacgggaatccattcaataccacatctgcatctccgccttcaacaggacccgacccaactctaacaccagcacctaacacttcaaattcaacgcccccagcaccagcacccccatctccttcaagagctactcccccgcctaaaacaacctcaaattatcctgaaggatcaactacccgagacagcacttcatcatctaggaaacacaatacatcaaccctcaagattgttggttttgttcttgctggagtagtgctgtttattgttatagtcttcctagtattattttgtctatccaagtaccaagggagacagtcgagatacgatcgtaatagaagtcagctgggaggggtgcatcatagggttgaaccgcaaatcaagccacctccagtgcaacaaagcaatgatattaaagaaggcgagacaccggacaggagggtccatcaactaagttcatctgcagcagctctcccaaagaagtctcctgaaaaccaaaaggagcacataattaattttgatcaaacagattcagatctgtttcatgtttctctaccacctcctcctccaccaccgccattaaccccaattgaaagagttgctgcaaatctcattgttccactagaaaagcgatatattcctccaccaaagacaagtagctcgacttcttccgcgtcattctctgttgcatctcttcagcaatatacagatagtctcagagaggagaatgtgatcagagagagtagattaggaagggtttacctagcagagcttcctgatggcaagttattggaggttttaaagattggcaatgctaatggaagaatatcagtagatgacttcctagaacagattgaatgtatctcagatatcaagcatcctaacattcttgagttagtcggatactgtgctgaatatgggcagaggttactcgtatacgaacacttcagcagaacgacactggatgatgcaattcatgatggaaaggatactgaaagtgcactgtcatggaatgcccgcctccaggttgctcttggttcaggaaaagccttagagtatctccatcatagcttccattctccaattgtgcaccagaactttgaaccagctaatgtgctccttgataaaaagttctcagtgtgtgttgctgaatgtggactggcagaattgatgacatcaagttcagtcactcagctgtcaggtcggatgcgtgcatcactggactacgaagcacctgaattccaggattatggggtcatttcagaaaggggtgatgtctacagctttggtgtagtgatgctggaacttcttacggggcgtaaaccatatgatagttcacgcccgcgtcatgagcaacatcttgttagatgggccagttggcagcttcatgacattgaatccctatccaagatggtggacccacctatacgtggacatgttctgagaagcattgtcacattttgctgacataatcagccgctgtatccagcggcagccagagttcaggccaccaatgtctgatattgtacaagacctaactagacttgtaaatgctactggtgaggaatcagagtaaagaaaaaccatggggatatacaatacaaccctcgtgaccaagttgcgtgttgtacaaaattttgggaagataattgtcttgccacaatctgaggacaatattgtaaggatgtattttcttcagagatcattccacactaactcatgtcaaattggagtttcatttacacatggctggagagtggaggtacagcaatttgtgcacctggtcgttgatcatcaaatccatctttttgcatacatgatattgtacatagcaaggccctgaattcttgtaactaacagtcaggagttcgataaattggttagtctaaagctagtcatttaattattcgcttgttcatcatgttggatggatctactctcagcagtcgaagaaaaattgttcggccatttacttcttgtagagaatagagatgatttggttactgctgtaaaacccagttgtattctcctttcagctcttgcctgttgaaatttgaatgtttatctgtggatttattcccgcaatgctgaaaaaaacatgtagcgtgaattttgttcatagtggatatgtatgaagatgtaaaatttgtctggatgtaaaatttgttgttgaggcccaaacaaacatagggtctgtt

SEQ ID NO: 61728 - DNA, 2826 bp, Zea Mays
gccgatcctgctgctggcgctggtcgcattggcggcggccgcgccgaggctcgtgcgcgcggtcaccgacgctgccgacgtctttgcaataaatgggctgtacatttcactgggatcaccacctcttcctggatggactggagatggtggagacccttgtggtgagggctggcagggtgttctgtgtaccggctcttctataactggaataaccatgaatgctgcaaacttgggaggacagctgggaagtttaggaaacttcaatgccatcaccagcatagagcttaacaacaataatattggtggaagcataccagaggacctacctgttactttgcagagtcttttcctctctgctaatcaaattactggaagcataccaagttcactgtcaaaactcgaaaacttatcagccatgtcagtcaacggcaaccatctaagtggaggcctaccagacacttttgattcactcaatagacttgtaaatttggatatttcttcgaataacttgactggcgtgttaccgtcgtcaatgaaaagtttggcatctttaacttcattgaacatagagaataatattttttctggaccggtgcctgcgagcttgcttaacataccaaacttcaaaaaggacgggaatccattcaataccacatctgcatctccgccttcaacaggacccgacccaactctaacaccagcacctaacacttcaaattcaacgcccccagcaccagcacccccatctccttcaagagctactcccccgcctaaaacaacctcaaattatcctgaaggatcaactacccgagacagcacttcatcatctaggaaacacaatacatcaaccctcaagattgttggttttgttcttgctggagtagtgctgtttattgttatagtcttcctagtattattttgtctatccaagtaccaagggagacagtcgagatacgatcgtaatagaagtcagctgggaggggtgcatcatagggttgaaccgcaaatcaagccacctccagtgcaacaaagcaatgatattaaagaaggcgagacaccggacaggagggtccatcaactaagttcatctgcagcagctctcccaaagaagtctcctgaaaaccaaaaggagcacataattaattttgatcaaacagattcagatctgtttcatgtttctctaccacctcctcctccaccaccgccattaaccccaattgaaagagttgctgcaaatctcattgttccactagaaaagcgatatattcctccaccaaagacaagtagctcgacttcttccgcgtcattctctgttgcatctcttcagcaatatacagatagtctcagagaggagaatgtgatcagagagagtagattaggaagggtttacctagcagagcttcctgatggcaagttattggaggttttaaagattggcaatgctaatggaagaatatcagtagatgacttcctagaacagattgaatgtatctcagatatcaagcatcctaacattcttgagttagtcggatactgtgctgaatatgggcagaggttactcgtatacgaacacttcagcagaacgacactggatgatgcaattcatgatggaaaggatactgaaagtgcactgtcatggaatgcccgcctccaggttgctcttggttcaggaaaagccttagagtatctccatcatagcttccattctccaattgtgcaccagaactttgaaccagctaatgtgctccttgataaaaagttctcagtgtgtgttgctgaatgtggactggcagaattgatgacatcaagttcagtcactcagctgtcaggtcggatgcgtgcatcactggactacgaagcacctgaattccaggattatggggtcatttcagaaaggggtgatgtctacagctttggtgtagtgatgctggaacttcttacggggcgtaaaccatatgatagttcacgcccgcgtcatgagcaacatcttgttagatgggccagttggcagcttcatgacattgaatccctatccaagatggtggacccacctatacgtggacatgttctgagaagcattgtcacattttgctgacataatcagccgctgtatccagcggcagccagagttcaggccaccaatgtctgatattgtacaagacctaactagacttgtaaatgctactggtgaggaatcagagtaaagaaaaaccatggggatatacaatacaaccctcgtgaccaagttgcgtgttgtacaaaattttgggaagataattgtcttgccacaatctgaggacaatattgtaaggatgtattttcttcagagatcattccacactaactcatgtcaaattggagtttcatttacacatggctggagagtggaggtacagcaatttgtgcacctggtcgttgatcatcaaatccatctttttgcatacatgatattgtacatagcaaggccctgaattcttgtaactaacagtcaggagttcgataaattggttagtctaaagctagtcatttaattattcgcttgttcatcatgttggatggatctactctcagcagtcgaagaaaaattgttcggccatttacttcttgtagagaatagagatgatttggttactgctgtaaaacccagttgtattctcctttcagctcttgcctgttgaaatttgaatgtttatctgtggatttattcccgcaatgctgaaaaaaacatgtagcgtgaattttgttcatagtggatatgtatgaagatgtaaaatttgtctggatgtaaaatttgttgttgaggcccaaacaaacatagggtctgtt

SEQ ID NO: 61729 - DNA, 2892 bp, Zea Mays
gccgatcctgctgctggcgctggtcgcattggcggcggccgcgccgaggctcgtgcgcgcggtcaccgacgctgccgacgtctttgcaataaatgggctgtacatttcactgggatcaccacctcttcctggatggactggagatggtggagacccttgtggtgagggctggcagggtgttctgtgtaccggctcttctataactggaataaccatgaatgctgcaaacttgggaggacagctgggaagtttaggaaacttcaatgccatcaccagcatagagcttaacaacaataatattggtggaagcataccagaggacctacctgttactttgcagagtcttttcctctctgctaatcaaattactggaagcataccaagttcactgtcaaaactcgaaaacttatcagccatgtcagtcaacggcaaccatctaagtggaggcctaccagacacttttgattcactcaatagacttgtaaatttggatatttcttcgaataacttgactggcgtgttaccgtcgtcaatgaaaagtttggcatctttaacttcattgcacatgcaagacaatcaactgtctgggacccttaacgttttgcaaggtctcccactgaaagacttgaacatagagaataatattttttctggaccggtgcctgcgagcttgcttaacataccaaacttcaaaaaggacgggaatccattcaataccacatctgcatctccgccttcaacaggacccgacccaactctaacaccagcacctaacacttcaaattcaacgcccccagcaccagcacccccatctccttcaagagctactcccccgcctaaaacaacctcaaattatcctgaaggatcaactacccgagacagcacttcatcatctaggaaacacaatacatcaaccctcaagattgttggttttgttcttgctggagtagtgctgtttattgttatagtcttcctagtattattttgtctatccaagtaccaagggagacagtcgagatacgatcgtaatagaagtcagctgggaggggtgcatcatagggttgaaccgcaaatcaagccacctccagtgcaacaaagcaatgatattaaagaaggcgagacaccggacaggagggtccatcaactaagttcatctgcagcagctctcccaaagaagtctcctgaaaaccaaaaggagcacataattaattttgatcaaacagattcagatctgtttcatgtttctctaccacctcctcctccaccaccgccattaaccccaattgaaagagttgctgcaaatctcattgttccactagaaaagcgatatattcctccaccaaagacaagtagctcgacttcttccgcgtcattctctgttgcatctcttcagcaatatacagatagtctcagagaggagaatgtgatcagagagagtagattaggaagggtttacctagcagagcttcctgatggcaagttattggaggttttaaagattggcaatgctaatggaagaatatcagtagatgacttcctagaacagattgaatgtatctcagatatcaagcatcctaacattcttgagttagtcggatactgtgctgaatatgggcagaggttactcgtatacgaacacttcagcagaacgacactggatgatgcaattcatgatggaaaggatactgaaagtgcactgtcatggaatgcccgcctccaggttgctcttggttcaggaaaagccttagagtatctccatcatagcttccattctccaattgtgcaccagaactttgaaccagctaatgtgctccttgataaaaagttctcagtgtgtgttgctgaatgtggactggcagaattgatgacatcaagttcagtcactcagctgtcaggtcggatgcgtgcatcactggactacgaagcacctgaattccaggattatggggtcatttcagaaaggggtgatgtctacagctttggtgtagtgatgctggaacttcttacggggcgtaaaccatatgatagttcacgcccgcgtcatgagcaacatcttgttagatgggccagttggcagcttcatgacattgaatccctatccaagatggtggacccacctatacgtggacatgttctgagaagcattgtcacattttgctgacataatcagccgctgtatccagcggcagccagagttcaggccaccaatgtctgatattgtacaagacctaactagacttgtaaatgctactggtgaggaatcagagtaaagaaaaaccatggggatatacaatacaaccctcgtgaccaagttgcgtgttgtacaaaattttgggaagataattgtcttgccacaatctgaggacaatattgtaaggatgtattttcttcagagatcattccacactaactcatgtcaaattggagtttcatttacacatggctggagagtggaggtacagcaatttgtgcacctggtcgttgatcatcaaatccatctttttgcatacatgatattgtacatagcaaggccctgaattcttgtaactaacagtcaggagttcgataaattggttagtctaaagctagtcatttaattattcgcttgttcatcatgttggatggatctactctcagcagtcgaagaaaaattgttcggccatttacttcttgtagagaatagagatgatttggttactgctgtaaaacccagttgtattctcctttcagctcttgcctgttgaaatttgaatgtttatctgtggatttattcccgcaatgctgaaaaaaacatgtagcgtgaattttgttcatagtggatatgtatgaagatgtaaaatttgtctggatgtaaaatttgttgttgaggcccaaacaaacatagggtctgtt

SEQ ID NO: 61730 - DNA, 2903 bp, Zea Mays
aacggtgtgatcgagcccgttgggaactggggaagccaggccatgcagcgtgctccggggtgccgccgcggcgcggggccgatcctgctgctggcgctggtcgcattggcggcggccgcgccgaggctcgtgcgcgcggtcaccgacgctgccgacgtctttgcaataaatgggctgtacatttcactgggatcaccacctcttcctggatggactggagatggtggagacccttgtggtgagggctggcagggtgttctgtgtaccggctcttctataactggaataaccatgaatgctgcaaacttgggaggacagctgggaagtttaggaaacttcaatgccatcaccagcattttcctctctgctaatcaaattactggaagcataccaagttcactgtcaaaactcgaaaacttatcagccatgtcagtcaacggcaaccatctaagtggaggcctaccagacacttttgattcactcaatagacttgtaaatttggatatttcttcgaataacttgactggcgtgttaccgtcgtcaatgaaaagtttggcatctttaacttcattgcacatgcaagacaatcaactgtctgggacccttaacgttttgcaaggtctcccactgaaagacttgaacatagagaataatattttttctggaccggtgcctgcgagcttgcttaacataccaaacttcaaaaaggacgggaatccattcaataccacatctgcatctccgccttcaacaggacccgacccaactctaacaccagcacctaacacttcaaattcaacgcccccagcaccagcacccccatctccttcaagagctactcccccgcctaaaacaacctcaaattatcctgaaggatcaactacccgagacagcacttcatcatctaggaaacacaatacatcaaccctcaagattgttggttttgttcttgctggagtagtgctgtttattgttatagtcttcctagtattattttgtctatccaagtaccaagggagacagtcgagatacgatcgtaatagaagtcagctgggaggggtgcatcatagggttgaaccgcaaatcaagccacctccagtgcaacaaagcaatgatattaaagaaggcgagacaccggacaggagggtccatcaactaagttcatctgcagcagctctcccaaagaagtctcctgaaaaccaaaaggagcacataattaattttgatcaaacagattcagatctgtttcatgtttctctaccacctcctcctccaccaccgccattaaccccaattgaaagagttgctgcaaatctcattgttccactagaaaagcgatatattcctccaccaaagacaagtagctcgacttcttccgcgtcattctctgttgcatctcttcagcaatatacagatagtctcagagaggagaatgtgatcagagagagtagattaggaagggtttacctagcagagcttcctgatggcaagttattggaggttttaaagattggcaatgctaatggaagaatatcagtagatgacttcctagaacagattgaatgtatctcagatatcaagcatcctaacattcttgagttagtcggatactgtgctgaatatgggcagaggttactcgtatacgaacacttcagcagaacgacactggatgatgcaattcatgatggaaaggatactgaaagtgcactgtcatggaatgcccgcctccaggttgctcttggttcaggaaaagccttagagtatctccatcatagcttccattctccaattgtgcaccagaactttgaaccagctaatgtgctccttgataaaaagttctcagtgtgtgttgctgaatgtggactggcagaattgatgacatcaagttcagtcactcagctgtcaggtcggatgcgtgcatcactggactacgaagcacctgaattccaggattatggggtcatttcagaaaggggtgatgtctacagctttggtgtagtgatgctggaacttcttacggggcgtaaaccatatgatagttcacgcccgcgtcatgagcaacatcttgttagatgggccagttggcagcttcatgacattgaatccctatccaagatggtggacccacctatacgtggacatgttctgagaagcattgtcacattttgctgacataatcagccgctgtatccagcggcagccagagttcaggccaccaatgtctgatattgtacaagacctaactagacttgtaaatgctactggtgaggaatcagagtaaagaaaaaccatggggatatacaatacaaccctcgtgaccaagttgcgtgttgtacaaaattttgggaagataattgtcttgccacaatctgaggacaatattgtaaggatgtattttcttcagagatcattccacactaactcatgtcaaattggagtttcatttacacatggctggagagtggaggtacagcaatttgtgcacctggtcgttgatcatcaaatccatctttttgcatacatgatattgtacatagcaaggccctgaattcttgtaactaacagtcaggagttcgataaattggttagtctaaagctagtcatttaattattcgcttgttcatcatgttggatggatctactctcagcagtcgaagaaaaattgttcggccatttacttcttgtagagaatagagatgatttggttactgctgtaaaacccagttgtattctcctttcagctcttgcctgttgaaatttgaatgtttatctgtggatttattcccgcaatgctgaaaaaaacatgtagcgtgaattttgttcatagtggatatgtatgaagatgtaaaatttgtctggatgtaaaatttgttgttgaggcccaaacaaacatagggtctgtt

SEQ ID NO: 61731 - DNA, 1332 bp, Zea Mays
agcagagctgctgctgctcttaaaactgtcatttcagaagtactacaggttcttacggtgccacggagttgcaactgcacaaaggccttttgtggtcacaaagggtgctattgtgttacaacaacagttctagttgaagtaataagacattttttaaactgtctgctacattgcttccatggcaaccaatgagaacctcccaccaaatgtcatcaggcaattggctaaagaactgaagaatcttaatgagtcacctgcagaaggaattaatgtgactgtcaatgatgatgacttcactactatttttgctgatattgaaggccctgctggaactccatatgagaatggagtgttcaggatgaagctattattgtctcatgatttccctcaatctcccccaaaaggattcttcttgacaaaaattttccatccaaacatagctactagtggtgagatatgtgtaaacacactgaagaaggattggaatcctagccttggattaagacatgttcttctggtagtgagatgccttctggtcgaaccatttcctgaatctgcacttaatgaacaagctgggaagatgctactcgaaaattatgaggaatatgcacggcatgcaaggttatacactggcatccatgccctcaagaataagtccaagactggagctatatctgagtcgaccacagctctgaatgtcgacaagtcaagcactgctcccaacgagaacgcaccatcgatgccaccggcaatacctacctccgctgcatccagagcacttggcacaaatttgcaggatcagagccctactgtatctgatcctactgtaggagcggcggcggcggcggcggcacgaaggaaggatggcccaatgccttccaaagtacctgttgataggaaaaagatggatgcacggaagaagagcttgaagagattataggcggaaccttcatagtccagcatttaaatctgtcggaaatttagcagatgcctagcgaagctgggagagagacaattagttgggaggcatctgatgacctggcttccgggaggtaggggtcctgggctgggacaaaagtgaataatgtggcctgggtgagtccttcgggacaactgtatgtgcaatgtccaatcatttggaagaacacctgcctatttccttctgtcctctgtattttgttagcttagcggtagtgttagctagctcataggggcaattccctgtctagccatgggctgctgctccgtactctgcttgaataataatttgtccgtgcaattacagctattgttttgtttggaggaatagttgcctttttctgttgattcccg

SEQ ID NO: 61732 - DNA, 1514 bp, Zea Mays
ccggccgcctcttctcctctccacctctcaatttcccaaattgaatcctcctcctccccgcctagggttccgattccgcaccgtccgagaaccacccaagcggcggcaactgtcccttctcgtcggccaccgccgcacaactcagttgcttgttcagccgctccgctgccgacccgcctatcgcctgagcgtgtatcgtgggtccttccgcttcacccaaccacgaggaagttcttacggtgccacggagttgcaactgcacaaaggccttttgtggtcacaaagggtgctattgtgttacaacaacagttctagttgaagtaataagacattttttaaactgtctgctacattgcttccatggcaaccaatgagaacctcccaccaaatgtcatcaggcaattggctaaagaactgaagaatcttaatgagtcacctgcagaaggaattaatgtgactgtcaatgatgatgacttcactactatttttgctgatattgaaggccctgctggaactccatatgagaatggagtgttcaggatgaagctattattgtctcatgatttccctcaatctcccccaaaaggattcttcttgacaaaaattttccatccaaacatagctactagtggtgagatatgtgtaaacacactgaagaaggattggaatcctagccttggattaagacatgttcttctggtagtgagatgccttctggtcgaaccatttcctgaatctgcacttaatgaacaagctgggaagatgctactcgaaaattatgaggaatatgcacggcatgcaaggttatacactggcatccatgccctcaagaataagtccaagactggagctatatctgagtcgaccacagctctgaatgtcgacaagtcaagcactgctcccaacgagaacgcaccatcgatgccaccggcaatacctacctccgctgcatccagagcacttggcacaaatttgcaggatcagagccctactgtatctgatcctactgtaggagcggcggcggcggcggcggcacgaaggaaggatggcccaatgccttccaaagtacctgttgataggaaaaagatggatgcacggaagaagagcttgaagagattataggcggaaccttcatagtccagcatttaaatctgtcggaaatttagcagatgcctagcgaagctgggagagagacaattagttgggaggcatctgatgacctggcttccgggaggtaggggtcctgggctgggacaaaagtgaataatgtggcctgggtgagtccttcgggacaactgtatgtgcaatgtccaatcatttggaagaacacctgcctatttccttctgtcctctgtattttgttagcttagcggtagtgttagctagctcataggggcaattccctgtctagccatgggctgctgctccgtactctgcttgaataataatttgtccgtgcaattacagctattgttttgtttggaggaatagttgcctttttctgttgattcccg

SEQ ID NO: 61733 - DNA, 1454 bp, Zea Mays
gttcgttttcatccctaccggccgcctcttctcctctccacctctcaatttcccaaattgaatcctcctcctccccgcctagggttccgattccgcaccgtccgagaaccacccaagcggcggcaactgtcccttctcgtcggccaccgccgcacaactcagttgcttgttcagccgctccgctgccgacccgcctatcgcctgaggttcttacggtgccacggagttgcaactgcacaaaggccttttgtggtcacaaagggtgctattgtgttacaacaacagttctagttgaagtaataagacattttttaaactgtctgctacattgcttccatggcaaccaatgagaacctcccaccaaatgtcatcaggcaattggctaaagaactgaagaatcttaatgagtcacctgcagaaggaattaatgtgactgtcaatgatgatgacttcactactatttttgctgatattgaaggccctgctggaactccatatgagaatggagtgttcaggatgaagctattattgtctcatgatttccctcaatctcccccaaaagctactagtggtgagatatgtgtaaacacactgaagaaggattggaatcctagccttggattaagacatgttcttctggtagtgagatgccttctggtcgaaccatttcctgaatctgcacttaatgaacaagctgggaagatgctactcgaaaattatgaggaatatgcacggcatgcaaggttatacactggcatccatgccctcaagaataagtccaagactggagctatatctgagtcgaccacagctctgaatgtcgacaagtcaagcactgctcccaacgagaacgcaccatcgatgccaccggcaatacctacctccgctgcatccagagcacttggcacaaatttgcaggatcagagccctactgtatctgatcctactgtaggagcggcggcggcggcggcggcacgaaggaaggatggcccaatgccttccaaagtacctgttgataggaaaaagatggatgcacggaagaagagcttgaagagattataggcggaaccttcatagtccagcatttaaatctgtcggaaatttagcagatgcctagcgaagctgggagagagacaattagttgggaggcatctgatgacctggcttccgggaggtaggggtcctgggctgggacaaaagtgaataatgtggcctgggtgagtccttcgggacaactgtatgtgcaatgtccaatcatttggaagaacacctgcctatttccttctgtcctctgtattttgttagcttagcggtagtgttagctagctcataggggcaattccctgtctagccatgggctgctgctccgtactctgcttgaataataatttgtccgtgcaattacagctattgttttgtttggaggaatagttgcctttttctgttgattcccg

SEQ ID NO: 61734 - DNA, 1525 bp, Zea Mays
ggcaagttaggcaggaaaccaaacatgcccttagggttccgattccggcaactgaaaaaacgagagagtcgttcgttttcatccctaccggccgcctcttctcctctccacctctcaatttcccaaattgaatcctcctcctccccgcctagggttccgattccgcaccgtccgagaaccacccaagcggcggcaactgtcccttctcgtcggccaccgccgcacaactcagttgcttgttcagccgctccgctgccgacccgcctatcgcctgaggttcttacggtgccacggagttgcaactgcacaaaggccttttgtggtcacaaagggtgctattgtgttacaacaacagttctagttgaagtaataagacattttttaaactgtctgctacattgcttccatggcaattggctaaagaactgaagaatcttaatgagtcacctgcagaaggaattaatgtgactgtcaatgatgatgacttcactactatttttgctgatattgaaggccctgctggaactccatatgagaatggagtgttcaggatgaagctattattgtctcatgatttccctcaatctcccccaaaaggattcttcttgacaaaaattttccatccaaacatagctactagtggtgagatatgtgtaaacacactgaagaaggattggaatcctagccttggattaagacatgttcttctggtagtgagatgccttctggtcgaaccatttcctgaatctgcacttaatgaacaagctgggaagatgctactcgaaaattatgaggaatatgcacggcatgcaaggttatacactggcatccatgccctcaagaataagtccaagactggagctatatctgagtcgaccacagctctgaatgtcgacaagtcaagcactgctcccaacgagaacgcaccatcgatgccaccggcaatacctacctccgctgcatccagagcacttggcacaaatttgcaggatcagagccctactgtatctgatcctactgtaggagcggcggcggcggcggcggcacgaaggaaggatggcccaatgccttccaaagtacctgttgataggaaaaagatggatgcacggaagaagagcttgaagagattataggcggaaccttcatagtccagcatttaaatctgtcggaaatttagcagatgcctagcgaagctgggagagagacaattagttgggaggcatctgatgacctggcttccgggaggtaggggtcctgggctgggacaaaagtgaataatgtggcctgggtgagtccttcgggacaactgtatgtgcaatgtccaatcatttggaagaacacctgcctatttccttctgtcctctgtattttgttagcttagcggtagtgttagctagctcataggggcaattccctgtctagccatgggctgctgctccgtactctgcttgaataataatttgtccgtgcaattacagctattgttttgtttggaggaatagttgcctttttctgttgattcccg

SEQ ID NO: 61735 - DNA, 1927 bp, Zea Mays
atttctgcttcgggcttttcctgtccgctctcacagtcccacttccggtaataagggtctgtttggttcgtggctaactacgccacactttgcctaaagttagtcgttcaaattgaagaactaaccttaggcaaaaaagttaggcaaagtgtggcaagttaggcaggaaaccaaacatgcccttagggttccgattccggcaactgaaaaaacgagagagtcgttcgttttcatccctaccggccgcctcttctcctctccacctctcaatttcccaaattgaatcctcctcctccccgcctagggttccgattccgcaccgtccgagaaccacccaagcggcggcaactgtcccttctcgtcggccaccgccgcacaactcagttgcttgttcagccgctccgctgccgacccgcctatcgcctgagctccaacggagttacccagaaaccatgattttgaggctctctaattggtctcccaaacaacaacgctccacagcaaattcacaatttatttcattctccatcttttaaaagtgacacgtaacaactttgtaccgctccttacctgtctgtcacatcgcaattgttccccaccagcgtgtatcgtgggtccttccgcttcacccaaccacgaggaagttcttacggtgccacggagttgcaactgcacaaaggccttttgtggtcacaaagggtgctattgtgttacaacaacagttctagttgaagtaataagacattttttaaactgtctgctacattgcttccatggcaaccaatgagaacctcccaccaaatgtcatcaggcaattggctaaagaactgaagaatcttaatgagtcacctgcagaaggaattaatgtgactgtcaatgatgatgacttcactactatttttgctgatattgaaggccctgctggaactccatatgagaatggagtgttcaggatgaagctattattgtctcatgatttccctcaatctcccccaaaaggattcttcttgacaaaaattttccatccaaacatagctactagtggtgagatatgtgtaaacacactgaagaaggattggaatcctagccttggattaagacatgttcttctggtagtgagatgccttctggtcgaaccatttcctgaatctgcacttaatgaacaagctgggaagatgctactcgaaaattatgaggaatatgcacggcatgcaaggttatacactggcatccatgccctcaagaataagtccaagactggagctatatctgagtcgaccacagctctgaatgtcgacaagtcaagcactgctcccaacgagaacgcaccatcgatgccaccggcaatacctacctccgctgcatccagagcacttggcacaaatttgcaggatcagagccctactgtatctgatcctactgtaggagcggcggcggcggcggcggcacgaaggaaggatggcccaatgccttccaaagtacctgttgataggaaaaagatggatgcacggaagaagagcttgaagagattataggcggaaccttcatagtccagcatttaaatctgtcggaaatttagcagatgcctagcgaagctgggagagagacaattagttgggaggcatctgatgacctggcttccgggaggtaggggtcctgggctgggacaaaagtgaataatgtggcctgggtgagtccttcgggacaactgtatgtgcaatgtccaatcatttggaagaacacctgcctatttccttctgtcctctgtattttgttagcttagcggtagtgttagctagctcataggggcaattccctgtctagccatgggctgctgctccgtactctgcttgaataataatttgtccgtgcaattacagctattgttttgtttggaggaatagttgcctttttctgttgattcccg

SEQ ID NO: 61736 - DNA, 2329 bp, Zea Mays
cgacatcctccgctccgcgctttcatcgccgccatcaacggtcgtcgctatcccgtccgtgatgctcgccgcccctgctcccccacgctctgccatcctcgccctcctccgcgcacgcgtcggacgctcgccatgctcgcctccctcccctccggcccttccctcgcgcgggctcggaaaaaagtctagccccaaactccccagcggggggcgagcctaggagctgaaccaaccgtacaacagtttctccccaattcctccgccgtctgcccccttcggaaacccaatggcgtcgcccgacgacgagaccgcgcagccaccatcgaagcggccccgacacgatgccgaacctgaggtggacgccgctgagccatcaccgcgcgtggtgctcaacccagcgttctgcgatctcgacttcgatgtaggcgggggcggtctccgggggagcgcgcttcacgagggcggcttcgcctactgctggtccggcgcgcgcgcgatggtgggcgccaggggcggcgggcggtactgcatcgggtgcagaatcgtcgctgagcagccggtggagatggatcccacgacctccggggagcgccacctctgccgcattggggtctcgagaggggatgatctcgtaggtgcgctcggggagtcccagcacagcttcgggttcgggggcacggggaagttctcccaccagcgcaggcttatcaactacaacgtcaagttcggcgtcggcgacacggtcgtctgcgccgtggacctcgattccaagcccatggcatcgatagggttcgcgagaaatggcgaatggcttggtattgcgaggcattttgatgcggggtgagaaagggcttggtctggttgacactcctctgaggccgatgcgatggggatccgcactgtttccccatgtcctgctgaagaatgttatcgtggagatgcagttcagtagggaggatgggctgctgcctgttgatggttatgaaccctgggcctcagctttttctcaaaggaattcagaatttggcccttcgtttgagcaaaataaatgtgaggtcatgatgatggtcggtcttccggccactggcaagtcaacatgggcagagaaatgggtcaaggagcatcaggagaaacgttatatccttctcggaactaaccttgtattggagcaaatgaaggtgccaggattattgcgtaagaataactatggtgagcgttttgaacgactgatggattgtgctacatggattttcaacaaactgctgactagggctgcaaatacccctcgcaacttcattatcgatcaaacgaatgtttacaagaatgctcgcattcgcaagttgaggccatttgctaactaccgcaagactgatgtggtcatgttcccaactccaagtgaactgaaatccagggcagcgaagcgtttcaatgagatgggaaaggaaataccagctgaagcagttaacgaaatgacagccaattttgtcctaccactctcgaaggatatgcctcattcgaaggagccttttgatgaggtaatcttcacagagctttctagggatgaggctcagagaaccctagatgatatgcagcgtgtgttgccaagaaatgtgaccccaagctatggaaactctggcaaccaaaaacatgtaatggtgcctttattgttatttttgaaacagtgccttgtatgttttatgtcatcatggatcagattagtgtaaatatgcaacgctatacaacaatgttctgatgttctgggactgctgctccacttgatcctgaagccactttgcaaatcaaggtgcacagttttcaaacaaccaacgtaaaccaattttattaggctacttagtagcagggatactaaggtatcaccattttgtcttaattattgcatacaaaactaatgaaacatgattatgtttctgcattttaacgagtgagtagtcccataaaatatcaagaacgacatccaaaactaatccgtttttttcacgaggtttgctgacataagtggcttttgtttttgtagtagccagttgtcctttctgaaccctctcatgcattgaaccctctcatctgttgttatgtttgtacaacagtgttgtacgagtgcccgcgacaggagcttgtacgccagtgtgttttcttccggctgattgttttgctctgtgaagtcgttggtgccaccatcacactgctagcgtgcagaaactcctctgttgatttaatcctatctccatcagtgatataaagggattgtttcacactatgtatcggtggacctggttggtatactgctagaacaggagttcgaatatctaat

SEQ ID NO: 61737 - DNA, 1887 bp, Zea Mays
cgacatcctccgctccgcgctttcatcgccgccatcaacggtcgtcgctatcccgtccgtgatgctcgccgcccctgctcccccacgctctgccatcctcgccctcctccgcgcacgcgtcggacgctcgccatgctcgcctccctcccctccggcccttccctcgcgcgggctcggaaaaaagtctagccccaaactccccagcggggggcgagcctaggagctgaaccaaccgtacaacagtttctccccaattcctccgccgtctgcccccttcggaaacccaatggcgtcgcccgacgacgagaccgcgcagccaccatcgaagcggccccgacacgatgccgaacctgaggtggacgccgctgagccatcaccgcgcgtggtgctcaacccagcgttctgcgatctcgacttcgatgtaggcgggggcggtctccgggggagcgcgcttcacgagggcggcttcgcctactgctggtccggcgcgcgcgcgatggtgggcgccaggggcggcgggcggtactgcatcgggtgcagaatcgtcgctgagcagccggtggagatggatcccacgacctccggggagcgccacctctgccgcattggggtctcgagaggggatgatctcgtaggtgcgctcggggagtcccagcacagcttcgggttcgggggcacggggaagttctcccaccagcgcaggcttatcaactacaacgtcaagttcggcgtcggcgacacggtcgtctgcgccgtggacctcgattccaagcccatggcatcgatagggttcgcgagaaatggcgaatggcttggtattgcgaggcattttgatgcggggtgagaaagggcttggtctggttgacactcctctgaggccgatgcgatggggatccgcactgtttccccatgtcctgctgaagaatgttatcgtggagatgcagttcagtagggaggatgggctgctgcctgttgatggttatgaaccctgggcctcagctttttctcaaaggaattcagaatttggcccttcgtttgagcaaaataaatgtgaggtcatgatgatggtcggtcttccggccactggcaagtcaacatgggcagagaaatgggtcaaggagcatcaggagaaacgttatatccttctcggaactaaccttgtattggagcaaatgaaggtgccaggattattgcgtaagaataactatggtgagcgttttgaacgactgatggattgtgctacatggattttcaacaaactgctgactagggctgcaaatacccctcgcaacttcattatcgatcaaacgaatgtttacaagaatgctcgcattcgcaagttgaggccatttgctaactaccgcaaggtaagctgtaaaagagaaaaaggaaatgataggtttcctgtatggtagcactggattggttcataaatactcccatatgcaacagactgatgtggtcatgttcccaactccaagtgaactgaaatccagggcagcgaagcgtttcaatgagatgggaaaggaaataccagctgaagcagttaacgaaatgacagccaattttgtcctaccactctcgaaggatatgcctcattcgaaggagccttttgatgagtgccttgtatgttttatgtcatcatggatcagattagtgtaaatatgcaacgctatacaacaatgttctgatgttctgggactgctgctccacttgatcctgaagccactttgcaaatcaagtgttgtacgagtgcccgcgacaggagcttgtacgccagtgtgttttcttccggctgattgttttgctctgtgaagggattgtttcacactatgtatcggtggacctggttggtatactgctagaacaggagttcgaatatctaat

SEQ ID NO: 61738 - DNA, 2198 bp, Zea Mays
cgacatcctccgctccgcgctttcatcgccgccatcaacggtcgtcgctatcccgtccgtgatgctcgccgcccctgctcccccacgctctgccatcctcgccctcctccgcgcacgcgtcggacgctcgccatgctcgcctccctcccctccggcccttccctcgcgcgggctcggaaaaaagtctagccccaaactccccagcggggggcgagcctaggagctgaaccaaccgtacaacagtttctccccaattcctccgccgtctgcccccttcggaaacccaatggcgtcgcccgacgacgagaccgcgcagccaccatcgaagcggccccgacacgatgccgaacctgaggtggacgccgctgagccatcaccgcgcgtggtgctcaacccagcgttctgcgatctcgacttcgatgtaggcgggggcggtctccgggggagcgcgcttcacgagggcggcttcgcctactgctggtccggcgcgcgcgcgatggtgggcgccaggggcggcgggcggtactgcatcgggtgcagaatcgtcgctgagcagccggtggagatggatcccacgacctccggggagcgccacctctgccgcattggggtctcgagaggggatgatctcgtaggtgcgctcggggagtcccagcacagcttcgggttcgggggcacggggaagttctcccaccagcgcaggcttatcaactacaacgtcaagttcggcgtcggcgacacggtcgtctgcgccgtggacctcgattccaagcccatggcatcgatagggttcgcgagaaatggcgaatggcttggtattgcgaggcattttgatgcggggtgagaaagggcttggtctggttgacactcctctgaggccgatgcgatggggatccgcactgtttccccatgtcctgctgaagaatgttatcgtggagatgcagttcagtagggaggatgggctgctgcctgttgatggttatgaaccctgggcctcagctttttctcaaaggaattcagaatttggcccttcgtttgagcaaaataaatgtgaggtcatgatgatggtcggtcttccggccactggcaagtcaacatgggcagagaaatgggtcaaggagcatcaggagaaacgttatatccttctcggaactaaccttgtattggagcaaatgaaggtgccaggattattgcgtaagaataactatggtgagcgttttgaacgactgatggattgtgctacatggattttcaacaaactgctgactagggctgcaaatacccctcgcaacttcattatcgatcaaacgaatgtttacaagaatgctcgcattcgcaagttgaggccatttgctaactaccgcaagactgatgtggtcatgttcccaactccaagtgaactgaaatccagggcagcgaagcgtttcaatgagatgggaaaggaaataccagctgaagcagttaacgaaatgacagccaattttgtcctaccactctcgaaggatatgcctcattcgaaggagccttttgatgaggtaatcttcacagagctttctagggatgaggctcagagaaccctagatgatatgcagcgtgtgttgccaagaaatgtgaccccaagctatggaaactctggcaaccaaaaacattgtaaatatgcaacgctatacaacaatgttctgatgttctgggactgctgctccacttgatcctgaagccactttgcaaatcaagtgttgtacgagtgcccgcgacaggagcttgtacgccagtgtgttttcttccggctgattgttttgctctgtgaagtcgttggtgccaccatcacactgctagcgtgcagaaactcctctgttgatttaatcctatctccatcagtgatataaaggtacaagttgaagtaaaagacatggatatgatgcagcaagtcaagtctaacaattttttatgtctcggttccttcttgtcctggcgcatatgtgctcttccttttatttatgatctttctagaagataacctatctaattggggatgctttcaccatagccgagttattctttaatcattgattattgtgaccgtaatttctgatttctcaattttctatctgaagtttgagctcctgaagtttgagctcctgaaaaactcttggaacgacaagatgtctacgtcataaaaaatgtttcgtatattgtag

SEQ ID NO: 61739 - DNA, 2239 bp, Zea Mays
cgacatcctccgctccgcgctttcatcgccgccatcaacggtcgtcgctatcccgtccgtgatgctcgccgcccctgctcccccacgctctgccatcctcgccctcctccgcgcacgcgtcggacgctcgccatgctcgcctccctcccctccggcccttccctcgcgcgggctcggaaaaaagtctagccccaaactccccagcggggggcgagcctaggagctgaaccaaccgtacaacagtttctccccaattcctccgccgtctgcccccttcggaaacccaatggcgtcgcccgacgacgagaccgcgcagccaccatcgaagcggccccgacacgatgccgaacctgaggtggacgccgctgagccatcaccgcgcgtggtgctcaacccagcgttctgcgatctcgacttcgatgtaggcgggggcggtctccgggggagcgcgcttcacgagggcggcttcgcctactgctggtccggcgcgcgcgcgatggtgggcgccaggggcggcgggcggtactgcatcgggtgcagaatcgtcgctgagcagccggtggagatggatcccacgacctccggggagcgccacctctgccgcattggggtctcgagaggggatgatctcgtaggtgcgctcggggagtcccagcacagcttcgggttcgggggcacggggaagttctcccaccagcgcaggcttatcaactacaacgtcaagttcggcgtcggcgacacggtcgtctgcgccgtggacctcgattccaagcccatggcatcgatagggttcgcgagaaatggcgaatggcttggtattgcgaggcattttgatgcggggtgagaaagggcttggtctggttgacactcctctgaggccgatgcgatggggatccgcactgtttccccatgtcctgctgaagaatgttatcgtggagatgcagttcagtagggaggatgggctgctgcctgttgatggttatgaaccctgggcctcagctttttctcaaaggaattcagaatttggcccttcgtttgagcaaaataaatgtgaggtcatgatgatggtcggtcttccggccactggcaagtcaacatgggcagagaaatgggtcaaggagcatcaggagaaacgttatatccttctcggaactaaccttgtattggagcaaatgaaggtgccaggattattgcgtaagaataactatggtgagcgttttgaacgactgatggattgtgctacatggattttcaacaaactgctgactagggctgcaaatacccctcgcaacttcattatcgatcaaacgaatgtttacaagaatgctcgcattcgcaagttgaggccatttgctaactaccgcaagtgaactgaaatccagggcagcgaagcgtttcaatgagatgggaaaggaaataccagctgaagcagttaacgaaatgacagccaattttgtcctaccactctcgaaggatatgcctcattcgaaggagccttttgatgaggtaatcttcacagagctttctagggatgaggctcagagaaccctagatgatatgcagcgtgtgttgccaagaaatgtgaccccaagctatggaaactctggcaaccaaaaacatgtaatggtgcctttattgttatttttgaaacagtgccttgtatgttttatgtcatcatggatcagattagtgtaaatatgcaacgctatacaacaatgttctgatgttctgggactgctgctccacttgatcctgaagccactttgcaaatcaagtgttgtacgagtgcccgcgacaggagcttgtacgccagtgtgttttcttccggctgattgttttgctctgtgaagtcgttggtgccaccatcacactgctagcgtgcagaaactcctctgttgatttaatcctatctccatcagtgatataaaggtacaagttgaagtaaaagacatggatatgatgcagcaagtcaagtctaacaattttttatgtctcggttccttcttgtcctggcgcatatgtgctcttccttttatttatgatctttctagaagataacctatctaattggggatgctttcaccatagccgagttattctttaatcattgattattgtgaccgtaatttctgatttctcaattttctatctgaagtttgagctcctgaagtttgagctcctgaaaaactcttggaacgacaagatgtctacgtcataaaaaatgtttcgtatattgtag

SEQ ID NO: 61740 - DNA, 1160 bp, Zea Mays
gagaatgggaatcgcataacagggaataggaatgggaatctgaatcgcagaatagggatggcagaacaaggaatgacatgcagaacaaagaatggtatgctacccttgcagacttagtagagattctcgttgaagccctacacaaggaaagctcttgaagccctacacaaggaaagctcacacgaggatcaagctccgtgtcaggtggtagtatttattatagagtatattcctgtttttttttaaaaaaaaggtagtcacccaagaaacaaaagccatatttcaattctggagaccaaaatcttgtttcgggaaaaacttacccttgactgattagcaaaaggtagctggttttccttttaaaatatttcataacggaattagtatttagaaaaaaaaatattggtacagtcactgtgcagaaagatttaaagtttaagaaaccagttttagtggcactaaggtaaattatattattctgacaaaaaaagaggaagcaatgagaccatttaagtatttaactcataagagattcagaaggcatccatttttttagagttaacaagtatttgattcataagtaagaaacagaattgactaatactaaacaaaatgattcagaagtgaagacgaaacaacagaggaagaataggctacttggcatataactaaatttcatttgtttctggaacatatataaataatttaagaacagacggaatggaagaattacctgaagtgagtattgttgatatcatgatatatatatacatagtttgcttgaagtccacacactgcatgcagtatttcaatttgtaatgttctgatgcctagaaggctctcgagacccctacatatatatacatgaaaagctagtatctttggggacaaagcaacatttcttctacaatgtattgaaacagacatgatgaagcattagtaaaaaaactaatatccaatgcactgggcaggacctgcaatactacatgagctataatctgcaagaagtcctgcaatactacatgagctataatctgcaagaagtattgcgcaaataagcttttctctcattccacatcaacaaattgagtgcagtcaatatcttgaagtgtgatcttgccaagaaagagatcacttgcgtgcatatagcacaaggggag

SEQ ID NO: 61741 - DNA, 1107 bp, Zea Mays
ttcgcttataatccacttcaaaaataagcgacaatccgcccaaacgtctatatttttttttcgtttctcacagaagcaacagtctacagttcggctcagatatactaaaacattaaaccaccaaatcgcgcttaccatcgccgagagagctgtagacaacaacaaaaatagcttaatggaacaacaaaatggaactttctttccaagactggctgcttcatcaaggattcaaggtctactcagaatccacatccagacatcctgaagccttgtcgttcaacgatttactccagaaacacaaccggaaaaaaaatgtcattaacaatactattccaaagaccaagatcctcgctatcccttgctctcaaaagtatcgcactactcccatgctagtcgcgccctgagcctgcacagaacacaggagaagttactagcacgctcattgtactcagagcaggaaattattacttagctactcgaattgtgcattgcttctattttcaagtgacctgaaatggaaacgcttgatacattctattgtaatgccatcggtaacagagcatatatgttcctttttttactcactagtaggtaccaagactgatcatgtctacaaagccatcaatcatggtaagatatagtcagggaatcacagcgtctcaaattccaatcatattttcccaataaattcaaaattctagcagcatggcaagagtgggacatgtgcctccgtaatagaaatactgaaatagttaggaaggcaacttttccaccaaatggcgatgtttccacttaatgatgaatcctcaaaacagaagcaggcaaaaatcaatccatgacataagcatcgatccaaaattggtcagcagtagtttctgtttaaaagatcctcattggctcccctagatttagagggaatccaccatacatcacatagctcgaaacacaatgtttggagtatgaaaagttgcagaagtggcgttcatataacaaaaataaaccaagggctggtacaattatgtttggcttcgtaatagttgagttggacagacaattcgaggtgttctagcataatagtttccacatgtaaggttctggttacgtgta

SEQ ID NO: 61742 - DNA, 706 bp, Zea Mays
gttcacacctctggctgccttcatttcctgttgacgactgagcgggcgagcgccggcgccctttgccaggtccgtcggcccgttagccggcgactagcgcctccctttgccaggtcttcgacgtccccttcgccgtcgactggcgcccagcagccagcaggtccggtcgccccttctcgtccttcctgcagttcgaaagcgagcatcgaaaccctaaaatccttttctatctgtcgtgttctgtctgcctggtacatttggaagaatgggggtttaccttagcactccgaaaactgagaaggtatccgaagatggggaaaatgataaacttaaattcggagtttcatctatgcaagggtggcgtacaactatggaagatgctccttatgcgtcttacctggatactgacacaccgacacaagtgatggaatccgactcagactcggatatccaactcagcatgattttactcaacttcccaattgtgacttggaatccaattgggtgtgaagagtctgattcgccaaaaataaatgtgctttcaatgtccaggttactgggtgtgcttatatggaaacttgtagaatgtcctaggaagtagagaataaagaactaccaaatattggtgcaaagtcttttcacaaatagtactccctccgttcttttttatttgtcacggtttagtgcaaaaatgaactagcgggcg

SEQ ID NO: 61743 - DNA, 840 bp, Zea Mays
ggcgttcacacctctggctgccttcatttcctgttgacgactgagcgggcgagcgccggcgccctttgccaggtccgtcggcccgttagccggcgactagcgcctccctttgccaggtcttcgacgtccccttcgccgtcgactggcgcccagcagccagcaggtccggtcgccccttctcgtccttcctgcagttcgaaagcgagcatcgaaaccctaaagcaagctacttgtatttgaatctggcacaattgcaagtgtacacatgtattgtgcctactaacttaaattttctatttttttgggatttccttaatccgttgcacaattcatgcgggttgcttcaatttagatccttttctatctgtcgtgttctgtctgcctggtacatttggaagaatgggggtttaccttagcactccgaaaactgagaaggtatccgaagatggggaaaatgataaacttaaattcggagtttcatctatgcaagggtggcgtacaactatggaagatgctccttatgcgtcttacctggatactgacacaccgacacaagtgatggaatccgactcagactcggatatccaactcagcatgattttactcaacttcccaattgtgacttggaatccaattgggtgtgaagagtctgattcgccaaaaataaatgtgctttcaatgtccaggttactgggtgtgcttatatggaaacttgtagaatgtcctaggaagtagagaataaagaactaccaaatattggtgcaaagtcttttcacaaatagtactccctccgttcttttttatttgtcacggtttagtgcaaaaatgaactagcgggcg

SEQ ID NO: 61744 - DNA, 693 bp, Zea Mays
agtcaatgtactcctcactgatatagaaaaatatatgtttattaaaaataaaaatgtccgctgcttgcttcgtcccgttctggcgttcacacctctggctgccttcatttcctgttgacgactgagcgggcgagcgccggcgccctttgccaggccaggtcttcgacgtccccttcgccgtcgactggcgcccagcagccagcagatccttttctatctgtcgtgttctgtctgcctggtacatttggaagaatgggggtttaccttagcactccgaaaactgagaaggtatccgaagatggggaaaatgataaacttaaattcggagtttcatctatgcaagggtggcgtacaactatggaagatgctccttatgcgtcttacctggatactgacacaccgacacaagtgatggaatccgactcagactcggatatccaactcagcatgattttactcaacttcccaattgtgacttggaatccaattgggtgtgaagagtctgattcgccaaaaataaatgtgctttcaatgtccaggttactgggtgtgcttatatggaaacttgtagaatgtcctaggaagtagagaataaagaactaccaaatattggtgcaaagtcttttcacaaatagtactccctccgttcttttttatttgtcacggtttagtgcaaaaatgaactagcgggcg

SEQ ID NO: 61745 - DNA, 1772 bp, Zea Mays
ccaacaacaggccgactccatccctcgactctactctacgcggcacgcgagcgcaggggcccgtccgcgaaaaagaccccacaccgcccactacaccggccaatcacccgccggcgcgccatggccgccgccaccgctaccggggactccgtcaaggagccgctcctccaccgcgcgtacccgtcccaggtcgcgtcggcctcctcgcccgcgctcccgtccgcgcccccggggtccgccggccgtcgcttcccgggggtgctcgacgtccccaacctcaagaagcgcggcggcggcacgcgcagctggatccgcgtcgaggccgtcacggcctccgtgcagacgttggagatcgacaaggccaccatgatgcggcgctgcgaactccccgcgcgggacctgcgcttgctcgacccgctcttcgtgtacccgtccacggtcctgggccgcgagcgcgccatcgtcgtcaacctcgagcagatccgatgcgtcattacagccgacgaggtcctcctgctcaactccctcgacagctacgtcctccagtacgccgccgagctccagcgccgcctcctccagcgcgctgagggcgaccagctaccattcgaattccgggcgctcgagctcgccctcgaggccgcatgctccttcctcgatgcacagcacactcttgcatggtcaaaacaacagagccttctaggtttctagtcccaagcaagttatagggcagcggaactggaaattgaagcatatccattattggatgagctgacatccaaaatcagtactctcaatttggaacgtgtccggcgattaaaaagtagactagttgcattgaccagaagagttcaaaaggtcagagatgaaatagaacaattaatggatgatgatggtgatatggctgagatgtatctcaccgaaaaaaagatgaggatggaatcatctgtctttggtgaccagtctttgttgggctacaattcagcaggtgctgctggggcatcagtttcagctcctgtatcgccagtctcatcacccacggaatcacgaaagctggagaaagctttcagtttgtgtagaagcaggcatgacagcacgaagagctccgataacacaacgacagatcatatccaagagttggagatgttactggaagcttatttcgttgttatcgacagcactctcaacaagctgacatcgcttaaagagtacattgatgacactgaagacttcatcaacattcagctggacaacgtgcggaaccagctgatccagtttgagttgctcctaacgactgcaacatttgttgtggccatttttggagtggttgctgggatatttgggatgaactttgagacatcagttttcaaaatagagaatgcattccagtgggtccttgtaattacttcagtggtgggcgttttcatcttctgctccttcatttggttcttcaagtacaagagactgatgcctttgtagagtgtatatatgccctcctcctcctcctcctcctcccatatagcaccgatgaatcagttcaccgtgtagaccttctaccctgttgaggaacttgatcagatccctgaatttctgccgatgtgaattaccattcttatagaggttcagggcatgcctgccgagaattcgggtgaaaattgtaactttcttgacatgatcccttgctgcgtaagactgtctaagcttcctctaaattttatcctctaaagaaatattttctttcctttacaacactctctaaaagatttcgttctcta

SEQ ID NO: 61746 - DNA, 1970 bp, Zea Mays
ccaaagggcaaaggcccaaaaacccagccggccagagccagtcccccaccccccagcagccatggagttcggcttccgcgcaggaaacagcacgcagcgccgcccttcccccgatcgacgcgtcacagcacagcaagccggacccttccacggcgaccacccgccgccctcgccgttgcagtgggaggctgcggcccggcgcgagcggatcaaacgcgaggtggagcgccggctcatcgaggaggaggtccgcctggagctcgcccttgagcgcgcccgcctccacggtggttttggccccgccccgttcctcgggaccgacggctccgtcgtgccggtgccgcctccacctccacctccaggccggttctccagggccgacggcccatcgatgacgccggcaatgtcgtgggacagccctcggcggctcgcgagatttgagcaaccgatgctcctcagtgagacgggaacgtggtccctgctgccgaagccgaggcatacgctccggctgcgcgagatcgcgcccagcgagagctccgaggtcagggagcaccattgccgttcaatgcccatgcatgctgcttgcttgttcgtattcttcttcgacattttggttgttcatattcttttcggcatttggcattaaaggcgcctagcgctactgcattaccacttttcaaatttctttccttttttttggtttgatctcttattgcacttccgttttactctcgatcgctttagaagcgcaagcgcttgcttttttcttgtcatttaaaggccaatggtagtagtcactttctgtaataactgattacaatctagaaggaaacgttgcccatagatcaaatgggagcttgaacgctgaagccaaataacagatctgatctggtgaacttgtatggaggaccagagaagaccgagtaaactattccatgtggttctttcatcagcaacaaaggcttctggcgtgaagaggaaagcagcagctgcgatttccgcaacaacgactgaacaacaaccaacgggagtacaagacccgagttccgggcaatggagctgcgcaatctgccaggtgagcgcgaccagcgaggccaacctgaacgagcacctccaagggaaaaagcacagggcaaagctggcccgatgcggagcgaccaaggcgacgacggatcctcctcctaacagaagcggcgatggcgcagtagcagtagcagcaggcccgagcgacgcgccgaagaggatccagatcctggtcgacggggaggcgcaccaggtcgtccagaggagcagctgcgtgtggtgcgagcgctgcagggtcggctgcaccaacgccgccgccatggtcgaccatctgcggggcaagaggcacagcctgtcgaacaaggtctggacggcgataaaggccgtgaggaggagcagctaatacggcgataaaggccgtgaccgtgaggaggaggcacaatcttgtcgaatacggttgagcagggcctgtgttgagctttggaaagaaagggcacagacactagttgtttgacaactaatgaagtgtgggttttcatagaccctcttaatttagcagcggaaagaaagacggtatattccttgcttgttatcacttatcagacaatcacttattccctaatcccgaacctcgcgtgtgggggctaatcgttgggagtgtgtgtgtgtgtttttggatgggctttttccttgtgatgtttatgcggcagggtgtgttcctcctgctcatgtagctttcaggtctgatgctttttatggttttggatggctgcgggagtggtagcttgtggcatgcatctcttgcgtgctcgctgcctcaagatctttcagacctgaaaacaaaacaaaaacaaaacccagatgagcccacgcgtcggtctgttctgttggtcttctcgagtctaaggctagcttgggcgacggagagcgtagctagctaggagtcg

SEQ ID NO: 61747 - DNA, 1371 bp, Zea Mays
gtgacttttttcttagcatagtactaatacacttcttgatatgatttatctgagagcactcggctttgctagatctcgacaatgacactgcgttttttggtgtttttgatggacatggaggaaaagtagtcgccaaattctgtgcaaaatatctacacagagaagttctcaggagtgaagcctatgcagctggtgacctgggtgctgctgtccacagagcttacttcagaatggatgaaatgatgcgaggtcaaagaggatggcgggaacttcaagcacttggagataagataaatcagtttagtggcataatagaaggcttaatttggtctcctaaagcaagtgattcaaatgatagacatgatgattgggcttttgaggagggaccacactctgattttactgggccaaattgtgggagtacagcctgtgtagctttgatcagaaataagcaactcgttgtggcaaatgctggtgactcccgctgtgtcatctcaaggaatggtcaggcatacaatttgtctagagaccataaaccagagctcgaggcagagagagagaggatacggagtgcaggcggtttcgttctaatggggcgtgtaaatggaaatctaaacttgtcaagagctatcggagacatgaagttcaaacaaaacaagttcttgccccccgataagcaaatcctgactgcgaaccccgacataaacattgtcgagctatgtgatgacgacgaattcattgttttggcatgcgatggcatctgggactgcatgtcaagccagcagttggtcgatttcatccgcgagcatatagacacatgcaggaggaaagcctctcggcagtatgcgagagagtgctcgatagatgcctggctccgtcgaccatgggcggcgagggatgcgataacatgacgatgatcctggtgcagttcaagaagccgattgctcaggtcgaggacgccagcggtgcagaaccagctggagacgctgggtgctgtgagacccatggggcccacgagaacggctctggtaagcaggtgtagcgaagacgtggcatgcatggctctcggagtcttggactcttggtacatataggcctgacgctggacatgggtaaaacgggagtacgatagatgacaccctctgttcctcaatacaacccgctgttgtgattttttggttacctgaccacctatctgtacatttttgtggaaatgatgttacagtaattattgtccggtcaagcggaccccttttgagttttgtcatctacatgtacttactctcgtagcagaatgactgcatgagctgacaattgcactcctttaccctcttagactctcacgctgtctccggtagggcagggtgatgc

SEQ ID NO: 61748 - DNA, 1429 bp, Zea Mays
tagaggagaaattttgaatgtgcatgagatatcttgttgagtataactgctaagggagaagctgtgacttttttcttagcatagtactaatacacttcttgatatgatttatctgagagcactcggctttgctagatctcgacaatgacactgcgttttttggtgtttttgatggacatggaggaaaagtagtcgccaaattctgtgcaaaatatctacacagagaagttctcaggagtgaagcctatgcagctggtgacctgggtgctgctgtccacagagcttacttcagaatggatgaaatgatgcgaggtcaaagaggatggcgggaacttcaagcacttggagataagataaatcagtttagtggcataatagaaggcttaatttggtctcctaaagcaagtgattcaaatgatagacatgatgattgggcttttgaggagggaccacactctgattttactgggccaaattgtgggagtacagcctgtgtagctttgatcagaaataagcaactcgttgtggcaaatgctggtgactcccgctgtgtcatctcaaggaatggtcaggcatacaatttgtctagagaccataaaccagagctcgaggcagagagagagaggatacggagtgcaggcggtttcgttctaatggggcgtgtaaatggaaatctaaacttgtcaagagctatcggagacatgaagttcaaacaaaacaagttcttgccccccgataagcaaatcctgactgcgaaccccgacataaacattgtcgagctatgtgatgacgacgaattcattgttttggcatgcgatggcatctgggactgcatgtcaagccagcagttggtcgatttcatccgcgagcatatagacacagaggaaagcctctcggcagtatgcgagagagtgctcgatagatgcctggctccgtcgaccatgggcggcgagggatgcgataacatgacgatgatcctggtgcagttcaagaagccgattgctcaggtcgaggacgccagcggtgcagaaccagctggagacgctgggtgctgtgagacccatggggcccacgagaacggctctggtaagcaggtgtagcgaagacgtggcatgcatggctctcggagtcttggactcttggtacatataggcctgacgctggacatgggtaaaacgggagtacgatagatgacaccctctgttcctcaatacaacccgctgttgtgattttttggttacctgaccacctatctgtacatttttgtggaaatgatgttacagtaattattgtccggtcaagcggaccccttttgagttttgtcatctacatgtacttactctcgtagcagaatgactgcatgagctgacaattgcactcctttaccctcttagactctcacgctgtctccggtagggcagggtgatgc

SEQ ID NO: 61749 - DNA, 1651 bp, Zea Mays
atgggtgagataggcatggaccagctgggtctggccgaggctgccgccgccgtgaaggaggagggcatcctcgacgatgacgaggagacgtcaccgatagagcaagtgcgactgacggtgccgacgacggatgactcgtcgctgccggtgtggatgttccggatgtggagcatcgggcttctgtcgtgcgcgctcatgagcttcctcaaccaattcttctcataccgaacggagccgctggtggtgacgcagttcacggtgcagtatcctatgcaatttctaagcctctatgcaattttccagcactcggctttgctagatctcgacaatgacactgcgttttttggtgtttttgatggacatggaggaaaagtagtcgccaaattctgtgcaaaatatctacacagagaagttctcaggagtgaagcctatgcagctggtgacctgggtgctgctgtccacagagcttacttcagaatggatgaaatgatgcgaggtcaaagaggatggcgggaacttcaagcacttggagataagataaatcagtttagtggcataatagaaggcttaatttggtctcctaaagcaagtgattcaaatgatagacatgatgattgggcttttgaggagcctgtgtagctttgatcagaaataagcaactcgttgtggcaaatgctggtgactcccgctgtgtcatctcaaggaatggtcaggcatacaatttgtctagagaccataaaccagagctcgaggcagagagagagaggatacggagtgcaggcggtttcgttctaatggggcgtgtaaatggaaatctaaacttgtcaagagctatcggtattcttcactcgcttcttctcgttcgtacctgacaccttacctgatggtcttgcttgcatatgccaaatgccttttcaggagacatgaagttcaaacaaaacaagttcttgccccccgataagcaaatcctgactgcgaaccccgacataaacattgtcgagctatgtgatgacgacgaattcattgttttggcatgcgatggcatctgggactgcatgtcaagccagcagttggtcgatttcatccgcgagcatatagacacagaggaaagcctctcggcagtatgcgagagagtgctcgatagatgcctggctccgtcgaccatgggcggcgagggatgcgataacatgacgatgatcctggtgcagttcaagaagccgattgctcaggtcgaggacgccagcggtgcagaaccagctggagacgctgggtgctgtgagacccatggggcccacgagaacggctctggtaagcaggtgtagcgaagacgtggcatgcatggctctcggagtcttggactcttggtacatataggcctgacgctggacatgggtaaaacgggagtacgatagatgacaccctctgttcctcaatacaacccgctgttgtgattttttggttacctgaccacctatctgtacatttttgtggaaatgatgttacagtaattattgtccggtcaagcggaccccttttgagttttgtcatctacatgtacttactctcgtagcagaatgactgcatgagctgacaattgcactcctttaccctcttagactctcacgctgtctccggtagggcagggtgatgc

SEQ ID NO: 61750 - DNA, 2191 bp, Zea Mays
agcgtcctctagcttcttgcccagcccgggtagtacaatacaacccccgtcccatcagctggcagaggccaggccatcagcacccacacccacacccactccctccgttcctcctccatcctcctgcccccaagtacggccgccgccgccgctcaccggatccaagaagaacagccgaggggttcggtctccctcccagcagtgacgagctagctgctccgtgcgttgattgcgtgtttgttattacgtgtacgtcgtgtaccggccgtgtttagctgcagaaaatatagtcgattgggcttaggccccgaagagattgacagaagagagcgagcacctggcgcggcgaccggcatggaacgcatgccgtccccgccgcgtgctcgcttctctttctgtcagcctctccctcgtcctgagccgacgccgatcgagcgtcgtgtgtgtgtagctagctataccttgctctgggcagcatcagtcgctgcctgcctagtggctgctggcgctagtggggcggcagacgctgagacgccaccaccgatactggaaggcaaggagccaaggagggagggggaagggaagggggagagagaggaattggcacgggcgggtgcggtggaaactgtgccacgcagccgcgcgcgcgcagagatgggcaaggacgacacgcatgctgcgaggggacgacggcttttgcaggcaccaagggcatgtcacctcattatcttctagagatacgcacagatttctcgcattttttttgctcgttcctttcggtcaggttgtcggggggttactaccgaggaagaggatgaggctgggaggggggcatggagacttggagaggagcagccaagaagagtagtagtagtactttccttccacttccacgcctctcagtacactgagaaaaccacttcggagcgcgagttcgtggttggttttgcggtacactgaaaaatgattgctagttttattcgccgtttatttatttatctatatttttgctcgcatgctcgcaagatttccttctcttccgctccactcccgggtctctcttgctgcctcagctcacctcgcctcaccttggtgggatgctggcagtacactgcggcactgtaaggatttaacagaacgaagactagtgctgcatcatctctcgctctcgctctcgctctctttctctttcctttctccctccctcgtggtgcaggttcagctcatctttgaacactgtagccattattccagctagctcgcgctgtttctgctcttgcttgctcgggggttctcttctcgctctctcgagttcttgctcggttcctcctgcggccatggcggtccgggtggttgcgcgcgccggcgctagcaagctcctgtttgcacaaaaatggagcgtggggggcaccatgtgatgacccaaatttggcaaagaccgtggactcgccttgccctttgccagatctggtctgcatctgagatgtacgtacgcaggtaggggtggagagaagaggacgacgctgctgctcgttatactgatggaaagtgctgctgagtgactcttgtgctctttgctgcttttccatcgccgtcgtcttcctccccagcatatggatatgagggagcatcatgaactaatggggaacgtcatttgcagattttacttgaccaaggttttggaccaagctacagaaaaggcttaggttttgaaccaagctacagaaaagtgaagaggaagatgaccaaataaagaccgcttgtcgacaattagagacagtggcaatggagatttctgctcatcatagatgggggtttacaaatagaattgcattgtaaccaaattatctatccctttgtttttctagttatccagtttagaggtttgtccctcccacttgtgcagaccgatgagctgatgagctgttagttctgtaataagtttggccctatcctcgctatgaggtgaaagtcggaaattttggttccattatttaaaaaaataaggatctatattatattagttattcataaaagtatctagaaacatcgatgtaattgctctgatgtctttgtcaagactcaagaatggttgaagaagcaataatagaattggccattgagtttttgcttcctcttgtgtaccctttcccttcatttgttgattaatgatcaataaaactgaaaactt

SEQ ID NO: 61751 - DNA, 2274 bp, Zea Mays
agcgtcctctagcttcttgcccagcccgggtagtacaatacaacccccgtcccatcagctggcagaggccaggccatcagcacccacacccacacccactccctccgttcctcctccatcctcctgcccccaagtacggccgccgccgccgctcaccggatccaagaagaacagccgaggggttcggtctccctcccagcagtgacgagctagctgctccgtgcgttgattgcgtgtttgttattacgtgtacgtcgtgtaccggccgtgtttagctgcagaaaatatagtcgattgggcttaggccccgaagagattgacagaagagagcgagcacctggcgcggcgaccggcatggaacgcatgccgtccccgccgcgtgctcgcttctctttctgtcagcctctccctcgtcctgagccgacgccgatcgagcgtcgtgtgtgtgtagctagctataccttgctctgggcagcatcagtcgctgcctgcctagtggctgctggcgctagtggggcggcagacgctgagacgccaccaccgatactggaaggcaaggagccaaggagggagggggaagggaagggggagagagaggaattggcacgggcgggtgcggtggaaactgtgccacgcagccgcgcgcgcgcagagatgggcaaggacgacacgcatgctgcgaggggacgacggcttttgcaggcaccaagggcatgtcacctcattatcttctagagatacgcacagatttctcgcattttttttgctcgttcctttcggtcaggttgtcggggggttactaccgaggaagaggatgaggctgggaggggggcatggagacttggagaggagcagccaagaagagtagtagtagtactttccttccacttccacgcctctcagtacactgagaaaaccacttcggagcgcgagttcgtggttggttttgcggtacactgaaaaatgattgctagttttattcgccgtttatttatttatctatatttttgctcgcatgctcgcaagatttccttctcttccgctccactcccgggtctctcttgctgcctcagctcacctcgcctcaccttggtgggatgctggcagtacactgcggcactgtaaggatttaacagaacgaagactagtgctgcatcatctctcgctctcgctctcgctctctttctctttcctttctccctccctcgtggtgcaggttcagctcatctttgaacactgtagccattattccagctagctcgcgctgtttctgctcttgcttgctcgggggttctcttctcgctctctcgagttcttgctcggttcctcctgcggccatggcggtccgggtggttgcgcgcgccggcgctagcaagctcctgtttgcacaaaaatggagcgtggggggcaccatgtgatgacccaaatttggcaaagaccgtggactcgccttgccctttgccagatctggtctgcatctgaggtaggattgggtactttcttgtctctctcgctgcacacagtcaaacacatctggtcttttcattcgtgtggtttcggcgccgtgaacatgaattttcagctcctctctctactactcaccttcgtcgacctctcagatgtacgtacgcaggtaggggtggagagaagaggacgacgctgctgctcgttatactgatggaaagtgctgctgcatatggatatgagggagcatcatgaactaatggggaacgtcatttgcagattttacttgaccaaggttttggaccaagctacagaaaaggcttaggttttgaaccaagctacagaaaagtgaagaggaagatgaccaaataaagaccgcttgtcgacaattagagacagtggcaatggagatttctgctcatcatagatgggggtttacaaatagaattgcattgtaaccaaattatctatccctttgtttttctagttatccagtttagaggtttgtccctcccacttgtgcagaccgatgagctgatgagctgttagttctgtaataagtttggccctatcctcgctatgaggtgaaagtcggaaattttggttccattatttaaaaaaataaggatctatattatattagttattcataaaagtatctagaaacatcgatgtaattgctctgatgtctttgtcaagactcaagaatggttgaagaagcaataatagaattggccattgagtttttgcttcctcttgtgtaccctttcccttcatttgttgattaatgatcaataaaactgaaaactt

SEQ ID NO: 61752 - DNA, 1891 bp, Zea Mays
agcgtcctctagcttcttgcccagcccgggtagtacaatacaacccccgtcccatcagctggcagaggccaggccatcagcacccacacccacacccactccctccgttcctcctccatcctcctgcccccaagtacggccgccgccgccgctcaccggatccaagaagaacagccgaggggttcggtctccctcccagcagtgacgagctagctgctccgtgcgttgattgcgtgtttgttattacgtgtacgtcgtgtaccggccgtgtttagctgcagaaaatatagtcgattgggcttaggccccgaagagattgacagaagagagcgagcacctggcgcggcgaccggcatggaacgcatgccgtccccgccgcgtgctcgcttctctttctgtcagcctctccctcgtcctgagccgacgccgatcgagcgtcgtgtgtgtgtagctagctataccttgctctgggcagcatcagtcgctgcctgcctagtggctgctggcgctagtggggcggcagacgctgagacgccaccaccgatactggaaggcaaggagccaaggagggagggggaagggaagggggagagagaggaattggcacgggcgggtgcggtggaaactgtgccacgcagccgcgcgcgcgcagagatgggcaaggacgacacgcatgctgcgaggggacgacggcttttgcaggcaccaagggcatgtcacctcattatcttctagagatacgcacagatttctcgcattttttttgctcgttcctttcggtcaggttgtcggggggttactaccgaggaagaggatgaggctgggaggggggcatggagacttggagaggagcagccaagaagagtagtagtagtactttccttccacttccacgcctctcagtacactgagaaaaccacttcggagcgcgagttcgtggttggttttgcggtacactgaaaaatgattgctagttttattcgccgtttatttatttatctatatttttgctcgcatgctcgcaagatttccttctcttccgctccactcccgggtctctcttgctgcctcagctcacctcgcctcaccttggtgggatgctggcagtacactgcggcactgtaaggatttaacagaacgaagactagtgctgcatcatctctcgctctcgctctcgctctctttctctttcctttctccctccctcgtggtgcaggttcagctcatctttgaacactgtagccattattccagctagctcgcgctgtttctgctcttgcttgctcgggggttctcttctcgctctctcgagttcttgctcggttcctcctgcggccatggcggtccgggtggttgcgcgcgccggcgctagcaagctcctgtttgcacaaaaatggagcgtggggggcaccatgtgatgacccaaatttggcaaagaccgtggactcgccttgccctttgccagatctggtctgcatctgaggtaggattgggtactttcttgtctctctcgctgcacacagtcaaacacatctggtcttttcattcgtgtggtttcggcgccgtgaacatgaattttcagctcctctctctactactcaccttcgtcgacctctcagatgtacgtacgcaggtaggggtggagagaagaggacgacgctgctgctcgttatactgatggaaagtgctgctgcatatggatatgagggagcatcatgaactaatggggaacgtcatttgcagattttacttgaccaagacatggcttctattacttgaatcaccaacttgtgtaatgcgcgactaagtaacgaaaatgacttttttagatggaagctaactacatctagtcagtttactgtacaatctatgtatagtaccctaattaaca

SEQ ID NO: 61753 - DNA, 649 bp, Zea Mays
tctgcattttcattcctgacaatcttctctaccacttctatgtacgctacattggcagtatctcctgggcagtcctcattaatctctgatgatgctgatgttgttgctctgattgggacaagtaaggacttggcaaaacaaataaatcagaaggaagtacattgggggttgcttgaagattctgttgaagagcaaatggagaaggcactagcagaatctgataaaatagaagctgaaagcaacgatgctgatgcagaagataacaaggcaaggaaaaaaggaatacagaaggtggaaagcaaaatacttctcttgtgtggggacacttgctttcagctgcgaaggagcattgcttgcatcggggtcggctgactgtactgttaagctctgggatgtcgctttcagcacaaaagccctgaagacagaggacaccaaaggcagctcatcagctaaccgactgagactgcttaaatctctgcctacaaaatcagctcctgtctatagcctgcgggttgtgatcttatgatttataaacgccactaaatgtacatatgcctgataggagatagcttgtaagggatgaccggatgatttggtgacaaaacaatgcattttatctacttctcaaacatgtaaaatatggatcatc

SEQ ID NO: 61754 - DNA, 2225 bp, Zea Mays
ctcggcctttcgggtctttcgctccccggctcttcgtctccctctcttgccgaatccaagccctaaaccatagggcttgcctggtgcccgggtgggctccccatggcggcaatagaggacgaggagatggagaagaaggtgcagcagtacctgcaccgcaaggggttccgcctcaccgagctcgcgctccacgaggagcgcagtcgcctctccacctccgacgtcgcgcttacccggttgtttccacatgtatcggatatctgttctttggagaggaagaaatgagctacatgttgcttagatgttaacactatatcgtgaagggaagggacaggtaacagcaaattcaatgtttttctgcctgaaatttttgtgatcatttggaaaacagtgttttctggatgcttgcatgtgatgattggtgaagcaatcggctttgttggttcagtggtgctttattgatattataataatcgaagttcagttgttttgtcattgtctttcactctcccttcgaaatgccataatatacacagattctgaagtggctatattttcacttacaatcttaccatacacatccgttgattgattatattcttcaataacaggtctgacaataatccagcaagataccatgagggatacagcagattaatagcatgggcgtatagttctcttgatcaatataagtgcactgcttgtagataaattgtacttaatattcagccaaagcatatcacgccttcaaactatttctaactgttaccttcaagtgatgcattttatgaatcctctgtgttctatggcacaaatttacttggcagacctcctctccttttatgaatcccatatctgtcatataagcatgattttgcacttgacaacttatgtaattctagtttttcaaaagggcgtttggttgtggcaggcaaactattttatgttgtgatctgattttttaacttacagtcttacgctccattctgttcttaaacttggcaatataattcatatttcttaattcagatattttttgtagcatgaattacttcgcgtcctttacccagtttttatccattgcttcatggatctagtggcagagggacatatgcacaatgctcggtcatttttccatacatttcgggaagctcataaggtgatgcattcaagggatcttcagaagctggaaggcatcctctctccttcacacttggaggaaacggaactggctcgatcttttaggaaaaaataaatttaaaattaaattatgcgagtattcgtatgaattgcttctccagtatctccagaaaacacaagcttttgtggtgcttggagtaatcaatgagcacataacttttgaagtatctcctgggcagtcctcattaatctctgatgatgctgatgttgttgctctgattgggacaagtaaggacttggcaaaacaaataaatcagaaggaagtacattgggggttgcttgaagattctgttgaagagcaaatggagaaggcactagcagaatctgataaaatagaagctgaaagcaacgatgctgatgcagaagataacaagaaaaggaatacagaaggtggaaagcaaaatacttctcttgtgtggggacacttgctttcagctgcgaaggagcattgcttgcatcggggtcggctgactgtactgttaagctctgggatgtcgctttcagcacaaaagccctgaagacagaggacaccaaaggcagctcatcagctaaccgactgagactgcttaaatctctgcctacaaaatcagctcctgtctatagcctgcggttttctcggaggaaccttctgtttgcctccggtgctctcgcgtaagctgcgtgtttcgtagaatacagctagaactgttccggttttgacatggagtagtgaagttggcatttcgcagactccgctgtggatcctattgtagagctaatattttcgttagcaatctcaacggcccagcatgtatgcacagcggaattgagcaccgcagatgctttgtagcgtgcttgcaacattgtgacattgttattaggtaaatacgtcgtgtaattttttttaggttgtgatcttatgatttataaacgccactaaatgtacatatgcctgataggagatagcttgtaagggatgaccggatgatttggtgacaaaacaatgcattttatctacttctcaaacatgtaaaatatggatcatc

SEQ ID NO: 61755 - DNA, 1419 bp, Zea Mays
ctcggcctttcgggtctttcgctccccggctcttcgtctccctctcttgccgaatccaagccctaaaccatagggcttgcctggtgcccgggtgggctccccatggcggcaatagaggacgaggagatggagaagaaggtgcagcagtacctgcaccgcaaggggttccgcctcaccgagctcgcgctccacgaggagcgcagtcgcctctccacctccgacgtcgcgcttacccgcatgaattacttcgcgtcctttacccagtttttatccattgcttcatggatctagtggcagagggacatatgcacaatgctcggtcatttttccatacatttcgggaagctcataaggtgatgcattcaagggatcttcagaagctggaaggcatcctctctccttcacacttggaggaaacggaactggctcgatcttttaggaaaaaataaatttaaaattaaattatgcgagtattcgtatgaattgcttctccagtatctccagaaaacacaagcttttgtggtgcttggagtaatcaatgagcacataacttttgaagtatctcctgggcagtcctcattaatctctgatgatgctgatgttgttgctctgattgggacaagtaaggacttggcaaaacaaataaatcagaaggaagtacattgggggttgcttgaagattctgttgaagagcaaatggagaaggcactagcagaatctgataaaatagaagctgaaagcaacgatgctgatgcagaagataacaagaaaaggaatacagaaggtggaaagcaaaatacttctcttgtgtggggacacttgctttcagctgcgaaggagcattgcttgcatcggggtcggctgactgtactgttaagctctgggatgtcgctttcagcacaaaagccctgaagacagaggacaccaaaggcagctcatcagctaaccgactgagactgcttaaatctctgcctacaaaatcagctcctgtctatagcctgcggttttctcggaggaaccttctgtttgcctccggtgctctcgcgtaagctgcgtgtttcgtagaatacagctagaactgttccggttttgacatggagtagtgaagttggcatttcgcagactccgctgtggatcctattgtagagctaatattttcgttagcaatctcaacggcccagcatgtatgcacagcggaattgagcaccgcagatgctttgtagcgtgcttgcaacattgtgacattgttattaggtaaatacgtcgtgtaattttttttaggttgtgatcttatgatttataaacgccactaaatgtacatatgcctgataggagatagcttgtaagggatgaccggatgatttggtgacaaaacaatgcattttatctacttctcaaacatgtaaaatatggatcatc

SEQ ID NO: 61756 - DNA, 2818 bp, Zea Mays
gtctcggcctttcgggtctttcgctccccggctcttcgtctccctctcttgccgaatccaagccctaaaccatagggcttgcctggtgcccgggtgggctccccatggcggcaatagaggacgaggagatggagaagaaggtgcagcagtacctgcaccgcaaggggttccgcctcaccgagctcgcgctccacgaggagcgcagtcgcctctccacctccgacgtcgcgcttacccggtaggtttgcccgtcccgcttccctggcctacattgggctgcagctctcgccctggccagtgacggtagcttctctggtaccaggaaatctagtggcctcgtgtgaagtcgaactggtgcgttttatttggctgctcggtgtctgaacctctgtctgcgtgctctcgccttggctgtcgattttactaatttggttgcttggatgtggaccgttggcttagatagtcaattaggtactcatgttgcggattgaagggtataaagttatgccaattcagttttcatgaagatccatgttttacattgctgccagctgccagttacatgccattgttcaggcccgttacggtagcaaccctgattaaaattgtattactatttgaatattgcaataagtttgttctgaaaaaatgaataactttagctacacagttattttgaggaagagtgtgtgggctgtgttgccatcgtaccattttattctatctcctgaatcctgatacaatgccatgtagttctcctgcgtgtttgaggcaaaaaagatactgctaattttcctttagcagtaagtgccatagtttgctgtcttaggttgtttccacatgtatcggatatctgttctttggagaggaagaaatgagctacatgttgcttagatgttaacactatatcgtgaagggaagggacaggtaacagcaaattcaatgtttttctgcctgaaatttttgtgatcatttggaaaacagtgttttctggatgcttgcatgtgatgattggtgaagcaatcggctttgttggttcagtggtgctttattgatattataataatcgaagttcagttgttttgtcattgtctttcactctcccttcgaaatgccataatatacacagattctgaagtggctatattttcacttacaatcttaccatacacatccgttgattgattatattcttcaataacaggtctgacaataatccagcaagataccatgagggatacagcagattaatagcatgggcgtatagttctcttgatcaatataagtgcactgcttgtagataaattgtacttaatattcagccaaagcatatcacgccttcaaactatttctaactgttaccttcaagtgatgcattttatgaatcctctgtgttctatggcacaaatttacttggcagacctcctctccttttatgaatcccatatctgtcatataagcatgattttgcacttgacaacttatgtaattctagtttttcaaaagggcgtttggttgtggcaggcaaactattttatgttgtgatctgattttttaacttacagtcttacgctccattctgttcttaaacttggcaatataattcatatttcttaattcagatattttttgtagcatgaattacttcgcgtcctttacccagtttttatccattgcttcatggatctagtggcagagggacatatgcacaatgctcggtcatttttccatacatttcgggaagctcataaggtgatgcattcaagggatcttcagaagctggaaggcatcctctctccttcacacttggaggaaacggaactggctcgatcttttaggaaaaaataaatttaaaattaaattatgcgagtattcgtatgaattgcttctccagtatctccagaaaacacaagcttttgtggtgcttggagtaatcaatgagcacataacttttgaagtatctcctgggcagtcctcattaatctctgatgatgctgatgttgttgctctgattgggacaagtaaggacttggcaaaacaaataaatcagaaggaagtacattgggggttgcttgaagattctgttgaagagcaaatggagaaggcactagcagaatctgataaaatagaagctgaaagcaacgatgctgatgcagaagataacaagaaaaggaatacagaaggtggaaagcaaaatacttctcttgtgtggggacacttgctttcagctgcgaaggagcattgcttgcatcggggtcggctgactgtactgttaagctctgggatgtcgctttcagcacaaaagccctgaagacagaggacaccaaaggcagctcatcagctaaccgactgagactgcttaaatctctgcctacaaaatcagctcctgtctatagcctgcggttttctcggaggaaccttctgtttgcctccggtgctctcgcgtaagctgcgtgtttcgtagaatacagctagaactgttccggttttgacatggagtagtgaagttggcatttcgcagactccgctgtggatcctattgtagagctaatattttcgttagcaatctcaacggcccagcatgtatgcacagcggaattgagcaccgcagatgctttgtagcgtgcttgcaacattgtgacattgttattaggtaaatacgtcgtgtaattttttttaggttgtgatcttatgatttataaacgccactaaatgtacatatgcctgataggagatagcttgtaagggatgaccggatgatttggtgacaaaacaatgcattttatctacttctcaaacatgtaaaatatggatcatc

SEQ ID NO: 61757 - DNA, 1869 bp, Zea Mays
ctccgttccgttccgtcgtctcggcctttcgggtctttcgctccccggctcttcgtctccctctcttgccgaatccaagccctaaaccatagggcttgcctggtgcccgggtgggctccccatggcggcaatagaggacgaggagatggagaagaaggtgcagcagtacctgcaccgcaaggggttccgcctcaccgagctcgcgctccacgaggagcgcagtcgcctctccacctccgacgtcgcgcttacccggtctgacaataatccagcaagataccatgagggatacagcagattaatagcatgggcgtatagttctcttgatcaatataagtgcactgcttgtagataaattgtacttaatattcagccaaagcatatcacgccttcaaactatttctaactgttaccttcaagtgatgcattttatgaatcctctgtgttctatggcacaaatttacttggcagacctcctctccttttatgaatcccatatctgtcatataagcatgattttgcacttgacaacttatgtaattctagtttttcaaaagggcgtttggttgtggcaggcaaactattttatgttgtgatctgattttttaacttacagtcttacgctccattctgttcttaaacttggcaatataattcatatttcttaattcagatattttttgtagcatgaattacttcgcgtcctttacccagtttttatccattgcttcatggatctagtggcagagggacatatgcacaatgctcggtcatttttccatacatttcgggaagctcataaggtgatgcattcaagggatcttcagaagctggaaggcatcctctctccttcacacttggaggaaacggaactggctcgatcttttaggaaaaaataaatttaaaattaaattatgcgagtattcgtatgaattgcttctccagtatctccagaaaacacaagcttttgtggtgcttggagtaatcaatgagcacataacttttgaagtatctcctgggcagtcctcattaatctctgatgatgctgatgttgttgctctgattgggacaagtaaggacttggcaaaacaaataaatcagaaggaagtacattgggggttgcttgaagattctgttgaagagcaaatggagaaggcactagcagaatctgataaaatagaagctgaaagcaacgatgctgatgcagaagataacaagaaaaggaatacagaaggtggaaagcaaaatacttctcttgtgtggggacacttgctttcagctgcgaaggagcattgcttgcatcggggtcggctgactgtactgttaagctctgggatgtcgctttcagcacaaaagccctgaagacagaggacaccaaaggcagctcatcagctaaccgactgagactgcttaaatctctgcctacaaaatcagctcctgtctatagcctgcggttttctcggaggaaccttctgtttgcctccggtgctctcgcgtaagctgcgtgtttcgtagaatacagctagaactgttccggttttgacatggagtagtgaagttggcatttcgcagactccgctgtggatcctattgtagagctaatattttcgttagcaatctcaacggcccagcatgtatgcacagcggaattgagcaccgcagatgctttgtagcgtgcttgcaacattgtgacattgttattaggtaaatacgtcgtgtaattttttttaggttgtgatcttatgatttataaacgccactaaatgtacatatgcctgataggagatagcttgtaagggatgaccggatgatttggtgacaaaacaatgcattttatctacttctcaaacatgtaaaatatggatcatc

SEQ ID NO: 61758 - DNA, 1864 bp, Zea Mays
ctccgttccgttccgtcgtctcggcctttcgggtctttcgctccccggctcttcgtctccctctcttgccgaatccaagccctaaaccatagggcttgcctggtgcccgggtgggctccccatggcggcaatagaggacgaggagatggagaagaaggtgcagcagtacctgcaccgcaaggggttccgcctcaccgagctcgcgctccacgaggagcgcagtcgcctctccacctccgacgtcgcgcttacccggtctgacaataatccagcaagataccatgagggatacagcagattaatagcatgggcgtatagttctcttgatcaatataagtgcactgcttgtagataaattgtacttaatattcagccaaagcatatcacgccttcaaactatttctaactgttaccttcaagtgatgcattttatgaatcctctgtgttctatggcacaaatttacttggcagacctcctctccttttatgaatcccatatctgtcatataagcatgattttgcacttgacaacttatgtaattctagtttttcaaaagggcgtttggttgtggcaggcaaactattttatgttgtgatctgattttttaacttacagtcttacgctccattctgttcttaaacttggcaatataattcatatttcttaattcagatattttttgtagcatgaattacttcgcgtcctttacccagtttttatccattgcttcatggatctagtggcagagggacatatgcacaatgctcggtcatttttccatacatttcgggaagctcataaggtgatgcattcaagggatcttcagaagctggaaggcatcctctctccttcacacttggaggaaacggaactggctcgatcttttaggaaaaaataaatttaaaattaaattatgcgagtattcgtatgaattgcttctccagtatctccagaaaacacaagcttttgtggtgcttggagtaatcaatgagcacataacttttgaagtatctcctgggcagtcctcattaatctctgatgatgctgatgttgttgctctgattgggacaagtaaggacttggcaaaacaaataaatcagaaggaagtacattgggggttgcttgaagattctgttgaagagcaaatggagaaggcactagcagaatctgataaaatagaagctgaaagcaacgatgctgatgcagaagataacaagaaaaggaatacagaaggtggaaagcaaaatacttctcttgtgtggggacacttgctttcagctgcgaaggagcattgcttgcatcggggtcggctgactgtactgttaagctctgggatgtcgctttcagcacaaaagccctgaagacagaggacacgcagctcatcagctaaccgactgagactgcttaaatctctgcctacaaaatcagctcctgtctatagcctgcggttttctcggaggaaccttctgtttgcctccggtgctctcgcgtaagctgcgtgtttcgtagaatacagctagaactgttccggttttgacatggagtagtgaagttggcatttcgcagactccgctgtggatcctattgtagagctaatattttcgttagcaatctcaacggcccagcatgtatgcacagcggaattgagcaccgcagatgctttgtagcgtgcttgcaacattgtgacattgttattaggtaaatacgtcgtgtaattttttttaggttgtgatcttatgatttataaacgccactaaatgtacatatgcctgataggagatagcttgtaagggatgaccggatgatttggtgacaaaacaatgcattttatctacttctcaaacatgtaaaatatggatcatc

SEQ ID NO: 61759 - DNA, 1891 bp, Zea Mays
gtctcggcctttcgggtctttcgctccccggctcttcgtctccctctcttgccgaatccaagccctaaaccatagggcttgcctggtgcccgggtgggctccccatggcggcaatagaggacgaggagatggagaagaaggtgcagcagtacctgcaccgcaaggggttccgcctcaccgagctcgcgctccacgaggagcgcagtcgcctctccacctccgacgtcgcgcttacccggtaggtttgcccgtcccgcttccctggcctacattgggctgcagctctcgccctggccagtgacggtagcttctctggtaccaggaaatctagtggcctcgtgtgaagtcgaactggtgcgttttatttggctgctcggtgtctgaacctctgtctgcgtgctctcgccttggctgtcgattttactaatttggttgcttggatgtggaccgttggcttagatagtcaattaggtactcatgttgcggattgaagggtataaagttatgccaattcagttttcatgaagatccatgttttacattgctgccagctgccagttacatgccattgttcaggcccgttacggtagcaaccctgattaaaattgtattactatttgaatattgcaataagtttgttctgaaaaaatgaataactttagctacacagttattttgaggaagagtgtgtgggctgtgttgccatcgtaccattttattctatctcctgaatcctgatacaatgccatgtagttctcctgcgtgtttgaggcaaaaaagatactgctaattttcctttagcagtaagtgccatagtttgctgtcttaggttgtttccacatgtatcggatatctgttctttggagaggaagaaatgagctacatgttgcttagatgttaacactatatcgtgaagggaagggacaggtaacagcaaattcaatgtttttctgcctgaaatttttgtgatcatttggaaaacagtgttttctggatgcttgcatgtgatgattggtgaagcaatcggctttgttggttcagtggtgctttattgatattataataatcgaagttcagttgttttgtcattgtctttcactctcccttcgaaatgccataatatacacagattctgaagtggctatattttcacttacaatcttaccatacacatccgttgattgattatattcttcaataacaggtctgacaataatccagcaagataccatgagggatacagcagattaatagcatgggcgtatagttctcttgatcaatataagtgcactgcttgtagataaattgtacttaatattcagccaaagcatatcacgccttcaaactatttctaactgttaccttcaagtgatgcattttatgaatcctctgtgttctatggcacaaatttacttggcagacctcctctccttttatgaatcccatatctgtcatataagcatgattttgcacttgacaacttatgtaattctagtttttcaaaagggcgtttggttgtggcaggcaaactattttatgttgtgatctgattttttaacttacagtcttacgctccattctgttcttaaacttggcaatataattcatatttcttaattcagatattttttgtagcatgaattacttcgcgtcctttacccagtttttatccattgcttcatggatctagtggcagagggacatatgcacaatgctcggtcatttttccatacatttcgggaagctcataaggtgatgcattcaagggatcttcagaagctggaaggcatcctctctccttcacacttggaggaaacggaactggctcgatcttttaggaaaaaataaatttaaaattaaattatgcgaggtacaaggaagcagtttcatc

SEQ ID NO: 61760 - DNA, 2210 bp, Zea Mays
gtctcggcctttcgggtctttcgctccccggctcttcgtctccctctcttgccgaatccaagccctaaaccatagggcttgcctggtgcccgggtgggctccccatggcggcaatagaggacgaggagatggagaagaaggtgcagcagtacctgcaccgcaaggggttccgcctcaccgagctcgcgctccacgaggagcgcagtcgcctctccacctccgacgtcgcgcttacccggtaggtttgcccgtcccgcttccctggcctacattgggctgcagctctcgccctggccagtgacggtagcttctctggtaccaggaaatctagtggcctcgtgtgaagtcgaactggtgcgttttatttggctgctcggtgtctgaacctctgtctgcgtgctctcgccttggctgtcgattttactaatttggttgcttggatgtggaccgttggcttagatagtcaattaggtactcatgttgcggattgaagggtataaagttatgccaattcagttttcatgaagatccatgttttacattgctgccagctgccagttacatgccattgttcaggcccgttacggtagcaaccctgattaaaattgtattactatttgaatattgcaataagtttgttctgaaaaaatgaataactttagctacacagttattttgaggaagagtgtgtgggctgtgttgccatcgtaccattttattctatctcctgaatcctgatacaatgccatgtagttctcctgcgtgtttgaggcaaaaaagatactgctaattttcctttagcagtaagtgccatagtttgctgtcttaggttgtttccacatgtatcggatatctgttctttggagaggaagaaatgagctacatgttgcttagatgttaacactatatcgtgaagggaagggacaggtaacagcaaattcaatgtttttctgcctgaaatttttgtgatcatttggaaaacagtgttttctggatgcttgcatgtgatgattggtgaagcaatcggctttgttggttcagtggtgctttattgatattataataatcgaagttcagttgttttgtcattgtctttcactctcccttcgaaatgccataatatacacagattctgaagtggctatattttcacttacaatcttaccatacacatccgttgattgattatattcttcaataacaggtctgacaataatccagcaagataccatgagggatacagcagattaatagcatgggcgtatagttctcttgatcaatataagtgcactgcttgtagataaattgtacttaatattcagccaaagcatatcacgccttcaaactatttctaactgttaccttcaagtgatgcattttatgaatcctctgtgttctatggcacaaatttacttggcagacctcctctccttttatgaatcccatatctgtcatataagcatgattttgcacttgacaacttatgtaattctagtttttcaaaagggcgtttggttgtggcaggcaaactattttatgttgtgatctgattttttaacttacagtcttacgctccattctgttcttaaacttggcaatataattcatatttcttaattcagatattttttgtagcatgaattacttcgcgtcctttacccagtttttatccattgcttcatggatctagtggcagagggacatatgcacaatgctcggtcatttttccatacatttcgggaagctcataaggtgatgcattcaagggatcttcagaagctggaaggcatcctctctccttcacacttggaggaaacggaactggctcgatcttttaggaaaaaataaatttaaaattaaattatgcgagcttgtcctcgagctctaggcctgcttggaactgtggctgagcaatattgaaggtgatgaagcacatttaagcagtcagttgctggatgaagacaaccgtgacaacgatggaagatgtgtagaaggcagtgccggtgtggtagacgtttgtggccaagaccgaggagaatgcctgctttggagcggacaacgtggctctagagatctcgccagagatagtgtgcatgcgggtggtatgtggagatgaccacaaccacggagatgccgtcggctgtggcgtgagcctgggagcccatggaggaagcgacgtcacggagaacacatcactagtacaatttggc

SEQ ID NO: 61761 - DNA, 1261 bp, Zea Mays
ctccgttccgttccgtcgtctcggcctttcgggtctttcgctccccggctcttcgtctccctctcttgccgaatccaagccctaaaccatagggcttgcctggtgcccgggtgggctccccatggcggcaatagaggacgaggagatggagaagaaggtgcagcagtacctgcaccgcaaggggttccgcctcaccgagctcgcgctccacgaggagcgcagtcgcctctccacctccgacgtcgcgcttacccggtctgacaataatccagcaagataccatgagggatacagcagattaatagcatgggcgtatagttctcttgatcaatataagtgcactgcttgtagataaattgtacttaatattcagccaaagcatatcacgccttcaaactatttctaactgttaccttcaagtgatgcattttatgaatcctctgtgttctatggcacaaatttacttggcagacctcctctccttttatgaatcccatatctgtcatataagcatgattttgcacttgacaacttatgtaattctagtttttcaaaagggcgtttggttgtggcaggcaaactattttatgttgtgatctgattttttaacttacagtcttacgctccattctgttcttaaacttggcaatataattcatatttcttaattcagatattttttgtagcatgaattacttcgcgtcctttacccagtttttatccattgcttcatggatctagtggcagagggacatatgcacaatgctcggtcatttttccatacatttcgggaagctcataaggtgatgcattcaagggatcttcagaagctggaaggcatcctctctccttcacacttggaggaaacggaactggctcgatcttttaggaaaaaataaatttaaaattaaattatgcgagcttgtcctcgagctctaggcctgcttggaactgtggctgagcaatattgaaggtgatgaagcacatttaagcagtcagttgctggatgaagacaaccgtgacaacgatggaagatgtgtagaaggcagtgccggtgtggtagacgtttgtggccaagaccgaggagaatgcctgctttggagcggacaacgtggctctagagatctcgccagagatagtgtgcatgcgggtggtatgtggagatgaccacaaccacggagatgccgtcggctgtggcgtgagcctgggagcccatggaggaagcgacgtcacggagaacacatcactagtacaatttggc

SEQ ID NO: 61762 - DNA, 541 bp, Zea Mays
ctcggcctttcgggtctttcgctccccggctcttcgtctccctctcttgccgaatccaagccctaaaccatagggcttgcctggtgcccgggtgggctccccatggcggcaatagaggacgaggagatggagaagaaggtgcagcagtacctgcaccgcaaggggttccgcctcaccgagctcgcgctccacgaggagcgcagtcgcctctccacctccgacgtcgcgcttacccggtctgacaataatccagcaagataccatgagggatacagcagattaatagcatgggccatgaattacttcgcgtcctttacccagtttttatccattgcttcatggatctagtggcagagggacatatgcacaatgctcggtcatttttccatacatttcgggaagctcataaggtgatgcattcaagggatcttcagaagctggaaggcatcctctctccttcacacttggaggttatttagctctgcactacattgtgccattatgttgtgaatggacccatgtattggaatgtgaattgtga

SEQ ID NO: 61763 - DNA, 1723 bp, Zea Mays
cagagacccttaaaaagagagagacagagagagagagaggagccagctccgtctctctcgcgctcgctcctggtctcgtggccttgttgttccgtgcccaattccagttccaggggtataggagcaggatctcctctcgcgaacaacccagtaaacaactccgcacagcatgaggccaccgccacctccattgccgtccctgcgctcttccgtcttggtcctcgtcctgctgccgctgctggccgcgtgctcgtccccggccagtgggagggccgtgccgttgtctcctgggaccgcctccgttgctcccgcgccgcctcccgtcgacaccgcgagggggatcatgctggcgccgatcctcagcaagttcaactcgctcaagacgagcaggaagggggttgtggcgatggcgatgatcgagtacccgtcgctggaggcggcgacagggaagttcagcgcgagcaacgtgctcggtgtcggcggcttcggttgcgtctacaaggcagttttcgatggcggtgtcgccgcggcggtcaagaggctggaagcaggcggccctgaatgcgagaaggaattcgagaatgagctggatttgctcggcaggattcggcaccccaacattgtgaccctgctgggcttttgtgttcacgaggggaatcactacattgtttatgagctcatgcacaagggatccctggacacacagctgcatggggcttcacgtggatcagccctgagctggcatgtccggatgaagatcgcactcgacatggccagggggttagagtatctccatgagcactgcagtccaccagtgatccatagggatctgaagtcatctaacatacttttagattctgacttcaatgctaagatttcagattttggtcttgcagtgaccagtgggaatattgacaagggaagcatgaagctttctgggactttaggttacgtggctccagagtacctattagatgggaagctgactgaaaaaagcgatgtatacgcatttggagtggtgcttcttgagctactaatgggaaggaagcctgtcgagaagatgagtcaaactcagtgccaatcaattgtgacatgggccatgccgcagctgactgaaagaacgaaactccccaacatagttgacccagtgatcagggacacgatggacccaaagcatctgtaccaagtggcagcagtggcggttctctgtgtgcaaccagaaccaagttacaggccgctgattactgatgttctccactcccttgtccctttagtgcccgtggagctcggagggacgttgagggttgcagagccaccttccccaaacctaaaacattctgcttgttgagatgtcatggtcggtcgaagatgacagttacgtgctgatgagcttggacgatgcttatcagtaacttatcactctagctgtgtgccagaggatgacggttccaacctgccggtcgctgagaattctggtttgcaaagagttgtctcctatgtctttgcttgtacaaagaagtgaaagaagcaacaccctttcccttagaatttagggtccttctgtacagatcaaagtttctccaacactataacataaagaatttgagaacgacgtgcataaagaatttgagaatgacgtgctttgggttccacaggggtacccgagcacctttgctttgctgcaatattttgcttcctatcgtactctgataaaactgaaaat

SEQ ID NO: 61764 - DNA, 2234 bp, Zea Mays
cgcacatggccgcctcacactcccgagcgggccccttgctgccagtgtctctccctcctgctcccccgaacgaaagcgcccagcaccagcagctcaactgttctgcactgcacacagcgttgccattgccataccagaccagagacagagacccttaaaaagagagagacagagagagagagaggagccagctccgtctctctcgcgctcgctcctggtctcgtggccttgttgttccgtgcccaattccagttccaggggtataggagcaggatctcctctcgcgaacaacccagtaaacaactccgcacagcatgaggccaccgccacctccattgccgtccctgcgctcttccgtcttggtcctcgtcctgctgccgctgctggccgcgtgctcgtccccggccagtgggagggccgtgccgttgtctcctgggaccgcctccgttgctcccgcgccgcctcccgtcgtgatcatagtggagcggcgcaatcgtttccaccgggagctagtcgtcgcctccgccctcgcctccatcgccatcgccgcgattatcctttccgcgctgtacgcgtgggtcctgtggcggcggtctcgccggctgccccgcggcaataagggcgccaggagcgcagacaccgcgagggggatcatgctggcgccgatcctcagcaagttcaactcgctcaagacgagcaggaagggggttgtggcgatggcgatgatcgagtacccgtcgctggaggcggcgacagggaagttcagcgcgagcaacgtgctcggtgtcggcggcttcggttgcgtctacaaggcagttttcgatggcggtgtcgccgcggcggtcaagaggctggaagcaggcggccctgaatgcgagaaggaattcgagaatgagctggatttgctcggcaggattcggcaccccaacattgtgaccctgctgggcttttgtgttcacgaggggaatcactacattgtttatgagctcatgcacaagggatccctggacacacagctgcatggggcttcacgtggatcagccctgagctggcatgtccggatgaagatcgcactcgacatggccagggggttagagtatctccatgagcactgcagtccaccagtgatccatagggatctgaagtcatctaacatacttttagattctgacttcaatgctaagatttcagattttggtcttgcagtgaccagtgggaatattgacaagggaagcatgaagctttctgggactttaggttacgtggctccagagtacctattagatgggaagctgactgaaaaaagcgatgtatacgcatttggagtggtgcttcttgagctactaatgggaaggaagcctgtcgagaagatgagtcaaactcagtgccaatcaattgtgacatgggtacggtacaaaaaaaatacactaaacctagaatatctctaattgccacaatttggaactttagtgatgaacaattgtcaactcccattcacaatttggaattttattttatcatatactggaatacatcggcttcatcatcagtgctaacaattaaggagtcaatgcaatttctttgtgtgctgaaaaaatcataaacaggccatgccgcagctgactgaaagaacgaaactccccaacatagttgacccagtgatcagggacacgatggacccaaagcatctgtaccaagtggcagcagtggcggttctctgtgtgcaaccagaaccaagttacaggccgctgattactgatgttctccactcccttgtccctttagtgcccgtggagctcggagggacgttgagggttgcagagccaccttccccaaacctaaaacattctgcttgttgagatgtcatggtcggtcgaagatgacagttacgtgctgatgagcttggacgatgcttatcagtaacttatcactctagctgtgtgccagaggatgacggttccaacctgccggtcgctgagaattctggtttgcaaagagttgtctcctatgtctttgcttgtacaaagaagtgaaagaagcaacaccctttcccttagaatttagggtccttctgtacagatcaaagtttctccaacactataacataaagaatttgagaacgacgtgcataaagaatttgagaatgacgtgctttgggttccacaggggtacccgagcacctttgctttgctgcaatattttgcttcctatcgtactctgataaaactgaaaat

SEQ ID NO: 61765 - DNA, 3998 bp, Zea Mays
ggttgcattcggaccgtccgtagcgcccagctgacctctaaacccttgtctccctcccccaagtgaatccgtgttgtacctctcgccgccgccgtaccatcgcccgaaatcctagccccattcaccgcctcgctcggaatccaagccccattcggcgccgccgcgaccgccggacaggaggtcatggacgacgtgtgcgaggggaaggacttctccttcccggagcaggaggagcgggtactcgagctgtgggcgaagctcgacgccttccacgagcagctccggcgcacggagggcggtgaggagttcgtcttctatgacggcccccccttcgccactggtctgccccactacggccacatactcgccggcaccatcaaggacgtggtcacccggcaccagtcgatgcggggccgccatgtctcgcgacggttcgggtgggactgtcacggcctccccgtcgagtttgagatcgacaagctgctcggcatcaccaaccggcagcaggtgttcgacctcggcatcggcaagtacaacgagacgtgccgcagcatcgtcaccaagtacgtctctgagtgggaggccatggtcacacgtacggggaggtggattgacttcaagaacgactacaagaccatggacctcaacttcatggagagcgtctggtgggtgtttgcgcagctctgggagaaggacctcgtctataagggcttcaaggtcatgccttacagcacaggatgcaaaactgcactgtcaaactttgaggcagcactggactataggactgttcctgacccagcggtgatggtatccttccctattgttggtgatatggacaatgcagcttttgttgcatggactacaacaccctggacacttccaagtaacctagcgctgtgtatcaatgccaatctcatgtatgcaaaggttagagacaagtcaaatggaaaagtatatgttattgcagaatctaggcttgggcagttaccagttaaggccaaagcttcaggaaagaagcaggcaccttcaaagggaagcaatgctgaagctgctcaggatggtttggataaggaatcatatgagctgctggtaaagattcctgggccatatttggttggcttaaaatatactcccctatttgattttttcattgaactacaagagactgcctttagagtgattgcggataactatgtcaccgatgatagtggaactggcgttgtccattgtgctcctgcatttggtgaagacgaccatcgtgtttgccttgctgctgggatatttgagactgctggacttgttgtcgctgttgatgatgatgggtgctttattgaaaaaatatctgattttaaagggcgatatgtcaaagaagctgacaaggatatcatcagtgctgttaaggataaaggaagacttgttagtaaagggagcattgaacactcttatccattttgttggcgatcgggtactcctcttatttatcgggctgttccaagctggtttgtcaaggttgagaagattaaagaccaattgctggaatgtaacaaggagacttactgggtgcctgactatgttaaggaaaaaagatttcacaactggcttgaaggtgcacgtgattgggccattagcagaagtagattctggggtactccacttccactgtggatgagtcaagatcgtaaagaaattgttgttatggattctatcgaaaagcttgaaaaattatctggagtcaaggtcactgatcttcaccgacactatgttgatgatattacaattccctctaagaggggacccaagtttgggacgctcaaacgtgttgatgatgtttttgactgctggtttgagagtggatcaatgccatatgcctacattcactatccatttgagaatcgagagctatttgaaaagaattttcctgggaattttgtggcagagggtttggatcaaacccgtggatggttttatactctgatggttctctcgacggcactgtttgggaagcctgcatttaagaatcttatatgcaatggccttgtcttggctgaggatggtaagaaaatgagtaagagtaaaaagaactatccttcaccaaaagatctcattgacgagtttggagcggattctctgcgtctatatttggtaaactctccagttgtacgtgcagagtctctacgattcaaacgtactggtgtctttgctgttgtgaaagatgtcttcctcccatggtataatgcgtacagattctttgtccaaaatgcaaagagactggaagtcgagggtcttgcctcattttctccgatggaacaagcggtacttctgaagtcatccaatgtgttggatcactggataaactcagcaactgaaagtctagttagctttgttcaccaggagatggatgcatatcgtctttacacggttgtgccatatttggtaaaatacattgactatcttactaacatatatgtgcgcttgaaccgcaaacggttcaaaggacgtactggagaagaagactgcagaatttctctctcaacactctaccatgttctcgtaacaacttgcgtggtgatggctccatttacaccattctttactgaagttctttatcaaaatttgcggaaggtatcaagtaaatctgaggagagcattcacttctgcaagttcccttccacaactggtgagagagatgagcgtgttgagcaaagtgtaaataggatggtgaccatcattgatcttgcacgtaatattcgtgagcggcataacaaagctctcaaaacaccactcaaggagatggtggttgtgcatccagacaatgactttcttgaagacataactggtaaactaaaagagtatgtcatggaggaaatcaatgttaagactgtcactccatgcaatgaccccttgatgtatgcttctctgcgagctgaacctaatttcagtgtgctgggaaaaagacttggaaaggacatgggcaaagtatcaaatgtggtgaagaagatgactcaggaacagatcttagacttcgaaaaaagtggagagatttcattcttcggtcattgcttgaagctagatgatattaaggttgtccgacaattcaagcgtcctgaaaacgtgtcggagaaggagattgatgctgcaggagatggttttgccattaatatgctactttgtctatagtttggctaatctctttctgctaacatccctatattgcttttgttataggcgacgttttagtcattttagatctacgagctgaccagtcattgtttgaagctggagtggctcgagaggttgtgaacaggatccaaaaattacggaagactgctcagcttgaacctgctgatccagttgatgtgtattacgaatctgtgggcagtgacaaaaacacactggaagagattttgaagtcacaggatcagtatattagggacgcacttggttcaccaattatgccaaaagaaatggcaccaacagatgatgtaatacttggcgaggagtctcacaatgtacatgacatgtcatttgtcatatgcattgcaaggtccacccctattcttgcaccagatcttctttctcatgcctcaggcaaaagcaatcatgtggaggcgttgagagtatatcttctgtcaaggtctctttccagattgaagaaccagttccaagctggaaagggcatgttgactgcatcgaaggttatccaccggtcagtttactgctaggaaagcacgttttcctaagtgcaggggatttttatctggctagtcgatcctagtttcgtttgctgcatcccaattttgagctgcttcacccattgttttgccgcaatcagcttaaaacagcttggttccatttatgcatctcaccaaagtcatgtattcagtaaaggtgaaagtctcaatgtatgctaatatgctatagcatgacatgtaagctaagattttcaaatacctggctatgggttcccataggtgatagcatgtttgtttgcaatctct

SEQ ID NO: 61766 - DNA, 3914 bp, Zea Mays
ggttgcattcggaccgtccgtagcgcccagctgacctctaaacccttgtctccctcccccaagtgaatccgtgttgtacctctcgccgccgccgtaccatcgcccgaaatcctagccccattcaccgcctcgctcggaatccaagccccattcggcgccgccgcgaccgccggacaggaggtcatggacgacgtgtgcgaggggaaggacttctccttcccggagcaggaggagcgggtactcgagctgtgggcgaagctcgacgccttccacgagcagctccggcgcacggagggcggtgaggagttcgtcttctatgacggcccccccttcgccactggtctgccccactacggccacatactcgccggcaccatcaaggacgtggtcacccggcaccagtcgatgcggggccgccatgtctcgcgacggttcgggtgggactgtcacggcctccccgtcgagtttgagatcgacaagctgctcggcatcaccaaccggcagcaggtgttcgacctcggcatcggcaagtacaacgagacgtgccgcagcatcgtcaccaagtacgtctctgagtgggaggccatggtcacacgtacggggaggtggattgacttcaagaacgactacaagaccatggacctcaacttcatggagagcgtctggtgggtgtttgcgcagctctgggagaaggacctcgtctataagggcttcaaggtcatgccttacagcacaggatgcaaaactgcactgtcaaactttgaggcagcactggactataggactgttcctgacccagcggtgatggtatccttccctattgttggtgatatggacaatgcagcttttgttgcatggactacaacaccctggacacttccaagtaacctagcgctgtgtatcaatgccaatctcatgtatgcaaaggttagagacaagtcaaatggaaaagtatatgttattgcagaatctaggcttgggcagttaccagttaaggccaaagcttcaggaaagaagcaggcaccttcaaagggaagcaatgctgaagctgctcaggatggtttggataaggaatcatatgagctgctggtaaagattcctgggccatatttggttggcttaaaatatactcccctatttgattttttcattgaactacaagagactgcctttagagtgattgcggataactatgtcaccgatgatagtggaactggcgttgtccattgtgctcctgcatttggtgaagacgaccatcgtgtttgccttgctgctgggatatttgagactgctggacttgttgtcgctgttgatgatgatgggtgctttattgaaaaaatatctgattttaaagggcgatatgtcaaagaagctgacaaggatatcatcagtgctgttaaggataaaggaagacttgttagtaaagggagcattgaacactcttatccattttgttggcgatcgggtactcctcttatttatcgggctgttccaagctggtttgtcaaggttgagaagattaaagaccaattgctggaatgtaacaaggagacttactgggtgcctgactatgttaaggaaaaaagatttcacaactggcttgaaggtgcacgtgattgggccattagcagaagtagattctggggtactccacttccactgtggatgagtcaagatcgtaaagaaattgttgttatggattctatcgaaaagcttgaaaaattatctggagtcaaggtcactgatcttcaccgacactatgttgatgatattacaattccctctaagaggggacccaagtttgggacgctcaaacgtgttgatgatgtttttgactgctggtttgagagtggatcaatgccatatgcctacattcactatccatttgagaatcgagagctatttgaaaagaattttcctgggaattttgtggcagagggtttggatcaaacccgtggatggttttatactctgatggttctctcgacggcactgtttgggaagcctgcatttaagaatcttatatgcaatggccttgtcttggctgaggatggtaagaaaatgagtaagagtaaaaagaactatccttcaccaaaagatctcattgacgagtttggagcggattctctgcgtctatatttggtaaactctccagttgtacgtgcagagtctctacgattcaaacgtactggtgtctttgctgttgtgaaagatgtcttcctcccatggtataatgcgtacagattctttgtccaaaatgcaaagagactggaagtcgagggtcttgcctcattttctccgatggaacaagcggtacttctgaagtcatccaatgtgttggatcactggataaactcagcaactgaaagtctagttagctttgttcaccaggagatggatgcatatcgtctttacacggttgtgccatatttggtaaaatacattgactatcttactaacatatatgtgcgcttgaaccgcaaacggttcaaaggacgtactggagaagaagactgcagaatttctctctcaacactctaccatgttctcgtaacaacttgcgtggtgatggctccatttacaccattctttactgaagttctttatcaaaatttgcggaaggtatcaagtaaatctgaggagagcattcacttctgcaagttcccttccacaactgagagatgagcgtgttgagcaaagtgtaaataggatggtgaccatcattgatcttgcacgtaatattcgtgagcggcataacaaagctctcaaaacaccactcaaggagatggtggttgtgcatccagacaatgactttcttgaagacataactggtaaactaaaagagtatgtcatggaggaaatcaatgttaagactgtcactccatgcaatgaccccttgatgtatgcttctctgcgagctgaacctaatttcagtgtgctgggaaaaagacttggaaaggacatgggcaaagtatcaaatgtggtgaagaagatgactcaggaacagatcttagacttcgaaaaaagtggagagatttcattcttcggtcattgcttgaagctagatgatattaaggttgtccgacaattcaagcgtcctgaaaacgtgtcggagaaggagattgatgctgcaggagatggcgacgttttagtcattttagatctacgagctgaccagtcattgtttgaagctggagtggctcgagaggttgtgaacaggatccaaaaattacggaagactgctcagcttgaacctgctgatccagttgatgtgtattacgaatctgtgggcagtgacaaaaacacactggaagagattttgaagtcacagtatattagggacgcacttggttcaccaattatgccaaaagaaatggcaccaacagatgatgtaatacttggcgaggagtctcacaatgtacatgacatgtcatttgtcatatgcattgcaaggtccacccctattcttgcaccagatcttctttctcatgcctcaggcaaaagcaatcatgtggaggcgttgagagtatatcttctgtcaaggtctctttccagattgaagaaccagttccaagctggaaagggcatgattacagttgactgcatcgaaggttatccaccggtcagtttactgctaggaaagcacgttttcctaagtgcaggggatttttatctggctagtcgatcctagtttcgtttgctgcatcccaattttgagctgcttcacccattgttttgccgcaatcagcttaaaacagcttggttccatttatgcatctcaccaaagtcatgtattcagtaaaggtgaaagtctcaatgtatgctaatatgctatagcatgacatgtaagctaagattttcaaatacctggctatgggttcccataggtgatagcatgtttgtttgcaatctct

SEQ ID NO: 61767 - DNA, 3840 bp, Zea Mays
ggttgcattcggaccgtccgtagcgcccagctgacctctaaacccttgtctccctcccccaagtgaatccgtgttgtacctctcgccgccgccgtaccatcgcccgaaatcctagccccattcaccgcctcgctcggaatccaagccccattcggcgccgccgcgaccgccggacaggaggtcatggacgacgtgtgcgaggggaaggacttctccttcccggagcaggaggagcgggtactcgagctgtgggcgaagctcgacgccttccacgagcagctccggcgcacggagggcggtgaggagttcgtcttctatgacggcccccccttcgccactggtctgccccactacggccacatactcgccggcaccatcaaggacgtggtcacccggcaccagtcgatgcggggccgccatgtctcgcgacggttcgggtgggactgtcacggcctccccgtcgagtttgagatcgacaagctgctcggcatcaccaaccggcagcaggtgttcgacctcggcatcggcaagtacaacgagacgtgccgcagcatcgtcaccaagtacgtctctgagtgggaggccatggtcacacgtacggggaggtggattgacttcaagaacgactacaagaccatggacctcaacttcatggagagcgtctggtgggtgtttgcgcagctctgggagaaggacctcgtctataagggcttcaaggtcatgccttacagcacaggatgcaaaactgcactgtcaaactttgaggcagcactggactataggactgttcctgacccagcggtgatggtatccttccctattgttggtgatatggacaatgcagcttttgttgcatggactacaacaccctggacacttccaagtaacctagcgctgtgtatcaatgccaatctcatgtatgcaaaggttagagacaagtcaaatggaaaagtatatgttattgcagaatctaggcttgggcagttaccagttaaggccaaagcttcaggaaagaagcaggcaccttcaaagggaagcaatgctgaagctgctcaggatggtttggataaggaatcatatgagctgctggtaaagattcctgggccatatttggttggcttaaaatatactcccctatttgattttttcattgaactacaagagactgcctttagagtgattgcggataactatgtcaccgatgatagtggaactggcgttgtccattgtgctcctgcatttggtgaagacgaccatcgtgtttgccttgctgctgggatatttgagactgctggacttgttgtcgctgttgatgatgatgggtgctttattgaaaaaatatctgattttaaagggcgatatgtcaaagaagctgacaaggatatcatcagtgctgttaaggataaaggaagacttgttagtaaagggagcattgaacactcttatccattttgttggcgatcgggtactcctcttatttatcgggctgttccaagctggaaaaaagatttcacaactggcttgaaggtgcacgtgattgggccattagcagaagtagattctggggtactccacttccactgtggatgagtcaagatcgtaaagaaattgttgttatggattctatcgaaaagcttgaaaaattatctggagtcaaggtcactgatcttcaccgacactatgttgatgatattacaattccctctaagaggggacccaagtttgggacgctcaaacgtgttgatgatgtttttgactgctggtttgagagtggatcaatgccatatgcctacattcactatccatttgagaatcgagagctatttgaaaagaattttcctgggaattttgtggcagagggtttggatcaaacccgtggatggttttatactctgatggttctctcgacggcactgtttgggaagcctgcatttaagaatcttatatgcaatggccttgtcttggctgaggatggtaagaaaatgagtaagagtaaaaagaactatccttcaccaaaagatctcattgacgagtttggagcggattctctgcgtctatatttggtaaactctccagttgtacgtgcagagtctctacgattcaaacgtactggtgtctttgctgttgtgaaagatgtcttcctcccatggtataatgcgtacagattctttgtccaaaatgcaaagagactggaagtcgagggtcttgcctcattttctccgatggaacaagcggtacttctgaagtcatccaatgtgttggatcactggataaactcagcaactgaaagtctagttagctttgttcaccaggagatggatgcatatcgtctttacacggttgtgccatatttggtaaaatacattgactatcttactaacatatatgtgcgcttgaaccgcaaacggttcaaaggacgtactggagaagaagactgcagaatttctctctcaacactctaccatgttctcgtaacaacttgcgtggtgatggctccatttacaccattctttactgaagttctttatcaaaatttgcggaaggtatcaagtaaatctgaggagagcattcacttctgcaagttcccttccacaactggtgagagagatgagcgtgttgagcaaagtgtaaataggatggtgaccatcattgatcttgcacgtaatattcgtgagcggcataacaaagctctcaaaacaccactcaaggagatggtggttgtgcatccagacaatgactttcttgaagacataactggtaaactaaaagagtatgtcatggaggaaatcaatgttaagactgtcactccatgcaatgaccccttgatgtatgcttctctgcgagctgaacctaatttcagtgtgctgggaaaaagacttggaaaggacatgggcaaagtatcaaatgtggtgaagaagatgactcaggaacagatcttagacttcgaaaaaagtggagagatttcattcttcggtcattgcttgaagctagatgatattaaggttgtccgacaattcaagcgtcctgaaaacgtgtcggagaaggagattgatgctgcaggagatggcgacgttttagtcattttagatctacgagctgaccagtcattgtttgaagctggagtggctcgagaggttgtgaacaggatccaaaaattacggaagactgctcagcttgaacctgctgatccagttgatgtgtattacgaatctgtgggcagtgacaaaaacacactggaagagattttgaagtcacagtatattagggacgcacttggttcaccaattatgccaaaagaaatggcaccaacagatgatgtaatacttggcgaggagtctcacaatgtacatgacatgtcatttgtcatatgcattgcaaggtccacccctattcttgcaccagatcttctttctcatgcctcaggcaaaagcaatcatgtggaggcgttgagagtatatcttctgtcaaggtctctttccagattgaagaaccagttccaagctggaaagggcatgattacagttgactgcatcgaaggttatccaccggtcagtttactgctaggaaagcacgttttcctaagtgcaggggatttttatctggctagtcgatcctagtttcgtttgctgcatcccaattttgagctgcttcacccattgttttgccgcaatcagcttaaaacagcttggttccatttatgcatctcaccaaagtcatgtattcagtaaaggtgaaagtctcaatgtatgctaatatgctatagcatgacatgtaagctaagattttcaaatacctggctatgggttcccataggtgatagcatgtttgtttgcaatctct

SEQ ID NO: 61768 - DNA, 3925 bp, Zea Mays
ggttgcattcggaccgtccgtagcgcccagctgacctctaaacccttgtctccctcccccaagtgaatccgtgttgtacctctcgccgccgccgtaccatcgcccgaaatcctagccccattcaccgcctcgctcggaatccaagccccattcggcgccgccgcgaccgccggacaggaggtcatggacgacgtgtgcgaggggaaggacttctccttcccggagcaggaggagcgggtactcgagctgtgggcgaagctcgacgccttccacgagcagctccggcgcacggagggcggtgaggagttcgtcttctatgacggcccccccttcgccactggtctgccccactacggccacatactcgccggcaccatcaaggacgtggtcacccggcaccagtcgatgcggggccgccatgtctcgcgacggttcgggtgggactgtcacggcctccccgtcgagtttgagatcgacaagctgctcggcatcaccaaccggcagcaggtgttcgacctcggcatcggcaagtacaacgagacgtgccgcagcatcgtcaccaagtacgtctctgagtgggaggccatggtcacacgtacggggaggtggattgacttcaagaacgactacaagaccatggacctcaacttcatggagagcgtctggtgggtgtttgcgcagctctgggagaaggacctcgtctataagggcttcaaggtcatgccttacagcacaggatgcaaaactgcactgtcaaactttgaggcagcactggactataggactgttcctgacccagcggtgatggtatccttccctattgttggtgatatggacaatgcagcttttgttgcatggactacaacaccctggacacttccaagtaacctagcgctgtgtatcaatgccaatctcatgtatgcaaaggttagagacaagtcaaatggaaaagtatatgttattgcagaatctaggcttgggcagttaccagttaaggccaaagcttcaggaaagaagcaggcaccttcaaagggaagcaatgctgaagctgctcaggatggtttggataaggaatcatatgagctgctggtaaagattcctgggccatatttggttggcttaaaatatactcccctatttgattttttcattgaactacaagagactgcctttagagtgattgcggataactatgtcaccgatgatagtggaactggcgttgtccattgtgctcctgcatttggtgaagacgaccatcgtgtttgccttgctgctgggatatttgagactgctggacttgttgtcgctgttgatgatgatgggtgctttattgaaaaaatatctgattttaaagggcgatatgtcaaagaagctgacaaggatatcatcagtgctgttaaggataaaggaagacttgttagtaaagggagcattgaacactcttatccattttgttggcgatcgggtactcctcttatttatcgggctgttccaagctggtttgtcaaggttgagaagattaaagaccaattgctggaatgtaacaaggagacttactgggtgcctgactatgttaaggaaaaaagatttcacaactggcttgaaggtgcacgtgattgggccattagcagaagtagattctggggtactccacttccactgtggatgagtcaagatcgtaaagaaattgttgttatggattctatcgaaaagcttgaaaaattatctggagtcaaggtcactgatcttcaccgacactatgttgatgatattacaattccctctaagaggggacccaagtttgggacgctcaaacgtgttgatgatgtttttgactgctggtttgagagtggatcaatgccatatgcctacattcactatccatttgagaatcgagagctatttgaaaagaattttcctgggaattttgtggcagagggtttggatcaaacccgtggatggttttatactctgatggttctctcgacggcactgtttgggaagcctgcatttaagaatcttatatgcaatggccttgtcttggctgaggatggtaagaaaatgagtaagagtaaaaagaactatccttcaccaaaagatctcattgacgagtttggagcggattctctgcgtctatatttggtaaactctccagttgtacgtgcagagtctctacgattcaaacgtactggtgtctttgctgttgtgaaagatgtcttcctcccatggtataatgcgtacagattctttgtccaaaatgcaaagagactggaagtcgagggtcttgcctcattttctccgatggaacaagcggtacttctgaagtcatccaatgtgttggatcactggataaactcagcaactgaaagtctagttagctttgttcaccaggagatggatgcatatcgtctttacacggttgtgccatatttggtaaaatacattgactatcttactaacatatatgtgcgcttgaaccgcaaacggttcaaaggacgtactggagaagaagactgcagaatttctctctcaacactctaccatgttctcgtaacaacttgcgtggtgatggctccatttacaccattctttactgaagttctttatcaaaatttgcggaaggtatcaagtaaatctgaggagagcattcacttctgcaagttcccttccacaactggtgagagagatgagcgtgttgagcaaagtgtaaataggatggtgaccatcattgatcttgcacgtaatattcgtgagcggcataacaaagctctcaaaacaccactcaaggagatggtggttgtgcatccagacaatgactttcttgaagacataactggtaaactaaaagagtatgtcatggaggaaatcaatgttaagactgtcactccatgcaatgaccccttgatgtatgcttctctgcgagctgaacctaatttcagtgtgctgggaaaaagacttggaaaggacatgggcaaagtatcaaatgtggtgaagaagatgactcaggaacagatcttagacttcgaaaaaagtggagagatttcattcttcggtcattgcttgaagctagatgatattaaggttgtccgacaattcaagcgtcctgaaaacgtgtcggagaaggagattgatgctgcaggagatggcgacgttttagtcattttagatctacgagctgaccagtcattgtttgaagctggagtggctcgagaggttgtgaacaggatccaaaaattacggaagactgctcagcttgaacctgctgatccagttgatgtgtattacgaatctgtgggcagtgacaaaaacacactggaagagattttgaagtcacaggatcagtatattagggacgcacttggttcaccaattatgccaaaagaaatggcaccaacagatgatgtaatacttggcgaggagtctcacaatgtacatgacatgtcatttgtcatatgcattgcaaggtccacccctattcttgcaccagatcttctttctcatgcctcaggcaaaagcaatcatgtggaggcgttgagagtatatcttctgtcaaggtctctttccagattgaagaaccagttccaagctggaaagggcatgattacagttgactgcatcgaaggttatccaccggtcagtttactgctaggaaagcacgttttcctaagtgcaggggatttttatctggctagtcgatcctagtttcgtttgctgcatcccaattttgagctgcttcacccattgttttgccgcaatcagcttaaaacagcttggttccatttatgcatctcaccaaagtcatgtattcagtaaaggtgaaagtctcaatgtatgctaatatgctatagcatgacatgtaagctaagattttcaaatacctggctatgggttcccataggtgatagcatgtttgtttgcaatctct

SEQ ID NO: 61769 - DNA, 3864 bp, Zea Mays
ggttgcattcggaccgtccgtagcgcccagctgacctctaaacccttgtctccctcccccaagtgaatccgtgttgtacctctcgccgccgccgtaccatcgcccgaaatcctagccccattcaccgcctcgctcggaatccaagccccattcggcgccgccgcgaccgccggacaggaggtcatggacgacgtgtgcgaggggaaggacttctccttcccggagcaggaggagcgggtactcgagctgtgggcgaagctcgacgccttccacgagcagctccggcgcacggagggcggtgaggagttcgtcttctatgacggcccccccttcgccactggtctgccccactacggccacatactcgccggcaccatcaaggacgtggtcacccggcaccagtcgatgcggggccgccatgtctcgcgacggttcgggtgggactgtcacggcctccccgtcgagtttgagatcgacaagctgctcggcatcaccaaccggcagcaggtgttcgacctcggcatcggcaagtacaacgagacgtgccgcagcatcgtcaccaagtacgtctctgagtgggaggccatggtcacacgtacggggaggtggattgacttcaagaacgactacaagaccatggacctcaacttcatggagagcgtctggtgggtgtttgcgcagctctgggagaaggacctcgtctataagggcttcaaggtcatgccttacagcacaggatgcaaaactgcactgtcaaactttgaggcagcactggactataggcttttgttgcatggactacaacaccctggacacttccaagtaacctagcgctgtgtatcaatgccaatctcatgtatgcaaaggttagagacaagtcaaatggaaaagtatatgttattgcagaatctaggcttgggcagttaccagttaaggccaaagcttcaggaaagaagcaggcaccttcaaagggaagcaatgctgaagctgctcaggatggtttggataaggaatcatatgagctgctggtaaagattcctgggccatatttggttggcttaaaatatactcccctatttgattttttcattgaactacaagagactgcctttagagtgattgcggataactatgtcaccgatgatagtggaactggcgttgtccattgtgctcctgcatttggtgaagacgaccatcgtgtttgccttgctgctgggatatttgagactgctggacttgttgtcgctgttgatgatgatgggtgctttattgaaaaaatatctgattttaaagggcgatatgtcaaagaagctgacaaggatatcatcagtgctgttaaggataaaggaagacttgttagtaaagggagcattgaacactcttatccattttgttggcgatcgggtactcctcttatttatcgggctgttccaagctggtttgtcaaggttgagaagattaaagaccaattgctggaatgtaacaaggagacttactgggtgcctgactatgttaaggaaaaaagatttcacaactggcttgaaggtgcacgtgattgggccattagcagaagtagattctggggtactccacttccactgtggatgagtcaagatcgtaaagaaattgttgttatggattctatcgaaaagcttgaaaaattatctggagtcaaggtcactgatcttcaccgacactatgttgatgatattacaattccctctaagaggggacccaagtttgggacgctcaaacgtgttgatgatgtttttgactgctggtttgagagtggatcaatgccatatgcctacattcactatccatttgagaatcgagagctatttgaaaagaattttcctgggaattttgtggcagagggtttggatcaaacccgtggatggttttatactctgatggttctctcgacggcactgtttgggaagcctgcatttaagaatcttatatgcaatggccttgtcttggctgaggatggtaagaaaatgagtaagagtaaaaagaactatccttcaccaaaagatctcattgacgagtttggagcggattctctgcgtctatatttggtaaactctccagttgtacgtgcagagtctctacgattcaaacgtactggtgtctttgctgttgtgaaagatgtcttcctcccatggtataatgcgtacagattctttgtccaaaatgcaaagagactggaagtcgagggtcttgcctcattttctccgatggaacaagcggtacttctgaagtcatccaatgtgttggatcactggataaactcagcaactgaaagtctagttagctttgttcaccaggagatggatgcatatcgtctttacacggttgtgccatatttggtaaaatacattgactatcttactaacatatatgtgcgcttgaaccgcaaacggttcaaaggacgtactggagaagaagactgcagaatttctctctcaacactctaccatgttctcgtaacaacttgcgtggtgatggctccatttacaccattctttactgaagttctttatcaaaatttgcggaaggtatcaagtaaatctgaggagagcattcacttctgcaagttcccttccacaactggtgagagagatgagcgtgttgagcaaagtgtaaataggatggtgaccatcattgatcttgcacgtaatattcgtgagcggcataacaaagctctcaaaacaccactcaaggagatggtggttgtgcatccagacaatgactttcttgaagacataactggtaaactaaaagagtatgtcatggaggaaatcaatgttaagactgtcactccatgcaatgaccccttgatgtatgcttctctgcgagctgaacctaatttcagtgtgctgggaaaaagacttggaaaggacatgggcaaagtatcaaatgtggtgaagaagatgactcaggaacagatcttagacttcgaaaaaagtggagagatttcattcttcggtcattgcttgaagctagatgatattaaggttgtccgacaattcaagcgtcctgaaaacgtgtcggagaaggagattgatgctgcaggagatggcgacgttttagtcattttagatctacgagctgaccagtcattgtttgaagctggagtggctcgagaggttgtgaacaggatccaaaaattacggaagactgctcagcttgaacctgctgatccagttgatgtgtattacgaatctgtgggcagtgacaaaaacacactggaagagattttgaagtcacaggatcagtatattagggacgcacttggttcaccaattatgccaaaagaaatggcaccaacagatgatgtaatacttggcgaggagtctcacaatgtacatgacatgtcatttgtcatatgcattgcaaggtccacccctattcttgcaccagatcttctttctcatgcctcaggcaaaagcaatcatgtggaggcgttgagagtatatcttctgtcaaggtctctttccagattgaagaaccagttccaagctggaaagggcatgattacagttgactgcatcgaaggttatccaccggtcagtttactgctaggaaagcacgttttcctaagtgcaggggatttttatctggctagtcgatcctagtttcgtttgctgcatcccaattttgagctgcttcacccattgttttgccgcaatcagcttaaaacagcttggttccatttatgcatctcaccaaagtcatgtattcagtaaaggtgaaagtctcaatgtatgctaatatgctatagcatgacatgtaagctaagattttcaaatacctggctatgggttcccataggtgatagcatgtttgtttgcaatctct

SEQ ID NO: 61770 - DNA, 3101 bp, Zea Mays
ggttgcattcggaccgtccgtagcgcccagctgacctctaaacccttgtctccctcccccaagtgaatccgtgttgtacctctcgccgccgccgtaccatcgcccgaaatcctagccccattcaccgcctcgctcggaatccaagccccattcggcgccgccgcgaccgccggacaggaggtcatggacgacgtgtgcgaggggaaggacttctccttcccggagcaggaggagcgggtactcgagctgtgggcgaagctcgacgccttccacgagcagctccggcgcacggagggcggtgaggagttcgtcttctatgacggcccccccttcgccactggtctgccccactacggccacatactcgccggcaccatcaaggacgtggtcacccggcaccagtcgatgcggggccgccatgtctcgcgacggttcgggtgggactgtcacggcctccccgtcgagtttgagatcgacaagctgctcggcatcaccaaccggcagcaggtgttcgacctcggcatcggcaagtacaacgagacgtgccgcagcatcgtcaccaagtacgtctctgagtgggaggccatggtcacacgtacggggaggtggattgacttcaagaacgactacaagaccatggacctcaacttcatggagagcgtctggtgggtgtttgcgcagctctgggagaaggacctcgtctataagggcttcaaggtcatgccttacagcacaggatgcaaaactgcactgtcaaactttgaggcagcactggactataggactgttcctgacccagcggtgatggtatccttccctattgttggtgatatggacaatgcagcttttgttgcatggactacaacaccctggacacttccaagtaacctagcgctgtgtatcaatgccaatctcatgtatgcaaaggttagagacaagtcaaatggaaaagtatatgttattgcagaatctaggcttgggcagttaccagttaaggccaaagcttcaggaaagaagcaggcaccttcaaagggaagcaatgctgaagctgctcaggatggtttggataaggaatcatatgagctgctggtaaagattcctgggccatatttggttggcttaaaatatactcccctatttgattttttcattgaactacaagagactgcctttagagtgattgcggataactatgtcaccgatgatagtggaactggcgttgtccattgtgctcctgcatttggtgaagacgaccatcgtgtttgccttgctgctgggatatttgagactgctggacttgttgtcgctgttgatgatgatgggtgctttattgaaaaaatatctgattttaaagggcgatatgtcaaagaagctgacaaggatatcatcagtgctgttaaggataaaggaagacttgttagtaaagggagcattgaacactcttatccattttgttggcgatcgggtactcctcttatttatcgggctgttccaagctggtttgtcaaggttgagaagattaaagaccaattgctggaatgtaacaaggagacttactgggtgcctgactatgttaaggaaaaaagatttcacaactggcttgaaggtgcacgtgattgggccattagcagaagtagattctggggtactccacttccactgtggatgagtcaagatcgtaaagaaattgttgttatggattctatcgaaaagcttgaaaaattatctggagtcaaggtcactgatcttcaccgacactatgttgatgatattacaattccctctaagaggggacccaagtttgggacgctcaaacgtgttgatgatgtttttgactgctggtttgagagtggatcaatgccatatgcctacattcactatccatttgagaatcgagagctatttgaaaagaattttcctgggaattttgtggcagagggtttggatcaaacccgtggatggttttatactctgatggttctctcgacggcactgtttgggaagcctgcatttaagaatcttatatgcaatggccttgtcttggctgaggatggtaagaaaatgagtaagagtaaaaagaactatccttcaccaaaagatctcattgacgagtttggagcggattctctgcgtctatatttggtaaactctccagttgtacgtgcagagtctctacgattcaaacgtactggtgtctttgctgttgtgaaagatgtcttcctcccatggtataatgcgtacagattctttgtccaaaatgcaaagagactggaagtcgagggtcttgcctcattttctccgatggaacaagcggtacttctgaagtcatccaatgtgttggatcactggataaactcagcaactgaaagtctagttagctttgttcaccaggagatggatgcatatcgtctttacacggttgtgccatatttggtaaaatacattgactatcttactaacatatatgtgcgcttgaaccgcaaacggttcaaaggacgtactggagaagaagactgcagaatttctctctcaacactctaccatgttctcgtaacaacttgcgtggtgatggctccatttacaccattctttactgaagttctttatcaaaatttgcggaaggtatcaagtaaatctgaggagagcattcacttctgcaagttcccttccacaactggtgagagagatgagcgtgttgagcaaagtgtaaataggatggtgaccatcattgatcttgcacgtaatattcgtgagcggcataacaaagctctcaaaacaccactcaaggagatggtggttgtgcatccagacaatgactttcttgaagacataactggtaaactaaaagagtatgtcatggaggaaatcaatgttaagactgtcactccatgcaatgaccccttgatgtatgcttctctgcgagctgaacctaatttcagtgtgctgggaaaaagacttggaaaggacatgggcaaagtatcaaatgtggtgaagaagatgactcaggaacagatcttagacttcgaaaaaagtggagagatttcattcttcggtcattgcttgaagctagatgatattaagtgcaacatgtttctattaga

SEQ ID NO: 61771 - DNA, 1467 bp, Zea Mays
ggttgcattcggaccgtccgtagcgcccagctgacctctaaacccttgtctccctcccccaagtgaatccgtgttgtacctctcgccgccgccgtaccatcgcccgaaatcctagccccattcaccgcctcgctcggaatccaagccccattcggcgccgccgcgaccgccggacaggaggtcatggacgacgtgtgcgaggggaaggacttctccttcccggagcaggaggagcgggtactcgagctgtgggcgaagctcgacgccttccacgagcagctccggcgcacggagggcggtgaggagttcgtcttctatgacggcccccccttcgccactggtctgccccactacggccacatactcgccggcaccatcaaggacgtggtcacccggcaccagtcgatgcggggccgccatgtctcgcgacggttcgggtgggactgtcacggcctccccgtcgagtttgagatcgacaagctgctcggcatcaccaaccggcagcaggtgttcgacctcggcatcggcaagtacaacgagacgtgccgcagcatcgtcaccaagtacgtctctgagtgggaggccatggtcacacgtacggggaggtggattgacttcaagaacgactacaagaccatggacctcaacttcatggagagcgtctggtgggtgtttgcgcagctctgggagaaggacctcgtctataagggcttcaaggtcatgccttacagcacaggatgcaaaactgcactgtcaaactttgaggcagcactggactataggactgttcctgacccagcggtgatggtatccttccctattgttggtgatatggacaatgcagcttttgttgcatggactacaacaccctggacacttccaagtaacctagcgctgtgtatcaatgccaatctcatgtatgcaaaggttagagacaagtcaaatggaaaagtatatgttattgcagaatctaggcttgggcagttaccagttaaggccaaagcttcaggaaagaagcaggcaccttcaaagggaagcaatgctgaagctgctcaggatggtttggataaggaatcatatgagctgctggtaaagattcctgggccatatttggttggcttaaaatatactcccctatttgattttttcattgaactacaagagactgcctttagagtgattgcggataactatgtcaccgatgatagtggaactggcgttgtccattgtgctcctgcatttggtgaagacgaccatcgtgtttgccttgctgctgggatatttgagactgctggacttgttgtcgctgttgatgatgatgggtgctttattgaaaaaatatctgattttaaagggcgatatgtcaaagaagctgacaaggatatcatcagtgctgttaaggataaaggaagacttgttagtaaagggagcattgaacactcttatccattttgttggcgatcgggt

SEQ ID NO: 61772 - DNA, 588 bp, Zea Mays
ctagcacgcacgcagccgacccctccgcgctcgcccccagcgcgcacggcgtacgcagccacgtcggtcggtcagcaaccgcctgcacctcgcccccaacgcgcgcgcacaaaaaccgcccaaccgcttctgccgctgccccgctcggccagctcacgcccacgtcgcctcctctctcaccaatatccgccgcgcttgccgcatgtcgagtctccccgagcagatcgccgttgtccctgcaccaagcacacaggagaactgacgtcggccacgaacctccgtcccaagacttgcggctcttgggaaactgccgtgttcactccccgccgtgccgaagctccgttaagccgttgccgcgacattctccgtcgagatccgtttcgagattgcgatctgtttccaagcttcaagggatcaaagatcgagcgttggcgaccaagagatcaagctttttgaggtctacaacattgaacaccctgagcatctgtttgatgaaggcaagtgtcctctgacccattatgtcctatctatttataattcactgtcccacactacttaattgaaacctaaggatggactagttttgta

SEQ ID NO: 61773 - DNA, 2914 bp, Zea Mays
ccaaccttccctctcattctccgcctctgccccccggccacgctcctcacgagtcaccggggaggcggggactagcgcttggcaaaatcaacgaacgaccaacgcacagtcaaacactccgacgaccccttcctccctcacccctagccgcttccccggaccccgcgccgatcccaccgaacccatggcgtcggagatcgaggtgctcgaggacaccaccacctcctcgacctccctcgtcgcggccgcgtccacggccccttccgccgcggagggcgcaggggcgccggcggagaacgagtcgctgaagaacgacgtgtacaccgcagcggcgtacggagatctggagaagctgcagcggctggtggagggggagggccgcccggtcaccgagcccgacggcgggggctattacgcgctccagtgggccgcgctcaacaaccgcgtcgccgccgcgcagtacatcctcgagcatggagcagacacaaatgctgtggatcacactggacaaacagcacttcactggagtgctgtacgtggtcatattcaagttgccgaactacttctgaaagaaggagctaagatggatgctgctgatttatatgggtatcaggccacacatgttgcagcacagtatggtcagactgcattcatttaccgcattgttgcgaaatggaatgctgatccagatatccctgataatgatgggaggagccctttacactgggctgcttataagggatttgcggactccatacggcttcttttgtttttggatgcttataggggacggcaagacaaagaaggttgtactcctttacactgggctgctattcgggggaaccttgaggcatgcactgtgctagttcaggttggcaaaaaggatgatttgatggtgaaagacaaaactggcttaactccagcacagcttgctgccgataagaatcatcggcaaattgcgtttttcctcgacaacgctagaagggtacatgacagaggatgtggtgcgaacaccagatttgggaaattgtcaaaattaggccttgcaccttttctttggtgcaccattattggcatgcttattacatacgtacactctgttatattaggacaatatgtcatgactatgacagcaccatttgggatgttcgcatggtcaggagtttttcttgcaactgctgggttggtcatgttctataaatgtagcagatccgggttacatcagcataaatacaaggggctcgcaaaatcaaagggacgatgaaccactgctgaagatggagttagaaaatcctgcgcttctttttggcaactggtcacaactttgtataacctgcaaaatagtcagacctgttcgttcgaaacattgttctacatgtgatcgttgcgtggagcagtttgatcaccattgcccttgggtatctaattgcataggaaagaagaacaaatgggaattcttcatgttcctcaccttagaagtttttgcaatgatcattactggctctgctgccattataagacttgtaagggatccagattctccatcatcttttggtgcttggattcattattctgcgtttcagcatcctggggttgtttcatttctcgcattggattgtttccttttctttggagttgcagttcttacagtttctcaagcatcacagatagcaaggaacattacaacaaatgagatggcaaattccatgagatatgcatatctcagaggcccaggtggcagattcaggaacccgtatgatcatgggattcgcaagaactgctctgacttcttgttaaatggatacaatgaggacactgaacggctagaccagacattgcacactgatgaggagatgggaatgatacagatgacaagagcggtttcgcagaatggtgacaatcatttacatcatggtaatggcacggaacatagttgcgctgattcacaggcaagcccaaaacctcatagccaagtgggttcgcctcagtgttgtgatcacagtaagaggactgataggacactgttgggcctaggtttgggccttgggcgaaacagtgcatcccggcagtatgttcggtctcttatcccattgtgatctatcatttggatatcatgtgttcgtttcagtgtagattggatttgttcactgctccggccccatcttttatacgtgcccttgacatggttcaccatgtaccattggctggtcagggacattgttgggccattagcacaggaatactgagatatatctagtgtttgtagttttggggtgaactcagagaagttgaaggtaacgacttggcttgcgaatatcagctgatctgcactcgggaaatatcagagagcttgtgcagaaaaggtaacagttatgggcttatggcagatgcagtagcatgagatgtcttcataattgttgtgtacatcaggttcagtggtcttgggggcctccttcttctgaaggtcttaaaaacacggttaaccatttattttcagtatgttattaagtattacaggagcttcgttactagaaaaacttcgacatagatcaatgaaagcacgacgaagcaagctttgttacgttgtcacagtaagtcgatgtagggagaatgtgttgttcaagctgctgagtgcaaatgataatattgtccctgtgacatttgtaaatcttgtatgtaatctttgagggtatgaatgtaatatcgtacgaattgtacgattgcttataaatagatgaacaatactgttcacactgaattgagattgcattcacgctttcgctttcaagcaagccgaatatacaaatgtaatgtacatcatgtatctctttgttaatatatgagatgtatcttgatgttgtttgacatttgatatgaaataaataatcagcataatgttacatttgtaactata

SEQ ID NO: 61774 - DNA, 2960 bp, Zea Mays
ccaaccttccctctcattctccgcctctgccccccggccacgctcctcacgagtcaccggggaggcggggactagcgcttggcaaaatcaacgaacgaccaacgcacagtcaaacactccgacgaccccttcctccctcacccctagccgcttccccggaccccgcgccgatcccaccgaacccatggcgtcggagatcgaggtgctcgaggacaccaccacctcctcgacctccctcgtcgcggccgcgtccacggccccttccgccgcggagggcgcaggggcgccggcggagaacgagtcgctgaagaacgacgtgtacaccgcagcggcgtacggagatctggagaagctgcagcggctggtggagggggagggccgcccggtcaccgagcccgacggcgggggctattacgcgctccagtgggccgcgctcaacaaccgcgtcgccgccgcgcagtacatcctcgagcatggagcagacacaaatgctgtggatcacactggacaaacagcacttcactggagtgctgtacgtggtcatattcaagttgccgaactacttctgaaagaaggagctaagatggatgctgctgatttatatgggtatcaggccacacatgttgcagcacagtatggtcagactgcattcatttaccgcattgttgcgaaatggaatgctgatccagatatccctgataatgatgggaggagccctttacactgggctgcttataagggatttgcggactccatacggcttcttttgtttttggatgcttataggggacggcaagacaaagaaggttgtactcctttacactgggctgctattcgggggaaccttgaggcatgcactgtgctagttcaggttggcaaaaaggatgatttgatggtgaaagacaaaactggcttaactccagcacagcttgctgccgataagaatcatcggcaaattgcgtttttcctcgacaacgctagaagggtacatgacagaggatgtggtgcgaacaccagatttgggaaattgtcaaaattaggccttgcaccttttctttggtgcaccattattggcatgcttattacatacgtacactctgttatattaggacaatatgtcatgactatgacagcaccatttgggatgttcgcatggtcaggagtttttcttgcaactgctgggttggtcatgttctataaatgtagcaggaaagatccgggttacatcagcataaatacaaggggctcgcaaaatcaaagggacgatgaaccactgctgaagatggagttagaaaatcctgcgcttctttttggcaactggtcacaactttgtataacctgcaaaatagtcagacctgttcgttcgaaacattgttctacatgtgatcgttgcgtggagcagtttgatcaccattgcccttgggtatctaattgcataggaaagtgtgttctttcatccgatctatttttgaactgtaactgcagaagaacaaatgggaattcttcatgttcctcaccttagaagtttttgcaatgatcattactggctctgctgccattataagacttgtaagggatccagattctccatcatcttttggtgcttggattcattattctgcgtttcagcatcctggggttgtttcatttctcgcattggattgtttccttttctttggagttgcagttcttacagtttctcaagcatcacagatagcaaggaacattacaacaaatgagatggcaaattccatgagatatgcatatctcagaggcccaggtggcagattcaggaacccgtatgatcatgggattcgcaagaactgctctgacttcttgttaaatggatacaatgaggacactgaacggctagaccagacattgcacactgatgaggagatgggaatgatacagatgacaagagcggtttcgcagaatggtgacaatcatttacatcatggtaatggcacggaacatagttgcgctgattcacaggcaagcccaaaacctcatagccaagtgggttcgcctcagtgttgtgatcacagtaagaggactgataggacactgttgggcctaggtttgggccttgggcgaaacagtgcatcccggcagtatgttcggtctcttatcccattgtgatctatcatttggatatcatgtgttcgtttcagtgtagattggatttgttcactgctccggccccatcttttatacgtgcccttgacatggttcaccatgtaccattggctggtcagggacattgttgggccattagcacaggaatactgagatatatctagtgtttgtagttttggggtgaactcagagaagttgaaggtaacgacttggcttgcgaatatcagctgatctgcactcgggaaatatcagagagcttgtgcagaaaaggtaacagttatgggcttatggcagatgcagtagcatgagatgtcttcataattgttgtgtacatcaggttcagtggtcttgggggcctccttcttctgaaggtcttaaaaacacggttaaccatttattttcagtatgttattaagtattacaggagcttcgttactagaaaaacttcgacatagatcaatgaaagcacgacgaagcaagctttgttacgttgtcacagtaagtcgatgtagggagaatgtgttgttcaagctgctgagtgcaaatgataatattgtccctgtgacatttgtaaatcttgtatgtaatctttgagggtatgaatgtaatatcgtacgaattgtacgattgcttataaatagatgaacaatactgttcacactgaattgagattgcattcacgctttcgctttcaagcaagccgaatatacaaatgtaatgtacatcatgtatctctttgttaatatatgagatgtatcttgatgttgtttgacatttgatatgaaataaataatcagcataatgttacatttgtaactata

SEQ ID NO: 61775 - DNA, 3192 bp, Zea Mays
cttgcttccaaatgtccctaagatctgacatgccaaattttgaaagaagaaaagtccggggttctggcatgcaaaatccgacataccatttcgccccaaccttccctctcattctccgcctctgccccccggccacgctcctcacgagtcaccggggaggcggggactagcgcttggcaaaatcaacgaacgaccaacgcacagtcaaacactccgacgaccccttcctccctcacccctagccgcttccccggaccccgcgccgatcccaccgaacccatggcgtcggagatcgaggtgctcgaggacaccaccacctcctcgacctccctcgtcgcggccgcgtccacggccccttccgccgcggagggcgcaggggcgccggcggagaacgagtcgctgaagaacgacgtgtacaccgcagcggcgtacggagatctggagaagctgcagcggctggtggagggggagggccgcccggtcaccgagcccgacggcgggggctattacgcgctccagtgggccgcgctcaacaaccgcgtcgccgccgcgcagtacatcctcgagcatggagcagacacaaatgctgtggatcacactggacaaacagcacttcactggagtgctgtacgtggtcatattcaagttgccgaactacttctgaaagaaggagctaagatggatgctgctgatttatatgggtatcaggccacacatgttgcagcacagtatggtcagactgcattcatttaccgcattgttgcgaaatggaatgctgatccagatatccctgataatgatgggaggagccctttacactgggctgcttataagggatttgcggactccatacggcttcttttgtttttggatgcttataggggacggcaagacaaagaaggttgtactcctttacactgggctgctattcgggggaaccttgaggcatgcactgtgctagttcaggttggcaaaaaggatgatttgatggtgaaagacaaaactggcttaactccagcacagcttgctgccgataagaatcatcggcaaattgcgtttttcctcgacaacgctagaagggtacatgacagaggatgtggtgcgaacaccagatttgggaaattgtcaaaattaggccttgcaccttttctttggtgcaccattattggcatgcttattacatacgtacactctgttatattaggacaatatgtcatgactatgacagcaccatttgggatgttcgcatggtcaggagtttttcttgcaactgctgggttggtcatgttctataaatgtagcaggaaagatccgggttacatcagcataaatacaaggggctcgcaaaatcaaagggacgatgaaccactgctgaagatggagttagaaaatcctgcgcttctttttggcaactggtcacaactttgtataacctgcaaaatagtcagacctgttcgttcgaaacattgttctacatgtgatcgttgcgtggagcagtttgatcaccattgcccttgggtatctaattgcataggaaaggtacatcggtacatgtttccaatgtgatttcatactttcatagttgtggtttaatgtacctgccttctctattgtatttgagttaaaaacttaagatactcaagcaacaatgcctgaaagcttgacatcaacatataatcaacgatgaaatttgataaaagttgacataaaaatcatgaagaacaaatgggaattcttcatgttcctcaccttagaagtttttgcaatgatcattactggctctgctgccattataagacttgtaagggatccagattctccatcatcttttggtgcttggattcattattctgcgtttcagcatcctggggttgtttcatttctcgcattggattgtttccttttctttggagttgcagttcttacagtttctcaagcatcacagatagcaaggaacattacaacaaatgagatggcaaattccatgagatatgcatatctcagaggcccaggtggcagattcaggaacccgtatgatcatgggattcgcaagaactgctctgacttcttgttaaatggatacaatgaggacactgaacggctagaccagacattgcacactgatgaggagatgggaatgatacagatgacaagagcggtttcgcagaatggtgacaatcatttacatcatggtaatggcacggaacatagttgcgctgattcacaggcaagcccaaaacctcatagccaagtgggttcgcctcagtgttgtgatcacagtaagaggactgataggacactgttgggcctaggtttgggccttgggcgaaacagtgcatcccggcagtatgttcggtctcttatcccattgtgatctatcatttggatatcatgtgttcgtttcagtgtagattggatttgttcactgctccggccccatcttttatacgtgcccttgacatggttcaccatgtaccattggctggtcagggacattgttgggccattagcacaggaatactgagatatatctagtgtttgtagttttggggtgaactcagagaagttgaaggtaacgacttggcttgcgaatatcagctgatctgcactcgggaaatatcagagagcttgtgcagaaaaggtaacagttatgggcttatggcagatgcagtagcatgagatgtcttcataattgttgtgtacatcaggttcagtggtcttgggggcctccttcttctgaaggtcttaaaaacacggttaaccatttattttcagtatgttattaagtattacaggagcttcgttactagaaaaacttcgacatagatcaatgaaagcacgacgaagcaagctttgttacgttgtcacagtaagtcgatgtagggagaatgtgttgttcaagctgctgagtgcaaatgataatattgtccctgtgacatttgtaaatcttgtatgtaatctttgagggtatgaatgtaatatcgtacgaattgtacgattgcttataaatagatgaacaatactgttcacactgaattgagattgcattcacgctttcgctttcaagcaagccgaatatacaaatgtaatgtacatcatgtatctctttgttaatatatgagatgtatcttgatgttgtttgacatttgatatgaaataaataatcagcataatgttacatttgtaactata

SEQ ID NO: 61776 - DNA, 2899 bp, Zea Mays
agcagatgcaggacaaaaacctgatatttgaacaggtatcgccatgaagaatcaaaatcgtttcttgcttccaaatgtccctaagatctgacatgccaaattttgaaagaagaaaagtccggggttctggcatgcaaaatccgacataccatttcgccccaaccttccctctcattctccgcctctgccccccggccacgctcctcacgagtcaccggggaggcggggactagcgcttggcaaaatcaacgaacgaccaacgcacagtcaaacactccgacgaccccttcctccctcacccctagccgcttccccggaccccgcgccgatcccaccgaacccatggcgtcggagatcgaggtgctcgaggacaccaccacctcctcgacctccctcgtcgcggccgcgtccacggccccttccgccgcggagggcgcaggggcgccggcggagaacgagtcgctgaagaacgacgtgtacaccgcagcggcgtacggagatctggagaagctgcagcggctggtggagggggagggccgcccggtcaccgagcccgacggcgggggctattacgcgctccagtgggccgcgctcaacaaccgcgtcgccgccgcgcagtacatcctcgagcatggagcagacacaaatgctgtggatcacactggacaaacagcacttcactggagtgctgtacgtggtcatattcaagttgccgaactacttctgaaagaaggagctaagatggatgctgctgatttatatgggtatcaggccacacatgttgcagcacagtatggtcagactgcattcatttaccgcattgttgcgaaatggaatgctgatccagatatccctgataatgatgggaggagccctttacactgggctgcttataagggatttgcggactccatacggcttcttttgtttttggatgcttataggggacggcaagacaaagaaggttgtactcctttacactgggctgctattcgggggaaccttgaggcatgcactgtgctagttcaggttggcaaaaaggatgatttgatggtgaaagacaaaactggcttaactccagcacagcttgctgccgataagaatcatcggcaaattgcgtttttcctcgacaacgctagaagggtacatgacagaggatgtggtgcgaacaccagatttgggaaattgtcaaaattaggccttgcaccttttctttggtgcaccattattggcatgcttattacatacgtacactctgttatattaggacaatatgtcatgactatgacagcaccatttgggatgttcgcatggtcaggagtttttcttgcaactgctgggttggtcatgttctataaatgtagcaggaaagatccgggttacatcagcataaatacaaggggctcgcaaaatcaaagggacgatgaaccactgctgaagatggagttagaaaatcctgcgcttctttttggcaactggtcacaactttgtataacctgcaaagacttgtaagggatccagattctccatcatcttttggtgcttggattcattattctgcgtttcagcatcctggggttgtttcatttctcgcattggattgtttccttttctttggagttgcagttcttacagtttctcaagcatcacagatagcaaggaacattacaacaaatgagatggcaaattccatgagatatgcatatctcagaggcccaggtggcagattcaggaacccgtatgatcatgggattcgcaagaactgctctgacttcttgttaaatggatacaatgaggacactgaacggctagaccagacattgcacactgatgaggagatgggaatgatacagatgacaagagcggtttcgcagaatggtgacaatcatttacatcatggtaatggcacggaacatagttgcgctgattcacaggcaagcccaaaacctcatagccaagtgggttcgcctcagtgttgtgatcacagtaagaggactgataggacactgttgggcctaggtttgggccttgggcgaaacagtgcatcccggcagtatgttcggtctcttatcccattgtgatctatcatttggatatcatgtgttcgtttcagtgtagattggatttgttcactgctccggccccatcttttatacgtgcccttgacatggttcaccatgtaccattggctggtcagggacattgttgggccattagcacaggaatactgagatatatctagtgtttgtagttttggggtgaactcagagaagttgaaggtaacgacttggcttgcgaatatcagctgatctgcactcgggaaatatcagagagcttgtgcagaaaaggtaacagttatgggcttatggcagatgcagtagcatgagatgtcttcataattgttgtgtacatcaggttcagtggtcttgggggcctccttcttctgaaggtcttaaaaacacggttaaccatttattttcagtatgttattaagtattacaggagcttcgttactagaaaaacttcgacatagatcaatgaaagcacgacgaagcaagctttgttacgttgtcacagtaagtcgatgtagggagaatgtgttgttcaagctgctgagtgcaaatgataatattgtccctgtgacatttgtaaatcttgtatgtaatctttgagggtatgaatgtaatatcgtacgaattgtacgattgcttataaatagatgaacaatactgttcacactgaattgagattgcattcacgctttcgctttcaagcaagccgaatatacaaatgtaatgtacatcatgtatctctttgttaatatatgagatgtatcttgatgttgtttgacatttgatatgaaataaataatcagcataatgttacatttgtaactata

SEQ ID NO: 61777 - DNA, 2835 bp, Zea Mays
ctacttccaccgaaaaccatggataccttgccactaccactatttccgccgacaacctagtttgatccattcctgaagcagatgcaggacaaaaacctgatatttgaacaggtatcgccatgaagaatcaaaatcgtttcttgcttccaaatgtccctaagatctgacatgccaaattttgaaagaagaaaagtccggggttctggcatgcaaaatccgacataccatttcgccccaaccttccctctcattctccgcctctgccccccggccacgctcctcacgagtcaccggggaggcggggactagcgcttggcaaaatcaacgaacgaccaacgcacagtcaaacactccgacgaccccttcctccctcacccctagccgcttccccggaccccgcgccgatcccaccgaacccatggcgtcggagatcgaggtgctcgaggacaccaccacctcctcgacctccctcgtcgcggccgcgtccacggccccttccgccgcggagggcgcaggggcgccggcggagaacgagtcgctgaagaacgacgtgtacaccgcagcggcgtacggagatctggagaagctgcagcggctggtggagggggagggccgcccggtcaccgagcccgacggcgggggctattacgcgctccagtgggccgcgctcaacaaccgcgtcgccgccgcgcagtacatcctcgagcatggagcagacacaaatgctgtggatcacactggacaaacagcacttcactggagtgctgtacgtggtcatattcaagttgccgaactacttctgaaagaaggagctaagatggatgctgctgatttatatgggtatcaggccacacatgttgcagcacagtatggtcagactgcattcatttaccgcattgttgcgaaatggaatgctgatccagatatccctgataatgatgggaggagccctttacactgggctgcttataagggatttgcggactccatacggcttcttttgtttttggatgcttataggggacggcaagacaaagaaggttgtactcctttacactgggctgctattcgggggaaccttgaggcatgcactgtgctagttcaggttggcaaaaaggatgatttgatggtgaaagacaaaactggcttaactccagcacagcttgctgccgataagaatcatcggcaaattgcgtttttcctcgaaagatccgggttacatcagcataaatacaaggggctcgcaaaatcaaagggacgatgaaccactgctgaagatggagttagaaaatcctgcgcttctttttggcaactggtcacaactttgtataacctgcaaaatagtcagacctgttcgttcgaaacattgttctacatgtgatcgttgcgtggagcagtttgatcaccattgcccttgggtatctaattgcataggaaaggacttgtaagggatccagattctccatcatcttttggtgcttggattcattattctgcgtttcagcatcctggggttgtttcatttctcgcattggattgtttccttttctttggagttgcagttcttacagtttctcaagcatcacagatagcaaggaacattacaacaaatgagatggcaaattccatgagatatgcatatctcagaggcccaggtggcagattcaggaacccgtatgatcatgggattcgcaagaactgctctgacttcttgttaaatggatacaatgaggacactgaacggctagaccagacattgcacactgatgaggagatgggaatgatacagatgacaagagcggtttcgcagaatggtgacaatcatttacatcatggtaatggcacggaacatagttgcgctgattcacaggcaagcccaaaacctcatagccaagtgggttcgcctcagtgttgtgatcacagtaagaggactgataggacactgttgggcctaggtttgggccttgggcgaaacagtgcatcccggcagtatgttcggtctcttatcccattgtgatctatcatttggatatcatgtgttcgtttcagtgtagattggatttgttcactgctccggccccatcttttatacgtgcccttgacatggttcaccatgtaccattggctggtcagggacattgttgggccattagcacaggaatactgagatatatctagtgtttgtagttttggggtgaactcagagaagttgaaggtaacgacttggcttgcgaatatcagctgatctgcactcgggaaatatcagagagcttgtgcagaaaaggtaacagttatgggcttatggcagatgcagtagcatgagatgtcttcataattgttgtgtacatcaggttcagtggtcttgggggcctccttcttctgaaggtcttaaaaacacggttaaccatttattttcagtatgttattaagtattacaggagcttcgttactagaaaaacttcgacatagatcaatgaaagcacgacgaagcaagctttgttacgttgtcacagtaagtcgatgtagggagaatgtgttgttcaagctgctgagtgcaaatgataatattgtccctgtgacatttgtaaatcttgtatgtaatctttgagggtatgaatgtaatatcgtacgaattgtacgattgcttataaatagatgaacaatactgttcacactgaattgagattgcattcacgctttcgctttcaagcaagccgaatatacaaatgtaatgtacatcatgtatctctttgttaatatatgagatgtatcttgatgttgtttgacatttgatatgaaataaataatcagcataatgttacatttgtaactata

SEQ ID NO: 61778 - DNA, 2411 bp, Zea Mays
aaaggtcctcatcctcagctccatcatcaacctcatcatcaagcatggagcagacacaaatgctgtggatcacactggacaaacagcacttcactggagtgctgtacgtggtcatattcaagttgccgaactacttctgaaagaaggagctaagatggatgctgctgatttatatgggtatcaggccacacatgttgcagcacagtatggtcagactgcattcatttaccgcattgttgcgaaatggaatgctgatccagatatccctgataatgatgggaggagccctttacactgggctgcttataagggatttgcggactccatacggcttcttttgtttttggatgcttataggggacggcaagacaaagaaggttgtactcctttacactgggctgctattcgggggaaccttgaggcatgcactgtgctagttcaggttggcaaaaaggatgatttgatggtgaaagacaaaactggcttaactccagcacagcttgctgccgataagaatcatcggcaaattgcgtttttcctcgacaacgctagaagggtacatgacagaggatgtggtgcgaacaccagatttgggaaattgtcaaaattaggccttgcaccttttctttggtgcaccattattggcatgcttattacatacgtacactctgttatattaggacaatatgtcatgactatgacagcaccatttgggatgttcgcatggtcaggagtttttcttgcaactgctgggttggtcatgttctataaatgtagcaggaaagatccgggttacatcagcataaatacaaggggctcgcaaaatcaaagggacgatgaaccactgctgaagatggagttagaaaatcctgcgcttctttttggcaactggtcacaactttgtataacctgcaaaatagtcagacctgttcgttcgaaacattgttctacatgtgatcgttgcgtggagcagtttgatcaccattgcccttgggtatctaattgcataggaaaggacttgtaagggatccagattctccatcatcttttggtgcttggattcattattctgcgtttcagcatcctggggttgtttcatttctcgcattggattgtttccttttctttggagttgcagttcttacagtttctcaagcatcacagatagcaaggaacattacaacaaatgagatggcaaattccatgagatatgcatatctcagaggcccaggtggcagattcaggaacccgtatgatcatgggattcgcaagaactgctctgacttcttgttaaatggatacaatgaggacactgaacggctagaccagacattgcacactgatgaggagatgggaatgatacagatgacaagagcggtttcgcagaatggtgacaatcatttacatcatggtaatggcacggaacatagttgcgctgattcacaggcaagcccaaaacctcatagccaagtgggttcgcctcagtgttgtgatcacagtaagaggactgataggacactgttgggcctaggtttgggccttgggcgaaacagtgcatcccggcagtatgttcggtctcttatcccattgtgatctatcatttggatatcatgtgttcgtttcagtgtagattggatttgttcactgctccggccccatcttttatacgtgcccttgacatggttcaccatgtaccattggctggtcagggacattgttgggccattagcacaggaatactgagatatatctagtgtttgtagttttggggtgaactcagagaagttgaaggtaacgacttggcttgcgaatatcagctgatctgcactcgggaaatatcagagagcttgtgcagaaaaggtaacagttatgggcttatggcagatgcagtagcatgagatgtcttcataattgttgtgtacatcaggttcagtggtcttgggggcctccttcttctgaaggtcttaaaaacacggttaaccatttattttcagtatgttattaagtattacaggagcttcgttactagaaaaacttcgacatagatcaatgaaagcacgacgaagcaagctttgttacgttgtcacagtaagtcgatgtagggagaatgtgttgttcaagctgctgagtgcaaatgataatattgtccctgtgacatttgtaaatcttgtatgtaatctttgagggtatgaatgtaatatcgtacgaattgtacgattgcttataaatagatgaacaatactgttcacactgaattgagattgcattcacgctttcgctttcaagcaagccgaatatacaaatgtaatgtacatcatgtatctctttgttaatatatgagatgtatcttgatgttgtttgacatttgatatgaaataaataatcagcataatgttacatttgtaactata

SEQ ID NO: 61779 - DNA, 1429 bp, Zea Mays
tcggcaacccggccggccgtgtcctccaagacttcgccttccgcgacccgaccgccgcgaccactatatataaccgcgtacgcccccaccccacgagcggccgtgaaatcgcgctccgatttgtgcttctgcgacttcaatcggccagtccgaaaaatccaaggacattgccgggcggaaccctcccctccacccacatcatggcggcgacgactgtggcaagccggaagcgagggacggcggccttcctcgatgaccccttctccttccccggcgacctgccgtgcctgcagacgaagcgcggccggtgctcgtcgtcgattgttgccgccgacctcggcctcagcttcccgctggagttcgacccggtcgaggcactccatctcatcttcccgggcgaggatcggcaggttctacaaaaccatttacaagcgtcaggaaatgtcctggatgctgcgatcagagcatacaaagattatttggcagaaagaagcaaagaatctgcttctgccatcaactatgttccatccgacaacgaggaaggagatagcattctatctgaatctgaatctgatgtttacctaaaagaagaaaccattcccaccaattgctctggatgggctgaggtcatcgtcaaggagatgtcctctgcttcggatttgaccgatgccaagaaccgcgccttcaagatactcaaactgtttgagaaatcggctgacaggagcagtagcccagatgaaaagagagaagtgaacaaggagcacgagatagtgaagcagatgctaggatccctgctccaccagaacggcgttctgaagcgcgcgttcctcatacagcacaaccgactcaaggagtaccaagagatggtgcaggagcggtctcagttcaaccagattctcgagaagtaccgggagcaaatcaaggcgttagagaaacacctattggcatcacaatccagatgtcttctaatctatactgttgtcagcaaggacattccgctaatccctacatgctgctacatctgcatgctacaacatgtgtcgagcttgggagaaagatagggagtgcaaaatcctgaaactgcaaaatatccttttctctcctccagctaaggagaaagataatcaaagaaaggactcgtccatgtggtagcaattatttgaaaggactagtttacgctagtctgaattgtctgtagagggcgataatgaaagaaagggcatgttcatatgttgcaattattttgtattagtctggtctctctttagattttagttgctctcaatgtaagtgagcagagtttgacggagttcgaaaatccatgtactatttgttttaaattatcgatcgaattgagactgttccccaccaaagctcactgacaagggaactaataagcaccttttaacattgggcaacataataaaca

SEQ ID NO: 61780 - DNA, 1313 bp, Zea Mays
tcggcaacccggccggccgtgtcctccaagacttcgccttccgcgacccgaccgccgcgaccactatatataaccgcgtacgcccccaccccacgagcggccgtgaaatcgcgctccgatttgtgcttctgcgacttcaatcggccagtccgaaaaatccaaggacattgccgggcggaaccctcccctccacccacatcatggcggcgacgactgtggcaagccggaagcgagggacggcggccttcctcgatgaccccttctccttccccggcgacctgccgtgcctgcagacgaagcgcggccggtgctcgtcgtcgattgttgccgccgacctcggcctcagcttcccgctggagttcgacccggtcgaggcactccatctcatcttcccgggcgaggatcggcagtttacctaaaagaagaaaccattcccaccaattgctctggatgggctgaggtcatcgtcaaggagatgtcctctgcttcggatttgaccgatgccaagaaccgcgccttcaagatactcaaactgtttgagaaatcggctgacaggagcagtagcccagatgaaaagagagaagtgaacaaggagcacgagatagtgaagcagatgctaggatccctgctccaccagaacggcgttctgaagcgcgcgttcctcatacagcacaaccgactcaaggagtaccaagagatggtgcaggagcggtctcagttcaaccagattctcgagaagtaccgggagcaaatcaaggcgttagaggagaagaacagtgccttgtcatttcatcttcaaaatatgaaccagtgcagaaacacctattggcatcacaatccagatgtcttctaatctatactgttgtcagcaaggacattccgctaatccctacatgctgctacatctgcatgctacaacatgtgtcgagcttgggagaaagatagggagtgcaaaatcctgaaactgcaaaatatccttttctctcctccagctaaggagaaagataatcaaagaaaggactcgtccatgtggtagcaattatttgaaaggactagtttacgctagtctgaattgtctgtagagggcgataatgaaagaaagggcatgttcatatgttgcaattattttgtattagtctggtctctctttagattttagttgctctcaatgtaagtgagcagagtttgacggagttcgaaaatccatgtactatttgttttaaattatcgatcgaattgagactgttccccaccaaagctcactgacaagggaactaataagcaccttttaacattgggcaacataataaaca

SEQ ID NO: 61781 - DNA, 1728 bp, Zea Mays
taggttttgagagcgaggtgcccgtctgaataggttgcgcacgaggagagcccaccggccaccgcctaccgcaatggaagccgcaggcggcggagccgaggatgagcaggtgatgagcgaggtgcacttgggctgcccgccgcacttctctggcctcctcgtctcccatttcagcttctcctcacggcccctagggccatatggacacaaaggaggcggcggcggcggcggcgggagcgagctagtcgcagcaactagcggttctggtgattcccctgacgcagtcgccgtggatgaggatggggatctcgttctggaccggaggagaagaaacaaatatgctagaggtgaccgccatctgttcactattcagcatggtgttaccagctcgcttaagagcgttgggcttcaggtttggaaagcggccttactattatctgactttattctgcacgaaagcttttcatcgccaaactttgatggtgttactgccattgagataggtgctggaacaggtttggtaggtttagcactagctcgagttgctagaaggatttttgttacagatagaggcactgatatccttgataattgcttggctaatctccatatcaactctggtatgctaaggttcgatgaagctaaagtctgtgtacgagaactggactggaaaatggcatggcctccacctgtgggtacatatgacccttctgatccaagtcggtatttatggtctgcaagtgaagttgaggaggctgagaaagcaacagtcctgtttgctgcagatgttatttacagtgatgatctcacaaatttgttcttcaacacggtgaagaaattgatgtcggtcggtgctaagaaggtgctatacttggccctggagaagagatacaacttcagtgtagacgaactagatgtcgtggccaatggttacacgcacttccgaagtttcttcacagcccaagatgagcacggtgatccgagcaacagatctggaccaggttttgttggaaagcagatagaccctgcagagattcctcagtacatcagagagtatgagaggggcaaggatttagagatgtggatgatcatgtacagtccggaggagaaacagcacagtaactctacaaaaaccgtcttttccttctaggaggacgaagagagcaatgagtgcttggtgcaaaaagacgaattccgttaaaaagacgggaccccctcccacgggcatccatactatcttgacaaaaatgaaaactgctgcttggtgcaagatccgtgtggtgtcgaagaatcgcagttcggcatcttctctgcggggaccgcgacagaaacgaggtcatcagaagagagaaataagttacacctaattgcggcagggcagggcagtggtggctggcatatattaagtggtggacaatcaagaacatgctctgcatgcttagcttaagtatatcatacgtatataataacgccgttgggactcgttttctttgtcgcccggaaacagcatctgtttggtccaagattcttggcacgccattgcgatccaaccctgtcgtgctcaaacatactctctccgtcggctggtgctctcgtttcatttcatcacaagttaattaattttaattttaactaaatatgtataaaaggacaaggccggccttcccagtcacaggctcacagctggataaagaaagaaaaggccaatttatgagtcaacaattcctg

SEQ ID NO: 61782 - DNA, 1746 bp, Zea Mays
taggttttgagagcgaggtgcccgtctgaataggttgcgcacgaggagagcccaccggccaccgcctaccgcaatggaagccgcaggcggcggagccgaggatgagcaggtgatgagcgaggtgcacttgggctgcccgccgcacttctctggcctcctcgtctcccatttcagcttctcctcacggcccctagggccatatggacacaaaggaggcggcggcggcggcggcgggagcgagctagtcgcagcaactagcggttctggtgattcccctgacgcagtcgccgtggatgaggatggggatctcgttctggaccggaggagaagaaacaaatatgctagaggtgaccgccatctgttcactattcagcatggtgttaccagctcgcttaagagcgttgggcttcagccgtgcaggtttggaaagcggccttactattatctgactttattctgcacgaaagcttttcatcgccaaactttgatggtgttactgccattgagataggtgctggaacaggtttggtaggtttagcactagctcgagttgctagaaggatttttgttacagatagaggcactgatatccttgataattgcttggctaatctccatatcaactctggtatgctaaggttcgatgaagctaaagtctgtgtacgagaactggactggaaaatggcatggcctccacctgtgggtacatatgacccttctgatccaagtcggtatttatggtctgcaagtgaagttgaggaggctgagaaagcaacagtcctgtttgctgcagatgttatttacagtgatgatctcacaaatttgttcttcaacacggtgaagaaattgatgtcggtcggtgctaagaaggtgctatacttggccctggagaagagatacaacttcagtgtagacgaactagatgtcgtggccaatggttacacgcacttccgaagtttcttcacagcccaagatgagcacggtgatccgagcaacagatctggaccaggttttgttggaaagcagatagaccctgcagagattcctcagtacatcagagagtatgagaggggcaaggatttagagatgtggatgatcatgtacagtccggaggagaaacagcacagtaactctacaaaaaccgtcttttccttctaggaggacgaagagagcaatgagtgcttggtgcaaaaagacgaattccgttaaaaagacgggaccccctcccacgggcatccatactatcttgacaaaaatgaaaactgctgcttggtgcaagatccgtgtggtgtcgaagaatcgcagttcggcatcttctctgcggggaccgcgacagaaacgaggtcatcagaagagagaaataagttacacctaattgcggcagggcagggcagtggtggctggcatatattaagtggtggacaatcaagaacatgctctgcatgcttagcttaagtatatcatacgtatataataacgccgttgggactcgttttctttgtcgcccggaaacagcatctgtttggtccaagattcttggcacgccattgcgatccaaccctgtcgtgctcaaacatactctctccgtcggctggtgctctcgtttcatttcatcacaagttaattaattttaattttaactaaatatgtataaaaggttagtaatttcaatgatgtatactaataaatattattagatcgattatttaatctattttttctaataaaattatttgcagatataaa

SEQ ID NO: 61783 - DNA, 1682 bp, Zea Mays
taggttttgagagcgaggtgcccgtctgaataggttgcgcacgaggagagcccaccggccaccgcctaccgcaatggaagccgcaggcggcggagccgaggatgagcaggtgatgagcgaggtgcacttgggctgcccgccgcacttctctggcctcctcgtctcccatttcagcttctcctcacggcccctagggccatatggacacaaaggaggcggcggcggcggcggcgggagcgagctagtcgcagcaactagcggttctggtgattcccctgacgcagtcgccgtggatgaggatggggatctcgttctggaccggaggagaagaaacaaatatgctagaggtgaccgccatctgttcactattcagcatggtgttaccagctcgcttaagagcgttgggcttcagccgtgcaggtttggaaagcggccttactattatctgactttattctgcacgaaagcttttcatcgccaaactttgatggtgttactgccattgagataggtgctggaacaggtttggtaggtttagcactagctcgagttgctagaaggatttttgttacaggttcgatgaagctaaagtctgtgtacgagaactggactggaaaatggcatggcctccacctgtgggtacatatgacccttctgatccaagtcggtatttatggtctgcaagtgaagttgaggaggctgagaaagcaacagtcctgtttgctgcagatgttatttacagtgatgatctcacaaatttgttcttcaacacggtgaagaaattgatgtcggtcggtgctaagaaggtgctatacttggccctggagaagagatacaacttcagtgtagacgaactagatgtcgtggccaatggttacacgcacttccgaagtttcttcacagcccaagatgagcacggtgatccgagcaacagatctggaccaggttttgttggaaagcagatagaccctgcagagattcctcagtacatcagagagtatgagaggggcaaggatttagagatgtggatgatcatgtacagtccggaggagaaacagcacagtaactctacaaaaaccgtcttttccttctaggaggacgaagagagcaatgagtgcttggtgcaaaaagacgaattccgttaaaaagacgggaccccctcccacgggcatccatactatcttgacaaaaatgaaaactgctgcttggtgcaagatccgtgtggtgtcgaagaatcgcagttcggcatcttctctgcggggaccgcgacagaaacgaggtcatcagaagagagaaataagttacacctaattgcggcagggcagggcagtggtggctggcatatattaagtggtggacaatcaagaacatgctctgcatgcttagcttaagtatatcatacgtatataataacgccgttgggactcgttttctttgtcgcccggaaacagcatctgtttggtccaagattcttggcacgccattgcgatccaaccctgtcgtgctcaaacatactctctccgtcggctggtgctctcgtttcatttcatcacaagttaattaattttaattttaactaaatatgtataaaaggttagtaatttcaatgatgtatactaataaatattattagatcgattatttaatctattttttctaataaaattatttgcagatataaa

SEQ ID NO: 61784 - DNA, 1662 bp, Zea Mays
taggttttgagagcgaggtgcccgtctgaataggttgcgcacgaggagagcccaccggccaccgcctaccgcaatggaagccgcaggcggcggagccgaggatgagcaggtgatgagcgaggtgcacttgggctgcccgccgcacttctctggcctcctcgtctcccatttcagcttctcctcacggcccctagggccatatggacacaaaggaggcggcggcggcggcggcgggagcgagctagtcgcagcaactagcggttctggtgattcccctgacgcagtcgccgtggatgaggatggggatctcgttctggaccggaggagaagaaacaaatatgctagaggtgaccgccatctgttcactattcagcatggtgttaccagctcgcttaagagcgttgggcttcaggtttggaaagcggccttactattatctgactttattctgcacgaaagcttttcatcgccaaactttgatggtgttactgccattgagataggtttggtaggtttagcactagctcgagttgctagaaggatttttgttacaggttcgatgaagctaaagtctgtgtacgagaactggactggaaaatggcatggcctccacctgtgggtacatatgacccttctgatccaagtcggtatttatggtctgcaagtgaagttgaggaggctgagaaagcaacagtcctgtttgctgcagatgttatttacagtgatgatctcacaaatttgttcttcaacacggtgaagaaattgatgtcggtcggtgctaagaaggtgctatacttggccctggagaagagatacaacttcagtgtagacgaactagatgtcgtggccaatggttacacgcacttccgaagtttcttcacagcccaagatgagcacggtgatccgagcaacagatctggaccaggttttgttggaaagcagatagaccctgcagagattcctcagtacatcagagagtatgagaggggcaaggatttagagatgtggatgatcatgtacagtccggaggagaaacagcacagtaactctacaaaaaccgtcttttccttctaggaggacgaagagagcaatgagtgcttggtgcaaaaagacgaattccgttaaaaagacgggaccccctcccacgggcatccatactatcttgacaaaaatgaaaactgctgcttggtgcaagatccgtgtggtgtcgaagaatcgcagttcggcatcttctctgcggggaccgcgacagaaacgaggtcatcagaagagagaaataagttacacctaattgcggcagggcagggcagtggtggctggcatatattaagtggtggacaatcaagaacatgctctgcatgcttagcttaagtatatcatacgtatataataacgccgttgggactcgttttctttgtcgcccggaaacagcatctgtttggtccaagattcttggcacgccattgcgatccaaccctgtcgtgctcaaacatactctctccgtcggctggtgctctcgtttcatttcatcacaagttaattaattttaattttaactaaatatgtataaaaggttagtaatttcaatgatgtatactaataaatattattagatcgattatttaatctattttttctaataaaattatttgcagatataaa

SEQ ID NO: 61785 - DNA, 1725 bp, Zea Mays
ctcagtctaggttttgagagcgaggtgcccgtctgaataggttgcgcacgaggagagcccaccggccaccgcctaccgcaatggaagccgcaggcggcggagccgaggatgagcaggtgatgagcgaggtgcacttgggctgcccgccgcacttctctggcctcctcgtctcccatttcagcttctcctcacggcccctagggccatatggacacaaaggaggcggcggcggcggcggcgggagcgagctagtcgcagcaactagcggttctggtaactgagtgggactgtggatcagtggatgtgtatttgcgttagttcgtgttgacgtagagtcgccgtggatgaggatggggatctcgttctggaccggaggagaagaaacaaatatgctagaggtgaccgccatctgttcactattcagcatggtgttaccagctcgcttaagagcgttgggcttcaggtttggaaagcggccttactattatctgactttattctgcacgaaagcttttcatcgccaaactttgatggtgttactgccattgagataggtgctggaacaggtttggtaggtttagcactagctcgagttgctagaaggatttttgttacaggttcgatgaagctaaagtctgtgtacgagaactggactggaaaatggcatggcctccacctgtgggtacatatgacccttctgatccaagtcggtatttatggtctgcaagtgaagttgaggaggctgagaaagcaacagtcctgtttgctgcagatgttatttacagtgatgatctcacaaatttgttcttcaacacggtgaagaaattgatgtcggtcggtgctaagaaggtgctatacttggccctggagaagagatacaacttcagtgtagacgaactagatgtcgtggccaatggttacacgcacttccgaagtttcttcacagcccaagatgagcacggtgatccgagcaacagatctggaccaggttttgttggaaagcagatagaccctgcagagattcctcagtacatcagagagtatgagaggggcaaggatttagagatgtggatgatcatgtacagtccggaggagaaacagcacagtaactctacaaaaaccgtcttttccttctaggaggacgaagagagcaatgagtgcttggtgcaaaaagacgaattccgttaaaaagacgggaccccctcccacgggcatccatactatcttgacaaaaatgaaaactgctgcttggtgcaagatccgtgtggtgtcgaagaatcgcagttcggcatcttctctgcggggaccgcgacagaaacgaggtcatcagaagagagaaataagttacacctaattgcggcagggcagggcagtggtggctggcatatattaagtggtggacaatcaagaacatgctctgcatgcttagcttaagtatatcatacgtatataataacgccgttgggactcgttttctttgtcgcccggaaacagcatctgtttggtccaagattcttggcacgccattgcgatccaaccctgtcgtgctcaaacatactctctccgtcggctggtgctctcgtttcatttcatcacaagttaattaattttaattttaactaaatatgtataaaaggttagtaatttcaatgatgtatactaataaatattattagatcgattatttaatctattttttctaataaaattatttgcagatataaa

SEQ ID NO: 61786 - DNA, 1681 bp, Zea Mays
ctcagtctaggttttgagagcgaggtgcccgtctgaataggttgcgcacgaggagagcccaccggccaccgcctaccgcaatggaagccgcaggcggcggagccgaggatgagcaggtgatgagcgaggtgcacttgggctgcccgccgcacttctctggcctcctcgtctcccatttcagcttctcctcacggcccctagggccatatggacacaaaggaggcggcggcggcggcggcgggagcgagctagtcgcagcaactagcggttctggtgattcccctgacgcagtcgccgtggatgaggatggggatctcgttctggaccggaggagaagaaacaaatatgctagaggtgaccgccatctgttcactattcagcatggtgttaccagctcgcttaagagcgttgggcttcaggtttggaaagcggccttactattatctgactttattctgcacgaaagcttttcatcgccaaactttgatggtgttactgccattgagataggtgctggaacaggtttggtaggtttagcactagctcgagttgctagaaggatttttgttacaggttcgatgaagctaaagtctgtgtacgagaactggactggaaaatggcatggcctccacctgtgggtacatatgacccttctgatccaagtcggtatttatggtctgcaagtgaagttgaggaggctgagaaagcaacagtcctgtttgctgcagatgttatttacagtgatgatctcacaaatttgttcttcaacacggtgaagaaattgatgtcggtcggtgctaagaaggtgctatacttggccctggagaagagatacaacttcagtgtagacgaactagatgtcgtggccaatggttacacgcacttccgaagtttcttcacagcccaagatgagcacggtgatccgagcaacagatctggaccaggttttgttggaaagcagatagaccctgcagagattcctcagtacatcagagagtatgagaggggcaaggatttagagatgtggatgatcatgtacagtccggaggagaaacagcacagtaactctacaaaaaccgtcttttccttctaggaggacgaagagagcaatgagtgcttggtgcaaaaagacgaattccgttaaaaagacgggaccccctcccacgggcatccatactatcttgacaaaaatgaaaactgctgcttggtgcaagatccgtgtggtgtcgaagaatcgcagttcggcatcttctctgcggggaccgcgacagaaacgaggtcatcagaagagagaaataagttacacctaattgcggcagggcagggcagtggtggctggcatatattaagtggtggacaatcaagaacatgctctgcatgcttagcttaagtatatcatacgtatataataacgccgttgggactcgttttctttgtcgcccggaaacagcatctgtttggtccaagattcttggcacgccattgcgatccaaccctgtcgtgctcaaacatactctctccgtcggctggtgctctcgtttcatttcatcacaagttaattaattttaattttaactaaatatgtataaaaggttagtaatttcaatgatgtatactaataaatattattagatcgattatttaatctattttttctaataaaattatttgcagatataaa

SEQ ID NO: 61787 - DNA, 1717 bp, Zea Mays
ctcgcctagccaaggggaccgtgttgcacttataagggcgggcctccctcctctctcagtctaggttttgagagcgaggtgcccgtctgaataggttgcgcacgaggagagcccaccggccaccgcctaccgcaatggaagccgcaggcggcggagccgaggatgagcaggtgatgagcgaggtgcacttgggctgcccgccgcacttctctggcctcctcgtctcccatttcagcttctcctcacggcccctagggccatatggacacaaaggaggcggcggcggcggcggcgggagcgagctagtcgcagcaactagcggttctgtcgccgtggatgaggatggggatctcgttctggaccggaggagaagaaacaaatatgctagaggtgaccgccatctgttcactattcagcatggtgttaccagctcgcttaagagcgttgggcttcaggtttggaaagcggccttactattatctgactttattctgcacgaaagcttttcatcgccaaactttgatggtgttactgccattgagataggtgctggaacaggtttggtaggtttagcactagctcgagttgctagaaggatttttgttacaggttcgatgaagctaaagtctgtgtacgagaactggactggaaaatggcatggcctccacctgtgggtacatatgacccttctgatccaagtcggtatttatggtctgcaagtgaagttgaggaggctgagaaagcaacagtcctgtttgctgcagatgttatttacagtgatgatctcacaaatttgttcttcaacacggtgaagaaattgatgtcggtcggtgctaagaaggtgctatacttggccctggagaagagatacaacttcagtgtagacgaactagatgtcgtggccaatggttacacgcacttccgaagtttcttcacagcccaagatgagcacggtgatccgagcaacagatctggaccaggttttgttggaaagcagatagaccctgcagagattcctcagtacatcagagagtatgagaggggcaaggatttagagatgtggatgatcatgtacagtccggaggagaaacagcacagtaactctacaaaaaccgtcttttccttctaggaggacgaagagagcaatgagtgcttggtgcaaaaagacgaattccgttaaaaagacgggaccccctcccacgggcatccatactatcttgacaaaaatgaaaactgctgcttggtgcaagatccgtgtggtgtcgaagaatcgcagttcggcatcttctctgcggggaccgcgacagaaacgaggtcatcagaagagagaaataagttacacctaattgcggcagggcagggcagtggtggctggcatatattaagtggtggacaatcaagaacatgctctgcatgcttagcttaagtatatcatacgtatataataacgccgttgggactcgttttctttgtcgcccggaaacagcatctgtttggtccaagattcttggcacgccattgcgatccaaccctgtcgtgctcaaacatactctctccgtcggctggtgctctcgtttcatttcatcacaagttaattaattttaattttaactaaatatgtataaaaggttagtaatttcaatgatgtatactaataaatattattagatcgattatttaatctattttttctaataaaattatttgcagatataaa

SEQ ID NO: 61788 - DNA, 1475 bp, Zea Mays
agcgtcttaaaactagaagaatgcaattgcctcgagtcacaactacaagattgacaacttagtgattggatttttgttggtgattttggtgtcgcactgcaaattaagagagaaatttcggatggatggcacacacaacagcaggggtgatagctcacagccgcaaggtcaagctggttggaacccataccagccccctcctccacctgcctggaacccatacatgtttccaatgcaacctcagcctggtggctggtatccacagccaatccatcacccccacataataggattcagtaccttcaatcctgaaacgaggaaggactaagttagggaacttcagcccacaagaagatgtaaacctggtgaaagcatggttggaagttagctgtgatcctgtcataggtaacggccaaaaaggagacatgttctggaagagggtggtggaacgatataattttcggaggggggcaaactcagaaagaagcctcaggtctctgcagagccgctggaccaataatatcaagcctgaggttggaaaatttgcaggctactatgcagaagccctgcgacaaaatcccagtggaatgtcagatgctgacaaaacatcacttgcagctaccaactttgcggaggttgaagggcatgcgtttggattcatgcactgttggggccgtatgaaggacgagcccaaatggggtaacccaacacaacttgggactgaagctcatctagaaggcgacggcttggaagaggactccaacagggtgcacggtgatgcagacaagtcagctggaaaaaggccggttggtagggacagagctaaagcagcgaacaagaaatctaaatcggtgtcaggtgatacatcttcttcagagtacgctagtaggatgcaggacctgtccattcaaaaaataaatatcatgcaagaagaaagcgtgcgcaaaggcgagcgattccagcagcttgctacaattgatgagaaaaggtaccaggaaatgtgtagtcacaaccaatcggtattagatattgagcaagagaaagttagaatcatgcgtgagaagcatgacagggaggagaagaaggaggatgagaggattctgagtattaatttggactcctgcacaccttccctgagaatgtattatgaagctttgcaggaggacataatggcgaagcttgctgctagacgccaagggaggcatgccccataaggctctcatgtgttgctgttagaataattttcccatatgctattatgtagtaattgttagaacaattgcattattcaatcctgttgtactggtgaggacaattttccacaattcagtcatgttgtaactgtgtgtattaatttgtgaggacaatttccattttttatgattgcagaataatatgctcacattattatgatatgtgcactatccatttttatgtgcactgtccattattatgatatgtgcacttcctttgaa

SEQ ID NO: 61789 - DNA, 2414 bp, Zea Mays
gaagaagtcggatctgctcagggaagcgcaaaggggaaccgcaagcgacgacgttcgaaggaggtagaggcatcatcggaggagagttccaccgcgcggtctgctcgtccatttcgtcgatttaggtaatttatgaatccagtagatcttgttttgaatgagattcattgtttgtgaacttgttttgaatgagattcaaatatatatgtatgtgtgtgaactctgaaatacttatttataggctaacaatgtgtctaacgatttcttgatatatacacctgtccagaggcggatctacagtgtgggcaatgtgggccatggccccacatcaatttttgtaatattcataataccatataggattagattagagggagcaggagtctcaggtccatttcgttccagcgtccatccggtcacggcccatgccccattggcccattcgttgttcacccaggaggccagaatctcagctctttcgtcacgtcttgtgttggccgcctgccgccgccggccgcctgcatcccaccgcggcatcgccgatcgcgtcatcgcgacatcgccccacaccacaggacaccacataatagatatgtgaataatcaaggccatgtgatggaacggtttcttgccctcaagcatgtcaaggatactacatcagatgccttgaaggaagctatttttggccttcttgatcaccatggattatctatatccaagataagggggcaaggatatgatggagcatcgaatatgcgagcaagtgttgagagaatattttcggcaatgaacatcattaagagagaattgcgtaacaaaattgaagatgattggatgaatgatttgatggtttgctatacggagaaagagatattcaaatcccttgatgatgagattattactagaagattccagcgtcttaaaactagaagaatgcaattgcctcgagtcacaactacaagattgacaacttagtgattggatttttgttggtgattttggtgtcgcactgcaaattaagagagaaatttcggatggatggcacacacaacagcaggggtgatagctcacagccgcaaggtcaagctggttggaacccataccagccccctcctccacctgcctggaacccatacatgtttccaatgcaacctcagcctgtatcagttgaccacactcaagcgaatgtggttctgggggctgatgaggtagatgtacttcatccagaggattcagtaccttcaatcctgaaacgaggaaggactaagttagggaacttcagcccacaagaagatgtaaacctggtgaaagcatggttggaagttagctgtgatcctgtcataggtaacggccaaaaaggagacatgttctggaagagggtggtggaacgatataattttcggaggggggcaaactcagaaagaagcctcaggtctctgcagagccgctggaccaataatatcaagcctgaggttggaaaatttgcaggctactatgcagaagccctgcgacaaaatcccagtggaatgtcagatgctgacaaaacatcacttgcagctaccaactttgcggaggttgaagggcatgcgtttggattcatgcactgttggggccgtatgaaggacgagcccaaatggggtaacccaacacaacttgggactgaagctcatctagaaggcgacggcttggaagaggactccaacagggtgcacggtgatgcagacaagtcagctggaaaaaggccggttggtagggacagagctaaagcagcgaacaagaaatctaaatcggtgtcaggtgatacatcttcttcagagtacgctagtaggatgcaggacctgtccattcaaaaaataaatatcatgcaagaagaaagcgtgcgcaaaggcgagcgattccagcagcttgctacaattgatgagaaaaggtaccaggaaatgtgtagtcacaaccaatcggtattagatattgagcaagagaaagttagaatcatgcgtgagaagcatgacagggaggagaagaaggaggatgagaggattctgagtattaatttggactcctgcacaccttccctgagaatgtattatgaagctttgcaggaggacataatggcgaagcttgctgctagacgccaagggaggcatgccccataaggctctcatgtgttgctgttagaataattttcccatatgctattatgtagtaattgttagaacaattgcattattcaatcctgttgtactggtgaggacaattttccacaattcagtcatgttgtaactgtgtgtattaatttgtgaggacaatttccattttttatgattgcagaataatatgctcacattattatgatatgtgcactatccatttttatgtgcactgtccattattatgatatgtgcacttcctttgaa

SEQ ID NO: 61790 - DNA, 2442 bp, Zea Mays
gaagaagtcggatctgctcagggaagcgcaaaggggaaccgcaagcgacgacgttcgaaggaggtagaggcatcatcggaggagagttccaccgcgcggtctgctcgtccatttcgtcgatttaggtaatttatgaatccagtagatcttgttttgaatgagattcattgtttgtgaacttgttttgaatgagattcaaatatatatgtatgtgtgtgaactctgaaatacttatttataggctaacaatgtgtctaacgatttcttgatatatacacctgtccagaggcggatctacagtgtgggcaatgtgggccatggccccacatcaatttttgtaatattcataataccatataggattagattagagggagcaggagtctcaggtccatttcgttccagcgtccatccggtcacggcccatgccccattggcccattcgttgttcacccaggaggccagaatctcagctctttcgtcacgtcttgtgttggccgcctgccgccgccggccgcctgcatcccaccgcggcatcgccgatcgcgtcatcgcgacatcgccccacaccacaggacaccacatagtactttcatattttatttgcatattgtagtttcatattttattttcatgttgtgttgcctagctaactaattatttttgtaagatagatatgtgaataatcaaggccatgtgatggaacggtttcttgccctcaagcatgtcaaggatactacatcagatgccttgaaggaagctatttttggccttcttgatcaccatggattatctatatccaagataagggggcaaggatatgatggagcatcgaatatgcgagcaagtgttgagagaatattttcggcaatgaacatcattaagagagaattgcgtaacaaaattgaagatgattggatgaatgatttgatggtttgctatacggagaaagagatattcaaatcccttgatgatgagattattactagaagattccagcgtcttaaaactagaagaatgcaattgcctcgagtcacaactacaagattgacaacttagtggatggatggcacacacaacagcaggggtgatagctcacagccgcaaggtcaagctggttggaacccataccagccccctcctccacctgcctggaacccatacatgtttccaatgcaacctcagcctgtatcagttgaccacactcaagcgaatgtggttctgggggctgatgaggtagatgtacttcatccagaggattcagtaccttcaatcctgaaacgaggaaggactaagttagggaacttcagcccacaagaagatgtaaacctggtgaaagcatggttggaagttagctgtgatcctgtcataggtaacggccaaaaaggagacatgttctggaagagggtggtggaacgatataattttcggaggggggcaaactcagaaagaagcctcaggtctctgcagagccgctggaccaataatatcaagcctgaggttggaaaatttgcaggctactatgcagaagccctgcgacaaaatcccagtggaatgtcagatgctgacaaaacatcacttgcagctaccaactttgcggaggttgaagggcatgcgtttggattcatgcactgttggggccgtatgaaggacgagcccaaatggggtaacccaacacaacttgggactgaagctcatctagaaggcgacggcttggaagaggactccaacagggtgcacggtgatgcagacaagtcagctggaaaaaggccggttggtagggacagagctaaagcagcgaacaagaaatctaaatcggtgtcaggtgatacatcttcttcagagtacgctagtaggatgcaggacctgtccattcaaaaaataaatatcatgcaagaagaaagcgtgcgcaaaggcgagcgattccagcagcttgctacaattgatgagaaaaggtaccaggaaatgtgtagtcacaaccaatcggtattagatattgagcaagagaaagttagaatcatgcgtgagaagcatgacagggaggagaagaaggaggatgagaggattctgagtattaatttggactcctgcacaccttccctgagaatgtattatgaagctttgcaggaggacataatggcgaagcttgctgctagacgccaagggaggcatgccccataaggctctcatgtgttgctgttagaataattttcccatatgctattatgtagtaattgttagaacaattgcattattcaatcctgttgtactggtgaggacaattttccacaattcagtcatgttgtaactgtgtgtattaatttgtgaggacaatttccattttttatgattgcagaataatatgctcacattattatgatatgtgcactatccatttttatgtgcactgtccattattatgatatgtgcacttcctttgaa

SEQ ID NO: 61791 - DNA, 2105 bp, Zea Mays
ggcctgtgtggtgtgcaaagttctcttggcttagcttttgtaatattcctcctaggttgattccactttctacaagtaaaatcaatacattatataataataaattgttgtattttagaagtagaaaaaatatacttgcctcttttttgcagtcccattgagtggacacttggaactagcttgtctatgacctttttctccacatcgaatgcaagtcattggtccccttgtcattttctgtccctttgcattgattggaacagcaccattttcgccttcgttagcaccttcaacatttttctttttttggccaccttccaaacatccttttagtcttagtttccttcgtctccctgcacttcccttagcaagtggtgcgccaacagcaaaaggtagttctacttgtggccattgggttttatctgtcaatggctcaatctctctgctgtaagcagccttgaatttattcacagagaagtactcatgcacaaactgttcaatgtccactcctcgttgtctggttacaaatgccaatacatgttgacatggtttaccagtgtgctgccattcaagacatgtacaagtcctttgatttaatttgacaatgtgcctttcaattttgttgttgtggtcccaaatctctgcactccaattagcagatggtacaattttcaaatgccccaaccctctagtatttgctttgagctggaccataattgctggaagtatccttttttcaggtagcatggatccaatatttcttcgcttgttccataattgcatgatcatctctctaaccttatcagcaagctcagccacaggcaagtctttaatgtcccttatccagttattgaatacctctgctaaattattagtaatgtaatcacatttaatttctgtattgaaagcacatctgtaccactttaacttatgattagcttgtaaccatttcaacacttctgttgattcatttagaatggaggccatatgttcatagaatatgtcatctctgtaagctcttgctgcaggatacatcttgccaaagcctctaaattttttctgaaaatttttcataagatgaagaatgcattctctttgctccgcacttgggaaaacattctttactgcattctccaagcccttacaagcatctgtgcaaacagcaagtagtggaggatcacctattgccttctttagttgttgcataaaccaagtccagttattttctgtttcagaagctatgaaaccataagcaagtggatacatccaattatgtccatcgactcatacagctgctgccaaatgaccattccaccttccattaagtgttgtcgaatctatactcaaataaggcctacaaccttccaagaaaccatcaatacatggttttagagcacagaaaaaacgattgaaatatacttgaccatccacatcaagtacatcaatctccactacactcccaggagacctcttaagtacctcagccttccatctaaacaacaactcaaaattgtcttcccatttaccataaatttccgcaagggctttttccttacccctccatacagtgtcataagaaattgtgacagaatattgtttctgtagcttatcctgtaattccttggcacccattttaggagattctctaagaatagtcacggccttactagctacccacttctgtgatggagttatagttttcatcctcatgttagacatacaggtatggtggttagttaaggctgtcacctacacaaataataaccaatgagaatcaaagtaatttatggaatcaaataataattggaaaaagaaaaaaaatatttacctctacaatgctttcctctttatgtttggtgccatttattttccaaggacaatcaagactagacttgcaaaaacacctatacctctttttatctgacttctctgtccctaaagtaaactccttattgatggcaaattgtcgtactgccatcttgaactcctccattgttgggtagattgtaccaatatccattatagggtggtccttatcatacgaaataaccatctcacttggtagaacatcactagtacgaaagcaatcatcatcattatcaacc

SEQ ID NO: 61792 - DNA, 158 bp, Zea Mays
ctcgtgtagaaggtaaaaagaattaacaaatcatttatccactgtatagtctcctctttggagtcatcttgtttggtgcagacgttgctggaactctcacaggatttgtggtactggtctgggaagaactgccctctcctaacaagaacgcaaggcgg

SEQ ID NO: 61793 - DNA, 1358 bp, Zea Mays
atggcgccaatgttctgcccgagagctggaggcgtggaggcaaaccgcaatgccgagacaatggcacgcatgctgctagctggtaagtctcagaagaccgtgttggctgtctctccaggtacagtatcagtatgcttgtccagggcggctgtttcacaccaccaccagttgtctctagattatcacctaatttgatgattcaatatggtcgcgttgcttaagatcaacgggaggtgaaactctaggttctggccttgtttactgacaccctctccagttggcgactaaagtttgccccttcttccacactgtgatcaaaatcatctatctcaagcaatttgccaatccttgaagcactctcactgtgcatgagatcctaggaaactaatctttggcaaatggcaatggacagactttgagatctcccaggcacatgacatgaatgaatatgctagattaagccaataaaaaaattgccggggacctgcctagttgtatggattaaagtacaggtccaacaattcttctatgaatagaaagaggaggtattggaactctgctttgaccaatataatggagtacacatgtctctctgaaggcctataaaactacccttcctttgtcctgctttccctctccttccgtttctgttagtttaatgacagacatacctaaaaagcaagcagggctgaacagttagttatgcggccgttaaactgtgtaagcttcttgcttgggctggccgtcgtctcggacacccttggccccttcgtcgccatcgcgcatagagaattactctcagtaactggcagcaaggggggagcagatatcaagctggaactcagtgttggcaagatcaggacaggtgaggagaccgccagaagcaacgtactgacaggtcgaaggctggctttcggagatgcagtcatggagcagaaggaaacagagaattccggaatcagaacagactcaggtgcaaaatatgctgttggaaaatgcggacatggaggagggaaggacttaagtatgaattgtagcaaacatacaccgaaggtttacttcgatggacacattcccttcactgctgattaccgttcaccccggaaacaccctcccaagaacaactagaagtagatagggtatacccatgtagcatataactagcatgttttcctctcatttttcttttggtttgccatcctaaatgtcgaatatggctttttccttcttgttagatacatgtgtttagttatggctaaaaaaaataactggtccttctcctcctatgtggtgaatcatgatacttatgttccacttcttttggtagactaacctctactctaagtgctatgattgag

SEQ ID NO: 61794 - DNA, 1450 bp, Zea Mays
gtcctctatgcccgtgacccctgcctgtcgctgaagggagcggtggctagggtttcgaccatctctagcagtttcgccgtcctccagcgagagctccaaccgtgtctgctatcctgcggttcccagtgaaagggactcaagtgattcagaagatgacttgagagttcttcaagttattattgggaaccaaaaaaatattgtggctgttgcatctcttttatcatgctactatgcatcatatgttgataagaatgagccaagggcaacaacattttctggtattgcttgggtcatggaagcattgaacaatccaaaagaatgctacaacatgtttaggatggaaccaactctattatacaatttgcatgatgagttggtaagagactttggtctatcctcttccatccatatgagcttatggaatctttaggattgtttcttgttatttgtggtcatgcttggtcattcactgtcgtccaaaaggatttcaagcactctaatgaaacaattagcagcaaattcagtgatgtcctgaattgcatggtagcaatgtcaaaaaggtacatacaaccaaaggaccctaatttccatacagtgcatagaaggattaccaatgatcaaagaatgtggcctcactttaagggttgtattggagcaattgacgacactcatataaatgcaacgcctccaaagaaagacttcatcaggttcatgggaaggtctggtaaacctactcaaaatgtgatgggagttgttgattttgatatgcgctttatatatgcatctattggacaacctggctccatgcataatactactgtgttgtaccatgcgcttgaagctgatgaagatttatttccacaccccctctagtactatgttgttgatgctggatatccaaatagggatgggtacttggccccgtacaaaggacaacgatatcatgttccggaatggagaaatggtcctccacctaatggtgagcaagagctcttcaatcatttacactcaagtctatagaatgttgttaaacgcacatttggtgtatggaagatgaaatggagaattcttctaaagatgccaacttatcctatggacaaacaaaaaatgattgttgctgctacaatgtgtcttcacaatttcatccgtgagaatagtgcattggatgaggattttcagagatgtgatcgagacccagattatatccctactattccatcccgttataggtgacatgtccctcagaatgcatcagatacatccaccacagggtcgagtagtaggaacatgaataggttctgtgatgatgtatcgaaggtactttgggagtcgaggtgattagaaaaggtggttcgtgtcatattttggatattgtgtcgtgctagttttatgcaatttatggattaaacattgcgaccattttatgcactactatgatgggaatatttta

SEQ ID NO: 61795 - DNA, 728 bp, Zea Mays
ctccccttaaagtttgatcaaaattacccgcaattgccattggacaaaaacataacgagcccctcccgcaaccctccacgacgcgcgtcctctatgcccgtgacccctgcctgtcgctgaagggagcggtggctagggtttcgaccatctctagcagtttcgccgtcctccagcgagagctccaaccgtgtctgctatcctgcggttcccaggaaaaccaaatctgcggccaaactatccattacccccagtggagcatttaaacatggtttattttgcttgagaggaaacctaagtcccagtcgctctgctatccgtcaagtggtactacaccacaaattctggagggtgaaaccactgagaacactaatgacaaggatggagactatgaggccaatgatgacaaggatgaagactatgaagaatgtgaagaggtttcccctgcaactactaaaggaaagcgtcatgtttctgttggtcaaaaggacaagggtaaaaagcccagtgttggaacttgctcttcggtgcaaggtgatccaatgggggtgtgatgtgacgtaaacagggttctcgcacgagatggcaatagctctgttaatctagcctctcaagggcactgtgcgggggtatttataggtatctgagtgcccagcgtcctgtgttaaggacgcatgtgccctcagacacctaggttatccccggaatattcccataaagcggggttacag

SEQ ID NO: 61796 - DNA, 3539 bp, Zea Mays
atgccctgtttgtctgctctcactagccgaccctccttggctcccataccgcatcatgacatctttgtccgcatttatttatgtactcttgttgccatctcggccgacgaagaaaagcgcaggaataacggccacacaaacaaaccgggattccggtcagtgcgcaggctctctgctccagtaaacttggcagcggtttcaggaagctgctggctgctgctagctctcagtctcagtctcagtctcagtctcatacatacatacatatacagcagctggtggggtgtctaggtctctcgtactcgtcggtacacgcttgccaatccatccaaacccgctgtatctgcgctagctggtgtccgaccgtgtctgccatggcttcttctccacgcacagccatgttcttcctcgcgctgtccctggcgctactgggcgacgaccttcgccgctgctctgcctctcaggtgtacgtggtctacatgggcaaagcgccgcagggcgacagggcaccccgtcgacgacgacacgccgggctgcaccgccagatgctgacggctgttcacgacggcagctcggagaaggcgcaggcatcacacgtctacacttacagcgccggcttccagggcttcgcggccaaactgaacgaaaagcaggccatcagattagccgagatgcctggcgtcgtctcggtgttcccaaacacaaagaggcgactgcgcaccacccattcctgggatttcatgggcttgtccaccagtgcagagggtcaggtccctggactgtccaccgagaaccaggagaacgtcattgttggattcatcgatacaggtgatggagtacaattgcagtaacatgtatactaagctagctaggttcaaactggaactcgcattcttcagtcagatcatgtgacaccaaaagaatatatatcttctcttccaccatattagttccagttgtgttctagcttacaaactgacaaggcatgatgtttgtgttttcatgttcgaccgacttggccatcaaatgactgttcggacagaaacgaaaaaggataccatcggatcgatagaaaccaaaatcatggaattctagctaactgttttgttttgttttttttttacctcctcaggaatctggccagaatcccctagtttcagtgaccacgggatgcctccggttcccaaaagatggagagggcaatgccaaggaggagacgcgaactcaccgtcaaatttcacctgcaacaggaaggtaataggaggcagatattacctcagcggataccaaacagaagagggtggcgccatcaagttcgtatctccaagggacagctcggggcatggcagccacactgcctcgatagcggccggaaggtttgtcagggacatgagctacggaggtggtctgggcaccggaggagggcggggaggagcccccatggcaaggattgcagcctacaaggcctgctgggaaactggctgctacgatgttgacattctcgcggcgttcgacgatgccatcagagacggcgtcgacattatatctgtgtcgctaggcccagactacccccagggcgactacctcagcgacgccatatccatcgggtcgttccacgcgacgagcaacgggatactggtcgtttcctcggcggggaacgccgggagacagggctcggcgactaacctcgcgccgtggatgctcacggtggctgcaggaacgactgacagatcgttctcttcgtatgtcagcctggcaaacggtacctccgtaatgggtgagagcctgagtacgtaccgcatggaaactcccgtcagaaccatcgcagcttcggaagtcaacgcaggctatttcaccccttaccagtccagcttgtgcctggatagctctttgaacaggaccaaggccaagggaaagatccttatctgccgccgtaaccaaggctcctccgagtcacgtctatcgacgagcatggttgtgaaggaagctggtgcggctgggatgatcctcatcgatgagatggaggatcatgtcgctaatcgctttgctgtgcctggagtaactgttgggaaagccatgggtgataaaattgtttcttatgtcaagagcacaaggcgtgcctgcacactgatcttgccggcaaagacggtcttagggctgcgagacgccccgcgagtagcggcgttctcttcgagaggtccgagctcactgacacctgagattctgaagccagatgttgctgctcctgggctgaacatcttggcggcgtggtctcctgccaagaacggtatgcgcttcaacgttctatctggaacttccatggcatgtccgcacgttacaggaatagcagctctcgtgaagagcgtgtatccgtcatggtctccttcaggcatcaaatcggcaatcatgacaacagcaaccgtactggacaccaaaaggaaaaccatagcaagggaccccaatgggggggctgcaacgccgtttgactttggctcgggttttatggaccccgtcaaagctctcagcccagggatcatcttcgatacacatcctgaagactacaagtcattcttatgtgccataataagccgcgatgaccactccgtgcatctaatcaccggagacaacagtagctgcacccacagagcctcctcttctgccactgctctgaactacccgtcgatcaccgttccgtatctgaagcagagctattcggtgacgcgaacaatgactaatgtgggcaatccaaggagtacttaccatgctgtggtgtcagctccgccaggaaccagcgtgagagtgacaccagaagtcataaatttcaagagctatggtgaaaagaggatgttcgcagttagcttacacgtggatgtgcctcctcgaggttacgtttttggctctttgtcttggcatggaaatggaagtgatgctcgcgtgacgatgccgctggtagtgaaactacagacttctggcaaggcctgaccgagttgatccccctggaaagatgcttggaagaggttgctagaatgctagatcaggctacaaatctaggtggtactagaactggaaatactgaccatatcagaagctaaccgcgatcaatctgtgaaaaatatcatattaactatggtatttcatttgtaaatgtcttggctagaacgcaagcactcccagaacaagattcttttttcctcctgatgattgttgtaaaattatttcgtgcctaaatgcaaatcttaagaatgcaggaattgttgggtttctttttctgcggaagaggaatttttggatttagcgaccagctaactaacgcccccaggcttatccaccaggattctggtctttgtaaagggtaggtttggtgacaaggggattgagggagattagaaaggattaagggggaaatgaactaatttccccctcaatcccgctcaatttcttcaccaaaccagccctaatgatgacggatccgacacctcctgaactccatcgatggtgttcgctggttagtacaggaacttgtcgccccgataggaaat

SEQ ID NO: 61797 - DNA, 3524 bp, Zea Mays
atgccctgtttgtctgctctcactagccgaccctccttggctcccataccgcatcatgacatctttgtccgcatttatttatgtactcttgttgccatctcggccgacgaagaaaagcgcaggaataacggccacacaaacaaaccgggattccggtcagtgcgcaggctctctgctccagtaaacttggcagcggtttcaggaagctgctggctgctgctagctctcagtctcagtctcagtctcagtctcatacatacatacatatacagcagctggtggggtgtctaggtctctcgtactcgtcggtacacgcttgccaatccatccaaacccgctgtatctgcgctagctggtgtccgaccgtgtctgccatggcttcttctccacgcacagccatgttcttcctcgcgctgtccctggcgctactgggcgacgaccttcgccgctgctctgcctctcaggtgtacgtggtctacatgggcaaagcgccgcagggcgacagggcaccccgtcgacgacgacacgccgggctgcaccgccagatgctgacggctgttcacgacggcagagatgcctggcgtcgtctcggtgttcccaaacacaaagaggcgactgcgcaccacccattcctgggatttcatgggcttgtccaccagtgcagagggtcaggtccctggactgtccaccgagaaccaggagaacgtcattgttggattcatcgatacaggtgatggagtacaattgcagtaacatgtatactaagctagctaggttcaaactggaactcgcattcttcagtcagatcatgtgacaccaaaagaatatatatcttctcttccaccatattagttccagttgtgttctagcttacaaactgacaaggcatgatgtttgtgttttcatgttcgaccgacttggccatcaaatgactgttcggacagaaacgaaaaaggataccatcggatcgatagaaaccaaaatcatggaattctagctaactgttttgttttgttttttttttacctcctcaggaatctggccagaatcccctagtttcagtgaccacgggatgcctccggttcccaaaagatggagagggcaatgccaaggaggagacgcgaactcaccgtcaaatttcacctgcaacaggaaggtaataggaggcagatattacctcagcggataccaaacagaagagggtggcgccatcaagttcgtatctccaagggacagctcggggcatggcagccacactgcctcgatagcggccggaaggtttgtcagggacatgagctacggaggtggtctgggcaccggaggagggcggggaggagcccccatggcaaggattgcagcctacaaggcctgctgggaaactggctgctacgatgttgacattctcgcggcgttcgacgatgccatcagagacggcgtcgacattatatctgtgtcgctaggcccagactacccccagggcgactacctcagcgacgccatatccatcgggtcgttccacgcgacgagcaacgggatactggtcgtttcctcggcggggaacgccgggagacagggctcggcgactaacctcgcgccgtggatgctcacggtggctgcaggaacgactgacagatcgttctcttcgtatgtcagcctggcaaacggtacctccgtaatggtaaattcccttcccactcttaaaaacgacgcctccagtctttatatgcggaacactacttattatatgcggtcttaattaagggtgagagcctgagtacgtaccgcatggaaactcccgtcagaaccatcgcagcttcggaagtcaacgcaggctatttcaccccttaccagtccagcttgtgcctggatagctctttgaacaggaccaaggccaagggaaagatccttatctgccgccgtaaccaaggctcctccgagtcacgtctatcgacgagcatggttgtgaaggaagctggtgcggctgggatgatcctcatcgatgagatggaggatcatgtcgctaatcgctttgctgtgcctggagtaactgttgggaaagccatgggtgataaaattgtttcttatgtcaagagcacaaggcgtgcctgcacactgatcttgccggcaaagacggtcttagggctgcgagacgccccgcgagtagcggcgttctcttcgagaggtccgagctcactgacacctgagattctgaagccagatgttgctgctcctgggctgaacatcttggcggcgtggtctcctgccaagaacggtatgcgcttcaacgttctatctggaacttccatggcatgtccgcacgttacaggaatagcagctctcgtgaagagcgtgtatccgtcatggtctccttcaggcatcaaatcggcaatcatgacaacagcaaccgtactggacaccaaaaggaaaaccatagcaagggaccccaatgggggggctgcaacgccgtttgactttggctcgggttttatggaccccgtcaaagctctcagcccagggatcatcttcgatacacatcctgaagactacaagtcattcttatgtgccataataagccgcgatgaccactccgtgcatctaatcaccggagacaacagtagctgcacccacagagcctcctcttctgccactgctctgaactacccgtcgatcaccgttccgtatctgaagcagagctattcggtgacgcgaacaatgactaatgtgggcaatccaaggagtacttaccatgctgtggtgtcagctccgccaggaaccagcgtgagagtgacaccagaagtcataaatttcaagagctatggtgaaaagaggatgttcgcagttagcttacacgtggatgtgcctcctcgaggttacgtttttggctctttgtcttggcatggaaatggaagtgatgctcgcgtgacgatgccgctggtagtgaaactacagacttctggcaaggcctgaccgagttgatccccctggaaagatgcttggaagaggttgctagaatgctagatcaggctacaaatctaggtggtactagaactggaaatactgaccatatcagaagctaaccgcgatcaatctgtgaaaaatatcatattaactatggtatttcatttgtaaatgtcttggctagaacgcaagcactcccagaacaagattcttttttcctcctgatgattgttgtaaaattatttcgtgcctaaatgcaaatcttaagaatgcaggaattgttgggtttctttttctgcggaagaggaatttttggatttagcgaccagctaactaacgcccccaggcttatccaccaggattctggtctttgtaaagggtaggtttggtgacaaggggattgagggagattagaaaggattaagggggaaatgaactaatttccccctcaatcccgctcaatttcttcaccaaaccagccctaatgatgacggatccgacacctcctgaactccatcgatggtgttcgctggttagtacaggaacttgtcgccccgataggaaat

SEQ ID NO: 61798 - DNA, 3535 bp, Zea Mays
atgccctgtttgtctgctctcactagccgaccctccttggctcccataccgcatcatgacatctttgtccgcatttatttatgtactcttgttgccatctcggccgacgaagaaaagcgcaggaataacggccacacaaacaaaccgggattccggtcagtgcgcaggctctctgctccagtaaacttggcagcggtttcaggaagctgctggctgctgctagctctcagtctcagtctcagtctcagtctcatacatacatacatatacagcagctggtggggtgtctaggtctctcgtactcgtcggtacacgcttgccaatccatccaaacccgctgtatctgcgctagctggtgtccgaccgtgtctgccatggcttcttctccacgcacagccatgttcttcctcgcgctgtccctggcgctactgggcgacgaccttcgccgctgctctgcctctcaggtgtacgtggtctacatgggcaaagcgccgcagggcgacagggcaccccgtcgacgacgacacgccgggctgcaccgccagatgctgacggctgttcacgacggcagctcggagaaggcgcaggcatcacacgtctacacttacagcgccggcttccagggcttcgcggccaaactgaacgaaaagcaggccatcagattagccgagatgcctggcgtcgtctcggtgttcccaaacacaaagaggcgactgcgcaccacccattcctgggatttcatgggcttgtccaccagtgcagagggtcaggtccctggactgtccaccgagaaccaggagaacgtcattgttggattcatcgatacaggtgatggagtacaattgcagtaacatgtatactaagctagctaggttcaaactggaactcgcattcttcagtcagatcatgtgacaccaaaagaatatatatcttctcttccaccatattagttccagttgtgttctagcttacaaactgacaaggcatgatgtttgtgttttcatgttcgaccgacttggccatcaaatgactgttcggacagaaacgaaaaaggataccatcggatcgatagaaaccaaaatcatggaattctagctaactgttttgttttgttttttttttacctcctcaggaatctggccagaatcccctagtttcagtgaccacgggatgcctccggttcccaaaagatggagagggcaatgccaaggaggagacgcgaactcaccgtcaaatttcacctgcaacaggaaggtaataggaggcagatattacctcagcggataccaaacagaagagggtggcgccatcaagttcgtatctccaagggacagctcggggcatggcagccacactgcctcgatagcggccggaaggtttgtcagggacatgagctacggaggtggtctgggcaccggaggagggcggggaggagcccccatggcaaggattgcagcctacaaggcctgctgggaaactggctgctacgatgttgacattctcgcggcgttcgacgatgccatcagagacggcgtcgacattatatctgtgtcgctaggcccagactacccccagggcgactacctcagcgacgccatatccatcgggtcgttccacgcgacgagcaacgggatactggtcgtttcctcggcggggaacgccgggagacagggctcggcgactaacctcgcgccgtggatgctcacggtggctgcaggaacgactgacagatcgttctcttcgtatgtcagcctggcaaacggtacctccgtaatgggtgagagcctgagtacgtaccgcatggaaactcccgtcagaaccatcgcagcttcggaagtcaacgcaggctatttcaccccttaccagtccagcttgtgcctggatagctctttgaacaggaccaaggccaagggaaagatccttatctgccgccgtaaccaaggctcctccgagtcacgtctatcgacgagcatggttgtgaaggaagctggtgcggctgggatgatcctcatcgatgagatggaggatcatgtcgctaatcgctttgctgtgcctggagtaactgttgggaaagccatgggtgataaaattgtttcttatgtcaagagcacaaggcgtgcctgcacactgatcttgccggcaaagacggtcttagggctgcgagacgccccgcgagtagcggcgttctcttcgagaggtccgagctcactgacacctgagattctgaagatgttgctgctcctgggctgaacatcttggcggcgtggtctcctgccaagaacggtatgcgcttcaacgttctatctggaacttccatggcatgtccgcacgttacaggaatagcagctctcgtgaagagcgtgtatccgtcatggtctccttcaggcatcaaatcggcaatcatgacaacagcaaccgtactggacaccaaaaggaaaaccatagcaagggaccccaatgggggggctgcaacgccgtttgactttggctcgggttttatggaccccgtcaaagctctcagcccagggatcatcttcgatacacatcctgaagactacaagtcattcttatgtgccataataagccgcgatgaccactccgtgcatctaatcaccggagacaacagtagctgcacccacagagcctcctcttctgccactgctctgaactacccgtcgatcaccgttccgtatctgaagcagagctattcggtgacgcgaacaatgactaatgtgggcaatccaaggagtacttaccatgctgtggtgtcagctccgccaggaaccagcgtgagagtgacaccagaagtcataaatttcaagagctatggtgaaaagaggatgttcgcagttagcttacacgtggatgtgcctcctcgaggttacgtttttggctctttgtcttggcatggaaatggaagtgatgctcgcgtgacgatgccgctggtagtgaaactacagacttctggcaaggcctgaccgagttgatccccctggaaagatgcttggaagaggttgctagaatgctagatcaggctacaaatctaggtggtactagaactggaaatactgaccatatcagaagctaaccgcgatcaatctgtgaaaaatatcatattaactatggtatttcatttgtaaatgtcttggctagaacgcaagcactcccagaacaagattcttttttcctcctgatgattgttgtaaaattatttcgtgcctaaatgcaaatcttaagaatgcaggaattgttgggtttctttttctgcggaagaggaatttttggatttagcgaccagctaactaacgcccccaggcttatccaccaggattctggtctttgtaaagggtaggtttggtgacaaggggattgagggagattagaaaggattaagggggaaatgaactaatttccccctcaatcccgctcaatttcttcaccaaaccagccctaatgatgacggatccgacacctcctgaactccatcgatggtgttcgctggttagtacaggaacttgtcgccccgataggaaat

SEQ ID NO: 61799 - DNA, 3591 bp, Zea Mays
atgccctgtttgtctgctctcactagccgaccctccttggctcccataccgcatcatgacatctttgtccgcatttatttatgtactcttgttgccatctcggccgacgaagaaaagcgcaggaataacggccacacaaacaaaccgggattccggtcagtgcgcaggctctctgctccagtaaacttggcagcggtttcaggaagctgctggctgctgctagctctcagtctcagtctcagtctcagtctcatacatacatacatatacagcagctggtggggtgtctaggtctctcgtactcgtcggtacacgcttgccaatccatccaaacccgctgtatctgcgctagctggtgtccgaccgtgtctgccatggcttcttctccacgcacagccatgttcttcctcgcgctgtccctggcgctactgggcgacgaccttcgccgctgctctgcctctcaggtgtacgtggtctacatgggcaaagcgccgcagggcgacagggcaccccgtcgacgacgacacgccgggctgcaccgccagatgctgacggctgttcacgacggcagctcggagaaggcgcaggcatcacacgtctacacttacagcgccggcttccagggcttcgcggccaaactgaacgaaaagcaggccatcagattagccgagatgcctggcgtcgtctcggtgttcccaaacacaaagaggcgactgcgcaccacccattcctgggatttcatgggcttgtccaccagtgcagagggtcaggtccctggactgtccaccgagaaccaggagaacgtcattgttggattcatcgatacaggtgatggagtacaattgcagtaacatgtatactaagctagctaggttcaaactggaactcgcattcttcagtcagatcatgtgacaccaaaagaatatatatcttctcttccaccatattagttccagttgtgttctagcttacaaactgacaaggcatgatgtttgtgttttcatgttcgaccgacttggccatcaaatgactgttcggacagaaacgaaaaaggataccatcggatcgatagaaaccaaaatcatggaattctagctaactgttttgttttgttttttttttacctcctcaggaatctggccagaatcccctagtttcagtgaccacgggatgcctccggttcccaaaagatggagagggcaatgccaaggaggagacgcgaactcaccgtcaaatttcacctgcaacagcggataccaaacagaagagggtggcgccatcaagttcgtatctccaagggacagctcggggcatggcagccacactgcctcgatagcggccggaaggtttgtcagggacatgagctacggaggtggtctgggcaccggaggagggcggggaggagcccccatggcaaggattgcagcctacaaggcctgctgggaaactggctgctacgatgttgacattctcgcggcgttcgacgatgccatcagagacggcgtcgacattatatctgtgtcgctaggcccagactacccccagggcgactacctcagcgacgccatatccatcgggtcgttccacgcgacgagcaacgggatactggtcgtttcctcggcggggaacgccgggagacagggctcggcgactaacctcgcgccgtggatgctcacggtggctgcaggaacgactgacagatcgttctcttcgtatgtcagcctggcaaacggtacctccgtaatgggtgagagcctgagtacgtaccgcatggaaactcccgtcagaaccatcgcagcttcggaagtcaacgcaggctatttcaccccttaccagtccagcttgtgcctggatagctctttgaacaggaccaaggccaagggaaagatccttatctgccgccgtaaccaaggctcctccgagtcacgtctatcgacgagcatggttgtgaaggaagctggtgcggctgggatgatcctcatcgatgagatggaggatcatgtcgctaatcgctttgctgtgcctggagtaactgttgggaaagccatgggtgataaaattgtttcttatgtcaagagcacaaggttgtctgaactttactatatataggaaagcgtgcatttcattggcatgccaatctttttttgtctaatagcaattctacaggcgtgcctgcacactgatcttgccggcaaagacggtcttagggctgcgagacgccccgcgagtagcggcgttctcttcgagaggtccgagctcactgacacctgagattctgaagccagatgttgctgctcctgggctgaacatcttggcggcgtggtctcctgccaagaacggtatgcgcttcaacgttctatctggaacttccatggcatgtccgcacgttacaggaatagcagctctcgtgaagagcgtgtatccgtcatggtctccttcaggcatcaaatcggcaatcatgacaacagcaaccgtactggacaccaaaaggaaaaccatagcaagggaccccaatgggggggctgcaacgccgtttgactttggctcgggttttatggaccccgtcaaagctctcagcccagggatcatcttcgatacacatcctgaagactacaagtcattcttatgtgccataataagccgcgatgaccactccgtgcatctaatcaccggagacaacagtagctgcacccacagagcctcctcttctgccactgctctgaactacccgtcgatcaccgttccgtatctgaagcagagctattcggtgacgcgaacaatgactaatgtgggcaatccaaggagtacttaccatgctgtggtgtcagctccgccaggaaccagcgtgagagtgacaccagaagtcataaatttcaagagctatggtgaaaagaggatgttcgcagttagcttacacgtggatgtgcctcctcgaggttacgtttttggctctttgtcttggcatggaaatggaagtgatgctcgcgtgacgatgccgctggtagtgaaactacagacttctggcaaggcctgaccgagttgatccccctggaaagatgcttggaagaggttgctagaatgctagatcaggctacaaatctaggtggtactagaactggaaatactgaccatatcagaagctaaccgcgatcaatctgtgaaaaatatcatattaactatggtatttcatttgtaaatgtcttggctagaacgcaagcactcccagaacaagattcttttttcctcctgatgattgttgtaaaattatttcgtgcctaaatgcaaatcttaagaatgcaggaattgttgggtttctttttctgcggaagaggaatttttggatttagcgaccagctaactaacgcccccaggcttatccaccaggattctggtctttgtaaagggtaggtttggtgacaaggggattgagggagattagaaaggattaagggggaaatgaactaatttccccctcaatcccgctcaatttcttcaccaaaccagccctaatgatgacggatccgacacctcctgaactccatcgatggtgttcgctggttagtacaggaacttgtcgccccgataggaaat

SEQ ID NO: 61800 - DNA, 3653 bp, Zea Mays
atgccctgtttgtctgctctcactagccgaccctccttggctcccataccgcatcatgacatctttgtccgcatttatttatgtactcttgttgccatctcggccgacgaagaaaagcgcaggaataacggccacacaaacaaaccgggattccggtcagtgcgcaggctctctgctccagtaaacttggcagcggtttcaggaagctgctggctgctgctagctctcagtctcagtctcagtctcagtctcatacatacatacatatacagcagctggtggggtgtctaggtctctcgtactcgtcggtacacgcttgccaatccatccaaacccgctgtatctgcgctagctggtgtccgaccgtgtctgccatggcttcttctccacgcacagccatgttcttcctcgcgctgtccctggcgctactgggcgacgaccttcgccgctgctctgcctctcaggtgtacgtggtctacatgggcaaagcgccgcagggcgacagggcaccccgtcgacgacgacacgccgggctgcaccgccagatgctgacggctgttcacgacggcagctcggagaaggcgcaggcatcacacgtctacacttacagcgccggcttccagggcttcgcggccaaactgaacgaaaagcaggccatcagattagccgagatgcctggcgtcgtctcggtgttcccaaacacaaagaggcgactgcgcaccacccattcctgggatttcatgggcttgtccaccagtgcagagggtcaggtccctggactgtccaccgagaaccaggagaacgtcattgttggattcatcgatacaggtgatggagtacaattgcagtaacatgtatactaagctagctaggttcaaactggaactcgcattcttcagtcagatcatgtgacaccaaaagaatatatatcttctcttccaccatattagttccagttgtgttctagcttacaaactgacaaggcatgatgtttgtgttttcatgttcgaccgacttggccatcaaatgactgttcggacagaaacgaaaaaggataccatcggatcgatagaaaccaaaatcatggaattctagctaactgttttgttttgttttttttttacctcctcaggaatctggccagaatcccctagtttcagtgaccacgggatgcctccggttcccaaaagatggagagggcaatgccaaggaggagacgcgaactcaccgtcaaatttcacctgcaacaggtacacacgctctaaaaccaacccacggtacggtattccagcattggaattttctaaagccaccccccaaacatgcacgataggaaggtaataggaggcagatattacctcagcggataccaaacagaagagggtggcgccatcaagttcgtatctccaagggacagctcggggcatggcagccacactgcctcgatagcggccggaaggtttgtcagggacatgagctacggaggtggtctgggcaccggaggagggcggggaggagcccccatggcaaggattgcagcctacaaggcctgctgggaaactggctgctacgatgttgacattctcgcggcgttcgacgatgccatcagagacggcgtcgacattatatctgtgtcgctaggcccagactacccccagggcgactacctcagcgacgccatatccatcgggtcgttccacgcgacgagcaacgggatactggtcgtttcctcggcggggaacgccgggagacagggctcggcgactaacctcgcgccgtggatgctcacggtggctgcaggaacgactgacagatcgttctcttcgtatgtcagcctggcaaacggtacctccgtaatgggtgagagcctgagtacgtaccgcatggaaactcccgtcagaaccatcgcagcttcggaagtcaacgcaggctatttcaccccttaccagtccagcttgtgcctggatagctctttgaacaggaccaaggccaagggaaagatccttatctgccgccgtaaccaaggctcctccgagtcacgtctatcgacgagcatggttgtgaaggaagctggtgcggctgggatgatcctcatcgatgagatggaggatcatgtcgctaatcgctttgctgtgcctggagtaactgttgggaaagccatgggtgataaaattgtttcttatgtcaagagcacaaggcgtgcctgcacactgatcttgccggcaaagacggtcttagggctgcgagacgccccgcgagtagcggcgttctcttcgagaggtccgagctcactgacacctgagattctgaagtttcttctccatgtgtgctttttttttgtagccagatgttgctgctcctgggctgaacatcttggcggcgtggtctcctgccaagaacggtatgcgcttcaacgttctatctggaacttccatggcatgtccgcacgttacaggaatagcagctctcgtgaagagcgtgtatccgtcatggtctccttcaggcatcaaatcggcaatcatgacaacagcaaccgtactggacaccaaaaggaaaaccatagcaagggaccccaatgggggggctgcaacgccgtttgactttggctcgggttttatggaccccgtcaaagctctcagcccagggatcatcttcgatacacatcctgaagactacaagtcattcttatgtgccataataagccgcgatgaccactccgtgcatctaatcaccggagacaacagtagctgcacccacagagcctcctcttctgccactgctctgaactacccgtcgatcaccgttccgtatctgaagcagagctattcggtgacgcgaacaatgactaatgtgggcaatccaaggagtacttaccatgctgtggtgtcagctccgccaggaaccagcgtgagagtgacaccagaagtcataaatttcaagagctatggtgaaaagaggatgttcgcagttagcttacacgtggatgtgcctcctcgaggttacgtttttggctctttgtcttggcatggaaatggaagtgatgctcgcgtgacgatgccgctggtagtgaaactacagacttctggcaaggcctgaccgagttgatccccctggaaagatgcttggaagaggttgctagaatgctagatcaggctacaaatctaggtggtactagaactggaaatactgaccatatcagaagctaaccgcgatcaatctgtgaaaaatatcatattaactatggtatttcatttgtaaatgtcttggctagaacgcaagcactcccagaacaagattcttttttcctcctgatgattgttgtaaaattatttcgtgcctaaatgcaaatcttaagaatgcaggaattgttgggtttctttttctgcggaagaggaatttttggatttagcgaccagctaactaacgcccccaggcttatccaccaggattctggtctttgtaaagggtaggtttggtgacaaggggattgagggagattagaaaggattaagggggaaatgaactaatttccccctcaatcccgctcaatttcttcaccaaaccagccctaatgatgacggatccgacacctcctgaactccatcgatggtgttcgctggttagtacaggaacttgtcgccccgataggaaat

SEQ ID NO: 61801 - DNA, 2889 bp, Zea Mays
aagcacggtttcagttcaaaaccattctccactgttcctccgctccctctgtctcgtcgtctcccatctccggctagggtttgccctttccaccgcgtccgacgcctacctcgcccacgccgtcgattccgtcaatgcttcagcgaaacccgaagcagagggcgcggaggaggaggggggcagcgacaggaaggagcggaatggtggcccgacggcggatttggttggcgaggttgtgaagttggagaatggggacgggcctgtgacggtgggcggctcggtggacgagggtcgaggtggagatggcggtgacgacaaaggcctggctggtcagaatcagcctgctgtgaaccagcttttgctggcgccggctgaggaggatctggcattgtccaagatctcagataattccttcatgttcgattacaccactggtggcgatgactcggggactgaggaggagcaggctgccttcatgaaggagctcgagcgtttccacagggagaaaatgttggagttcaagcctccgaagttttatggcgaaggattgaattgcctcaaattgtggagacaagttactggattgggtggctatgatcaggtgacatcatgcaagctgtggcgtcaagtaggagagtcattcaaacctccaaagacatgcacaactgtttcatggactttccgtaacttctatgagaaggcactccttgaatacgagaaacacaaaatcgaaacaggagagttccaagtagcttcatctgctctaccagaccggtttggttctgagagtcaggtgggtggaagccatgtatctggttctggaagagccagaagagaatctgcaactcgtgcaatgcaaggttggcattctcagcgcctactagggaatggtgaaatcgctgaccctataattaaggataaagggcatattgtcttaaagaaggataaaactcctaaaagcagtggtacctttctgcattatgtttcattttacttctgttctgccattacttactaattgttgtgagtggattggatcttggagaggccccttgatctctccttgtactatctttttcttaatgaaatgaagtgcagctcttatgcattgttcgagaaaaaaatgcttactaatccttgggtctgtaggttctgccaagaggaaaaggacactatccctggaagatgacagggtgataccttataaatctgatcagctacagtaaatcccctgtgcacttataatattcacgcaagccatgcattctatttttctatctattgctgttagaagatcagtaataattgcaacactgcttcacacaattagcttcattctgttcttttgcatggataatcatagtccagcggggcgtaatatccatttgaataactacttaggcttggcatggcattagtttgtttttcttcttcatccttggacttcgattgatttgatgaattattgttatctagcagaaatgactcgatggttattgacatgggcccccctgctgattgggtgaaaataaatgttaggaaaactgtgagtatctgtatctcacctttatctgttgctaaatcttatagctctatgctgtttcttattggtttgttgtttcctcatagttttcagttccattagtttccgattgaaatattgaagcactgaaattgtgccagtgaacgtgtgaaccacttattctttatgaaatgtatatatgtcagttaggtcttgtggttattaaggaaattttcgtgaagaatataggctagccaggaaccagtgaagctatgatcatttgggggcattttgtgaaagagattatgttttaataaatttatttattttcattctattttatttctttcagaaagattgctatgaagtctatgcgttggttcctggccttctgagggaagaggtacatgttcagtccgacccagctggtcgtttgatagttactggagagcctgagcaattggataacccatggggtgtcactccattcaagaaggtcattagtttgccttcccgcattgaccctcaccaaacctccgcagttgtcaccctccatgggcagctatttgtgcgtgcaccatttgaacaatcaaaataatgttgatgccacaatgaataatacaagtttaccgtatgggtggggattattttgttgtgacatgagcttagaatttctcaccctgaccgtcgccaaaaactaggtccttgctgattctaatgcttcaagactcttccgtgctagatctcgcctgtatcaagttaaactcattagttgacatagttctgtgtgtattcgggtgcgcccattggctgtgaattgtagctaaagcaaagttactaagcctagagtttaggatgttaatagcctgatgctcaacatgtccatggtttcttaatttaaccagcacaaagtgtactgtttgtagcaatgcagtatgtagcatgttcccattatttgagctctggaacatggacacaggtaggctcgttgcttgttgccggtgtattgctaattttgctattcaacttgtattgtcaaaagctatggcctccccctgtaacctgccttcttattgtgcgactttgtgattaccaagttagctcttaagatattttacatgatgggctttccgtcaggtctgaatgtgtgtgaggtttgacttacaggccgtgctgtgttggtacaagggcttgttttgtttccatagtgctaaagtttatcacatgttaaattttgctgaagtttagcacttgagggcttttaaaaaaataaaaggctgtagggaaaaccctacaacatgattttattaaataatgagaagagggaacaagaaatggaccaagagaaggaaacacacacaaaaaaa

SEQ ID NO: 61802 - DNA, 420 bp, Zea Mays
accccatcgttgttgtgctcccccattgatgtgcgcggtgcgggtgtgggtggagacaagctaggtagcagcggcacaaccaacagggaagcgggtgcagagaagaggacgatggtgatgctgtggttttggtgtagtaggatgagcttggttgttgtttatataaggtctacttgcttgatggggacgactggaaacaggcgcagcagccggcctagtggaaagtggtttggaggggttgcctgcacggctgcacctgcctgtgtggatttggggggaaaccagtaggaaggatcgggattcagaagggctgcatctatccctgtccaagtatcaccaacttgctatttagtacctcacatgtttagacgatgtaacccttggccttaattatgagtttacagttgggtcaagcacaca

SEQ ID NO: 61803 - DNA, 1395 bp, Zea Mays
aatgagctagtaagaatccacaaaccgataacatcaatagcaactattctcaagttcaacagactcacaatgatctgccagccaagagtgcctaagaaacggtacaaaaacaggatagataaaagggatagataaaagggtgaccaatacggcaatcctacaaatcctaaataaacggccattgcttaatctccatcgaggagagtttgttacagcattaagatcaaatacgagccacagggaaatgctctctctcaggcagcatgtggctcagcacacttcaccatggcgctggcgccactgtccttggtcatggtgttattcagccatacaggcagattaatcaccacaggccacaataagcatgcctgtcaagcagcagcaggtttgcgcagctcaccttcgccatgggcgaagtggcacctgtctccaaaggtgcaggagcctttgttgaagttctcgcacaatttggttttgaagttgcttccaggacccccggcatgagaaccaggccccctacctgggttgttcttggcttgtggaggcggcttaccactgatgcggacaatcaactctgtgaccattgcgctagcgtgcttgatctggtcaaatgttccctcgagctcgatgtttttatggttgggatcagcctcgttgtcccggatggctaacttggccccagtcactcgggatatatgctttgtgttggtaccacccttcccaatgatggcaccagcaagggatgcatcgacgctgatcttggctgtggcggaagcaccgaatgtggagggaggaaccatgtctgggaaaggcattggcggtggcatgaagtgcccgttgggccctggccccattggaggaggtcccatcgggttgtccatctgcaggggctttccaagctccctctctccatgagcaaagtggcacttgctcccccatttacatccttcggcagtgttgtacttgttacacatgcgagtcttcacagcaggtgaaggtggcccatcaggaccaccaggtcccataggcattcttcctggtggagccggaacaggcggtccacccaagttggtcatctttgaaacggcctggtagccacccgggaagttatggagaaaatggcaacttgcaccaaaggggcaacccgcagtgctgcacattgaaaacataatataagcaacagaacatgctaatatatctgacaacctacagatgattttagttgatacacaaatgcaaacaatgttgatggaagagattaagttacatgcagctggataatgcaacctcactagatgactgctaaaaatatatatgcaaagaataaaagctgaagtaaatgatacaaactaatcttttagaaatcatgctttatatagaaatgccattcataat

SEQ ID NO: 61804 - DNA, 1646 bp, Zea Mays
gtcacaatcatgagtagagctggtcgtcttgtgatggtcaaggtattgacaatggagacttttgagcaccttggattttttttgcagctctctgaaggaactccattaagccaagcagctaccttttttgcgaattcggatccagacatgcccgctgctcctgtacctgctgctttggtacatgattgggtcttgcagcatatagcttcagcattagaatttatggcagagaagactgtggcaaaagaaaacagccaacataatgcatttgatcctgatgtcacaatgtctgatgctgtcacgaatacaagaattcatagcagttcaccaactggcagttctgcaccaaactatcctggatactaccgaaatgcatcatttgtggagggttgctcgaaaacttcagttgtcaaacaagcatcggatctgaaagggcattcaataaaggttttgaactgccatgattctgtaatttacattttagccccacttaagtatgcaactgtctatggatgttctgacactaccattattcttggtgctattggtaaggttgttaaagtggagcattgtgaacgtgtacaaattattgcagcttcgaaacgaatttgtattgccaattgtcgtgaatgtatcttctacttgggagtaaatcaccaaccacttattgtaggggataaccataaattacaagttgccccatttaatacttattatccacaactcggggaacatttggcacaagttggtgtggatcctaatgtcaacaagtgggaccaaccttttgtgttgggagttgttgatctgcatgactcattatctcatcctgccggggtttctgatgtccaggctgagtccaccacttgtctagatcctgatctatttacgaactttttgattcctagttggtttgaagtagaaggacctaccaaatacaatccatttaccctgcctgaagtttattgggcgtcccaaaggaaaaagcatgcttctctggaagatattcaaaagaatatccgggagctggagatcgatgatatccggaagaaagaattggcatgtgcccttcatgctcaattcaaagattggttatatgcctcagggaatatccgccagctatactgtttgcaaggcgaatgagcataagatggggttcttgtgtaagcgcgagatgcagcagtacgcgtctgcaagtgcaatccaattccgggcgcctccgaaatctgaaagtgacttccaagctgagttggtgtcgcctgccctgatgcacttggtatttcagctgtagcgtttgtggaggcaagtaactgtaacgtttttgtttgttccaattagtttttaccacttttcccattcagttggccgcaaggtttctgtaaatctttcggtactgttggtttcatatttagaaaattcacaaagcggccactcaattctctttttggaaagtaactttatttttttttcaaatggtgtttggtttttagggactaatgtttagtcccttcattttattccattttagtctctaaattgctagaattttagtttttgtatttgacaatctagggactaatatagaataagatgattagtccttacaaatcaaactccttaacatactgtgtgaactaacgtgaacttgc

SEQ ID NO: 61805 - DNA, 1509 bp, Zea Mays
ggaagtcacaatcatgagtagagctggtcgtcttgtgatggtcaaggtattgacaatggagacttttgagcaccttggattttttttgcagctctctgaaggaactccattaagccaagcagctaccttttttgcgaattcggatccagacatgcccgctgctcctgtacctgctgctttggtacatgattgggtcttgcagcatatagcttcagcattagaatttatggcagagaagactgtggcaaaagaaaacagccaacataatgcatttgatcctgatgtcacaatgtctgatgctgtcacgaatacaagaattcatagcagttcaccaactggcagttctgcaccaaactatcctggatactaccgaaatgcatcatttgtggagggttgctcgaaaacttcagttgtcaaacaagcatcggatctgaaagggcattcaataaaggttttgaactgccatgattctgtaatttacattttagccccacttaagtatgcaactgtctatggatgttctgacactaccattattcttggtgctattggtaaggttgccccatttaatacttattatccacaactcggggaacatttggcacaagttggtgtggatcctaatgtcaacaagtgggaccaaccttttgtgttgggagttgttgatctgcatgactcattatctcatcctgccggggtttctgatgtccaggctgagtccaccacttgtctagatcctgatctatttacgaactttttgattcctagttggtttgaagtagaaggacctaccaaatacaatccatttaccctgcctgaagtttattgggcgtcccaaaggaaaaagcatgcttctctggaagatattcaaaagaatatccgggagctggagatcgatgatatccggaagaaagaattggcatgtgcccttcatgctcaattcaaagattggttatatgcctcagggaatatccgccagctatactgtttgcaaggcgaatgagcataagatggggttcttgtgtaagcgcgagatgcagcagtacgcgtctgcaagtgcaatccaattccgggcgcctccgaaatctgaaagtgacttccaagctgagttggtgtcgcctgccctgatgcacttggtatttcagctgtagcgtttgtggaggcaagtaactgtaacgtttttgtttgttccaattagtttttaccacttttcccattcagttggccgcaaggtttctgtaaatctttcggtactgttggtttcatatttagaaaattcacaaagcggccactcaattctctttttggaaagtaactttatttttttttcaaatggtgtttggtttttagggactaatgtttagtcccttcattttattccattttagtctctaaattgctagaattttagtttttgtatttgacaatctagggactaatatagaataagatgattagtccttacaaatcaaactccttaacatactgtgtgaactaacgtgaacttgc

SEQ ID NO: 61806 - DNA, 1696 bp, Zea Mays
atgttgagttgctgcccttaattgacaacgtggcggataaattgctgcatgggaagtcacaatcatgagtagagctggtcgtcttgtgatggtcaaggtattgacaatggagacttttgagcaccttggattttttttgcagctctctgaaggaactccattaagccaagcagctaccttttttgcgaattcggatccagacatgcccgctgctcctgtacctgctgctttggtacatgattgggtcttgcagcatatagcttcagcattagaatttatggcagagaagactgtggcaaaagaaaacagccaacataatgcatttgatcctgatgtcacaatgtctgatgctgtcacgaatacaagaattcatagcagttcaccaactggcagttctgcaccaaactatcctggatactaccgaaatgcatcatttgtggagggttgctcgaaaacttcagttgtcaaacaagcatcggatctgaaagggcattcaataaaggttttgaactgccatgattctgtaatttacattttagccccacttaagtatgcaactgtctatggatgttctgacactaccattattcttggtgctattggttgttaaagtggagcattgtgaacgtgtacaaattattgcagcttcgaaacgaatttgtattgccaattgtcgtgaatgtatcttctacttgggagtaaatcaccaaccacttattgtaggggataaccataaattacaagttgccccatttaatacttattatccacaactcggggaacatttggcacaagttggtgtggatcctaatgtcaacaagtgggaccaaccttttgtgttgggagttgttgatctgcatgactcattatctcatcctgccggggtttctgatgtccaggctgagtccaccacttgtctagatcctgatctatttacgaactttttgattcctagttggtttgaagtagaaggacctaccaaatacaatccatttaccctgcctgaagtttattgggcgtcccaaaggaaaaagcatgcttctctggaagatattcaaaagaatatccgggagctggagatcgatgatatccggaagaaagaattggcatgtgcccttcatgctcaattcaaagattggttatatgcctcagggaatatccgccagctatactgtttgcaaggcgaatgagcataagatggggttcttgtgtaagcgcgagatgcagcagtacgcgtctgcaagtgcaatccaattccgggcgcctccgaaatctgaaagtgacttccaagctgagttggtgtcgcctgccctgatgcacttggtatttcagctgtagcgtttgtggaggcaagtaactgtaacgtttttgtttgttccaattagtttttaccacttttcccattcagttggccgcaaggtttctgtaaatctttcggtactgttggtttcatatttagaaaattcacaaagcggccactcaattctctttttggaaagtaactttatttttttttcaaatggtgtttggtttttagggactaatgtttagtcccttcattttattccattttagtctctaaattgctagaattttagtttttgtatttgacaatctagggactaatatagaataagatgattagtccttacaaatcaaactccttaacatactgtgtgaactaacgtgaacttgc

SEQ ID NO: 61807 - DNA, 2304 bp, Zea Mays
acagatctctgtttgtctctgcctcctctggcccattcagtcagttaccctcaatggccgacgaccccctggactcgtccccgtcggcgtccgccgccgccgctgctggcggagtctcctccggcccccgcccagcgctccggccccggcgggaggcatttgagtacgggctcctgccgatccccaagctggtcttcccagaaggcgcgctgacgcaaaccctatcccagctgaaggagaggctcgcgccgggggggccgcgggtgggcgccgcagcgctcgctgaggcgctgcagatccctgccgagcaggcagcgctggcgctcggaacgctcgctgcggtgctacccgcggaggattcggcgctcggcgaggacggctcggggagtgctgacctccgcgacctgcttcttttcctctacatccaatcctacaagcgcctcgtgccgcgcgtgcacaaggactcgcccgccgtcacggatgtttggccgtcgacctccgccttcgatggatacctctccgcgctgtcgccgatccagtttgtacggagcaatagtcgccgttttatgccttcacaagcagatgaagaagctcatcagctatcgtatttacaaaagcatatgaccaacattctaacacttttagcagattctattgatggcgagggagatgattctatggtattgacaatggagacttttgagcaccttggattttttttgcagctctctgaaggaactccattaagccaagcagctaccttttttgcgaattcggatccagacatgcccgctgctcctgtacctgctgctttggtacatgattgggtcttgcagcatatagcttcagcattagaatttatggcagagaagactgtggcaaaagaaaacagccaacataatgcatttgatcctgatgtcacaatgtctgatgctgtcacgaatacaagaattcatagcagttcaccaactggcagttctgcaccaaactatcctggatactaccgaaatgcatcatttgtggagggttgctcgaaaacttcagttgtcaaacaagcatcggatctgaaagggcattcaataaaggttttgaactgccatgattctgtaatttacattttagccccacttaagtatgcaactgtctatggatgttctgacactaccattattcttggtgctattggtaaggttgttaaagtggagcattgtgaacgtgtacaaattattgcagcttcgaaacgaatttgtattgccaattgtcgtgaatgtatcttctacttgggagtaaatcaccaaccacttattgtaggggataaccataaattacaagttgccccatttaatacttattatccacaactcggggaacatttggcacaagttggtgtggatcctaatgtcaacaagtgggaccaaccttttgtgttgggagttgttgatctgcatgactcattatctcatcctgccggggtttctgatgtccaggctgagtccaccacttgtctagatcctgatctatttacgaactttttgccagctaattctctatgcagattcctagttggtttgaagtagaaggacctaccaaatacaatccatttaccctgcctgaagtttattgggcgtcccaaaggaaaaagcatgcttctctggaagatattcaaaagaatatccgggagctggagatcgatgatatccggaagaaagaattggcatgtgcccttcatgctcaattcaaagattggttatatgcctcagggaatatccgccagctatactgtttgcaaggcgaatgagcataagatggggttcttgtgtaagcgcgagatgcagcagtacgcgtctgcaagtgcaatccaattccgggcgcctccgaaatctgaaagtgacttccaagctgagttggtgtcgcctgccctgatgcacttggtatttcagctgtagcgtttgtggaggcaagtaactgtaacgtttttgtttgttccaattagtttttaccacttttcccattcagttggccgcaaggtttctgtaaatctttcggtactgttggtttcatatttagaaaattcacaaagcggccactcaattctctttttggaaagtaactttatttttttttcaaatggtgtttggtttttagggactaatgtttagtcccttcattttattccattttagtctctaaattgctagaattttagtttttgtatttgacaatctagggactaatatagaataagatgattagtccttacaaatcaaactccttaacatactgtgtgaactaacgtgaacttgc

SEQ ID NO: 61808 - DNA, 2212 bp, Zea Mays
acagatctctgtttgtctctgcctcctctggcccattcagtcagttaccctcaatggccgacgaccccctggactcgtccccgtcggcgtccgccgccgccgctgctggcggagtctcctccggcccccgcccagcgctccggccccggcgggaggcatttgactgaaggagaggctcgcgccgggggggccgcgggtgggcgccgcagcgctcgctgaggcgctgcagatccctgccgagcaggcagcgctggcgctcggaacgctcgctgcggtgctacccgcggaggattcggcgctcggcgaggacggctcggggagtgctgacctccgcgacctgcttcttttcctctacatccaatcctacaagcgcctcgtgccgcgcgtgcacaaggactcgcccgccgtcacggatgtttggccgtcgacctccgccttcgatggatacctctccgcgctgtcgccgatccagtttgtacggagcaatagtcgccgttttatgccttcacaagcagatgaagaagctcatcagctatcgtatttacaaaagcatatgaccaacattctaacacttttagcagattctattgatggcgagggagatgattctatggtattgacaatggagacttttgagcaccttggattttttttgcagctctctgaaggaactccattaagccaagcagctaccttttttgcgaattcggatccagacatgcccgctgctcctgtacctgctgctttggtacatgattgggtcttgcagcatatagcttcagcattagaatttatggcagagaagactgtggcaaaagaaaacagccaacataatgcatttgatcctgatgtcacaatgtctgatgctgtcacgaatacaagaattcatagcagttcaccaactggcagttctgcaccaaactatcctggatactaccgaaatgcatcatttgtggagggttgctcgaaaacttcagttgtcaaacaagcatcggatctgaaagggcattcaataaaggttttgaactgccatgattctgtaatttacattttagccccacttaagtatgcaactgtctatggatgttctgacactaccattattcttggtgctattggttgttaaagtggagcattgtgaacgtgtacaaattattgcagcttcgaaacgaatttgtattgccaattgtcgtgaatgtatcttctacttgggagtaaatcaccaaccacttattgtaggggataaccataaattacaagttgccccatttaatacttattatccacaactcggggaacatttggcacaagttggtgtggatcctaatgtcaacaagtgggaccaaccttttgtgttgggagttgttgatctgcatgactcattatctcatcctgccggggtttctgatgtccaggctgagtccaccacttgtctagatcctgatctatttacgaactttttgattcctagttggtttgaagtagaaggacctaccaaatacaatccatttaccctgcctgaagtttattgggcgtcccaaaggaaaaagcatgcttctctggaagatattcaaaagaatatccgggagctggagatcgatgatatccggaagaaagaattggcatgtgcccttcatgctcaattcaaagattggttatatgcctcagggaatatccgccagctatactgtttgcaaggcgaatgagcataagatggggttcttgtgtaagcgcgagatgcagcagtacgcgtctgcaagtgcaatccaattccgggcgcctccgaaatctgaaagtgacttccaagctgagttggtgtcgcctgccctgatgcacttggtatttcagctgtagcgtttgtggaggcaagtaactgtaacgtttttgtttgttccaattagtttttaccacttttcccattcagttggccgcaaggtttctgtaaatctttcggtactgttggtttcatatttagaaaattcacaaagcggccactcaattctctttttggaaagtaactttatttttttttcaaatggtgtttggtttttagggactaatgtttagtcccttcattttattccattttagtctctaaattgctagaattttagtttttgtatttgacaatctagggactaatatagaataagatgattagtccttacaaatcaaactccttaacatactgtgtgaactaacgtgaacttgc

SEQ ID NO: 61809 - DNA, 2300 bp, Zea Mays
acagatctctgtttgtctctgcctcctctggcccattcagtcagttaccctcaatggccgacgaccccctggactcgtccccgtcggcgtccgccgccgccgctgctggcggagtctcctccggcccccgcccagcgctccggccccggcgggaggcatttgagtacgggctcctgccgatccccaagctggtcttcccagaaggcgcgctgacgcaaaccctatcccagctgaaggagaggctcgcgccgggggggccgcgggtgggcgccgcagcgctcgctgaggcgctgcagatccctgccgagcaggcagcgctggcgctcggaacgctcgctgcggtgctacccgcggaggattcggcgctcggcgaggacggctcggggagtgctgacctccgcgacctgcttcttttcctctacatccaatcctacaagcgcctcgtgccgcgcgtgcacaaggactcgcccgccgtcacggatgtttggccgtcgacctccgccttcgatggatacctctccgcgctgtcgccgatccagtttgtacggagcaatagtcgccgttttatgccttcacaagcagatgaagaagctcatcagctatcgtatttacaaaagcatatgaccaacattctaacacttttagcagattctattgatggcgagggagatgattctatggtattgacaatggagacttttgagcaccttggattttttttgcagctctctgaaggaactccattaagccaagcagctaccttttttgcgaattcggatccagacatgcccgctgctcctgtacctgctgctttggtacatgattgggtcttgcagcatatagcttcagcattagaatttatggcagagaagactgtggcaaaagaaaacagccaacataatgcatttgatcctgatgtcacaatgtctgatgctgtcacgaatacaagaattcatagcagttcaccaactggcagttctgcaccaaactatcctggatactaccgaaatgcatcatttgtggagggttgctcgaaaacttcagttgtcaaacaagcatcggatctgaaagggcattcaataaaggttttgaactgccatgattctgtaatttacattttagccccacttaagtatgcaactgtctatggatgttctgacactaccattattcttggtgctattggtaaggttgttaaagtggagcattgtgaacgtgtacaaattattgcagcttcgaaacgaatttgtattgccaattgtcgtgaatgtatcttctacttgggagtaaatcaccaaccacttattgtaggggataaccataaattacaagttgccccatttaatacttattatccacaactcggggaacatttggcacaagttggtgtggatcctaatgtcaacaagtgggaccaaccttttgtgttgggagttgttgatctgcatgactcattatctcatcctgccggggtttctgatgtccaggctgagtccaccacttgtctagatcctgatctatttacgaactttttgctaattctctatgcagattcctagttggtttgaagtagaaggacctaccaaatacaatccatttaccctgcctgaagtttattgggcgtcccaaaggaaaaagcatgcttctctggaagatattcaaaagaatatccgggagctggagatcgatgatatccggaagaaagaattggcatgtgcccttcatgctcaattcaaagattggttatatgcctcagggaatatccgccagctatactgtttgcaaggcgaatgagcataagatggggttcttgtgtaagcgcgagatgcagcagtacgcgtctgcaagtgcaatccaattccgggcgcctccgaaatctgaaagtgacttccaagctgagttggtgtcgcctgccctgatgcacttggtatttcagctgtagcgtttgtggaggcaagtaactgtaacgtttttgtttgttccaattagtttttaccacttttcccattcagttggccgcaaggtttctgtaaatctttcggtactgttggtttcatatttagaaaattcacaaagcggccactcaattctctttttggaaagtaactttatttttttttcaaatggtgtttggtttttagggactaatgtttagtcccttcattttattccattttagtctctaaattgctagaattttagtttttgtatttgacaatctagggactaatatagaataagatgattagtccttacaaatcaaactccttaacatactgtgtgaactaacgtgaacttgc

SEQ ID NO: 61810 - DNA, 2197 bp, Zea Mays
acagatctctgtttgtctctgcctcctctggcccattcagtcagttaccctcaatggccgacgaccccctggactcgtccccgtcggcgtccgccgccgccgctgctggcggagtctcctccggcccccgcccagcgctccggccccggcgggaggcatttgagtacgggctcctgccgatccccaagctggtcttcccagaaggcgcgctgacgcaaaccctatcccagctgaaggagaggctcgcgccgggggggccgcgggtgggcgccgcagcgctcgctgaggcgctgcagatccctgccgagcaggcagcgctggcgctcggaacgctcgctgcggtgctacccgcggaggattcggcgctcggcgaggacggctcggggagtgctgacctccgcgacctgcttcttttcctctacatccaatcctacaagcgcctcgtgccgcgcgtgcacaaggactcgcccgccgtcacggatgtttggccgtcgacctccgccttcgatggatacctctccgcgctgtcgccgatccagtttgtacggagcaatagtcgccgttttatgccttcacaagcagatgaagaagctcatcagctatcgtatttacaaaagcatatgaccaacattctaacacttttagcagattctattgatggcgagggagatgattctatggtattgacaatggagacttttgagcaccttggattttttttgcagctctctgaaggaactccattaagccaagcagctaccttttttgcgaattcggatccagacatgcccgctgctcctgtacctgctgctttggtacatgattgggtcttgcagcatatagcttcagcattagaatttatggcagagaagactgtggcaaaagaaaacagccaacataatgcatttgatcctgatgtcacaatgtctgatgctgtcacgaatacaagaattcatagcagttcaccaactggcagttctgcaccaaactatcctggatactaccgaaatgcatcatttgtggagggttgctcgaaaacttcagttgtcaaacaagcatcggatctgaaagggcattcaataaaggttttgaactgccatgattctgtaatttacattttagccccacttaagtatgcaactgtctatggatgttctgacactaccattattcttggtgctattggtaaggttgttaaagtggagcattgtgaacgtgtacaaattattgcagcttcgaaacgaatttgtattgccaattgtcgtgaatgtatcttctacttgggagtaaatcaccaaccacttattgtaggggataaccataaattacaagttgccccatttaatacttattatccacaactcggggaacatttggcacaagttggtgtggatcctaatgtcaacaagtgggaccaaccttttgtgttgggagttgttgatctgcatgactcattatctcatcctgccggggtttctgatgtccaggctgagtccaccacttgtctagatcctgatctatttacgaactttttgcatgcttctctggaagatattcaaaagaatatccgggagctggagatcgatgatatccggaagaaagaattggcatgtgcccttcatgctcaattcaaagattggttatatgcctcagggaatatccgccagctatactgtttgcaaggcgaatgagcataagatggggttcttgtgtaagcgcgagatgcagcagtacgcgtctgcaagtgcaatccaattccgggcgcctccgaaatctgaaagtgacttccaagctgagttggtgtcgcctgccctgatgcacttggtatttcagctgtagcgtttgtggaggcaagtaactgtaacgtttttgtttgttccaattagtttttaccacttttcccattcagttggccgcaaggtttctgtaaatctttcggtactgttggtttcatatttagaaaattcacaaagcggccactcaattctctttttggaaagtaactttatttttttttcaaatggtgtttggtttttagggactaatgtttagtcccttcattttattccattttagtctctaaattgctagaattttagtttttgtatttgacaatctagggactaatatagaataagatgattagtccttacaaatcaaactccttaacatactgtgtgaactaacgtgaacttgc

SEQ ID NO: 61811 - DNA, 2224 bp, Zea Mays
acagatctctgtttgtctctgcctcctctggcccattcagtcagttaccctcaatggccgacgaccccctggactcgtccccgtcggcgtccgccgccgccgctgctggcggagtctcctccggcccccgcccagcgctccggccccggcgggaggcatttgagtacgggctcctgccgatccccaagctggtcttcccagaaggcgcgctgacgcaaaccctatcccagctgaaggagaggctcgcgccgggggggccgcgggtgggcgccgcagcgctcgctgaggcgctgcagatccctgccgagcaggcagcgctggcgctcggaacgctcgctgcggtgctacccgcggaggattcggcgctcggcgaggacggctcggggagtgctgacctccgcgacctgcttcttttcctctacatccaatcctacaagcgcctcgtgccgcgcgtgcacaaggactcgcccgccgtcacggatgtttggccgtcgacctccgccttcgatggatacctctccgcgctgtcgccgatccagtttgtacggagcaatagtcgccgttttatgccttcacaagcagatgaagaagctcatcagctatcgtatttacaaaagcatatgaccaacattctaacacttttagcagattctattgatggcgagggagatgattctatggtattgacaatggagacttttgagcaccttggattttttttgcagctctctgaaggaactccattaagccaagcagctaccttttttgcgaattcggatccagacatgcccgctgctcctgtacctgctgctttggtacatgattgggtcttgcagcatatagcttcagcattagaatttatggcagagaagactgtggcaaaagaaaacagccaacataatgcatttgatcctgatgtcacaatgtctgatgctgtcacgaatacaagaattcatagcagttcaccaactggcagttctgcaccaaactatcctggatactaccgaaatgcatcatttgtggagggttgctcgaaaacttcagttgtcaaacaagcatcggatctgaaagggcattcaataaaggttttgaactgccatgattctgtaatttacattttagccccacttaagtatgcaactgtctatggatgttctgacactaccattattcttggtgctattggtaaggttgttaaagtggagcattgtgaacgtgtacaaattattgcagcttcgaaacgaatttgtattgccaattgtcgtgaatgtatcttctacttgggagtaaatcaccaaccacttattgtaggggataaccataaattacaagttgccccatttaatacttattatccacaactcggggaacatttggcacaagttggtgtggatcctaatgtcaacaagtgggaccaaccttttgtgttgggagttgttgatctgcatgactcattatctcatcctgccggggtttctgatgtccaggctgagtccaccacttgtctagatcctgatctatttacgaactttttggtacgtgagctatatattcctttcattattgctatcttatgctagacttgaaaaaactcaaatgcagttaaaaaagttttatgatgagatatctcttgctttgacaacatgttgcgtctgatgcatctgcattaataaggttactcgattttttgcagtattattgtgtccataacagctggagtaggaacctatattccatatttttgtaatactatgttactaattgatcaatcaattgacattaatttttagtttctgaatgttctcacctaaatatgggtggtaatggggctttggcctctccagattcaataaaatattgtgggtggtaatatattgtgttgtggttctgtaaaagttacatctgatgcattttaaatgactacagtgtgcattttttcttgcaaaatattaaaaatggcagccagctaattctctatgcagattcctagttggtttgaagtagaaggacctaccaaatacaatccatttaccctgcctgaagtttattgggcgtcccaaaggaaaaagcatgcttctctggaagatattcaaaagaatatccgggagctggagatcgatgatatccggaagaaagaattggcatgtgcccttcatgctcaattcaaagattggttatatggggggtgtactgggcacagcttgaatggatggaggtgaaagag

SEQ ID NO: 61812 - DNA, 2195 bp, Zea Mays
caatgctggtggtggaaacacaggataactgaaggcaggaattaatgcgaggggaattctacattgcagggatgaacaccttccatctttgtagcgcattccagtccctgctcctcccccagtcccccttggccctgctataaatccccccttcccctcgcactcactacattggacttcacccggaaatcgcctcgctttcttcgcttttccctctgcctctattgctcttgcttcccggaggttcttagacggaatacattgttttagtagggaagagatggacgtgaaaaccttcccagcagggctgcgcgtgctcgtcgtcgacgacgatcgcgtctgcctcaaggtcctagagaggcagttgaagtgttgcaactacaacgtgatggtggtgacggacgccaggacggcgctggaaatgctcagggagaggaaggatgacggggaccagtttgacctggtgatcagcgacgttgtcatgcccaacatggacggctttgagctcctcgagctcatcggcgtggagatggatctcccagtcattatgctatccgcaaacagcgagacacggactataatgaaagggataaagcacggggcctgtgattatatcgtaaagccagtgcgcctcgaacagcttaggggcatatggacacatgtggtgaagaacagtaggactgatccacggaccagcatcatcgacagtggcagtgatgatgatgtacagaagctgccatctggggatggtggtgaaggtgacaaggttggagcaaaccgcagaaagaagaagtgttcaaagaagaacaaaccggctgtggatgttgctggtgggcacagcgagaacacatcagcccagaagaagccaagggtccagtggtgtggtcaactacaccgcaagttcgtagaagctgtccatcagattggcatcgacaaggctgttcccaagaagatactagaagccatgaatgtggaaggcattaccagagagaatgtcgccagccatttgcagaagtaccgaatctacctcagaaagctcatcgagggcacattggggaactctaattcatttgctgacgaaaccgaagcattgtggagatacttgaatgtcccatccttcattacctctccgagctcaagcaaccattttacaaatgccggttcctcatctgcaattagaacccaaactttgctacccccacagccaccagttcatgtcatgagctcccagaaaaacttgagcactcctcgctcctatgcgagcatactgcgtggcaagattctgggatcgagcagaggtattcctttcgaagacacgccagatggtgagatgctggctcctggtaatttgtcatcgcagtctcctgagcttcagtctgtttgggctggttctgcaagcaccagatctgaccttcagatagacaattcgacccaggcgctgaatggcggcggggcaagtgacaatagcctccgtgaaggaggcagcactgttgatcagcaagctgttgttagtgaccaagtgaataacatcaatgcggagagtgatggcttggatgatttccttgcttacatggttaatcgacgggatttcatcaacaatggtgattctttcatcctcggggaccaggactttgccccttgaatctggaagggagatgtttctgcatcgcctagctactgaccaattcatggttgtaataaggctagctaggagcaggccatcttggatggaatcaccatgtttctctagtgtactcatgtttttagcctgtggtgttaagtttggcgggaggtgtggctgtgccactgtcacccctgccaaccccccaagccatgtgttactcttcggcttgaattttggtggtcatttttacttttatattaaacaatctagcccctcttaggggtctttttttatatatagttgtgatcatagacggagttatgtcagatagatccagtttccatatgcagtgatatgattttcatgaagtatttgaactgttgtatgtcatctgttttttgaatcaatgaaatgttgcttttttcttgaaattgtatttgatagctcatatcctttttatggaacactatagcagacagaataagtgcgacgtatgagcttggaataaaggatgattcatattggacttgatatcactagatagacagtaatgttgcatacagtcttttag

SEQ ID NO: 61813 - DNA, 50 bp, Zea Mays
tggggtcaaggaaggagaagatgggagaggagaggaagccaggagccaag

SEQ ID NO: 61814 - DNA, 2533 bp, Zea Mays
caactgcataaaggattatttgagccaaggtgggtatctgattttcttccaaagaatttgctacctcagaaatgcttaaacttcagcaagtgtgcatatctgaacattttccaagacgttcttgaaagtaatatgtgggccagccatgatactctaatgatacatttatctacaagagcaagcctttgattattattgagataatgagttcaaacgatatccttcaatatgaagcaacttcaggaatcaggacatctgcaatcgaccttggttcagctgtcttattactaccagagagctattttcctctctaagagcctgtttggaagccttgttttacctaaacaggtgtaaatcagcagcctggaaacttatacccactgcattggaataagttgtttggatggcttgtgaaaacagtttaattacactcggttttaccctatccaaccggaaaaataaaatcacctcatgagtccctagaaaaggcacgacagatgtcgagctgcactgtgctcttctggcctcactcacacacctcttcagcggtgtccacctgtgaggctgtgagggacaccatggcaccaaaaagtgggcagggctgacgcggtgacgggtgtcgcgaagcatgctatgcgtgagttgggttacacgcgcttacccacacatgcggcatgcacatgcatgttctattcattcccatgtagcaggataatattttacaagagagttaagtcacatatgtaaattattgttcactagaaattcaaaacaggaaccgctcacaggtgtaaaatattgcaaaatatccaaatggggcctaaaggaaaaatctaaagttggaaccacagagtagtaaaggtaaataaaaaaacaatatgcgaggtagactttcatcaaacttttcatagacagtaccaaagatgcaataattataacaacaaaaaccttttaatcccaaacaaattaggatagtctagagttaaaactcaatagaaaccacaaatctcaaagttgaggcacctaaatagttgttttccatttcctcctattcaaagttaaatctttggatatattccatctttttaagtattcttttactgtttctttctatatctacttcggtcttctcctatctctcttttcaaggttaaatcattgatgcccgtggaggtattcgttggttatgtttagaccatagacaagcttttatttaattggtgctacctcctagcctatcatgtatgtcattattccagactccctcttcttgtacagccataaatgcaacgcaacatgcgtattttcgtaacatttatctgttgaacatgacgccttttttaggccaatgttatgcaccatacaacatagcaggtctaatcaccgtcttataaaatttgccttttaacttatatggtatctccaggtcgcataaaacagcaaatgtttggtgctattttctctaccctattttgatttttatggctaacatctccatcaatatcatctatgtgggtatgatcctaaataccgaaaagtatcgttgccggaaactacttgcattacaaactaacatctcatttcttatgtgtagtagtgtcaaagttatatctcatatattcgaatttatttctactaaatctaaaacatttgactctagagtaaagaagctctaggaaatggaaacctcataaatcagacacatttttccatttctttatgtataactaactttctacatgcacacgtacatgttgcagtggtttggctgcttacaacagctgggtagctgttcccaactgctccctccgtcccaaatttatcaaaaaggaataaaactcttgttcctaacgagtcaaataattttaaatttaactaaatatatatataaacatactagtatttatgacacataataagtatcattagactaaggcactaagcattgtagattttcaaaataaatatatatttgaaaaagtaaaatgttgatattttttcacacttgagatttttgttactcctccagaaactgtatatatatatatatatattcttgttggaatggaagaagcaggctataactagacagaacagcacccaacttggctagatctgaaaaaaacagcagcatatttgagtatgcatgaggtatcctgctagttttaacagaagttccgccgaaaccaagctattcaagcagaaaaaacttcaaaagttcatatggtttttcattaatcaagcactctgctccaggagaaagctttccttaaaaatgtgtctgtaaatcaatgaggcccaacttgtagaaagctgacaaaaaggatagcagcataagtacctccgtggtcagaaagctatctagcccaccaaaatcgcccctcgggtttacagttgcaagcctcattgacaagtactggaccaaccacatcggtagaacagtagtgagattagcagaaagataatgcgtgctatgttggctagaaacgaaaagggcttttcagatttttcaggttgtgcaagggatatcaac

SEQ ID NO: 61815 - DNA, 288 bp, Zea Mays
atgacccccagacaagtagtggacaactcacagaaacggtggggccgttcacagttgtacgagtggtcagaagggcccagggaccagatctgcatctacaggccttatgcagccaagcccaaacagaaagacgggggtgatatggtttctctttctggacacgcatttattagttcgggccatcagcaccaaccggttgggtccgcctgtgccagagagaacagatccaccagaccaacacacccctttaccaccccaaagagtggtcataatgacaataatgattga

SEQ ID NO: 61816 - DNA, 474 bp, Zea Mays
ccactcagcgctgagcaggcaggcaccggtacatcaagaaactgtcaattatttccgggcaaaaacagattctgccagccgtaatgcagtacagacatgccatctcgtcaggaacgagaaggggtccccagggtgtttaatgattcctgaacgctttgcatgattaggcctgtagctccaatagctcctgtctccacaacgcactctgcttggatccagtgcagtagcgcagatcggttgcccagatccaaacggcagatcacccgccttttctttggtttctctcattggtgcagcaaaagctggagcggtgttataagcctaaggtgtaggtcagtggagctagtcagcttggcttgcattgcatgatactaggattaggagctacaattattggcagcacaagttatggaaacgcttaattaggcaggccaggcctgagcctgaacgctccaaccatttcctctatataag

SEQ ID NO: 61817 - DNA, 2793 bp, Zea Mays
cttaattccgagggcataataattaccgtcggaaattaaaaattaaaattatctaagcaccactaattaaatttaggccctcggatataataaaataaactacaaaacaatattaatatatacaaaatattaataatacattaataccttacggcgggcgggcggggcgggcgtcgacggcgggctgtgcgtggcggccgacggcggggcggcgggcggcgggcggcgggcggccgcggcggggcggcggacggccgcggcggggcggcgggtggccgggcggcggggcggcgggcctcgacggcggcggcggcgagcgtcgacggcggcggcggggcggcgggtggccgggcggcggggcgggcgggcctcgacggcggcggcggcgagcgtccgacggaggcggcggtgagcgggcagagagagagaagcgagaagcgagcgcgcgcgcgtgaaaatgaaccgcgccgggacggtccgtgtgttaaaaaaaccttatgtccgacggaactttcttcgtttactgtagtgcctgtccggccgtcgccttgctccggcacgtgaagagcgccactccacctgcacacttccttccagctttgagccctctctccctgcctagcccagtactcgaccagtacggctccgacggcgatgctaaccgctcagtcagtgttcatgcatgcagctaacgaactgcacgagctcatccacatgatatatacatgacaataatgccgtgcagtaactatctatctatatatcgatggatcatccgctccaaaccaataaccccaccgtcggatgcacgcagatgcacatgtggggccacgggtcgcagtaccgcaagggcccggagtcgctgcggggcacgcagccgacggcgatgctgcggctgccgtgctactgctgcgcggcgggctgccggaacaacatcgaccacccgcgggcgcgcccgctcaaggacttccgcacgctgcagacgcactaccgccgcaggcacggcatcaagcccttcatgtgccgcaagtgcggcaagcccttcgccgtgcgcggcgactggcgcacccacgagaagaactgcggcaggctctggtactgcgcctgcggctccgacttcaagcacaagcgctccctcaaggaccacatacatcctacacagcaaccagtcgatctgtagccaaatgcaaacgtatgcttgtgtgcgtgtgtgtataaccatgcatatcatccatctgtccgtgtcttactcagtgtttaaaatagcgggctaaggcatttatcctcggccttttttaacagctagagaaggatatatctagatatcgccgcagctaaatgttttagcggttttcagaacatagaacaatcgagtagcattacctatgtaataaactaattaaccaaagcaaaaatatacaataggcggttcagacttcagaaccaaaaataatagcaagaaaaacaacattcatttgctaagttttatagtctactggttgcaacaatcactggttgcaacattcagtgtactgagcagcaaaacatacagcatactgagcagcaaaagtacttcaaaaggagttgctaagttgctaagttccaagacattaatttgataaaatggcagcagtctacactatgaacatctgtgaatgaaggtctaggcagtagctattagctaacaaatgagatcaaatcaaaatgagacgcccacctgcggcctcccgtgcgtgtccgcccaggcgcccaaccgtggagatcgcgatggagacttggagagccgattgcgatggagactggagagccgaacagcgccaggagcagcagcatcctcgtctcgaccaggaggaggagcagcagcgtcctcgtctcggccggggacggtcctcggtccctcggcggctgctgctggacaaagggcgaggagaggaacaagtaacaacgggagttgtgagtgtgacacaggcggcggctagggttagcaacaggagcaactgggcacgacaggttattttgttttgggcccaaatttcatttggcccacaacgcacaacaacttctttagcgggctaaatgatgtagtgtttagctgttttagcgggctaatatccgctattagcggttctgtccgtttagcgctaaattgtgattatcttatccctaatcttatgcaacagctatatccggatatagcggcggctatatccagctattttaaacactggtcttacttagcttgaggtgtgccgatccgatcgagaggagagctgatttattagtaggtgcaagagagagcatgcacgcaagggttcgttctattaaaatagatggaggtataagcatgcagccgggtttatgtattatgcatacaaaagatctaattgagtagctagctagcttcattgtatgtgcagactttgatccatctggtatatatggtcaacggtgcaaatacagatttgttaatgctaacttttgagaaaataatcgtgcagtgcagtgcagtgcatcatgcatatgcatgcaagtggtgaaagcatgttaatctattatatatctttagagatgaagtgttatataatgatttcttagtaattggggatatacatgcatattggggttatctggattagaatgggtttttccctccttagggagaatcatatttttccgagggatttccattttcataagggaaattagtttattttcctctagtaaaacagaaatctcttggtaaaatagagttcctatactagcccttatgaaactattttttttaccaaaaac

SEQ ID NO: 61818 - DNA, 3153 bp, Zea Mays
taattaccctcggaaattaagagtttaaattatatagacaccactacataacattattacgggtgacaaatcatataaactgaccttaattccgagggcataataattaccgtcggaaattaaaaattaaaattatctaagcaccactaattaaatttaggccctcggatataataaaataaactacaaaacaatattaatatatacaaaatattaataatacattaataccttacggcgggcgggcggggcgggcgtcgacggcgggctgtgcgtggcggccgacggcggggcggcgggcggcgggcggcgggcggccgcggcggggcggcggacggccgcggcggggcggcgggtggccgggcggcggggcggcgggcctcgacggcggcggcggcgagcgtcgacggcggcggcggggcggcgggtggccgggcggcggggcgggcgggcctcgacggcggcggcggcgagcgtccgacggaggcggcggtgagcgggcagagagagagaagcgagaagcgagcgcgcgcgcgtgaaaatgaaccgcgccgggacggtccgtgtgttaaaaaaaccttatgtccgacggaactttcttcgtttactgtagtgcctgtccggccgtcgccttgctccggcacgtgaagagcgccactccacctgcacacttccttccagctttgagccctctctccctgcctagcccagtactcgaccagtacggctccgacggcgatgctaaccgctcagtcagtgttcatgcatgcagctaacgaactgcacgagctcatccacatgatatatacatgacaataatgccgtgcagtaactatctatctatatatcgatggatcatccgctccaaaccaataaccccaccgtcggatgcacgcagatgcacatgtggggccacgggtcgcagtaccgcaagggcccggagtcgctgcggggcacgcagccgacggcgatgctgcggctgccgtgctactgctgcgcggcgggctgccggaacaacatcgaccacccgcgggcgcgcccgctcaaggacttccgcacgctgcagacgcactaccgccgcaggcacggcatcaagcccttcatgtgccgcaagtgcggcaagcccttcgccgtgcgcggcgactggcgcacccacgagaagaactgcggcaggctctggtactgcgcctgcggctccgacttcaagcacaagcgctccctcaaggaccacatccgggcgttcggccgcggccacgccgcctgcggcgtcgacgactgcttcgacgacgacgacgaccgcgacgacccgtcgtcatccgaggtcgaccacgcagccaccaacactactagtaacagcaccactactaccgctgccgccgccaatgctcaccaccatcaccacaccagctggaagccgccgccgccgccactgtcgtcgtcgagcagaggctccggcgacgaccgactactatagatcgacaagggtgagtacgtacggtcctactacatacatcctacacagcaaccagtcgatctgtagccaaatgcaaacgtatgcttgtgtgcgtgtgtgtataaccatgcatatcatccatctgtccgtgtcttactcagtgtttaaaatagcgggctaaggcatttatcctcggccttttttaacagctagagaaggatatatctagatatcgccgcagctaaatgttttagcggttttcagaacatagaacaatcgagtagcattacctatgtaataaactaattaaccaaagcaaaaatatacaataggcggttcagacttcagaaccaaaaataatagcaagaaaaacaacattcatttgctaagttttatagtctactggttgcaacaatcactggttgcaacattcagtgtactgagcagcaaaacatacagcatactgagcagcaaaagtacttcaaaaggagttgctaagttgctaagttccaagacattaatttgataaaatggcagcagtctacactatgaacatctgtgaatgaaggtctaggcagtagctattagctaacaaatgagatcaaatcaaaatgagacgcccacctgcggcctcccgtgcgtgtccgcccaggcgcccaaccgtggagatcgcgatggagacttggagagccgattgcgatggagactggagagccgaacagcgccaggagcagcagcatcctcgtctcgaccaggaggaggagcagcagcgtcctcgtctcggccggggacggtcctcggtccctcggcggctgctgctggacaaagggcgaggagaggaacaagtaacaacgggagttgtgagtgtgacacaggcggcggctagggttagcaacaggagcaactgggcacgacaggttattttgttttgggcccaaatttcatttggcccacaacgcacaacaacttctttagcgggctaaatgatgtagtgtttagctgttttagcgggctaatatccgctattagcggttctgtccgtttagcgctaaattgtgattatcttatccctaatcttatgcaacagctatatccggatatagcggcggctatatccagctattttaaacactggtcttacttagcttgaggtgtgccgatccgatcgagaggagagctgatttattagtaggtgcaagagagagcatgcacgcaagggttcgttctattaaaatagatggaggtataagcatgcagccgggtttatgtattatgcatacaaaagatctaattgagtagctagctagcttcattgtatgtgcagactttgatccatctggtatatatggtcaacggtgcaaatacagatttgttaatgctaacttttgagaaaataatcgtgcagtgcagtgcagtgcatcatgcatatgcatgcaagtggtgaaagcatgttaatctattatatatctttagagatgaagtgttatataatgatttcttagtaattggggatatacatgcatattggggttatctggattagaatgggtttttccctccttagggagaatcatatttttccgagggatttccattttcataagggaaattagtttattttcctctagtaaaacagaaatctcttggtaaaatagagttcctatactagcccttatgaaactattttttttaccaaaaac

SEQ ID NO: 61819 - DNA, 3649 bp, Zea Mays
cagctcgcggagccggtagcaccccagacgcggccaaccgctagctaggccggtgccgccatggctgcgtcctcctgctgccaggcccgctggctgctccccctgctgctgcttgctgctgccgcgggtgctcttggtgcagagggcgcctcctccattgtgcagctggacgtggagtccctgctcccgtccgcagccgctccttgccccacccctcaagcagagcaaaaacaaggtgccgcgccgcccacaaggatgcccgtcgtgcaccagcacggcccgtgctcgccgctggccgacaacaggaacgggaaggcgccgtcccacgcggagatcctcgccgcggaccagcgccgcgccgagtacatccaccgccgcgtggccgagaccaccgggcgggcgagacgacggaagcagggcgcaccggtcgagctccggcccggcacgccgccgtcgtcgatcgtcgtcccctcgtcgtcctccgccacgtcgacgacggacctgccggcgtcgtacggggtcgcgctgggcacgggaaactacgtggtgcccgtccgcctcggcacgccggcggagcggttcacggtggtgttcgacaccggcagcgacacgacgtgggtgcagtgccagccgtgcgtggcctactgctaccggcagaaggagcctctcttcgaccccaccaagtccgccacctacgccaacatctcctgctcctcgtcctactgctccgacctctacgtcagcggctgctccggcggccactgcctgtacggcatccagtacggcgacggctcctacaccatcggcttctacgcccaagacaccctcaccctggcctacgacaccatcaagaatttccggttcgggtgcggcgagaagaaccgtgggctgttcgggagggcggcggggctgctgggcctcggccgcggcaagacgtcgctgccggtgcaggcgtacgacaagtacggcggcgtgttcgcgtactgcctcccggcgacgtcggccgggacggggttcctggacctggggccgggcgcgccggcggcgaacgcgcgcctgacgccgatgctggtggacaggggcccgacgttctactacgtggggatgacgggcatcaaggtgggcgggcacgtgctgcccatcccgggctccgtcttctccaccgccggcacgctggtggactccggcacggtgatcacgcggctcccgccgtcggcgtacgcgccgctgcggtcggcgttctccaaggcgatgcagggcctggggtacagcgcggccccggcgttctcgatcctcgacacctgctacgacctgacggggcacaagggggggagcatcgcgctgcccgcggtgtcgctggtgttccagggcggcgcgtgcctggacgtggacgcgtcggggatcctgtacgtggcggacgtgtcgcaggcgtgcctggcgttcgcgcccaacgctgacgacaccgacgtggccatcgtcgggaacacgcagcagaagacgcacggcgtactgtacgacattggcaagaagatcgtcgggttcgccccgggagcttgctgatccggccatggtttgtgaaaaactccagatcatctgcatccaccaaagtggctgctgagtgaaaatgggagtggcaggtcacaacgatccattgttaggtgaaacgacatgtgggtctttgctgcagcaacttcagctgatatgggatgaggttggcgaaagtgatgaagatcgtgacaagatgttacttcagctagagcaagagtgcttagatgtttataggagaaaggttgatcaggcttctagctccaggtcatgtctcctccaacagctttccaactccaaatcggaactgactagactcctttctgcattaggagagtcatctatttctggtgctcctgacaagacatctggtacaatcaaggagcaactagcagctatatcaccatctttagagacactccgcaggaaaaaagagagtagggtgaaagagtttgctcatgtacaacttcagattcagatacttcgtgatgaaattgctggggatctacatattggtgaacagttggaaacaccccatgttaatgcggatgatctttcagtgaggagattaaatgaatatctttctgaactacaagccctgcaaaaggaaaagagtactaggctctcaaggattcttgaatccgtgagttcagtgcacgatctctgttctgtacttggcatggattttgtgggcactgttactaaagttcatccaagtcttgatgactctgttggtgtccaatccaagagcattagtggcgaaacaatatccaagctgtctaaaatggtgattgtacttgaagaagaaaaatcgaagaggtttgcaaagattcaagctctagcttcccagctatctgatctttggaacttaatggattctcctgtggaggaacagcaaccttttcgtcacgtaacatgcataatgtcctcaacattggatgatgtgatagttccaggagctctggctcttgatgtaattcagcaggcggaactcgaagttgaaaggcttgatcagctaaaagctagtaggatgaaggatattgcattcaagaaacagactgaacttgaagatatatatgcccgggctcatgttgcagtagattctagtgctgcaagagataggataatgtctattattgagtccagtagtttcgagccttcagaactactggctgatatggagaaccagatacttaaagcaaatgaggagtccttaagcagaaaggacatattggagagggttgataggtggatgtcagcatgtgaagaagaaagctggcttgaagactacagccgggacgataacaggtacagtgcaactcggggtgcacatctgaatctgaagcgtgcagaaaaggcccgtgttttggtcaataaaattccggctattgttgacacactgcttgcaaagacccgggcatgggaacaagagcatggcgtggccttcacctacgacggcgtccctcttcttgcgatgctggacgaatacaaaatcctgaggcaggagaaggaagacgagaagcgacgaatgagggaccagaaaaagatgaacgaacagctagccgccgaacaggagaagctgttcgggtcaaaaccgagccccgcgcggccgcagtcgtcctcgaggaaggtggctggcgcacggaccaacggcggtggcacgccagctcgcaggctgtcggccctccagagcggcggcaggaccgctagccgggatgggaggagggatgcgagcaggcccgtggcccccgtgaactacgtcgccatcgccaaggaggacgtggcctcgcaggcgtccagcaaccacactgggccgtccaccccctgaccggccgtgccagcagtaactgaactgttgtggcggtgcttagatatatatataccagtgcagtgcagtagtcagagctgattgtagatcggataatggaaaaaaacaaacgaagctggatatggtatcacacattatcagttgtcactggttgttcgtctggtcgtcctatctagcgaactcgtcctcgtgtagccgtgacaatttgctcgtcgctgagttggagacagggaatgtcaagttagagctagtttaataatatagcctataacggac

SEQ ID NO: 61820 - DNA, 2208 bp, Zea Mays
acgtgacaggtgcagctcgcggagccggtagcaccccagacgcggccaaccgctagctaggccggtgccgccatggctgcgtcctcctgctgccaggcccgctggctgctccccctgctgctgcttgctgctgccgcgggtgctcttggtgcagagggcgcctcctccattgtgcagctggacgtggagtccctgctcccgtccgcagccgctccttgccccacccctcaagcaggctgctgagtgaaaatgggagtggcaggtcacaacgatccattgttaggtgaaacgacatgtgggtctttgctgcagcaacttcagctgatatgggatgaggttggcgaaagtgatgaagatcgtgacaagatgttacttcagctagagcaagagtgcttagatgtttataggagaaaggttgatcaggcttctagctccaggtcatgtctcctccaacagctttccaactccaaatcggaactgactagactcctttctgcattaggagagtcatctatttctggtgctcctgacaagacatctggtacaatcaaggagcaactagcagctatatcaccatctttagagacactccgcaggaaaaaagagagtagggtgaaagagtttgctcatgtacaacttcagattcagatacttcgtgatgaaattgctggggatctacatattggtgaacagttggaaacaccccatgttaatgcggatgatctttcagtgaggagattaaatgaatatctttctgaactacaagccctgcaaaaggaaaagagtactaggctctcaaggattcttgaatccgtgagttcagtgcacgatctctgttctgtacttggcatggattttgtgggcactgttactaaagttcatccaagtcttgatgactctgttggtgtccaatccaagagcattagtggcgaaacaatatccaagctgtctaaaatggtgattgtacttgaagaagaaaaatcgaagaggtttgcaaagcaaccttttcgtcacgtaacatgcataatgtcctcaacattggatgatgtgatagttccaggagctctggctcttgatgtaattcagcaggcggaactcgaagttgaaaggcttgatcagctaaaagctagtaggatgaaggatattgcattcaagaaacagactgaacttgaagatatatatgcccgggctcatgttgcagtagattctagtgctgcaagagataggataatgtctattattgagtccagtagtttcgagccttcagaactactggctgatatggagaaccagatacttaaagcaaatgaggagtccttaagcagaaaggacatattggagagggttgataggtggatgtcagcatgtgaagaagaaagctggcttgaagactacagccgggacgataacaggtacagtgcaactcggggtgcacatctgaatctgaagcgtgcagaaaaggcccgtgttttggtcaataaaattccggctattgttgacacactgcttgcaaagacccgggcatgggaacaagagcatggcgtggccttcacctacgacggcgtccctcttcttgcgatgctggacgaatacaaaatcctgaggcaggagaaggaagacgagaagcgacgaatgagggaccagaaaaagatgaacgaacagctagccgccgaacaggagaagctgttcgggtcaaaaccgagccccgcgcggccgcagtcgtcctcgaggaaggtggctggcgcacggaccaacggcggtggcacgccagctcgcaggctgtcggccctccagagcggcggcaggaccgctagccgggatgggaggagggatgcgagcaggcccgtggcccccgtgaactacgtcgccatcgccaaggaggacgtggcctcgcaggcgtccagcaaccacactgggccgtccaccccctgaccggccgtgccagcagtaactgaactgttgtggcggtgcttagatatatatataccagtgcagtgcagtagtcagagctgattgtagatcggataatggaaaaaaacaaacgaagctggatatggtatcacacattatcagttgtcactggttgttcgtctggtcgtcctatctagcgaactcgtcctcgtgtagccgtgacaatttgctcgtcgctgagttggagacagggaatgtcaagttagagctagtttaataatatagcctataacggac

SEQ ID NO: 61821 - DNA, 2289 bp, Zea Mays
gcagacgataacaggacgtgacaggtgcagctcgcggagccggtagcaccccagacgcggccaaccgctagctaggccggtgccgccatggctgcgtcctcctgctgccaggcccgctggctgctccccctgctgctgcttgctgctgccgcgggtgctcttggtgcagagggcgcctcctccattgtgcagctggacgtggagtccctgctcccgtccgcagccgctccttgccccacccctcaagcaggctgctgagtgaaaatgggagtggcaggtcacaacgatccattgttaggtgaaacgacatgtgggtctttgctgcagcaacttcagctgatatgggatgaggttggcgaaagtgatgaagatcgtgacaagatgttacttcagctagagcaagagtgcttagatgtttataggagaaaggttgatcaggcttctagctccaggtcatgtctcctccaacagctttccaactccaaatcggaactgactagactcctttctgcattaggagagtcatctatttctggtgctcctgacaagacatctggtacaatcaaggagcaactagcagctatatcaccatctttagagacactccgcaggaaaaaagagagtagggtgaaagagtttgctcatgtacaacttcagattcagatacttcgtgatgaaattgctggggatctacatattggtgaacagttggaaacaccccatgttaatgcggatgatctttcagtgaggagattaaatgaatatctttctgaactacaagccctgcaaaaggaaaagagtactaggctctcaaggattcttgaatccgtgagttcagtgcacgatctctgttctgtacttggcatggattttgtgggcactgttactaaagttcatccaagtcttgatgactctgttggtgtccaatccaagagcattagtggcgaaacaatatccaagctgtctaaaatggtgattgtacttgaagaagaaaaatcgaagaggtttgcaaagattcaagctctagcttcccagctatctgatctttggaacttaatggattctcctgtggaggaacagcaaccttttcgtcacgtaacatgcataatgtcctcaacattggatgatgtgatagttccaggagctctggctcttgatgtaattcagcaggcggaactcgaagttgaaaggcttgatcagctaaaagctagtaggatgaaggatattgcattcaagaaacagactgaacttgaagatatatatgcccgggctcatgttgcagtagattctagtgctgcaagagataggataatgtctattattgagtccagtagtttcgagccttcagaactactggctgatatggagaaccagatacttaaagcaaatgaggagtccttaagcagaaaggacatattggagagggttgataggtggatgtcagcatgtgaagaagaaagctggcttgaagactacagccgggacgataacaggtacagtgcaactcggggtgcacatctgaatctgaagcgtgcagaaaaggcccgtgttttggtcaataaaattccggctattgttgacacactgcttgcaaagacccgggcatgggaacaagagcatggcgtggccttcacctacgacggcgtccctcttcttgcgatgctggacgaatacaaaatcctgaggcaggagaaggaagacgagaagcgacgaatgagggaccagaaaaagatgaacgaacagctagccgccgaacaggagaagctgttcgggtcaaaaccgagccccgcgcggccgcagtcgtcctcgaggaaggtggctggcgcacggaccaacggcggtggcacgccagctcgcaggctgtcggccctccagagcggcggcaggaccgctagccgggatgggaggagggatgcgagcaggcccgtggcccccgtgaactacgtcgccatcgccaaggaggacgtggcctcgcaggcgtccagcaaccacactgggccgtccaccccctgaccggccgtgccagcagtaactgaactgttgtggcggtgcttagatatatatataccagtgcagtgcagtagtcagagctgattgtagatcggataatggaaaaaaacaaacgaagctggatatggtatcacacattatcagttgtcactggttgttcgtctggtcgtcctatctagcgaactcgtcctcgtgtagccgtgacaatttgctcgtcgctgagttggagacagggaatgtcaagttagagctagtttaataatatagcctataacggac

SEQ ID NO: 61822 - DNA, 3644 bp, Zea Mays
cccggctgcagggcctatagccctatatgtatacgcagacgataacaggacgtgacaggtgcagctcgcggagccggtagcaccccagacgcggccaaccgctagctaggccggtgccgccatggctgcgtcctcctgctgccaggcccgctggctgctccccctgctgctgcttgctgctgccgcgggtgctcttggtgcagagggcgcctcctccattgtgcagctggacgtggagtccctgctcccgtccgcagccgctccttgccccacccctcaagcagagcaaaaacaaggtgccgcgccgcccacaaggatgcccgtcgtgcaccagcacggcccgtgctcgccgctggccgacaacaggaacgggaaggcgccgtcccacgcggagatcctcgccgcggaccagcgccgcgccgagtacatccaccgccgcgtggccgagaccaccgggcgggcgagacgacggaagcagggcgcaccggtcgagctccggcccggcacgccgccgtcgtcgatcgtcgtcccctcgtcgtcctccgccacgtcgacgacggacctgccggcgtcgtacggggtcgcgctgggcacgggaaactacgtggtgcccgtccgcctcggcacgccggcggagcggttcacggtggtgttcgacaccggcagcgacacgacgtgggtgcagtgccagccgtgcgtggcctactgctaccggcagaaggagcctctcttcgaccccaccaagtccgccacctacgccaacatctcctgctcctcgtcctactgctccgacctctacgtcagcggctgctccggcggccactgcctgtacggcatccagtacggcgacggctcctacaccatcggcttctacgcccaagacaccctcaccctggcctacgacaccatcaagaatttccggttcgggtgcggcgagaagaaccgtgggctgttcgggagggcggcggggctgctgggcctcggccgcggcaagacgtcgctgccggtgcaggcgtacgacaagtacggcggcgtgttcgcgtactgcctcccggcgacgtcggccgggacggggttcctggacctggggccgggcgcgccggcggcgaacgcgcgcctgacgccgatgctggtggacaggggcccgacgttctactacgtggggatgacgggcatcaaggtgggcgggcacgtgctgcccatcccgggctccgtcttctccaccgccggcacgctggtggactccggcacggtgatcacgcggctcccgccgtcggcgtacgcgccgctgcggtcggcgttctccaaggcgatgcagggcctggggtacagcgcggccccggcgttctcgatcctcgacacctgctacgacctgacggggcacaagggggggagcatcgcgctgcccgcggtgtcgctggtgttccagggcggcgcgtgcctggacgtggacgcgtcggggatcctgtacgtggcggacgtgtcgcaggcgtgcctggcgttcgcgcccaacgctgacgacaccgacgtggccatcgtcgggaacacgcagcagaagacgcacggcgtactgtacgacattggcaagaagatcgtcgggttcgccccgggagcttgctgatccggccatggtttgtgaaaaactccagatcatctgcatccaccaaagtggctgctgagtgaaaatgggagtggcaggtcacaacgatccattgttaggtgaaacgacatgtgggtctttgctgcagcaacttcagctgatatgggatgaggttggcgaaagtgatgaagatcgtgacaagatgttacttcagctagagcaagagtgcttagatgtttataggagaaaggttgatcaggcttctagctccaggtcatgtctcctccaacagctttccaactccaaatcggaactgactagactcctttctgcattaggagagtcatctatttctggtgctcctgacaagacatctggtacaatcaaggagcaactagcagctatatcaccatctttagagacactccgcaggaaaaaagagagtagggtgaaagagtttgctcatgtacaacttcagattcagatacttcgtgatgaaattgctggggatctacatattggtgaacagttggaaacaccccatgttaatgcggatgatctttcagtgaggagattaaatgaatatctttctgaactacaagccctgcaaaaggaaaagagtactaggctctcaaggattcttgaatccgtgagttcagtgcacgatctctgttctgtacttggcatggattttgtgggcactgttactaaagttcatccaagtcttgatgactctgttggtgtccaatccaagagcattagtggcgaaacaatatccaagctgtctaaaatggtgattgtacttgaagaagaaaaatcgaagaggtttgcaaagcaaccttttcgtcacgtaacatgcataatgtcctcaacattggatgatgtgatagttccaggagctctggctcttgatgtaattcagcaggcggaactcgaagttgaaaggcttgatcagctaaaagctagtaggatgaaggatattgcattcaagaaacagactgaacttgaagatatatatgcccgggctcatgttgcagtagattctagtgctgcaagagataggataatgtctattattgagtccagtagtttcgagccttcagaactactggctgatatggagaaccagatacttaaagcaaatgaggagtccttaagcagaaaggacatattggagagggttgataggtggatgtcagcatgtgaagaagaaagctggcttgaagactacagccgggacgataacaggtacagtgcaactcggggtgcacatctgaatctgaagcgtgcagaaaaggcccgtgttttggtcaataaaattccggctattgttgacacactgcttgcaaagacccgggcatgggaacaagagcatggcgtggccttcacctacgacggcgtccctcttcttgcgatgctggacgaatacaaaatcctgaggcaggagaaggaagacgagaagcgacgaatgagggaccagaaaaagatgaacgaacagctagccgccgaacaggagaagctgttcgggtcaaaaccgagccccgcgcggccgcagtcgtcctcgaggaaggtggctggcgcacggaccaacggcggtggcacgccagctcgcaggctgtcggccctccagagcggcggcaggaccgctagccgggatgggaggagggatgcgagcaggcccgtggcccccgtgaactacgtcgccatcgccaaggaggacgtggcctcgcaggcgtccagcaaccacactgggccgtccaccccctgaccggccgtgccagcagtaactgaactgttgtggcggtgcttagatatatatataccagtgcagtgcagtagtcagagctgattgtagatcggataatggaaaaaaacaaacgaagctggatatggtatcacacattatcagttgtcactggttgttcgtctggtcgtcctatctagcgaactcgtcctcgtgtagccgtgacaatttgctcgtcgctgagttggagacagggaatgtcaagttagagctagtttaataatatagcctataacggac

SEQ ID NO: 61823 - DNA, 1139 bp, Zea Mays
attcagttaatcagttccctgtgaatctaaacgcactcacttgccggcagcgcactcccactcccaccggttccgccctggtctacgttctgtcgttctgtggctgagctccaaagtccaaagattagtgaatccaaaaggcgaccaaacagatcccccgctcctgtgctccgctcatgttagagaaccccctgggaaaacgcagcggagaaactctggagatcgaaaccccggcacgcagctaggcgaactgcacgcaactgcaggtcgacgtctgatccatttcttgtcgcttcagcttctggtgctggtcttcttccagttgcatcctggttacctgtgtcaaggggcggttggtgtctggtgtagttggagggcagagcttcgcgggcggcgaagaagaagagcagcagagagactctgctgacactgaccgagggagatatggcgaggaagctgagagagttgctgcagaagagcggcaaccgcgtatgtgccgactgcggcgcacctgatcccaaatgggcatcggctaacattggagtattcatttgcctaaagtgttctggtgttcacagaagcctcgggacacatgtttcaaaggtgctgtcagtcacactagatcaatggacggatgatgagatcaactccatgatagaagttggtggaaactcttatgccaatgctatatatgaagcatttctgccagagggctatcagaagccgcatccagattctagccaagaagagagagctgatttcatcaggtcgaagtatgagttgcaagaattcctgaagccaagcctaaggttagtttccagcaataagggctctttagaggcgaccagctctcgaaagcatatggataattctgtgtctctttctgctagtttcagcagtgaggctggaatggttgagttcattggaatactaaaagttaaagtgataagagggactaaactagctgtaagagacctgatgagtagtgacccctatgttgtactgaccctaggacagcagaaagcaaaaacttctgtgagtaaacgtaatctgaatcctgtttggaatgaagagcttaagctgtcagttccccagcactacgggcctctgaaacttacaccttttcttcaatctttcat

SEQ ID NO: 61824 - DNA, 1165 bp, Zea Mays
attcagttaatcagttccctgtgaatctaaacgcactcacttgccggcagcgcactcccactcccaccggttccgccctggtctacgttctgtcgttctgtggctgagctccaaagtccaaagattagtgaatccaaaaggcgaccaaacagatcccccgctcctgtgctccgctcatgttagagaaccccctgggaaaacgcagcggagaaactctggagatcgaaaccccggcacgcagctaggcgaactgcacgcaactgcaggtcgacgtctgatccatttcttgtcgcttcagcttctggtgctggtcttcttccagttgcatcctggttacctgtgtcaaggggcggttggtgtctggtgtagttggagggcagagcttcgcgggcggcgaagaagaagagcagcagagagactctgctgacactgaccgagggagatatggcgaggaagctgagagagttgctgcagaagagcggcaaccgcgtatgtgccgactgcggcgcacctgatcccaaatgggcatcggctaacattggagtattcatttgcctaaagtgttctggtgttcacagaagcctcgggacacatgtttcaaaggtgctgtcagtcacactagatcaatggacggatgatgagatcaactccatgatagaagttggtggaaactcttatgccaatgctatatatgaagcatttctgccagagggctatcagaagccgcatccagattctagccaagaagagagagctgatttcatcaggtcgaagtatgagttgcaagaattcctgaagccaagcctaaggttagtttccagcaataagggctctttagaggcgaccagctctcgaaagcatatggataattctgtgtctctttctgctagtttcagcagtgagcatccttcgcttcatatatttttcaggctggaatggttgagttcattggaatactaaaagttaaagtgataagagggactaaactagctgtaagagacctgatgagtagtgacccctatgttgtactgaccctaggacagcagaaagcaaaaacttctgtgagtaaacgtaatctgaatcctgtttggaatgaagagcttaagctgtcagttccccagcactacgggcctctgaaacttacaccttttcttcaatctttcat

SEQ ID NO: 61825 - DNA, 985 bp, Zea Mays
cgcactcccactcccaccggttccgccctggtctacgttctgtcgttctgtggctgagctccaaagtccaaagattagtgaatccaaaaggcgaccaaacagatcccccgctcctgtgctccgctcatgttagagaaccccctgggaaaacgcagcggagaaactctggagatcgaaaccccggcacgcagctaggcgaactgcacgcaactgcaggtcgacgtctgatccatttcttgtcgcttcagcttctggtgctggtcttcttccagttgcatcctggttacctgtgtcaaggggcggttggtgtctggtgtagttggagggcagagcttcgcgggcggcgaagaagaagagcagcagagagactctgctgacactgaccgagggagatatggcgaggaagctgagagagttgctgcagaagagcggcaaccgcgtatgtgccgactgcggcgcacctgatcccaaatgggcatcggctaacattggagtattcatttgcctaaagtgttctggtgttcacagaagcctcgggacacatgtttcaaaggtgctgtcagtcacactagatcaatggacggatgatgagatcaactccatgatagaagttggtggaaactcttatgccaatgctatatatgaagcatttctgccagagggctatcagaagccgcatccagattctagccaagaagagagagctgatttcatcaggtcgaagtatgagttgcaagaattcctgaagccaagcctaaggttagtttccagcaataagggctctttagaggcgaccagctctcgaaagcatatggataattctgtgtctctttctgctagtttcagcagtgaggctggaatggttgagttcattggaatactaaaagttaaagtgataagagggactaaactagctgtaagagacctgatgagtagtgacccctatgttgtactgaccctaggacagcagcattgttctctgcag

SEQ ID NO: 61826 - DNA, 1011 bp, Zea Mays
cgcactcccactcccaccggttccgccctggtctacgttctgtcgttctgtggctgagctccaaagtccaaagattagtgaatccaaaaggcgaccaaacagatcccccgctcctgtgctccgctcatgttagagaaccccctgggaaaacgcagcggagaaactctggagatcgaaaccccggcacgcagctaggcgaactgcacgcaactgcaggtcgacgtctgatccatttcttgtcgcttcagcttctggtgctggtcttcttccagttgcatcctggttacctgtgtcaaggggcggttggtgtctggtgtagttggagggcagagcttcgcgggcggcgaagaagaagagcagcagagagactctgctgacactgaccgagggagatatggcgaggaagctgagagagttgctgcagaagagcggcaaccgcgtatgtgccgactgcggcgcacctgatcccaaatgggcatcggctaacattggagtattcatttgcctaaagtgttctggtgttcacagaagcctcgggacacatgtttcaaaggtgctgtcagtcacactagatcaatggacggatgatgagatcaactccatgatagaagttggtggaaactcttatgccaatgctatatatgaagcatttctgccagagggctatcagaagccgcatccagattctagccaagaagagagagctgatttcatcaggtcgaagtatgagttgcaagaattcctgaagccaagcctaaggttagtttccagcaataagggctctttagaggcgaccagctctcgaaagcatatggataattctgtgtctctttctgctagtttcagcagtgagcatccttcgcttcatatatttttcaggctggaatggttgagttcattggaatactaaaagttaaagtgataagagggactaaactagctgtaagagacctgatgagtagtgacccctatgttgtactgaccctaggacagcagcattgttctctgcag

SEQ ID NO: 61827 - DNA, 2803 bp, Zea Mays
ggagccggaggggatgcgagaggtgggtactggggaggacaaactgctggcgtgagatatcgtaaccgccttccgaccaccgaaccagcaatccacggggctcaggctcaggctcaggttcaggctcactcacgtccgctcttgccccgtgccttccacgaacgcgcgcatccacaccgcgtttatgtcggacgccgccgcggccatccgccgactcctcgtcgccggcgtccgccccagcacccacctgccgccgctcaccgtcaagctcctccacgcccgcgtcctccgcctggacatcctcgccgacctatccctgctcctcctccgcgccactacctcctccggcctgcacctccacgcgctccgtctccacgccctcctccccgagccctcccacctcaccttcccgttcgcactcaagtccgcctcgcgcctccccttcccgctccccgtcggcgcgcagctccacgcgcgctcgctcaagctcccctcccactccaacccgcacgtgctcacctcgctcctcggcctctacgcgaaatgcggccgcttgcacgacgcgcagagggcgttcgacgaaatgccccaccccagcaccgtctcctggaccgcgctcatcgccgcgtacatggacgcggggcacgctctcgaagccattggggtcgccaggagggcgttcgcgagcggcatgcgccccgacagcttcacggcggtgcgggtgctcaccgcgtgcgcccgcgtcgcagatctggagaccggggaggccgtgtgggcggcggcgcggcaggaggagggggtcgcggagagcgtgttcgtggcgactgcggcgttggacctgtacgtcaagtgcggggagatggagaaggctagatcagtgtttgacgagatgaagaacagggatgcggtggcctggggcgcgatggtcggagggtacgcctccaacggacatcctcgggaggctctggaccttttcttcgcgatgcagatggagggagcgaagccggattgttacacggtggtcggggcgctctcagcgtgcacgaggttaggtgcgttggatttgggacggcaggcggttggaatggtgcactgggatgaggtccttggcaacccagtcctgggtactgcactgatcgatatgtatgccaagtgtgggagcacaagtgaggcgtggatggtgttccagcagatgttggagagggacatcattgtctggaatgcgatgatcctggggcttggcatgactggccacgagaagattgcatttgcgcttgttggtcagatgaagaagtcgggtgtgaagctgaatgataataccttcattggattgctctgcagctgcacacatactggccttgtaaatgatgggcggcagtactttcataacatgactcatgtataccgtataagccctaggattgagcattatggttgtatggttgacctattcagtcgtgcgggattgctggaagaggctcatcagctgattggtgacatgccaatgctggcaaatgccgttgtatggggagcactcctcggtggttgcaagatccaccggaatgctgaccttgctgaacatgcgttgaagcagctcatccgactggagccatggaattctgggaactatgtcatgctttctaacatatactcgaacagtggaagatgggaagatgctgcaaagcttaggttggaaatgaaggcaaaggggattgagaaggtccctgcatctagctgggttgagcttgatggtaaggtccacaagttctatgttggggacgattcacatcctctctcagataagatttatgcaaagcttgatgaattgggcatggaaatgaaggccatggggtatgaacccactactgaggtggtgatgtttgatgtcgaaaatgaggagaaggaaaacacactagtgcatcacagcgagaagattgccatcgcattcagtctcatcactactgaaccaggagagaccattagggtcaccaaaaacctccgagtttgcactgactgccactctgccatcaagctcatatcgaggataacctgtcgtgaaattgttgtacgagataacaatagattccattgctttagagatggtcattgttcttgcaatgactactggtagtagacctacatgttgcagttgcgagcggcatggagagctggaagcatgtccagtccatttttgtttgatgtaaaacttttatcacctagaattttgaccgggcatagaagaggcagagtattaggcgtttggatgtcagttcctttcccagtgtataatttctgctagagttttatctgtgtcttgcagccctccggcattctgaaagatctggatacagtgatacacggcagcggtggtatagatatatgcaagttctgagaagacaattgttctgctgacatacacattcttgcttccttggcagccagtaaaaaacaccggcgtgttcggctggctacaagccgacactgttgcagctgtttggattgctgcagctgcaatccatagagagaaaaatactgtagaagccgcagccgcagccggattgcagccgcagcaagccgcagcgaacaagctgcacatctgaaactctttgtcatgttgcggcatctggctctggactggaaacagtttgacttgttttttttttgtaataacgtttatctgtgaattctagctcaaagttctgaggctgcaatccaattttgccgcattctgtcagcagatgtctatgaccttgttaattgagtattgactccgttcataaatatacgacgccgttcatttttt

SEQ ID NO: 61828 - DNA, 3203 bp, Zea Mays
cgacttttcatggtaaaaaaaaaaatcttttccgaactttcgattgccaatatcgagaatcgaccattgggctagttcctatacaagacgatatccaagggtggctgaacgaatttcgatttcggcatggcacatatataataatacaaatcaaatactggtcaggaacaaacactggacgaactcaccagactcgattcgatccaagacagccggaaaatctgcgtcctcgttaagaggagagaagaaagagatgatgccggagccggaggggatgcgagaggtgggtactggggaggacaaactgctggcgtgagatatcgtaaccgccttccgaccaccgaaccagcaatccacggggctcaggctcaggctcaggttcaggctcactcacgtccgctcttgccccgtgccttccacgaacgcgcgcatccacaccgcgtttatgtcggacgccgccgcggccatccgccgactcctcgtcgccggcgtccgccccagcacccacctgccgccgctcaccgtcaagctcctccacgcccgcgtcctccgcctggacatcctcgccgacctatccctgctcctcctccgcgccactacctcctccggcctgcacctccacgcgctccgtctccacgccctcctccccgagccctcccacctcaccttcccgttcgcactcaagtccgcctcgcgcctccccttcccgctccccgtcggcgcgcagctccacgcgcgctcgctcaagctcccctcccactccaacccgcacgtgctcacctcgctcctcggcctctacgcgaaatgcggccgcttgcacgacgcgcagagggcgttcgacgaaatgccccaccccagcaccgtctcctggaccgcgctcatcgccgcgtacatggacgcggggcacgctctcgaagccattggggtcgccaggagggcgttcgcgagcggcatgcgccccgacagcttcacggcggtgcgggtgctcaccgcgtgcgcccgcgtcgcagatctggagaccggggaggccgtgtgggcggcggcgcggcaggaggagggggtcgcggagagcgtgttcgtggcgactgcggcgttggacctgtacgtcaagtgcggggagatggagaaggctagatcagtgtttgacgagatgaagaacagggatgcggtggcctggggcgcgatggtcggagggtacgcctccaacggacatcctcgggaggctctggaccttttcttcgcgatgcagatggagggagcgaagccggattgttacacggtggtcggggcgctctcagcgtgcacgaggttaggtgcgttggatttgggacggcaggcggttggaatggtgcactgggatgaggtccttggcaacccagtcctgggtactgcactgatcgatatgtatgccaagtgtgggagcacaagtgaggcgtggatggtgttccagcagatgttggagagggacatcattgtctggaatgcgatgatcctggggcttggcatgactggccacgagaagattgcatttgcgcttgttggtcagatgaagaagtcgggtgtgaagctgaatgataataccttcattggattgctctgcagctgcacacatactggccttgtaaatgatgggcggcagtactttcataacatgactcatgtataccgtataagccctaggattgagcattatggttgtatggttgacctattcagtcgtgcgggattgctggaagaggctcatcagctgattggtgacatgccaatgctggcaaatgccgttgtatggggagcactcctcggtggttgcaagatccaccggaatgctgaccttgctgaacatgcgttgaagcagctcatccgactggagccatggaattctgggaactatgtcatgctttctaacatatactcgaacagtggaagatgggaagatgctgcaaagcttaggttggaaatgaaggcaaaggggattgagaaggtccctgcatctagctgggttgagcttgatggtaaggtccacaagttctatgttggggacgattcacatcctctctcagataagatttatgcaaagcttgatgaattgggcatggaaatgaaggccatggggtatgaacccactactgaggtggtgatgtttgatgtcgaaaatgaggagaaggaaaacacactagtgcatcacagcgagaagattgccatcgcattcagtctcatcactactgaaccaggagagaccattagggtcaccaaaaacctccgagtttgcactgactgccactctgccatcaagctcatatcgaggataacctgtcgtgaaattgttgtacgagataacaatagattccattgctttagagatggtcattgttcttgcaatgactactggtagtagacctacatgttgcagttgcgagcggcatggagagctggaagcatgtccagtccatttttgtttgatgtaaaacttttatcacctagaattttgaccgggcatagaagaggcagagtattaggcgtttggatgtcagttcctttcccagtgtataatttctgctagaggtaagtttctatgttggagctcttatgtttatctgtatggacttcaggaattaaaatgactaaacatcgcctaattagatagtttattatattttgacgaagacaacacactagatttacattatcagttggaggaatctttcaaaaaatatgaactgccctccggcattctgaaagatctggatacagtgatacacggcagcggtggtatagatatatgcaagttctgagaagacaattgttctgctgacatacacattcttgcttccttggcagccagtaaaaaacaccggcgtgttcggctggctacaagccgacactgttgcagctgtttggattgctgcagctgcaatccatagagagaaaaatactgtagaagccgcagccgcagccggattgcagccgcagcaagccgcagcgaacaagctgcacatctgaaactctttgtcatgttgcggcatctggctctggactggaaacagtttgacttgttttttttttgtaataacgtttatctgtgaattctagctcaaagttctgaggctgcaatccaattttgccgcattctgtcagcagatgtctatgaccttgttaattgagtattgactccgttcataaatatacgacgccgttcatttttt

SEQ ID NO: 61829 - DNA, 871 bp, Zea Mays
ccagcagcagggacgctgaacatgggctgagagatgcgtgggagcaggtgaaggagatgagagccagggaggaggagaccaggcagagagctgccttcctccagcacggcttcgcgtcggcgtggaaggagggaatccacaccgacatcgtcgtcaaacctggcaccggtcccgcgattccagcccacaaggccatcctggccgcgcggtcggaggtgttccggcacatgctgtccggcgacgaccgctgcaaggcccccgccggcggctccatctcgctcccggagctctcccacgacgacctgtccctcctgctcgccttcctctacacaggcgctctggaggcgccaggagaaggaggaggagaggccagccaggaccaggagcggcagctgcacgcgctcctcgtcgcggccgacaagtacgatgtgccgttcctgaggcgggtctgcgaggcgcggctggcggcgggcgtggcgccccggaacgcgctgcggacgcttgaggtcgccgagctgagctccagcgccgcgctcatggagcgcgccatgggcgccgtcgtggagcacgccgaggaggtcgtgttctcggcggaatacgagcggttcgccgcacggaacgcggggctgtgcgtcgagatcacccgcgcgctgctggccaggatgccgacgccggcgaggagtgatggcccgtgcttagagcttggaagcagctagctgatgcatgcagttgtattgtatcagatgatgatggatcggaaagaatactactcttgttccagtttcgagtcacgacaatatgtaattgtaaacgcataagttcttctgaaacacgggcgagcacgatgagcaagactgcaagaacaacacag

SEQ ID NO: 61830 - DNA, 639 bp, Zea Mays
gtgctttttagaaattttctcattttcatgatcctatttctagcaaggtagatttcatgtatcaattgactagaatagagaaagaagctaattgggtaattctaaccggcctggtggctaaactaactgataacaaggcagaagaaaattcgtgtgacttcgaaatcggagacatcgagaactggatgaagatcatggacttcgattgtaaaagtatcaatgcagccatacgcaatattcaccagtcatgactctgcccgcgattacaatttcacgatttttaggaagtatccgtgtcattacgttctctgattagaattattgggtctggaaaccctctttttatggaaccgtgtctcctgattttcccatgctatgagtgtatgtacccttcaatttcaaagtgatgatatatataggatcaaaatacacctgtctgaggatgtgttcctagtggtgttagtctcgtgccattatcagaacaactgttgcccatcagcttgcatgttcaagaatcactgcattgttgcacatatatgctctgaaagcagtggatacatctttggagaaggctacagcatcaggaaagtgacactttctttcttcaatgtgatttcaaggcaaggtactaaattacac

SEQ ID NO: 61831 - DNA, 1056 bp, Zea Mays
tccccgatccgcggttcctcatcgcttcgcttccttcccagatcaggcgaaaggcgtgacgggggccaccgctgcggcgccgcccctcgaccctccgctgctccgcctgcgctggagaccatccatctggaagagatctctgatttacgggatggacggagccaagccagtggcggccgggaagcaggacctggaagaggcgctgctccgtatcgtgcagcagcaccaccaccagtccctctgccaacgacaacaaaccggtacgagcgtgcaaagaaggacgccttgaagagcgctgtgcgggtcgccgatctcctcgtggacacggtcgacggcggggtgcgggagctcttcgtcaacgagaagcgcatcgagctcgaggcccgcgcgctgctcggtacgatcgcgcggtacaggaggcagactgatgagtggctggcggccaccagcgagatcaactcggccctgaagctgatcaactctttcatccctagcagattcatctctccggttccaaatacagttgaatttgctgactggattggtcgaacaaagcagaagaaaattcgtgtgacttcgaaatcggagacatcgagaactggatgaagatcatggacttcgattgtaaaagtatcaatgcagccatacgcaatattcaccagtcatgactctgcccgcgattacaatttcacgatttttaggaagtatccgtgtcattacgttctctgattagaattattgggtctggaaaccctctttttatggaaccgtgtctcctgattttcccatgctatgagtgtatgtacccttcaatttcaaagtgatgatatatataggatcaaaatacacctgtctgaggatgtgttcctagtggtgttagtctcgtgccattatcagaacaactgttgcccatcagcttgcatgttcaagaatcactgcattgttgcacatatatgctctgaaagcagtggatacatctttggagaaggctacagcatcaggaaagtgacactttctttcttcaatgtgatttcaaggcaaggtactaaattacac

SEQ ID NO: 61832 - DNA, 850 bp, Zea Mays
tccccgatccgcggttcctcatcgcttcgcttccttcccagatcaggcgaaaggcgtgacgggggccaccgctgcggcgccgcccctcgaccctccgctgctccgcctgcgctggagaccatccatctggaagagatctctgatttacgggatggacggagccaagccagtggcggccgggaagcaggacctggaagaggcgctgctccgtatcgtgcagcagcaccaccaccagtccctctgccaacgacaacaaaccggtacgctgatcaactctttcatccctagcagattcatctctccggttccaaatacagttgaatttgctgactggattggtcgaacaaagcagaagaaaattcgtgtgacttcgaaatcggagacatcgagaactggatgaagatcatggacttcgattgtaaaagtatcaatgcagccatacgcaatattcaccagtcatgactctgcccgcgattacaatttcacgatttttaggaagtatccgtgtcattacgttctctgattagaattattgggtctggaaaccctctttttatggaaccgtgtctcctgattttcccatgctatgagtgtatgtacccttcaatttcaaagtgatgatatatataggatcaaaatacacctgtctgaggatgtgttcctagtggtgttagtctcgtgccattatcagaacaactgttgcccatcagcttgcatgttcaagaatcactgcattgttgcacatatatgctctgaaagcagtggatacatctttggagaaggctacagcatcaggaaagtgacactttctttcttcaatgtgatttcaaggcaaggtactaaattacac

SEQ ID NO: 61833 - DNA, 1017 bp, Zea Mays
tccccgatccgcggttcctcatcgcttcgcttccttcccagatcaggcgaaaggcgtgacgggggccaccgctgcggcgccgcccctcgaccctccgctgctccgcctgcgctggagaccatccatctggaagagatctctgatttacgggatggacggagccaagccagtggcggccgggaagcaggacctggaagaggcgctgctccgtatcgtgcagcagcaccaccaccagtccctctgccaacgacaacaaaccggtacgagcgtgcaaagaaggacgccttgaagagcgctgtgcgggtcgccgatctcctcgtggacacggtcgacggcggggtgcgggagctcttcgtcaacgagaagcgcatcgagctcgaggcccgcgcgctgctcggtacgatcgcgcggtacaggaggcagactgatgagtggctggcggccaccagcgagatcaactcggccctgaaggttccaaatacagttgaatttgctgactggattggtcgaacaaagcagaagaaaattcgtgtgacttcgaaatcggagacatcgagaactggatgaagatcatggacttcgattgtaaaagtatcaatgcagccatacgcaatattcaccagtcatgactctgcccgcgattacaatttcacgatttttaggaagtatccgtgtcattacgttctctgattagaattattgggtctggaaaccctctttttatggaaccgtgtctcctgattttcccatgctatgagtgtatgtacccttcaatttcaaagtgatgatatatataggatcaaaatacacctgtctgaggatgtgttcctagtggtgttagtctcgtgccattatcagaacaactgttgcccatcagcttgcatgttcaagaatcactgcattgttgcacatatatgctctgaaagcagtggatacatctttggagaaggctacagcatcaggaaagtgacactttctttcttcaatgtgatttcaaggcaaggtactaaattacac

SEQ ID NO: 61834 - DNA, 960 bp, Zea Mays
cacaagctggggcgggttcaaggcccatgcgatacccgcctacccaaggcccatgaagcgaaaggcgtgacgggggccaccgctgcggcgccgcccctcgaccctccgctgctccgcctgcgctggagaccatccatctggaagagatctctgatttacgggatggacggagccaagccagtggcggccgggaagcaggacctggaagaggcgctgctccgtatcgtgcagcagcaccaccaccagtccctctgccaacgacaacaaaccggtacgagcgtgcaaagaaggacgccttgaagagcgctgtgcgggtcgccgatctcctcgtggacacggtcgacggcggggtgcgggagctcttcgtcaacgagaagcgcatcgagctcgaggcccgcgcgctgctcggtacgatcgcgcggtacaggaggcagactgatgagtggctggcggccaccagcgagatcaactcggccctgaaggaaatcggagacatcgagaactggatgaagatcatggacttcgattgtaaaagtatcaatgcagccatacgcaatattcaccagtcatgactctgcccgcgattacaatttcacgatttttaggaagtatccgtgtcattacgttctctgattagaattattgggtctggaaaccctctttttatggaaccgtgtctcctgattttcccatgctatgagtgtatgtacccttcaatttcaaagtgatgatatatataggatcaaaatacacctgtctgaggatgtgttcctagtggtgttagtctcgtgccattatcagaacaactgttgcccatcagcttgcatgttcaagaatcactgcattgttgcacatatatgctctgaaagcagtggatacatctttggagaaggctacagcatcaggaaagtgacactttctttcttcaatgtgatttcaaggcaaggtactaaattacac

SEQ ID NO: 61835 - DNA, 935 bp, Zea Mays
gaaactagaatcagagattggagcctcccctctgtttcatcaacaactgatgacgcctgatcgtttcattaacaactgatcgaggcctccctcccctctgttccacaagctggggcgggttcaaggcccatgcgatacccgcctacccaaggcccatgaagtaaggcccagcatcctcggcgccgtttcctcttctttccccgatccgcggttcctcatcgcttcgcttccttcccagatcaggcgaaaggcgtgacgggggccaccgctgcggcgccgcccctcgaccctccgctgctccgcctgcgctggagaccatccatctggaagagatctctgatttacgggatggacggagccaagccagtggcggccgggaagcaggacctggaagaggcgctgctccgtatcgtgcagcagcaccaccaccagtccctctgccaacgacaacaaaccggaaatcggagacatcgagaactggatgaagatcatggacttcgattgtaaaagtatcaatgcagccatacgcaatattcaccagtcatgactctgcccgcgattacaatttcacgatttttaggaagtatccgtgtcattacgttctctgattagaattattgggtctggaaaccctctttttatggaaccgtgtctcctgattttcccatgctatgagtgtatgtacccttcaatttcaaagtgatgatatatataggatcaaaatacacctgtctgaggatgtgttcctagtggtgttagtctcgtgccattatcagaacaactgttgcccatcagcttgcatgttcaagaatcactgcattgttgcacatatatgctctgaaagcagtggatacatctttggagaaggctacagcatcaggaaagtgacactttctttcttcaatgtgatttcaaggcaaggtactaaattacac

SEQ ID NO: 61836 - DNA, 487 bp, Zea Mays
cacaccctaaaatggaggagaaaaatcatggattagatcgagaagccaaaattagataaaagcctaaaccctaaaattatggggggaaattgaggagtccaaaaaagcatgaggttctccggtacaagaaaatcatagcaaaaggatgctgagcatgattgaaagcacgaatttggaaacaaatagatgtccaccgaatcgaaacggacgatgaaagataaaatatcaaatttgagcaaacaatcggagccgaggaggaagctagtcgagaggaaacttcagtacgaaggcggagtcaacgaggaacctaatgccgacaaaaccgaatgaacagagagaagaagggataatcaaaacctatatctcagcaaaacaaacggagccgagtaggaacccgcggcagatgaagcgcatgtgttgatccagaaaggactaaagtgatgtaaagcgccacagttgggagaagaagcgagaagcaaggaaggag

SEQ ID NO: 61837 - DNA, 523 bp, Zea Mays
tcaaagccagcaaaaagaacttgaaaactgaaaagttcgaattagttgttatgaagaagggtgtgaaaactctaaaggtaaaatcagatgtgatgaataaggatctggtgtaatgaagaagagtttgaaaggtcacaaaatagaatttgatatgatgaagaagggtgtgaaaactgctaaacagaatctgatgtaatgaagaatgggttgaagattctgaaaagtataaactgatgttatggtgtcagtataaagagaaataaaaatatatgtgctcatatataaatggttggaggactattctctattatagtacacaaaattaaaggtcccggagggaaaaaatatccctgagtagtagtggcaaaaaacaatgagcgttgctgcaacatgtgttgcaacagcattcaaccgtctgtacctcgatccttgatgaaattagagagcgtgttgcagtcatagaatagggcaaagccggtgaagcctagttcttcgaacgacacatgtcttcgcaggacggtcc

SEQ ID NO: 61838 - DNA, 784 bp, Zea Mays
acgacaaacatgtctccacctatattatagcatatcgctgatgcctttctacaattgaggtgttgttaactgatgaaaacatttaatcactctctcattctctaaaagaatcgtcatcctcctcgtcctcctcattattgccagaggtggttggtacctcaaacatttggagttctatggtgtgagacaaaggtgaaggtgacgcctcagagttgtccatctcatccgctgtatgtggcgacggagatggcggaggtgatgattcagaaatgtttatctcatcagataccaacgatacatgtggcggcgaaggtggttcatcagtgtcgtagttgcttatcgaaatggcaccattgttcggcgtctcctcgggtgtcaggtacaatgatgactaagacgatggcactgtgtagatctcatcatatgtggtcatcgtcttctcaactgtcaggtagaatgatgacaaagacgacggcattgtgtatgtctcatcagatgtggccgtcgtctgggattcaccaccgtgcaactcgtcacctgccccaaagatcttggcaaggagatgccggagccagcctattccgaaaattctagcaaacaacactggcggagccggccggcataaaactgaagccgcccggtcaccgctgcgctgccgtccgccggagcaggcgatggggcatcggcgcgccgccggccctaggccctgtcgctgcggcgccccgaagagcacctcttcatcgttccgcccacatacgcgcctgactgtgactgtggctccccg

SEQ ID NO: 61839 - DNA, 420 bp, Zea Mays
ctgtgatctgcactacactttttcattgcagatttatttacatagactcatgaatgtttattagcctagtttcctaaccaattctgcaggtcggccctttgcgctaagcgaaactgtatctaattctcaggattttcgactcctgtttccccaattttaattgtagcccatcaattcctacctatattaccttatttgattttggtcagctagctcagcctgtaatacacactcctccacgtcgtgctcgccgactccccgctcaatcccttcttctctcacgagatcagcggtgaggacgacattggggatagagacctagggttctccaagtgggccgagaaactccatggcgatgtcacaggtttcgtgcagttctttaaatttattttgcccgattgtaagggaactgtgtcctct

SEQ ID NO: 61840 - DNA, 1893 bp, Zea Mays
catcactttggtcctttctggatcaacacatgcgcttcatctaccgcgggttcctactcggctccgtttgttttggcattcaggcagaatttgatttgggcacaaggaataatttatccagtccttaaagattttcctaatgaggcgcaatgaatgaccatagtattcgctctggaagaaaaagcacctcgctagaagatagatatatttctcggcctctgttgagggcggcgactggcaaaggatgagggaatgcgtggacctggggttcgccggcctcgccctcaactccgattgcaacgctctatctaaggtcgttttggaccgtcctacgaagacctgtgccgttcgaagaactaggcttcaccggcttcgccctatgctacgactgcaacacgctctctaatttcatcaaggatcaaggtacaaacggttgaatgttgttgcaacacatgttgctgcaacgctcaatgtttttttgccactgctactcagggatatttttttccctccgggacctttaattttgtgtactataatagagaatagtcctccgaccatttatatatgagcacatatattttttatttctctttataccgacaccataacatcagtttatactttttagaatcttcagcccattcttcattacatcagattctgtttagcagttttcacacccttcttcgtcatatcaaattctattttgtgacctttcaaactcttcttcattacaccagatcctatatttcgagttttcagatccttattcatcacatctgattttaccttttgagttttcacacccttcttcataacaactaattcaaacttttcagttttcaagttctttttgctggctttgaacagactctccccctatatgcatgttgtacatgtagactcaccatccccactactttcaccaactttcataactgtccttctacctctacttagttgttcatctcaaaccagaaaaaatatacatactcatatatttattatttctctttacgcctagcatttccatagagttacgttgttcagcaaaaaaacataacttcttccattgtataccaatatcataatcatgatagcttctccttatagaacatggcaataagcacctgatatcctaagaatatggctgactggtagctgataaatgttatagcattaacctttgtgttggttttttgttagttaggtaaaaattatgcccaattatgaattttgaatattagtatgttcaactgcaacttgaatcattttaatcctctattttattgtttctacagacctttggtttcacttgcgtatccactaaccttttcttggaactatgttgcaattttattttcttgttcttcatgttcttggacatcatctcaaccatacaatgggattcattgaaatatcaggagggttgttgtacacatgagcggaggtcgaacccttcttgcagggctcttaatgtatgaagtatgccatgctattgaatcaatgtgagataattccattttttgtgcactaacttacttttagtgcacttatttggtgtcgtaaacattaatatttttagttatacttcagtaaaattgtaagcatattaatcaagaattcctatgtacaaatattttgttatgttacagctgtatttcgttggacaaggttactgctttcaactttgttgctcggagcctccacctcaaccatgtctttattctttgtgttagttcaattggattcattaaaatatcaggagggttgttgtacatgtgaaatgacgccaccccttcttgcagggctcttaatctaaggtaatctatggaatacaccatgctattgattcaagatggcataattccatgttgacatagagaaatt

SEQ ID NO: 61841 - DNA, 1718 bp, Zea Mays
tcagcttgtatttcgtggtaaggtaatagtatgctagctgttggatgatgatgggcgagctaaaccacattttcagactgatctctgctctcataaaccgccgctcgtcctgccctcgtgatctccgcccctacacaccacacacacctctcaaacctctataaaaaaaccgccagaaaacaccgaaacccgcacgtttctctgcgactcgcacggcccgcgcccaccaccgaccaccccacctggttcggtcggcactcggcaccccgccccgcatacatgccgccgcccagcctcaccgtggcgcgcgacccggccgccgccgccaccatgcggcaccgcaaggtccacccgacgccgggcggaggcgcagggacgacgaaggagatgggcgcggcggaggggtgggcgcggcccgagtggtgctcggcggcgggcgccgcggccgtgctgcggcggcacccggcgcccgcgctcttcgggtgcggcctcctgctcttcatggccgtcgagtacaccatccccatggtcaggccggacgcgccgccgctcgacctgggcttcgtcgccaccaggggcttgcacgccgccgtcgccgcgaggccctggctcaactcgctcctcgccgcgctcaacacggtgccatatttgctaaacggatcaatcctataaatcatttacaccactcaaaagcaactcaatacttctcctgccttagcccatcctattccatttaaccagaaacacctgccccttccaccagaaaattcgttctcttgaattatttctgttgcttgaaaagctcaaccgagaattgctcactcccacattggaattcctagcctagtcgctattaactagggtttgatctcacaactacttgtgctgacatgtgcacccacaccagaattgagcttgttgggggcctatcacaattgtgaaataacaacatcagaacaacatgattaatttattagtttcccatccctttccatactctaggacctgttcggcttgaggtggtttgagggagattaaatcccttgttagtgaaatttgaataggagatgatttaatatttctcgactgatccgaattgtattttcagttgtattttattctagaaaattgaaactagacaattggtgataacagaaaggttgcacatgtgagtctagcacacggccacgaataacataataatccagaagaatatgatttgaaaataaagaaaagaagaggcgtatctagcgacaaacattgtgccgatcaatacagacctttcgatcgatgcaggaaaagaaggaagaagttgagcggtagatgttgggtcgatgcaggaagaggagcaatctgtgcttagggcttggatgacatttgtgttggagtcgcttgctctctcagaatttgtgtgcggtagaacaaagtggtgagtaaccaactaaacagtggtagagaggctaatcaagagcaaatggcatttgttttggagtcgcatgatgagttgccaccgttcctgaccatcgcagacaccactggacgaaattgtgcggaggagaatgcggaacggaggggaggacgatgggacacataggaccgatttttttttttgcttttcagcacattttttttaaaaatatatacgtctggaccattggagggcaaaattgcagatctagactctatgctcggcgccatggattgtggcgacgagctta

SEQ ID NO: 61842 - DNA, 1064 bp, Zea Mays
ctctatctaccctttctctcgctggtcgctgcgtcctgcgccgtgctgctcccctggaccgactgtccagatgatgcgcagttccgcaacccacagattctgatggtgtgttttaatataataacttaaaacctcatcaaattcagatgcaacctgtaaaagttcaacatatctgcttccatgattctactacggctctatcctcttgctgatcctgtggtgcatgtgtactactgtatggtggcatgaccacataggccagcttgttaactggatgcaagcaacgattctacctgacattcaggggcgttttcggacattcaggtttctgctacatacagctgcacggctggagctacacaggctatctacaatagcgttacaaaaaatatatatatacaaacacctggtgctttgagctgcctcgtctgatctaacgaagacagctatggtacatgcatcacctgagaaagcgagatgcagaaatcctcgtgaatcccagctccacgagctatacgctggatttaacagaagtttccccctcttctaacggctacgaaccacgtctcttgttgttggttgccatttacagtagctcagtgctgggctagcaagtggtcgtcctcagcagcttagatttcgcagaaacttcgattggcctccagattatgctgtcaagtctgctgcataggttcttgtaaaactgcagctcgtttaagatgcaggttagcagtcattacaagactcaaatcattagtaaaaggatgggatgcaaacagaacagaccctgtggtattccagggtgtcaccggcgacctttcgaacatcaaccatgaacagagaaggggcaacttgaaaaacctgattcaagtgcactgcagagcatgaaaatggctgcacaacaacattgtgtaaagacaagtgatcaactgatgggctgcgtgacctcacctctagaacaacagcgaattggctcgttctgttcgatgatgcaccttcaagccgcagctgcaaagttagtaaacatgtaccagcacatggagatgaacaagagtcaaatgatt

SEQ ID NO: 61843 - DNA, 936 bp, Zea Mays
gccactgctctacatacctttgagatcgagaggtgctcccatggtgtggtgatgatggaacgtgtgaactaactgcttcttttggttccaaactataagacggtttggtttttccggataaattgaaaattctcagctcacctcccaagcttggaacatatatgttgagaggaagtgggattggcatatgttgcaggttggctagggattgccgccccagctggctggttatatattaggctgtcgccgccaaagaaagaaaggcctgcttcttcacctcgcgctccaggttcatgttttgagcgtgtacagtgcatgtggtttcagaaatggggacgctggcgtgcccatggagatctggccacctctttgctttcatcaccttcgccgtgctgttcttctcgacttcatttgccgggagacagtacagtttcttgatggatcaagatgccctacgtcaacaagaaggagagggagcacgaactgagcagaaggaagcgctagtgccactggtgcaagctcggcggctcagcgtcaagacgaacgattacagcagctatgacccttccccgtccatggacaagccacactccaagctcataccgaactgatcaatcatgtacccgtccaggttgcagcagtcgagttgccgatgagaaatttaacagcttaaatgtgtgcctgatttatatatacagaagcattatattactaggcttgcttaaactgttctcatgacatctaatatcatattattatagatgtgacatatagatgtttacttcttctttgtattcatacgcagtcacaggcttcttctcaagattagatcaagtagttagtataataagagtagcaactactttgtcaaactctgaatgcaagtctcctaaacaattttaacaacaagctggttctactgccagagcattcaac

SEQ ID NO: 61844 - DNA, 891 bp, Zea Mays
cttttccctttcatctctgtctccatgccactgctctacatacctttgagatcgagaggtgctcccatggtgtggtgatgatggaacgtgtgaactaactgcttcttttggttccaaactataagacggtttggtttttccggataaattggttggctagggattgccgccccagctggctggttatatattaggctgtcgccgccaaagaaagaaaggcctgcttcttcacctcgcgctccaggttcatgttttgagcgtgtacagtgcatgtggtttcagaaatggggacgctggcgtgcccatggagatctggccacctctttgctttcatcaccttcgccgtgctgttcttctcgacttcatttgccgggagacagtacagtttcttgatggatcaagatgccctacgtcaacaagaaggagagggagcacgaactgagcagaaggaagcgctagtgccactggtgcaagctcggcggctcagcgtcaagacgaacgattacagcagctatgacccttccccgtccatggacaagccacactccaagctcataccgaactgatcaatcatgtacccgtccaggttgcagcagtcgagttgccgatgagaaatttaacagcttaaatgtgtgcctgatttatatatacagaagcattatattactaggcttgcttaaactgttctcatgacatctaatatcatattattatagatgtgacatatagatgtttacttcttctttgtattcatacgcagtcacaggcttcttctcaagattagatcaagtagttagtataataagagtagcaactactttgtcaaactctgaatgcaagtctcctaaacaattttaacaacaagctggttctactgccagagcattcaac

SEQ ID NO: 61845 - DNA, 1423 bp, Zea Mays
ggtgcttctaaaggcgcgatctttgcgttccgggcaaaatcaattccaagtttgggtcactggacgatggggatttgaaatttggcgtacagtgtttggttgcgagtgttcgccaaacatgcgatcttatacgtgggcttggagttgccacttgggaatgggacctgttgcatgtgctctccgagttgcccaggcagcttaacttcattgagcataccagtgacatcggatggaaggagtaccagagggcgaaaccggtgatcatcgaccctgggctatacagcctgcagaagtctgacgttttctggataacagagaaacggagtgtcccaactgcgttcaagctcttcactgagggctacttccacacggtcatctgcaacgtgccggagttccgcaacaccacagtcaaccatgacctgcatttcatttcctgggacaacccaccgaagcagcaccctcactacctcacgctcgctgacttcgacggcatggttaacagcaacgcgccctttgcaaggaagttcgggagagaagaccccgtgctggacaagatcgaccaggagctactgggccgccggcctgatgggtttgtgcccggtggatggacgtatctactgaatgcgacgactgaggaagggagacccttcgccgttgagcgcgtgcaggatctccgcccagggcctggtgtggacagattgaagaaactcgtcacgggcttgctcacacaagaaggctttgatgacaagcactgcctgtgagactgccccccagtaagatgattctggctgggggcggtagattacacggtcaaatcttgagggcattgaagccattttctgggaatatgcctactggctgaagaagcagcacatagtatcatgtgatgtacgcgtggatgcgagcaacggtaagataggtgctcttacagacagccgcctgagttgagctactaccgtacagcaggaggccacggacgtagccggcggagattatacaggaatagtagctcattaggttatgttagatgactatatcagccccttcccaaccgtcaataatgttgggaattttgacatctccgcggcgctgcgggttgtgcaaggcaggcaggcagtccattctttgcttggatgccatggcgcctggtgtaatcaactggtagcgtgtgaggaggcttcgttgtattgactagtgcatatttctgggcaaaacagatgcgtttggttgcacacatgtattcttttatcccttttcctctttgatgatgagtatagcagaaatgatggtgctgtttcctctcgcttgctgcttgcatttggtaagcgcctgcgccctgccgtccagtttcggttgggttagaaatgctgttgcgattttaatatgtgtgattgcatcgctttttggagtctggatcgttttt

SEQ ID NO: 61846 - DNA, 2925 bp, Zea Mays
atggacgagcatagcccagagatcgtgcctgtcaactccccggccctagaccccgaccccgaccaggagcctcaatcttcagaaagcggggaagaaggtgaccgtggaggcccacgcccacctgagtctctcagcgacaagctgccactcccgccggccgacctcaacctgtacggcgcggccgtcgcgctgcgcctgctcctcctcgccgccttcttccggtaccgcgtcgcgcacccggcgcgcggcgcgccctggctctggctggccgcgctcgcctgcgagctgtgcctcgccctcgcgtggctcctcgcccagctcccgaagctgtccccgaccagccgcgagacgcacctcgacaggctggcttcgaggtacgacaaggacgcgcggctgggcagcgtggacgtgctcgtgacggcggcgggcgcgggggcggagccgccgctggcggccgcgaacacggtcctgtcggtgctcgcggcggactacccggcgcggaggctggcctgctacgtgtccgacgacggcgcggacttgctgctgttcgaggcgctgttcgacgccgcgggcttcgcgcggcggtgggtgccgttctgccgccgccacgccgtggagccgagggcccccgagctctacttcgcccgcggcgtcgactacctcagggacaaggccgcgccgtcgttcgtcaaggaacgccgcgccatgaagagggcgtacgaggagttgaaggtcaggatgaactgcctcgccgcgaaggcgcggaaggtgccggaggacgggtgggtcatgtcggacggcacgccgtggcctgggaacaacacgagagaccatcctgcaatgatacaggttcttctggggcatcccggcgatcaggacgccgaggggaacgagctgcctcggctgctgtacgtgtcgcgggagaagaagccggggttccagcatcacacgaaagccggcgccctcaacgccctgctccgggtgtccgctctgctgacgaacggctcctacgtgctcaacctggaccacgaccactgcgtagccaacagcggcgtcctgagggaggcaatgtgcttcctcatggaccccgagtccgggaacaggacgtgctacgtccagttcccgctgaggatgggcgtcaacgacgacggtggcgagacgcgcgcgactcgcgactctgtcttcttcgacgcaagtgatcaatcagagctttgcacactgcagcgctgtccgccaagtcgtctaacactaacacacgcttttttgacgctggggtggggttcagatcggcatgaagtgcctggacggcatccagggcccggtgtacgtcggctccggctgctgcatcaacaggaaggcgctgtacgggttcgatcccgcgtccactgaagacgacgacggggaggcgccggtgcagcggagcagccgagcaggtggtggttcgggaagttgaggaagcgagcattgaggaggaccatgtccaccgtgcctctgcttgactcggaggacaccgacgaactgacggaagcaggaaggaggcggaggttgcgttcctaccgcgccgcgttggagcggcacttcggcaactcaccggcgttcatcgcgtccgcgttcgcgagccaagagcgcggcggcgacacgtccgcggccgcagacgcttcttgtctcctcagggaggcgatccacgtcgtcagctgcgcgtacgaagcgcggacgaggtggggcaaagacgtcggctggatgtacggttctggcggcggcggcggcgtggtcacggggtttaggatgcacgcgcgcgggtggtcgtcagcgtactgcgcgccggcgcggaccgcgttccggagcttcgcgcgtgccagccccgctgacgtcctggcctcggcgtcgaagcgagcggtcgcggccatgggcgtcctgctgagccgacactgccctgtctgggccggtgctggcgggagcctgcggttcatgcagaggctgggctacgtgagctgcgtcgcctacccgctggcgtccatcccgctcaccgtctactgcgcgctcccggcggcctgcctcctcaccggcaagtccatcttcccggacgacatgggcttctacgacgcggtcgtggtcatcttgctcctgtcctcggtggtggccacggtcgcgctggagcttcggtggagcggcgtgacgctgcgcgcgtggtggcgggaccagaagctctgggctgtcactggcacgtcggcgtgccttgcggccgtgttccagggcatcctccgctcgtgcgccgggatcgacgtttgtttctcttccacctacacggagacggcggcgaccaggacgtcgtcgtcgacctcggatgacgacagtggcgccgccggcgaggagccctccgacgcgcagaagtccgtgctgcggtggtcgaacctgctgatcccaccggcgagtctgctgctgggaaacctcgccggcgtcgtggtggccgtgtcgtacggggtggaccacgggtaccggtcgtggggaccggtcctcgtgaagctggctctcgccttgtgggtggtggcgcacctgcagggcttcttcaggggtctccttgcgcggcgggacagggcacccaccatcgccgtgctatggtcggtgctcttcgtgtccgtgctctcgctgctctgggtcaacgtcgactcctactcagcgccgccggcgcagtccacgttgcagcagccggtcttgtgagattcaaaagctgggccgtgccgccacgcactccaggcccatcaggccatcaccaccgtgaaacctacgcgtgaattctactcacctcacttgggtttaggatgacaatcttagctgcaggttttgcacatgcggtcacgaataaatatatatcacctatatgaagcatatattatatcagctagtttatttaatatataatttgcg

SEQ ID NO: 61847 - DNA, 1694 bp, Zea Mays
ttataaaacctagctcctcaagctccagacgcagtcgaccgccgcagaccgggagtagtcgacgcgccgtcactgaatcctcagatcacggctagccgtaatcacgccactctgctgactcccggcgagcagtgtaacattttccttcagccatgggcaaggagaagactcacatcaacattgtggtcattggacatgtcgactctggcaagtcgaccaccactggccacctgatctacaagctcggcggtattgacaagcgtgtgattgagaggttcgagaaagaggccgcggagatgaacaagcggtcattcaagtatgcctgggtgcttgacaagctcaaggccgagcgtgagagaggtatcacaattgatattgctttgtggaagttcgagaccaccaagtactactgcactgtcattgatgcccctggacaccgtgacttcatcaagaatatgattactggcacttcccaagctgactgcgctgttcttatcattgactccactactggtggttttgaggctggtatctccaaggatggacagacccgcgagcatgctctccttgctttcacgcttggagtgaagcagatgatttgctgttgcaacaagatggatgccaccacacccaagtactccaaggcccgttatgatgagattgtgaaggaagtctcttcctacctgaagaaggttggatacaaccctgacaagatccactttgttcccatctctggtttcgaaggtgacaacatgattgagaggtccaccaaccttgactggtacaagggcccaaccctacttgaggctttggacttgatcaatgagccgaagaggccttcagacaagcccctgcgtctccccctacaggatgtgtacaagattggtggtattggaactgttcctgttgggcgtgttgagactggtatcatcaagcctggtatggttgttacctttggtcctagtggccttactactgaggtgaagtctgttgaaatgcaccatgaggctctccaggaggcccttcctggtgacaatgttggcttcaatgttaagaatgttgctgtgaaggatctgaagcgtgggtatgtggcctccaactccaaggatgaccctgccaaggaggctgctagcttcacgtcccaggtcatcatcatgaaccaccctgggcagattggcaacggctatgccccagtgctggactgccacacctcgcacattgctgtcaagtttgcggagctcattaccaagattgataggcggtctggcaaagagcttgagaaggagcccaaattcctcaagaatggtgatgctggtatggtgaagatggttcccactaagcccatggtagtggagaccttttctgaatatcctcctcttggtcgctttgctgtccgtgacatgaggcaaacggtggctgtcggagtcatcaagagtgtggagaagaaggatccaactggagccaaggtgaccaaggctgccgcaaagaagaaatgatgtgtctggctggttctgtgtttgcttgagggatacctagtggaaacgtaaaatatctcgtcttgttcacgtcattgtctgaactatgctcgcaacgtttgcctggtcgatttagaactgttattttcgttaaaaccagagtgttatttaagacttatccgaacatctggtgagccatatatggttactaaaaaaaaa

SEQ ID NO: 61848 - DNA, 1376 bp, Zea Mays
ttataaaacctagctcctcaagctccagacgcagtcgaccgccgcagaccgggagtagtcgacgcgccgtcactgaatcctcagatcacggctagccgtaatcacgccactctgctgactcccggcgagccatgggcaaggagaagactcacatcaacattgtggtcattggacatgtcgactctggcaagtcgaccaccactggccacctgatctacaagctcggcggtattgacaagcgtgtgattgagaggtccaccaaccttgactggtacaagggcccaaccctacttgaggctttggacttgatcaatgagccgaagaggccttcagacaagcccctgcgtctccccctacaggatgtgtacaagattggtggtattggaactgttcctgttgggcgtgttgagactggtatcatcaagcctggtatggttgttacctttggtcctagtggccttactactgaggtgaagtctgttgaaatgcaccatgaggctctccaggaggcccttcctggtgacaatgttggcttcaatgttaagaatgttgctgtgaaggatctgaagcgtgggtatgtggcctccaactccaaggatgaccctgccaaggaggctgctagcttcacgtcccaggtcatcatcatgaaccaccctgggcagattggcaacggctatgccccagtgctggactgccacacctcgcacattgctgtcaagtttgcggagctcattaccaagattgataggcggtctggcaaagagcttgagaaggagcccaaattcctcaagaatggtgatgctggtatggtgaagatggttcccactaagcccatggtagtggagaccttttctgaatatcctcctcttggtcgctttgctgtccgtgacatgaggcaaacggtggctgtcggagtcatcaagagtgtggagaagaaggatccaactggagccaaggtgaccaaggctgccgcaaagaagaaatgatgtgtctggctggttctgtgtttgcttgagggatacctagtggaaacgtaaaatatctcgtcttgttcacgtcattgtctgaactatgctcgcaacgtttgcctggtcgatttagaactgttattttcgttaaaaccagagtgttatttaagacttatccgaacatctggtgagccatatatggttactagttttgttactacccttgttggtgttgtgtgcttctttagcaaatgtgctgtttctaaattgctcattatttgctcgtccatacctgtctgctgcgatcaaatttctcttgcgcttaaatcttttaaacaaaaaagctgccaaatcgcatatcaaggatttagaaattatgattcttccgaaatgtttttttgataaata

SEQ ID NO: 61849 - DNA, 1719 bp, Zea Mays
ttataaaacctagctcctcaagctccagacgcagtcgaccgccgcagaccgggagtagtcgacgcgccgtcactgaatcctcagatcacggctagccgtaatcacgccactctgctgactcccggcgagtgtaacattttccttcagccatgggcaaggagaagactcacatcaacattgtggtcattggacatgtcgactctggcaagtcgaccaccactggccacctgatctacaagctcggcggtattgacaagcgtgtgattgagaggttcgagaaagaggccgcggagatgaacaagcggtcattcaagtatgcctgggtgcttgacaagctcaaggccgagcgtgagagaggctggtatctccaaggatggacagacccgcgagcatgctctccttgctttcacgcttggagtgaagcagatgatttgctgttgcaacaagatggatgccaccacacccaagtactccaaggcccgttatgatgagattgtgaaggaagtctcttcctacctgaagaaggttggatacaaccctgacaagatccactttgttcccatctctggtttcgaaggtgacaacatgattgagaggtccaccaaccttgactggtacaagggcccaaccctacttgaggctttggacttgatcaatgagccgaagaggccttcagacaagcccctgcgtctccccctacaggatgtgtacaagattggtggtattggaactgttcctgttgggcgtgttgagactggtatcatcaagcctggtatggttgttacctttggtcctagtggccttactactgaggtgaagtctgttgaaatgcaccatgaggctctccaggaggcccttcctggtgacaatgttggcttcaatgttaagaatgttgctgtgaaggatctgaagcgtgggtatgtggcctccaactccaaggatgaccctgccaaggaggctgctagcttcacgtcccaggtcatcatcatgaaccaccctgggcagattggcaacggctatgccccagtgctggactgccacacctcgcacattgctgtcaagtttgcggagctcattaccaagattgataggcggtctggcaaagagcttgagaaggagcccaaattcctcaagaatggtgatgctggtatggtgaagatggttcccactaagcccatggtagtggagaccttttctgaatatcctcctcttggtcgctttgctgtccgtgacatgaggcaaacggtggctgtcggagtcatcaagagtgtggagaagaaggatccaactggagccaaggtgaccaaggctgccgcaaagaagaaatgatgtgtctggctggttctgtgtttgcttgagggatacctagtggaaacgtaaaatatctcgtcttgttcacgtcattgtctgaactatgctcgcaacgtttgcctggtcgatttagaactgttattttcgttaaaaccagagtgttatttaagacttatccgaacatctggtgagccatatatggttactagttttgttactacccttgttggtgttgtgtgcttctttagcaaatgtgctgtttctaaattgctcattatttgctcgtccatacctgtctgctgcgatcaaatttctcttgcgcttaaatcttttaaacaaaaaagctgccaaatcgcatatcaaggatttagaaattatgattcttccgaaatgtttttttgataaata

SEQ ID NO: 61850 - DNA, 2106 bp, Zea Mays
agagcacacggcctggtcgtccgccagcgccgggcgcgcaagagcacacagtacaacaacccgcggtttgcagtggcgctcgccgcttaggagcctggtgcctggagccgctcagccgccgccggtggaatctatagagtccagcgtggagagtgccttacacctgaacaccaagtgggcctaatgggtcaactgccggctgtgatggactaaattagttatttttttatttaaacaggttttattagagagagggtagctccgcccctggtcctcgagatccatgcatttgagttttaagttcttatcttatgttttctctttatttaaatcacactatatatgcagttagcaagcgttcatttgagatgattgagccacacttcatggaagatggatcgattgcttcaagctacaaggaaaagaggtcttgccagcacaatgatgattctaaaggggaacaagaaaaaccattcctttcagagggtgtctggtctcatatacattcctttatgcacattcgagacgcggggcgagctgcctgtttgtcccggtcttttctacagtcatggagatgtcatccctacctcatttttactgatgaaacattgggttgcaagaaaaacacatctcaagaaaacgaaattgcaagcaatttttacagtagagttgataacattctgaataatcattcaggcattgggatgaaggcactcaaaatccatgttcctataggttacactgcaaaggactcacgttatcttaaccgttggcttcagattgctatcacacatgggattgaagaactcgagctaatttttcctttcatggcaaagtacaaattcccatattcccttctacctatgagtggagactcaatcaaatgtcttgaacttagttgctgttctttttgtcccacttctaagtttggctggttaaaaaatctgacaaaattgtgtcttgatggtgtttttattgagggtgacgagttagagcgccttgtcttctctgcccttgctttggagaggttggagattagatattgtgatcgcatagtctgtctgaaggttccttccatgctacaacggctcacatacctagaggtttatgattgtgacaagcttcgtgttttggacatcgatgctccaaatataacttgcttcaatttcggaagacatcatacgaagacgaaactgtcaattggtgggggagtgtccaaaataaaagaattgagtgcatgcttcgacgatgcagtttattatgtccgtgttgaactcccgtctatgatggcaaacctcgaaactcttaccataaattcaatggttgagatgaatataccaatgcttcccagcaagtatctgcacctgaagtacttaaagatttctcttgcggcgtacacctttccttcaacatttgattatttttctctggcttccttttttgatgcatgtccctctttggaggcttttttcttggatgcatatcagcggaagatgaaacatgtttcgatcattacaaatcctttggttctgagggggactcctgaacaacgccatcacaagctcaagactgttgagatgaatggattcacttccgctaagagcctggttgagctagcatgccacattgctcagtgtgcaacatcgctgcaatccctcaaattggaggtccatcagagtgattttaagtgttatattccggctaataaacataataagtgctccccgctacctgtcgaggttctgatggaatctcgacgagcacacttggccatcatgacgtacattgagcctataattccctccactgtgaagttacaggttgtaggaccttgcagcagatgccatgcccttgaacagtagagtacgtactaccgtagtttcagtatttgggtcattagtaccctccataatattagaatggtttaaatatttatcgtcccacacgtgtgtaaagtattgtgacttgcacctatttcattttaattctaatgtctaagcatgaacaaacagtgatcccgttatttttgtcccacaatgtatgtaagttatccattgcattatcagttgcaaggattgaggcagtaaattgtaattacaagtgaag

SEQ ID NO: 61851 - DNA, 1921 bp, Zea Mays
gccctggctcgctccggtcacgaccttgctgtacgttgttcctggcgaagctcgtctcccgccaagaagaagccacccagacgtgacgtgcgtcgacgctgcccagccaccgctgtgctcccctctgtcgtctctatccgtcgatctacacgaccacactgttagcaagcgttcatttgagatgattgagccacacttcatggaagagatggatcgattgcttcaagctacaaggaaaagaggtcttgccagcacaatgatgattctaaaggggaacaagaaaaaccattcctttcagagggtgtctggtctcatatacattcctttatgcacattcgagacgcggggcgagctgcctgtttgtcccggtcttttctacagtcatggagatgtcatccctacctcatttttactgatgaaacattgggttgcaagaaaaacacatctcaagaaaacgaaattgcaagcaatttttacagtagagttgataacattctgaataatcattcaggcattgggatgaaggcactcaaaatccatgttcctataggttacactgcaaaggactcacgttatcttaaccgttggcttcagattgctatcacacatgggattgaagaactcgagctaatttttcctttcatggcaaagtacaaattcccatattcccttctacctatgagtggagactcaatcaaatgtcttgaacttagttgctgttctttttgtcccacttctaagtttggctggttaaaaaatctgacaaaattgtgtcttgatggtgtttttattgagggtgacgagttagagcgccttgtcttctctgcccttgctttggagaggttggagattagatattgtgatcgcatagtctgtctgaaggttccttccatgctacaacggctcacatacctagaggtttatgattgtgacaagcttcgtgttttggacatcgatgctccaaatataacttgcttcaatttcggaagacatcatacgaagacgaaactgtcaattggtgggggagtgtccaaaataaaagaattgagtgcatgcttcgacgatgcagtttattatgtccgtgttgaactcccgtctatgatggcaaacctcgaaactcttaccataaattcaatggttgagatgaatataccaatgcttcccagcaagtatctgcacctgaagtacttaaagatttctcttgcggcgtacacctttccttcaacatttgattatttttctctggcttccttttttgatgcatgtccctctttggaggcttttttcttggatgcatatcagcggaagatgaaacatgtttcgatcattacaaatcctttggttctgagggggactcctgaacaacgccatcacaagctcaagactgttgagatgaatggattcacttccgctaagagcctggttgagctagcatgccacattgctcagtgtgcaacatcgctgcaatccctcaaattggaggtccatcagagtgattttaagtgttatattccggctaataaacataataagtgctccccgctacctgtcgaggttctgatggaatctcgacgagcacacttggccatcatgacgtacattgagcctataattccctccactgtgaagttacaggttgtaggaccttgcagcagatgccatgcccttgaacagtagagtacgtactaccgtagtttcagtatttgggtcattagtaccctccataatattagaatggtttaaatatttatcgtcccacacgtgtgtaaagtattgtgacttgcacctatttcattttaattctaatgtctaagcatgaacaaacagtgatcccgttatttttgtcccacaatgtatgtaagttatccattgcattatcagttgcaaggattgaggcagtaaattgtaattacaagtgaag

SEQ ID NO: 61852 - DNA, 2033 bp, Zea Mays
ctttgaggaggcattgacatttttccgagacatgcggctacagtcatgaggatatttaactgcttgtatttaccggcttttttatcaggatatttaactgcttttggatccgccgccctggctcgctccggtcacgaccttgctgtacgttgttcctggcgaagctcgtctcccgccaagaagaagccacccagacgtgacgtgcgtcgacgctgcccagccaccgctgtgctcccctctgtcgtctctatccgtcgatctacacgaccacactgttagcaagcgttcatttgagatgattgagccacacttcatggaagatggatcgattgcttcaagctacaaggaaaagaggtcttgccagcacaatgatgattctaaaggggaacaagaaaaaccattcctttcagagggtgtctggtctcatatacattcctttatgcacattcgagacgcggggcgagctgcctgtttgtcccggtcttttctacagtcatggagatgtcatccctacctcatttttactgatgaaacattgggttgcaagaaaaacacatctcaagaaaacgaaattgcaagcaatttttacagtagagttgataacattctgaataatcattcaggcattgggatgaaggcactcaaaatccatgttcctataggttacactgcaaaggactcacgttatcttaaccgttggcttcagattgctatcacacatgggattgaagaactcgagctaatttttcctttcatggcaaagtacaaattcccatattcccttctacctatgagtggagactcaatcaaatgtcttgaacttagttgctgttctttttgtcccacttctaagtttggctggttaaaaaatctgacaaaattgtgtcttgatggtgtttttattgagggtgacgagttagagcgccttgtcttctctgcccttgctttggagaggttggagattagatattgtgatcgcatagtctgtctgaaggttccttccatgctacaacggctcacatacctagaggtttatgattgtgacaagcttcgtgttttggacatcgatgctccaaatataacttgcttcaatttcggaagacatcatacgaagacgaaactgtcaattggtgggggagtgtccaaaataaaagaattgagtgcatgcttcgacgatgcagtttattatgtccgtgttgaactcccgtctatgatggcaaacctcgaaactcttaccataaattcaatggttgagatgaatataccaatgcttcccagcaagtatctgcacctgaagtacttaaagatttctcttgcggcgtacacctttccttcaacatttgattatttttctctggcttccttttttgatgcatgtccctctttggaggcttttttcttggatgcatatcagcggaagatgaaacatgtttcgatcattacaaatcctttggttctgagggggactcctgaacaacgccatcacaagctcaagactgttgagatgaatggattcacttccgctaagagcctggttgagctagcatgccacattgctcagtgtgcaacatcgctgcaatccctcaaattggaggtccatcagagtgattttaagtgttatattccggctaataaacataataagtgctccccgctacctgtcgaggttctgatggaatctcgacgagcacacttggccatcatgacgtacattgagcctataattccctccactgtgaagttacaggttgtaggaccttgcagcagatgccatgcccttgaacagtagagtacgtactaccgtagtttcagtatttgggtcattagtaccctccataatattagaatggtttaaatatttatcgtcccacacgtgtgtaaagtattgtgacttgcacctatttcattttaattctaatgtctaagcatgaacaaacagtgatcccgttatttttgtcccacaatgtatgtaagttatccattgcattatcagttgcaaggattgaggcagtaaattgtaattacaagtgaag

SEQ ID NO: 61853 - DNA, 2391 bp, Zea Mays
ccacaaccatccgcgtcgctctcccgcttctatacggcagcaaaaaagattccaacttggcccctcctcctacccacacggccacacgtgtggccacacgtgacacgtcccacgatggcgacgacgtgccaccatgccatgccgctgcgcgactgcaacgtactgatcaggaccctggccaggcgcggcagtttctcacgcgtcatggcggtgtactacgatctccgtgcgcgaggcctcgccgcagacagctacacctacccattcgtgctcagggcaatcggcacgatgaagctgtccgtcgaggggcgcaaggtgcacgcggccgcggtgaagaccggcttccgctgggatgcgtacactgcatgttcgctgatggagatgtacacgatgctgggccgtgcggattccgcacggagggtgttcgatgagatgccgcagcgattcctggtgctgtggaatatgatgatgaggtgctacatcaggtgcggtcgcttcacagcagcagttgcgttggctgtgcagatggagagtggcggtgccacacctgacagggtgacattggtgaccgccgttaccgcttgctcaagagcaggcgatctgaacttgggaaggaggattcattcatacatggatggagtttttggattcagtctcccagtcgcaaatgcgcttctggacatgtatacgaagaatggttacttggaagaggcggtgaagatgttcgagcaaatgccagagaggaacatcatatcttggactatactagtgtcgggatatggcattgctggtcagttggacaaggcaagagtgtttttctaccaatgcacacagaaggatctaatcctgtggacttcaatgatcaacgcatgtgtacaacatggaagctttgaggaggcattgatattgttccgagacatgcaattacaacgtgtggagcctgacaagttcactgttgtcactctcctcacatgctgtgccaacattggtgctcttgatcaaggtgaatggatccatcagtatgctgaaagcaggaatatgaagattgatgcagttcttggcacagcattgattgagatgtactcaaagtgtgggcatgttgacaagtcactgcaaatctttgggcgaatgcaaggcaaagatgctgcagcctggactgccatcatctgtggtctggccacaaatggtcaggccagcaaggctcttgaactgtttgaagagatgcagagaagcaaaacaaagcctgatggtatcacgttcattggagtattgagtgcttgttgccatggtggcttggtcgatgaaggacagaggtatttccaagccatgaaggaggtctatcatatagagccgagaatcgaacattatagttgccttgtcaatcttctaggacatgctggtctactgtatgaagctgagaagttgatcactgacatgcctgttaacaatgacactatgcctctgtttggtgcactcctcactgcttgcaaagctaatggcaatgttgagatgagcgaatggttgacaaaaagaattgccaaggaagattgttccccaaatcctgacgttaatgtactcatgtctaatgtgtatgcaacagcaagtcgatgggaagaagcaataagagtgagaagtaagatgacaaatcctgcggtcaagaagactgcaggttgcagcatgattgaggtaaaagaatactgttgatggagctcatgctgccataaaactattgtattggagttggaatggttgacaaacagaaaatatgcttgattatagtcaaagaaactcaagtcaataactatttgataaatttagggtctgtgtgtttgagattataatctatttagattatataatctaacttattttgaactaacacttagttcaaaataagttagattatttaatctgagtagattataatcccaaacaaacaactctaagggctaatttgggaaccatattttcccaagggttttttatttttctaaggaaatttggttcattttctcttgggaaattggaaatcctatagaaaaatggggttgccaaactagccctaagtgttcagaattctggatagtttgtcaattcaagctattaaacaaaatgaccataacactgaagacattgaaatgttcagacttcaggaggtaattagataaaggaagcttagtcggcattgctggaatatattcaaagcatacaatacagcaaaatgtagtgttcgttctctgagccaatatatcctcttctggcgaagttcaaagtttggcttgaagcaatttatgtccacaagatgcatagcctttcagagagatttcaatgtaaagtttatacacctgcaaggaaaaaagcaaatatttcttcacaggtagattgttcaag

SEQ ID NO: 61854 - DNA, 2090 bp, Zea Mays
cttttgaacacaacattctgtatgttgagctagagttttattgtagacagttcatcaaaatgattatgagcaagatccatatgcgaaggaatttgggatcaacattagtgagaagctaacctctgttgaagcccgagtccttcctgcaccttggttgaagtatcatgacactggaaaagagaaagagtgcttaccacaggttggtcagtggaacatggtaaacaagaaagtgataaatggatgcaaggtgagccattgggcatgtataaacttctcaaggagtgttccagaaaccacagctcggggattttgccaggaattggcacaaatgtgtcaaatttcgggcatggaatttaacagtgagcctgtgatgccaatatattcagctagaccagatcaagttgtgaaggcacttaaaaacgtgtataatattgcattgaacaaacttaagggtaaagatcttgaacttcttttggctatcctccctgacaacaatgggcagttatatggtaagtgccatctgctaattgctttgaatatataattacttcaactcttacatattttatcagatataactttatatatatttaaagcgatataacttcatatgtgtaggtgacatcaaacgtatttgtgaaactgatttggggttgatatcacaatgttgcttaaccaagcatgtttttaagatcagcaagcagtacttggcaaatgtctcactgaaaattaatgttaagatgggaggaagaaacactgtgctcctggacgcaataagttggaggattccgttggtcagtgacatcccaactattatatttggtgcagatgtaacacatcctgaaaccggggaggactcaagtccatcgattgctgccgttgttgcttctcaagattggccagaagttacaaagtatgctggattggtttgtgctcaggcacaccggcaagagctcattcaagacctttacaaaacatggcacgatcctcagagaggcactgtaacaggcggcatgatcagggagctcttaatatccttcaggaaggccactggacagaagccattgagaataatattctacagggacggtgttagtgaaggtcagttctatcaagttctcctttacgagttagatgccatccggaaggcatgtgcatccctagaaccaaattaccagcctcctgtaacatttgtggtggttcaaaaacgtcatcatacaagactatttgcaaataatcacaaagacagaagtagcatggacaagagtggaaatattttgccaggaaccgttgttgattctaagatatgccacccaacggagtttgatttctacctctgtagtcatgctggaatccaggcctgctcactaccatgtcctctgggatgagaacaatttcacagcagacgaaatgcagacattgacaaacaacctttgctacacttatgcccggtgcacacgctcggtttctgttggtatgttctgtgctttacaggcaaatgttttcccagttccacaattcttaattgactctttagcctgctcaccagttcaggaaacaactttgacctgtgatgttgtatctttttgcttcttaacagtccctcctgcatactacgcacacttggcagcattccgggctcggttctacatggaaccagagatgttggacaaccagacgtccaagacctccaatggcacgagcggagtctcggtgaagcccctgcctgctgtgaaggagaaggtgaaaaggatgatgttctactgctgacaaggagaccacttaaccactcacatgctgtagctaacttgctagagtttagtaaggattagatagctttctcaaggagtgatggatcaatctgatctgttaacgacctctgtaaagtactcggaaatggctgtataatagttgttgtttcaaatgtgaaagcatctaggtccttagttagatttcagtgatcagtgatcaatgacgatactagattattgtgactaatgtatgctagattattatgattaatgtatgttttgcagaaacaatggattttgtgccgccattaatagtattcaattttggttttcaaagta

SEQ ID NO: 61855 - DNA, 3391 bp, Zea Mays
ttttttttcatttttttttaccttgcgtgacgcttcgttttcacagtgcggcggcggcggctgcttggctcgttgctcctcccattctgctcagctcagcttctgatgagttcgcctttgccgctgctagttaccagcatactagaccactgactgatcacgttataaggcttccgcgcaggcgagcttctgccgccttgtcgggtaaccaaacggacctcgccggccctctccagtggtcacatcacatcacatcacatgctcgaggtcgtcctggacatgacgccgccgccgccgccgccgcaggcgcggctccaccaggggtcatcagccaagggcgggcacgcggagcggaggaagcaaccgctgcagagcagcgtgacacagcccaaggcagagcccgcggcggcggcggccgtgctgccggtgccggagggaggcaagaggtgcagagggggcgggaggcgccgcggcagggccaaggcgcccggtgagcctcgcgccgcgctactagcgccagcgcaggcgcagacgcaggcgcctccgccgcgcacggtcattgggccgcccgtgccgagcaaggggctgtcattctgccgccggccagggttcgggacggtgggcgcgcgctgcgtcgtcaaggccaaccacttcctcgccgagctcccggacaaggacctcacccagtacgatgtgaagatcacgccggaggtgagctcgcggaccgtgaaccgggccataatggcggagctggtccgcctctaccgcgcgtccgacctggggatgcgactcccggcctacgacggccgcaagaacctctacaccgccgggacactaccgttcgacgctcgcgagttcgtcgtgcgcctcgccgatgaggacgacggctccggcgtcccgcctcgggagagggagtacagggtcgccatcaagttcgccgcgcgcgccgacctccaccacctcaggcagttcatcgccgggcggcaggcggacgcgccgcaggaggccctacaggtactcgacatcgtgctccgcgagctcgccaaccagaggtacgtgtccatagggcggtccttctactcgccggacatcaggaagccgcagcggctcggcgacggcctgcagtcgtggcgtgggttctaccagagcatccggccgacccagatgggattgtcgcttaacatcgacatgtcgtccacggcatttattgaacccctgccggtgatcgagttcgtggcccagatattaggaaaggatgtcatatcaaggccattgtccgatgctaaccgaatcaagatcaagaaggcattgcggggtgtaaaagttgaggtcactcaccgggggaatgtacggcgcaagtatcgcatttcaggcctcacaacacagccaactcatgaattgattttcccgattgatgaacaaatgaatatgaaatctgtcgtggaatacttcaaggaaatgtatggtttcaccattcagcatcctcatcttccctgccttcaggttggaaaccaaaagaaggcaaactatctacccatggaggcctgcaagatcattgaaggccagagatacacaaagaggctgaatgaaaaacagatcacatcgctgctaaaggttacatgccaaaggcctagagagcaagagatggatattctacagacagttcatcaaaatgattatgagcaagatccatatgcgaaggaatttgggatcaacattagtgagaagctaacctctgttgaagcccgagtccttcctgcaccttggttgaagtatcatgacactggaaaagagaaagagtgcttaccacaggttggtcagtggaacatggtaaacaagaaagtgataaatggatgcaaggtgagccattgggcatgtataaacttctcaaggagtgttccagaaaccacagctcggggattttgccaggaattggcacaaatgtgtcaaatttcgggcatggaatttaacagtgagcctgtgatgccaatatattcagctagaccagatcaagttgtgaaggcacttaaaaacgtgtataatattgcattgaacaaacttaagggtaaagatcttgaacttcttttggctatcctccctgacaacaatgggcagttatatggtgacatcaaacgtatttgtgaaactgatttggggttgatatcacaatgttgcttaaccaagcatgtttttaagatcagcaagcagtacttggcaaatgtctcactgaaaattaatgttaagatgtaacacatcctgaaaccggggaggactcaagtccatcgattgctgccgttgttgcttctcaagattggccagaagttacaaagtatgctggattggtttgtgctcaggcacaccggcaagagctcattcaagacctttacaaaacatggcacgatcctcagagaggcactgtaacaggcggcatgatcagggagctcttaatatccttcaggaaggccactggacagaagccattgagaataatattctacagggacggtgttagtgaaggtcagttctatcaagttctcctttacgagttagatgccatccggaaggcatgtgcatccctagaaccaaattaccagcctcctgtaacatttgtggtggttcaaaaacgtcatcatacaagactatttgcaaataatcacaaagacagaagtagcatggacaagagtggaaatattttgccaggaaccgttgttgattctaagatatgccacccaacggagtttgatttctacctctgtagtcatgctggaatccagggaacgagtaggcctgctcactaccatgtcctctgggatgagaacaatttcacagcagacgaaatgcagacattgacaaacaacctttgctacacttatgcccggtgcacacgctcggtttctgttgtccctcctgcatactacgcacacttggcagcattccgggctcggttctacatggaaccagagatgttggacaaccagacgtccaagacctccaatggcacgagcggagtctcggtgaagcccctgcctgctgtgaaggagaaggtgaaaaggatgatgttctactgctgacaaggagaccacttaaccactcacatgctgtagctaacttgctagagtttagtaaggattagatagctttctcaaggagtgatggatcaatctgatctgttaacgacctctgtaaagtactcggaaatggctgtataatagttgttgtttcaaatgtgaaagcatctaggtccttagttagatttcagtgatcagtgatcaatgacgatactagattattgtgactaatgtatgctagattattatgattaatgtatgttttgcagaaacaatggattttgtgccgccattaatagtattcaattttggttttcaaagta

SEQ ID NO: 61856 - DNA, 3567 bp, Zea Mays
gccgctggagagagagagagagaggttcttctaatgcccttctgttctgtcccgcccccgcgccgcatttttttttcatttttttttaccttgcgtgacgcttcgttttcacagtgcggcggcggcggctgcttggctcgttgctcctcccattctgctcagctcagcttctgatgagttcgcctttgccgctgctagttaccagcatactagaccactgactgatcacgttataaggcttccgcgcaggcgagcttctgccgccttgtcgggtaaccaaacggacctcgccggccctctccagtggtcacatcacatcacatcacatgctcgaggtcgtcctggacatgacgccgccgccgccgccgccgcaggcgcggctccaccaggggtcatcagccaagggcgggcacgcggagcggaggaagcaaccgctgcagagcagcgtgacacagcccaaggcagagcccgcggcggcggcggccgtgctgccggtgccggagggaggcaagaggtgcagagggggcgggaggcgccgcggcagggccaaggcgcccggtgagcctcgcgccgcgctactagcgccagcgcaggcgcagacgcaggcgcctccgccgcgcacggtcattgggccgcccgtgccgagcaaggggctgtcattctgccgccggccagggttcgggacggtgggcgcgcgctgcgtcgtcaaggccaaccacttcctcgccgagctcccggacaaggacctcacccagtacgatgtgaagatcacgccggaggtgagctcgcggaccgtgaaccgggccataatggcggagctggtccgcctctaccgcgcgtccgacctggggatgcgactcccggcctacgacggccgcaagaacctctacaccgccgggacactaccgttcgacgctcgcgagttcgtcgtgcgcctcgccgatgaggacgacggctccggcgtcccgcctcgggagagggagtacagggtcgccatcaagttcgccgcgcgcgccgacctccaccacctcaggcagttcatcgccgggcggcaggcggacgcgccgcaggaggccctacaggtactcgacatcgtgctccgcgagctcgccaaccagaggtacgtgtccatagggcggtccttctactcgccggacatcaggaagccgcagcggctcggcgacggcctgcagtcgtggcgtgggttctaccagagcatccggccgacccagatgggattgtcgcttaacatcgacatgtcgtccacggcatttattgaacccctgccggtgatcgagttcgtggcccagatattaggaaaggatgtcatatcaaggccattgtccgatgctaaccgaatcaagatcaagaaggcattgcggggtgtaaaagttgaggtcactcaccgggggaatgtacggcgcaagtatcgcatttcaggcctcacaacacagccaactcatgaattgattttcccgattgatgaacaaatgaatatgaaatctgtcgtggaatacttcaaggaaatgtatggtttcaccattcagcatcctcatcttccctgccttcaggttggaaaccaaaagaaggcaaactatctacccatggaggcctgcaagatcattgaaggccagagatacacaaagaggctgaatgaaaaacagatcacatcgctgctaaaggttacatgccaaaggcctagagagcaagagatggatattctacagacagttcatcaaaatgattatgagcaagatccatatgcgaaggaatttgggatcaacattagtgagaagctaacctctgttgaagcccgagtccttcctgcaccttggttgaagtatcatgacactggaaaagagaaagagtgcttaccacaggttggtcagtggaacatggtaaacaagaaagtgataaatggatgcaaggtgagccattgggcatgtataaacttctcaaggagtgttccagaaaccacagctcggggattttgccaggaattggcacaaatgtgtcaaatttcgggcatggaatttaacagtgagcctgtgatgccaatatattcagctagaccagatcaagttgtgaaggcacttaaaaacgtgtataatattgcattgaacaaacttaagggtaaagatcttgaacttcttttggctatcctccctgacaacaatgggcagttatatggtgacatcaaacgtatttgtgaaactgatttggggttgatatcacaatgttgcttaaccaagcatgtttttaagatcagcaagcagtacttggcaaatgtctcactgaaaattaatgttaagatgggaggaagaaacactgtgctcctggacgcaataagttggaggattccgttggtcagtgacatcccaactattatatttggtgcagatgtaacacatcctgaaaccggggaggactcaagtccatcgattgctgccgttgttgcttctcaagattggccagaagttacaaagtatgctggattggtttgtgctcaggcacaccggcaagagctcattcaagacctttacaaaacatggcacgatcctcagagaggcactgtaacaggcggcatgatcagggagctcttaatatccttcaggaaggccactggacagaagccattgagaataatattctacagggacggtgttagtgaaggtcagttctatcaagttctcctttacgagttagatgccatccggaaggcatgtgcatccctagaaccaaattaccagcctcctgtaacatttgtggtggttcaaaaacgtcatcatacaagactatttgcaaataatcacaaagacagaagtagcatggacaagagtggaaatattttgccaggaaccgttgttgattctaagatatgccacccaacggagtttgatttctacctctgtagtcatgctggaatccagggaacgagtaggcctgctcactaccatgtcctctgggatgagaacaatttcacagcagacgaaatgcagacattgacaaacaacctttgctacacattgatgtatactgatgcagttatgcccggtgcacacgctcggtttctgttgtccctcctgcatactacgcacacttggcagcattccgggctcggttctacatggaaccagagatgttggacaaccagacgtccaagacctccaatggcacgagcggagtctcggtgaagcccctgcctgctgtgaaggagaaggtgaaaaggatgatgttctactgctgacaaggagaccacttaaccactcacatgctgtagctaacttgctagagtttagtaaggattagatagctttctcaaggagtgatggatcaatctgatctgttaacgacctctgtaaagtactcggaaatggctgtataatagttgttgtttcaaatgtgaaagcatctaggtccttagttagatttcagtgatcagtgatcaatgacgatactagattattgtgactaatgtatgctagattattatgattaatgtatgttttgcagaaacaatggattttgtgccgccattaatagtattcaattttggttttcaaagta

SEQ ID NO: 61857 - DNA, 3545 bp, Zea Mays
gttcccgcgccgcccgccggccgcccagtccctagcatagcaggccaaacctgcctccgcgcagttgctgccgcgtcaatgctgccgtgccgctggagagagagagagagagtgcggcggcggcggctgcttggctcgttgctcctcccattctgctcagctcagcttctgatgagttcgcctttgccgctgctagttaccagcatactagaccactgactgatcacgttataaggcttccgcgcaggcgagcttctgccgccttgtcgggtaaccaaacggacctcgccggccctctccagtggtcacatcacatcacatcacatgctcgaggtcgtcctggacatgacgccgccgccgccgccgccgcaggcgcggctccaccaggggtcatcagccaagggcgggcacgcggagcggaggaagcaaccgctgcagagcagcgtgacacagcccaaggcagagcccgcggcggcggcggccgtgctgccggtgccggagggaggcaagaggtgcagagggggcgggaggcgccgcggcagggccaaggcgcccggtgagcctcgcgccgcgctactagcgccagcgcaggcgcagacgcaggcgcctccgccgcgcacggtcattgggccgcccgtgccgagcaaggggctgtcattctgccgccggccagggttcgggacggtgggcgcgcgctgcgtcgtcaaggccaaccacttcctcgccgagctcccggacaaggacctcacccagtacgatgtgaagatcacgccggaggtgagctcgcggaccgtgaaccgggccataatggcggagctggtccgcctctaccgcgcgtccgacctggggatgcgactcccggcctacgacggccgcaagaacctctacaccgccgggacactaccgttcgacgctcgcgagttcgtcgtgcgcctcgccgatgaggacgacggctccggcgtcccgcctcgggagagggagtacagggtcgccatcaagttcgccgcgcgcgccgacctccaccacctcaggcagttcatcgccgggcggcaggcggacgcgccgcaggaggccctacaggtactcgacatcgtgctccgcgagctcgccaaccagaggtacgtgtccatagggcggtccttctactcgccggacatcaggaagccgcagcggctcggcgacggcctgcagtcgtggcgtgggttctaccagagcatccggccgacccagatgggattgtcgcttaacatcgacatgtcgtccacggcatttattgaacccctgccggtgatcgagttcgtggcccagatattaggaaaggatgtcatatcaaggccattgtccgatgctaaccgaatcaagatcaagaaggcattgcggggtgtaaaagttgaggtcactcaccgggggaatgtacggcgcaagtatcgcatttcaggcctcacaacacagccaactcatgaattgattttcccgattgatgaacaaatgaatatgaaatctgtcgtggaatacttcaaggaaatgtatggtttcaccattcagcatcctcatcttccctgccttcaggttggaaaccaaaagaaggcaaactatctacccatggaggcctgcaagatcattgaaggccagagatacacaaagaggctgaatgaaaaacagatcacatcgctgctaaaggttacatgccaaaggcctagagagcaagagatggatattctacagacagttcatcaaaatgattatgagcaagatccatatgcgaaggaatttgggatcaacattagtgagaagctaacctctgttgaagcccgagtccttcctgcaccttggttgaagtatcatgacactggaaaagagaaagagtgcttaccacaggttggtcagtggaacatggtaaacaagaaagtgataaatggatgcaaggtgagccattgggcatgtataaacttctcaaggagtgttccagaaaccacagctcggggattttgccaggaattggcacaaatgtgtcaaatttcgggcatggaatttaacagtgagcctgtgatgccaatatattcagctagaccagatcaagttgtgaaggcacttaaaaacgtgtataatattgcattgaacaaacttaagggtaaagatcttgaacttcttttggctatcctccctgacaacaatgggcagttatatggtgacatcaaacgtatttgtgaaactgatttggggttgatatcacaatgttgcttaaccaagcatgtttttaagatcagcaagcagtacttggcaaatgtctcactgaaaattaatgttaagatgggaggaagaaacactgtgctcctggacgcaataagttggaggattccgttggtcagtgacatcccaactattatatttggtgcagatgtaacacatcctgaaaccggggaggactcaagtccatcgattgctgccgttgttgcttctcaagattggccagaagttacaaagtatgctggattggtttgtgctcaggcacaccggcaagagctcattcaagacctttacaaaacatggcacgatcctcagagaggcactgtaacaggcggcatgatcagggagctcttaatatccttcaggaaggccactggacagaagccattgagaataatattctacagggacggtgttagtgaaggtcagttctatcaagttctcctttacgagttagatgccatccggaaggcatgtgcatccctagaaccaaattaccagcctcctgtaacatttgtggtggttcaaaaacgtcatcatacaagactatttgcaaataatcacaaagacagaagtagcatggacaagagtggaaatattttgccaggaaccgttgttgattctaagatatgccacccaacggagtttgatttctacctctgtagtcatgctggaatccagggaacgagtaggcctgctcactaccatgtcctctgggatgagaacaatttcacagcagacgaaatgcagacattgacaaacaacctttgctacacttatgcccggtgcacacgctcggtttctgttgtccctcctgcatactacgcacacttggcagcattccgggctcggttctacatggaaccagagatgttggacaaccagacgtccaagacctccaatggcacgagcggagtctcggtgaagcccctgcctgctgtgaaggagaaggtgaaaaggatgatgttctactgctgacaaggagaccacttaaccactcacatgctgtagctaacttgctagagtttagtaaggattagatagctttctcaaggagtgatggatcaatctgatctgttaacgacctctgtaaagtactcggaaatggctgtataatagttgttgtttcaaatgtgaaagcatctaggtccttagttagatttcagtgatcagtgatcaatgacgatactagattattgtgactaatgtatgctagattattatgattaatgtatgttttgcagaaacaatggattttgtgccgccattaatagtattcaattttggttttcaaagta

SEQ ID NO: 61858 - DNA, 3654 bp, Zea Mays
cacagactaccctacccctccccctccctcggccggtcccgttcccgcgccgcccgccggccgcccagtccctagcatagcaggccaaacctgcctccgcgcagttgctgccgcgtcaatgctgccgtgccgctggagagagagagagagaggttcttctaatgcccttctgttctgtcccgcccccgcgccgcatttttttttcatttttttttaccttgcgtgacgcttcgttttcacagtgcggcggcggcggctgcttggctcgttgctcctcccattctgctcagctcagcttctgatgagttcgcctttgccgctgctagttaccagcatactagaccactgactgatcacgttataaggcttccgcgcaggcgagcttctgccgccttgtcgggtaaccaaacggacctcgccggccctctccagtggtcacatcacatcacatcacatgctcgaggtcgtcctggacatgacgccgccgccgccgccgccgcaggcgcggctccaccaggggtcatcagccaagggcgggcacgcggagcggaggaagcaaccgctgcagagcagcgtgacacagcccaaggcagagcccgcggcggcggcggccgtgctgccggtgccggagggaggcaagaggtgcagagggggcgggaggcgccgcggcagggccaaggcgcccggtgagcctcgcgccgcgctactagcgccagcgcaggcgcagacgcaggcgcctccgccgcgcacggtcattgggccgcccgtgccgagcaaggggctgtcattctgccgccggccagggttcgggacggtgggcgcgcgctgcgtcgtcaaggccaaccacttcctcgccgagctcccggacaaggacctcacccagtacgatgtgaagatcacgccggaggtgagctcgcggaccgtgaaccgggccataatggcggagctggtccgcctctaccgcgcgtccgacctggggatgcgactcccggcctacgacggccgcaagaacctctacaccgccgggacactaccgttcgacgctcgcgagttcgtcgtgcgcctcgccgatgaggacgacggctccggcgtcccgcctcgggagagggagtacagggtcgccatcaagttcgccgcgcgcgccgacctccaccacctcaggcagttcatcgccgggcggcaggcggacgcgccgcaggaggccctacaggtactcgacatcgtgctccgcgagctcgccaaccagaggtacgtgtccatagggcggtccttctactcgccggacatcaggaagccgcagcggctcggcgacggcctgcagtcgtggcgtgggttctaccagagcatccggccgacccagatgggattgtcgcttaacatcgacatgtcgtccacggcatttattgaacccctgccggtgatcgagttcgtggcccagatattaggaaaggatgtcatatcaaggccattgtccgatgctaaccgaatcaagatcaagaaggcattgcggggtgtaaaagttgaggtcactcaccgggggaatgtacggcgcaagtatcgcatttcaggcctcacaacacagccaactcatgaattgattttcccgattgatgaacaaatgaatatgaaatctgtcgtggaatacttcaaggaaatgtatggtttcaccattcagcatcctcatcttccctgccttcaggttggaaaccaaaagaaggcaaactatctacccatggaggcctgcaagatcattgaaggccagagatacacaaagaggctgaatgaaaaacagatcacatcgctgctaaaggttacatgccaaaggcctagagagcaagagatggatattctacagacagttcatcaaaatgattatgagcaagatccatatgcgaaggaatttgggatcaacattagtgagaagctaacctctgttgaagcccgagtccttcctgcaccttggttgaagtatcatgacactggaaaagagaaagagtgcttaccacaggttggtcagtggaacatggtaaacaaggtgagccattgggcatgtataaacttctcaaggagtgttccagaaaccacagctcggggattttgccaggaattggcacaaatgtgtcaaatttcgggcatggaatttaacagtgagcctgtgatgccaatatattcagctagaccagatcaagttgtgaaggcacttaaaaacgtgtataatattgcattgaacaaacttaagggtaaagatcttgaacttcttttggctatcctccctgacaacaatgggcagttatatggtgacatcaaacgtatttgtgaaactgatttggggttgatatcacaatgttgcttaaccaagcatgtttttaagatcagcaagcagtacttggcaaatgtctcactgaaaattaatgttaagatgggaggaagaaacactgtgctcctggacgcaataagttggaggattccgttggtcagtgacatcccaactattatatttggtgcagatgtaacacatcctgaaaccggggaggactcaagtccatcgattgctgccgttgttgcttctcaagattggccagaagttacaaagtatgctggattggtttgtgctcaggcacaccggcaagagctcattcaagacctttacaaaacatggcacgatcctcagagaggcactgtaacaggcggcatgatcagggagctcttaatatccttcaggaaggccactggacagaagccattgagaataatattctacagggacggtgttagtgaaggtcagttctatcaagttctcctttacgagttagatgccatccggaaggcatgtgcatccctagaaccaaattaccagcctcctgtaacatttgtggtggttcaaaaacgtcatcatacaagactatttgcaaataatcacaaagacagaagtagcatggacaagagtggaaatattttgccaggaaccgttgttgattctaagatatgccacccaacggagtttgatttctacctctgtagtcatgctggaatccagggaacgagtaggcctgctcactaccatgtcctctgggatgagaacaatttcacagcagacgaaatgcagacattgacaaacaacctttgctacacttatgcccggtgcacacgctcggtttctgttgtccctcctgcatactacgcacacttggcagcattccgggctcggttctacatggaaccagagatgttggacaaccagacgtccaagacctccaatggcacgagcggagtctcggtgaagcccctgcctgctgtgaaggagaaggtgaaaaggatgatgttctactgctgacaaggagaccacttaaccactcacatgctgtagctaacttgctagagtttagtaaggattagatagctttctcaaggagtgatggatcaatctgatctgttaacgacctctgtaaagtactcggaaatggctgtataatagttgttgtttcaaatgtgaaagcatctaggtccttagttagatttcagtgatcagtgatcaatgacgatactagattattgtgactaatgtatgctagattattatgattaatgtatgttttgcagaaacaatggattttgtgccgccattaatagtattcaattttggttttcaaagta

SEQ ID NO: 61859 - DNA, 1926 bp, Zea Mays
ggcctccttctcgtccttgtagtcttgggttgagatcccaggattcagactggtgccattcgatttgatttggcgcggggtactttcctatggccgcctccatcgcggcctcgcccttctttccagggtcgccggcgccggccgctcctaagaacggccttggagagcgcccagagagcctggacgtccgcggcgttgcggcgaagccgggagcctcgtctaatgccgtgagggcgggcaagacgcgcgcccacgctgccgtccccaaggtgaacggtggcaagtctgcggtggcggatgtggaacacgagaccgtaactgtaccttcgtcggtgccgaggactttctacaaccagcttcccgactggagcatgctccttgctgccatcacgaccatcttcttggccgccgagaagcagtggacgatgcttgattggaagcccaggcggcctgacatgctcactgacacttttgggtttggccggatcatacatgatggcctcatgttcaagcagaacttctccattaggtcctatgagattggggctgataggacggcatctatagagacaatgatgaaccatttgcaggaaacggcacttaatcatgtgaagaccgctgggctgctaggtgatggattcggctccacaccagagatgagtaaacggaacttattctgggtggttagccagatgcaggctatcgtcgagcgttatccatgctgggattggcatatacgtgattctatgacaggccacacaatactgaaggcgacaagtaaatgggttatgatgaacaaactcactaggaagcttgcaagaattccagatgaagtgcggactgaaatagagccatactttgttgggcgttctgctattgttgatgaagacaaccgcaagcttccaaaactgccagagggtcaaagcacttctgcagctaaatatgtgaggacaggcctgactcctcgttgggctgatcttgatataaaccagcatgtcaataatgttaaatacattgcgtggattcttgagagtgcaccgattactatttttgagaatcatgagctggccagcattgtgctggattacaaaagggagtgtgtccgcgatagtgtgctgcagtcacacacctctgtccatgaggattgcaacattgagtctggagaaacaaccttgcactgtgagcatgtgctgagccttgaatcaggtccgaccatagtgaaggcccggaccatgtggaggcctaagggaaccaaggcccaagaaacagcggttccatcttcattctgattttgtcagatgttcgagatggtgactttggcagcaaactatctggcagaagatcagaatggttactagcatcctctattggaagcaaatcacacggaccgtgacctaaactaatttaactatgaagtgtgaccaatagaggagatataagtggggtcacaatggaggagaccaaagcggggagatcgaagacaaaggaggcctcctgtgcatggtttgtttctgtttccgcctttcgagttctttcttacgacaatcttgggtcgcacaaatgggtgttgtaagtattgatctgtagctacaaatgtatgatgggggagtgattgcttctcatacatgttccttctggggctatgtccatatgttgtaagccccatgaaaacagatttgtcgcagccatatccattcagaatctcatactatattgtatttgctgatattaaaattgatactactactattctccaggctgctcaagcgtgttgaaacttcgtgtctgggacaaatattgaaactgtacagcttgccatttactttgacttgcataccatgctttctaatttctagactagagctctttgaactgtagacggcttggcgtgaccgatgacaggttgacatgtctaccatgctttcg

SEQ ID NO: 61860 - DNA, 2001 bp, Zea Mays
gcagcttcttttcttggcctccttctcgtccttgtagtcttgggttgagatcccaggattcagactggtgccattcgatttgatttggcgcggggtactttcctatggccgcctccatcgcggcctcgcccttctttccagggtcgccggcgccggccgctcctaagaacggccttggagagcgcccagagagcctggacgtccgcggcgttgcggcgaagccgggagcctcgtctaatgccgtgagggcgggcaagacgcgcgcccacgctgccgtccccaaggtgaacggtggcaagtctgcggtggcggatgtggaacacgagaccgtaactgtaccttcgtcggtgccgaggactttctacaaccagcttcccgactggagcatgctccttgctgccatcacgaccatcttcttggccgccgagaagcagtggacgatgcttgattggaagcccaggcggcctgacatgctcactgacacttttgggtttggccggatcatacatgatggcctcatgttcaagcagaacttctccattaggtcctatgagattggggctgataggacggcatctatagagacaatgatgaaccatttgcaggaaacggcacttaatcatgtgaagaccgctgggctgctaggtgatggattcggctccacaccagagatgagtaaacggaacttattctgggtggttagccagatgcaggctatcgtcgagcgttatccatgctggggtgatactgttgaagtaaatacatgggttagtgctaatggtaaaaatggaatgcgtagggattggcatatacgtgattctatgacaggccacacaatactgaaggcgacaagtaaatgggttatgatgaacaaactcactaggaagcttgcaagaattccagatgaagtgcggactgaaatagagccatactttgttgggcgttctgctattgttgatgaagacaaccgcaagcttccaaaactgccagagggtcaaagcacttctgcagctaaatatgtgaggacaggcctgactcctcgttgggctgatcttgatataaaccagcatgtcaataatgttaaatacattgcgtggattcttgagagtgcaccgattactatttttgagaatcatgagctggccagcattgtgctggattacaaaagggagtgtgtccgcgatagtgtgctgcagtcacacacctctgtccatgaggattgcaacattgagtctggagaaacaaccttgcactgtgagcatgtgctgagccttgaatcaggtccgaccatagtgaaggcccggaccatgtggaggcctaagggaaccaaggcccaagaaacagcggttccatcttcattctgattttgtcagatgttcgagatggtgactttggcagcaaactatctggcagaagatcagaatggttactagcatcctctattggaagcaaatcacacggaccgtgacctaaactaatttaactatgaagtgtgaccaatagaggagatataagtggggtcacaatggaggagaccaaagcggggagatcgaagacaaaggaggcctcctgtgcatggtttgtttctgtttccgcctttcgagttctttcttacgacaatcttgggtcgcacaaatgggtgttgtaagtattgatctgtagctacaaatgtatgatgggggagtgattgcttctcatacatgttccttctggggctatgtccatatgttgtaagccccatgaaaacagatttgtcgcagccatatccattcagaatctcatactatattgtatttgctgatattaaaattgatactactactattctccaggctgctcaagcgtgttgaaacttcgtgtctgggacaaatattgaaactgtacagcttgccatttactttgacttgcataccatgctttctaatttctagactagagctctttgaactgtagacggcttggcgtgaccgatgacaggttgacatgtctaccatgctttcg

SEQ ID NO: 61861 - DNA, 2715 bp, Zea Mays
gcccttgcattggcgacagaaccacctacaaaccatcttatggagagaccccagtagggagaaggtggtgataaccgtgtagcagttgatctgattgttcaacatatccgtacaaaacttggtcagcatgacttgtgcaaaatctatccaaatgttcatgttgttcaatcaacttttcagatccgaggaatgcatactcttatccgtgatagggacatcaccacacctgagattgccttggaagagcagtggcggcttcatgggcaggatgatcctattagcctttctagctatgctgccgacgcgttaagtaccactggtgaggatatgatagagtgtggcggcctcccgaagccgccgcagaactatatattcttagagcagtgccaaacagactctcggataaaaagttttctgacagtatttctctctctcccagatctaataaaaaggaaaatttgccgcctccccagactccatgttttaaaaggtcgcggtgggcaacgagccaacgaccggtgccagcagagacgaccggccccggccccgccccggccgcagctgcccgaagccgccaaacaccgccagtcccccaccacatccgccagaaccctctccctccctccctccctccctcatcggcgcgccgccaatggccgtgtggtgaagcgcacccgacggaagaagcaggcaccaacagccaagccccctttgcccttgcccttgcccttgccctcgccgccgccgtccgcggaaggttgagatcccaggattcagactggtgccattcgatttgatttggcgcggggtactttcctatggccgcctccatcgcggcctcgcccttctttccagggtcgccggcgccggccgctcctaagaacggccttggagagcgcccagagagcctggacgtccgcggcgttgcggcgaagccgggagcctcgtctaatgccgtgagggcgggcaagacgcgcgcccacgctgccgtccccaaggtgaacggtggcaagtctgcggtggcggatgtggaacacgagaccgtaactgtaccttcgtcggtgccgaggactttctacaaccagcttcccgactggagcatgctccttgctgccatcacgaccatcttcttggccgccgagaagcagtggacgatgcttgattggaagcccaggcggcctgacatgctcactgacacttttgggtttggccggatcatacatgatggcctcatgttcaagcagaacttctccattaggtcctatgagattggggctgataggacggcatctatagagacaatgatgaaccatttgcaggaaacggcacttaatcatgtgaagaccgctgggctgctaggtgatggattcggctccacaccagagatgagtaaacggaacttattctgggtggttagccagatgcaggctatcgtcgagcgttatccatgctggggtgatactgttgaagtaaatacatgggttagtgctaatggtaaaaatggaatgcgtagggattggcatatacgtgattctatgacaggccacacaatactgaaggcgacaagtaaatgggttatgatgaacaaactcactaggaagcttgcaagaattccagatgaagtgcggactgaaatagagccatactttgttgggcgttctgctattgttgatgaagacaaccgcaagcttccaaaactgccagagggtcaaagcacttctgcagctaaatatgtgaggacaggcctgactcctcgttgggctgatcttgatataaaccagcatgtcaataatgttaaatacattgcgtggattcttgagagtgcaccgattactatttttgagaatcatgagctggccagcattgtgctggattacaaaagggagtgtgtccgcgatagtgtgctgcagtcacacacctctgtccatgaggattgcaacattgagtctggagaaacaaccttgcactgtgagcatgtgctgagccttgaatcaggtccgaccatagtgaaggcccggaccatgtggaggcctaagggaaccaaggcccaagaaacagcggttccatcttcattctgattttgtcagatgttcgagatggtgactttggcagcaaactatctggcagaagatcagaatggttactagcatcctctattggaagcaaatcacacggaccgtgacctaaactaatttaactatgaagtgtgaccaatagaggagatataagtggggtcacaatggaggagaccaaagcggggagatcgaagacaaaggaggcctcctgtgcatggtttgtttctgtttccgcctttcgagttctttcttacgacaatcttgggtcgcacaaatgggtgttgtaagtattgatctgtagctacaaatgtatgatgggggagtgattgcttctcatacatgttccttctggggctatgtccatatgttgtaagccccatgaaaacagatttgtcgcagccatatccattcagaatctcatactatattgtatttgctgatattaaaattgatactactactattctccaggctgctcaagcgtgttgaaacttcgtgtctgggacaaatattgaaactgtacagcttgccatttactttgacttgcataccatgctttctaatttctagactagagctctttgaactgtagacggcttggcgtgaccgatgacaggttgacatgtctaccatgctttcg

SEQ ID NO: 61862 - DNA, 2705 bp, Zea Mays
atactttgggtgcccttgcattggcgacagaaccacctacaaaccatcttatggagagaccccagtagggagaagttgatctgattgttcaacatatccgtacaaaacttggtcagcatgacttgtgcaaaatctatccaaatgttcatgttgttcaatcaacttttcagatccgaggaatgcatactcttatccgtgatagggacatcaccacacctgagattgccttggaagagcagtggcggcttcatgggcaggatgatcctattagcctttctagctatgctgccgacgcgttaagtaccactggtgaggatatgatagagtgtggcggcctcccgaagccgccgcagaactatatattcttagagcagtgccaaacagactctcggataaaaagttttctgacagtatttctctctctcccagatctaataaaaaggaaaatttgccgcctccccagactccatgttttaaaaggtcgcggtgggcaacgagccaacgaccggtgccagcagagacgaccggccccggccccgccccggccgcagctgcccgaagccgccaaacaccgccagtcccccaccacatccgccagaaccctctccctccctccctccctccctcatcggcgcgccgccaatggccgtgtggtgaagcgcacccgacggaagaagcaggcaccaacagccaagccccctttgcccttgcccttgcccttgccctcgccgccgccgtccgcggaaggttgagatcccaggattcagactggtgccattcgatttgatttggcgcggggtactttcctatggccgcctccatcgcggcctcgcccttctttccagggtcgccggcgccggccgctcctaagaacggccttggagagcgcccagagagcctggacgtccgcggcgttgcggcgaagccgggagcctcgtctaatgccgtgagggcgggcaagacgcgcgcccacgctgccgtccccaaggtgaacggtggcaagtctgcggtggcggatgtggaacacgagaccgtaactgtaccttcgtcggtgccgaggactttctacaaccagcttcccgactggagcatgctccttgctgccatcacgaccatcttcttggccgccgagaagcagtggacgatgcttgattggaagcccaggcggcctgacatgctcactgacacttttgggtttggccggatcatacatgatggcctcatgttcaagcagaacttctccattaggtcctatgagattggggctgataggacggcatctatagagacaatgatgaaccatttgcaggaaacggcacttaatcatgtgaagaccgctgggctgctaggtgatggattcggctccacaccagagatgagtaaacggaacttattctgggtggttagccagatgcaggctatcgtcgagcgttatccatgctggggtgatactgttgaagtaaatacatgggttagtgctaatggtaaaaatggaatgcgtagggattggcatatacgtgattctatgacaggccacacaatactgaaggcgacaagtaaatgggttatgatgaacaaactcactaggaagcttgcaagaattccagatgaagtgcggactgaaatagagccatactttgttgggcgttctgctattgttgatgaagacaaccgcaagcttccaaaactgccagagggtcaaagcacttctgcagctaaatatgtgaggacaggcctgactcctcgttgggctgatcttgatataaaccagcatgtcaataatgttaaatacattgcgtggattcttgagagtgcaccgattactatttttgagaatcatgagctggccagcattgtgctggattacaaaagggagtgtgtccgcgatagtgtgctgcagtcacacacctctgtccatgaggattgcaacattgagtctggagaaacaaccttgcactgtgagcatgtgctgagccttgaatcaggtccgaccatagtgaaggcccggaccatgtggaggcctaagggaaccaaggcccaagaaacagcggttccatcttcattctgattttgtcagatgttcgagatggtgactttggcagcaaactatctggcagaagatcagaatggttactagcatcctctattggaagcaaatcacacggaccgtgacctaaactaatttaactatgaagtgtgaccaatagaggagatataagtggggtcacaatggaggagaccaaagcggggagatcgaagacaaaggaggcctcctgtgcatggtttgtttctgtttccgcctttcgagttctttcttacgacaatcttgggtcgcacaaatgggtgttgtaagtattgatctgtagctacaaatgtatgatgggggagtgattgcttctcatacatgttccttctggggctatgtccatatgttgtaagccccatgaaaacagatttgtcgcagccatatccattcagaatctcatactatattgtatttgctgatattaaaattgatactactactattctccaggctgctcaagcgtgttgaaacttcgtgtctgggacaaatattgaaactgtacagcttgccatttactttgacttgcataccatgctttctaatttctagactagagctctttgaactgtagacggcttggcgtgaccgatgacaggttgacatgtctaccatgctttcg

SEQ ID NO: 61863 - DNA, 259 bp, Zea Mays
cggcgtcctccccatttttctataattggagctgtgattggagaagcggatgaggttcttgtgcgacgcttcctatgtgtttgatgaaatggacaaatcaaggtttgttatggttgctgtgaagttttgggttgaataaaagttttggtgagccaatttcttaattatattagacatggtcaaaaggtcttctcgcttgtgcaatgtttgtgaaatggtgtatgatgttcggatagtgcataatggagttagtaatatg

SEQ ID NO: 61864 - DNA, 2955 bp, Zea Mays
tacattagttgtaagtccacggagagagagagaggcctctagggagaaaaaaaaaggtccacgcagagagaacagagaaaggaaacaacagcgacggaccaagaaatgccggggcgacaaggcatggagccggcctctgctgcggcgcgggcgccaaggccgccgagcttcgcgtcgcagaccaatgccctcctgcgcaaaaacctcatcttccagaaacgtaacaggaagggaaccattcggctaatcatagttcccatatacctctgcctcataatcagcgtccttcaaagggtcatcaacagcttcctagacaagccaaagttcaggtgtggttgcaagtgcatcgacgatgccaacggcagcacagccccctgccagaacgtgtgtggaatccagtactccacgctggatcaggcgcctagttgccccattccaaatcctccgaaatggcctgccctcgtgcaagtacccctcccggagtatcgcgccgtgcaggactcctcaggcttgtttacaggcttccctgacgcatcatgcagaaagacacaatcttgccctgccagtataccctttgctggagcaaatacaactctatctaatagtatcatgcagaacctgctcacaagctcaccactcttaaatctttctgattacacgagcatatcaagtcttttgcttggtacagatgttccaggatcttctacgggattcgttgaacctgcttttatctcggctcgacccatatatgttcttcaaccacagtgcaagtccggtgattcagttacaatcccaattaccgtcggttctgttaatgcccagaaagcagagataaaatgtgttcaaggtttacccttgtggcggaacagttcaataacaattaatgaggaaacatttcggggctaccgaaaagggaaaactgctaaagggataaatgaaattgcgatgggctatgattttcaagactcaaacgagaatcattttaatgtccttactttgtataactcaacgtatgagaatgcctctttcattccaatgccatttgcacttctgcgcattccacactcattgaatgcggtatcaaacgcctatctccaactaatacaaggttcgggtgtaaaaatgttgctcgacttcacaaaagaaatgcctaagcaagccacccgtctgacatttgatttttctgctgtggctggtgtgaactttttcaagataaacgactacagtatacagtttgttttctttttcagcttcattaatctgcagattgtactggccttcctagcctcatcattcttttcgaaagttaacactgctcaggcaattgcgtacctgtacatatttgggtcagggttgatggctggatatcttattcgcaattttattgaaggggggaaattcccaagacactggatcacagttctggagataatacctgcattttctttatatcgaggactatatgagcttggccagtatgctgttagatcttcagaaacaggaagccctggcatgcgatggagtgatttaaatgaccacatgaatggcatgagagatgtgttaatcataattattttggaatggttggttttgcttcctgtcgcatattatttcgactatgcttcttcagttggacacagatctagtcccctttctataatcaaacatctcttaaagaaggaccccacctggagaaggataactgctaatgaaatagatggtaaggatgttcacatagagatggagaaggtagacattatcaaagaaagagaggctgttgatcaagtgctacagcagcaacaaactagtggctatgctgtagtctgtgatgacctaagaaaagtatatcatggaaaagatggtaatcctgataagtttgcagttcaaggagtatcacttgctttgccttatggagagtgccttggtattcttggtcctaatggcgctggcaaaagctcttttattagcatgatgattgggtttgtaaagccaacatcagggaacgcttttgtacgggggttcagcatacaaaatgacatggaaaagatatacagcagcatgggagtttgcccacagaatgatatgctttgggagacactaactggtagggaacatctccagttttatggccgactgaagggcctcagtggttcatccttggatcttgttgtcgatgagtccttaaggagtgtaaatttgcttcatgggggtgctcctgataagcaagtgaagaagtacagtggtggcatgaggaggcgccttagtgtcgccatctcgttgatcggagatgctaaagttgtgtacatggatgagccaagcaccggattagacccagcttcgaggaagagtctctggagcgctgtgaagcaagcaaagcaggatagagcaatcattctcaccacgcattccatggaagaagctgaaactctttgtgacagactgtgtatcatggtcgatggaaagctccagtgcataggcactcccaaagagctcatagctagatacggagggtactacgtgctgacgatgacgacactgccggagttcgaacaagaggtcgaagatctggtgcgcaggctctcgccaagctccaggaaggtgtaccatctgtcggggacgcagaagcacgagctgccgaagcaggaagcgaggatctcagacgtgttcatggccgtagagagcttcaagaagagggtggaagtccaggcctggggcctcgcggacaccaccatggaggacgtgttcgtcaaggtcgccaaaggggcccagtccagcgaagaactctcctagagtcgtagtctacatgtaatggtgcaagggcaagggcctgctgttgatgctaggtgtatatatatgtacagcacgtaaaattttcttccgttgcaaagcaaatggtttggtttgctcacctttgattttggaattttgataacaaagattatttgattgaattga

SEQ ID NO: 61865 - DNA, 3298 bp, Zea Mays
cttctccatcgacctctacattagttgtaagtccacggagagagagagaggcctctagggagaaaaaaaaaggtccacgcagagagaacagagaaaggaaacaacagcgacggaccaagaaatgccggggcgacaaggcatggagccggcctctgctgcggcgcgggcgccaaggccgccgagcttcgcgtcgcagaccaatgccctcctgcgcaaaaacctcatcttccagaaacgtaacaggaagggaaccattcggctaatcatagttcccatatacctctgcctcataatcagcgtccttcaaagggtcatcaacagcttcctagacaagccaaagttcaggtgtggttgcaagtgcatcgacgatgccaacggcagcacagccccctgccagaacgtgtgtggaatccagtactccacgctggatcaggcgcctagttgccccattccaaatcctccgaaatggcctgccctcgtgcaagtacccctcccggagtatcgcgccgtgcaggactcctcaggcttgtttacaggcttccctgacgcatcatgcagaaagacacaatcttgccctgccagtataccctttgctggagcaaatacaactctatctaatagtatcatgcagaacctgctcacaagctcaccactcttaaatctttctgattacacgagcatatcaagtcttttgcttggtacagatgttccaggatcttctacgggattcgttgaacctgcttttatctcggctcgacccatatatgttcttcaaccacagtgcaagtccggtgattcagttacaatcccaattaccgtcggttctgttaatgcccagaaagagataaaatgtgttcaaggtttacccttgtggcggaacagttcaataacaattaatgaggaaacatttcggggctaccgaaaagggaaaactgctaaagggataaatgaaattgcgatgggctatgattttcaagactcaaacgagaatcattttaatgtccttactttgtataactcaacgtatgagaatgcctctttcattccaatgccatttgcacttctgcgcattccacactcattgaatgcggtatcaaacgcctatctccaactaatacaaggttcgggtgtaaaaatgttgctcgacttcacaaaagaaatgcctaagcaagccacccgtctgacatttgatttttctgctgtggctggtccactgtttttcgaatgggtggttgtcttgctttttccggtatgacgttattggagttgattttctttttgcgagtaatatattaaatacacagaatatcaatgtgtaatgcattacagtttttttaaactccattcatgattacattaacagaaaaaaattcaggttatgctgacctaccttgtatatgagaagcaacacaaactccgaacaatgatgaaaatgcatggacttggggatggcccttattggattatatattatatgtacttccttattttttctacagtgtatctgattgtatttgtcattttcggatccatcataggtgtgaactttttcaagataaacgactacagtatacagtttgttttctttttcagcttcattaatctgcagattgtactggccttcctagcctcatcattcttttcgaaagttaacactgctcaggcaattgcgtacctgtacatatttgggtcagggttgatggctggatatcttattcgcaattttattgaaggggggaaattcccaagacactggatcacagttctggagataatacctgcattttctttatatcgaggactatatgagcttggccagtatgctgttagatcttcagaaacaggaagccctggcatgcgatggagtgatttaaatgaccacatgaatggcatgagagatgtgttaatcataattattttggaatggttggttttgcttcctgtcgcatattatttcgactatgcttcttcagttggacacagatctagtcccctttctataatcaaacatctcttaaagaaggaccccacctggagaaggataactgctaatgaaatagatggtaaggatgttcacatagagatggagaaggtagacattatcaaagaaagagaggctgttgatcaagtgctacagcagcaacaaactagtggctatgctgtagtctgtgatgacctaagaaaagtatatcatggaaaagatggtaatcctgataagtttgcagttcaaggagtatcacttgctttgccttatggagagtgccttggtattcttggtcctaatggcgctggcaaaagctcttttattagcatgatgattgggtttgtaaagccaacatcagggaacgcttttgtacgggggttcagcatacaaaatgacatggaaaagatatacagcagcatgggagtttgcccacagaatgatatgctttgggagacactaactggtagggaacatctccagttttatggccgactgaagggcctcagtggttcatccttggatcttgttgtcgatgagtccttaaggagtgtaaatttgcttcatgggggtgctcctgataagcaagtgaagaagtacagtggtggcatgaggaggcgccttagtgtcgccatctcgttgatcggagatgctaaagttgtgtacatggatgagccaagcaccggattagacccagcttcgaggaagagtctctggagcgctgtgaagcaagcaaagcaggatagagcaatcattctcaccacgcattccatggaagaagctgaaactctttgtgacagactgtgtatcatggtcgatggaaagctccagtgcataggcactcccaaagagctcatagctagatacggagggtactacgtgctgacgatgacgacactgccggagttcgaacaagaggtcgaagatctggtgcgcaggctctcgccaagctccaggaaggtgtaccatctgtcggggacgcagaagcacgagctgccgaagcaggaagcgaggatctcagacgtgttcatggccgtagagagcttcaagaagagggtggaagtccaggcctggggcctcgcggacaccaccatggaggacgtgttcgtcaaggtcgccaaaggggcccagtccagcgaagaactctcctagagtcgtagtctacatgtaatggtgcaagggcaagggcctgctgttgatgctaggtgtatatatatgtacagcacgtaaaattttcttccgttgcaaagcaaatggtttggtttgctcacctttgattttggaattttgataacaaagattatttgattgaattga

SEQ ID NO: 61866 - DNA, 3193 bp, Zea Mays
ctcttccttctccatcgacctctacattagttgtaagtccacggagagagagagaggcctctagggagaaaaaaaaaggtccacgcagagagaacagagaaaggaaacaacagcgacggaccaagaaatgccggggcgacaaggcatggagccggcctctgctgcggcgcgggcgccaaggccgccgagcttcgcgtcgcagaccaatgccctcctgcgcaaaaacctcatcttccagaaacgtaacaggaagggaaccattcggctaatcatagttcccatatacctctgcctcataatcagcgtccttcaaagggtcatcaacagcttcctagacaagccaaagttcaggtgtggttgcaagtgcatcgacgatgccaacggcagcacagccccctgccagaacgtgtgtggaatccagtactccacgctggatcaggcgcctagttgccccattccaaatcctccgaaatggcctgccctcgtgcaagtacccctcccggagtatcgcgccgtgcaggactcctcaggcttgtttacaggcttccctgacgcatcatgcagaaagacacaatcttgccctgccagtataccctttgctggagcaaatacaactctatctaatagtatcatgcagaacctgctcacaagctcaccactcttaaatctttctgattacacgagcatatcaagtcttttgcttggtacagatgttccaggatcttctacgggattcgttgaacctgcttttatctcggctcgacccatatatgttcttcaaccacagtgcaagtccggtgattcagttacaatcccaattaccgtcggttctgttaatgcccagaaagcagagataaaatgtgttcaaggtttacccttgtggcggaacagttcaataacaattaatgaggaaacatttcggggctaccgaaaagggaaaactgctaaagggataaatgaaattgcgatgggctatgattttcaagactcaaacgagaatcattttaatgtccttactttgtataactcaacgtatgagaatgcctctttcattccaatgccatttgcacttctgcgcattccacactcattgaatgcggtatcaaacgcctatctccaactaatacaaggttcgggtgtaaaaatgttgctcgacttcacaaaagaaatgcctaagcaagccacccgtctgacatttgatttttctgctgtggctggtccactgtttttcgaatgggtggttgtcttgctttttccgaaaaaaattcaggttatgctgacctaccttgtatatgagaagcaacacaaactccgaacaatgatgaaaatgcatggacttggggatggcccttattggattatatattatatgtacttccttattttttctacagtgtatctgattgtatttgtcattttcggatccatcataggtgtgaactttttcaagataaacgactacagtatacagtttgttttctttttcagcttcattaatctgcagattgtactggccttcctagcctcatcattcttttcgaaagttaacactgctcaggcaattgcgtacctgtacatatttgggtcagggttgatggctggatatcttattcgcaattttattgaaggggggaaattcccaagacactggatcacagttctggagataatacctgcattttctttatatcgaggactatatgagcttggccagtatgctgttagatcttcagaaacaggaagccctggcatgcgatggagtgatttaaatgaccacatgaatggcatgagagatgtgttaatcataattattttggaatggttggttttgcttcctgtcgcatattatttcgactatgcttcttcagttggacacagatctagtcccctttctataatcaaacatctcttaaagaaggaccccacctggagaaggataactgctaatgaaatagatggtaaggatgttcacatagagatggagaaggtagacattatcaaagaaagagaggctgttgatcaagtgctacagcagcaacaaactagtggctatgctgtagtctgtgatgacctaagaaaagtatatcatggaaaagatggtaatcctgataagtttgcagttcaaggagtatcacttgctttgccttatggagagtgccttggtattcttggtcctaatggcgctggcaaaagctcttttattagcatgatgattgggtttgtaaagccaacatcagggaacgcttttgtacgggggttcagcatacaaaatgacatggaaaagatatacagcagcatgggagtttgcccacagaatgatatgctttgggagacactaactggtagggaacatctccagttttatggccgactgaagggcctcagtggttcatccttggatcttgttgtcgatgagtccttaaggagtgtaaatttgcttcatgggggtgctcctgataagcaagtgaagaagtacagtggtggcatgaggaggcgccttagtgtcgccatctcgttgatcggagatgctaaagttgtgtacatggatgagccaagcaccggattagacccagcttcgaggaagagtctctggagcgctgtgaagcaagcaaagcaggatagagcaatcattctcaccacgcattccatggaagaagctgaaactctttgtgacagactgtgtatcatggtcgatggaaagctccagtgcataggcactcccaaagagctcatagctagatacggagggtactacgtgctgacgatgacgacactgccggagttcgaacaagaggtcgaagatctggtgcgcaggctctcgccaagctccaggaaggtgtaccatctgtcggggacgcagaagcacgagctgccgaagcaggaagcgaggatctcagacgtgttcatggccgtagagagcttcaagaagagggtggaagtccaggcctggggcctcgcggacaccaccatggaggacgtgttcgtcaaggtcgccaaaggggcccagtccagcgaagaactctcctagagtcgtagtctacatgtaatggtgcaagggcaagggcctgctgttgatgctaggtgtatatatatgtacagcacgtaaaattttcttccgttgcaaagcaaatggtttggtttgctcacctttgattttggaattttgataacaaagattatttgattgaattga

SEQ ID NO: 61867 - DNA, 3181 bp, Zea Mays
ctcttccttctccatcgacctctacattagttgtaagtccacggagagagagagaggcctctagggagaaaaaaaaaggtccacgcagagagaacagagaaaggaaacaacagcgacggaccaagaaatgccggggcgacaaggcatggagccggcctctgctgcggcgcgggcgccaaggccgccgagcttcgcgtcgcagaccaatgccctcctgcgcaaaaacctcatcttccagaaacgtaacaggaagggaaccattcggctaatcatagttcccatatacctctgcctcataatcagcgtccttcaaagggtcatcaacagcttcctagacaagccaaagttcaggtgtggttgcaagtgcatcgacgatgccaacggcagcacagccccctgccagaacgtgtgtggaatccagtactccacgctggatcaggcgcctagttgccccattccaaatcctccgaaatggcctgccctcgtgcaagtacccctcccggagtatcgcgccgtgcaggactcctcaggcttgtttacaggcttccctgacgcatcatgcagaaagacacaatcttgccctgccagtataccctttgctggagcaaatacaactctatctaatagtatcatgcagaacctgctcacaagctcaccactcttaaatctttctgattacacgagcatatcaagtcttttgcttggtacagatgttccaggatcttctacgggattcgttgaacctgcttttatctcggctcgacccatatatgttcttcaaccacagtgcaagtccggtgattcagttacaatcccaattaccgtcggttctgttaatgcccagaaagcagagataaaatgtgttcaaggtttacccttgtggcggaacagttcaataacaattaatgaggaaacatttcggggctaccgaaaagggaaaactgctaaagggataaatgaaattgcgatgggctatgattttcaagactcaaacgagaatcattttaatgtccttactttgtataactcaacgtatgagaatgcctctttcattccaatgccatttgcacttctgcgcattccacactcattgaatgcggtatcaaacgcctatctccaactaatacaaggttcgggtgtaaaaatgttgctcgacttcacaaaagaaatgcctaagcaagccacccgtctgacatttgatttttctgctgtggctggtccactgtttttcgaatgggtggttgtcttgctttttccggttatgctgacctaccttgtatatgagaagcaacacaaactccgaacaatgatgaaaatgcatggacttggggatggcccttattggattatatattatatgtacttccttattttttctacagtgtatctgattgtatttgtcattttcggatccatcataggtgtgaactttttcaagataaacgactacagtatacagtttgttttctttttcagcttcattaatctgcagattgtactggccttcctagcctcatcattcttttcgaaagttaacactgctcaggcaattgcgtacctgtacatatttgggtcagggttgatggctggatatcttattcgcaattttattgaaggggggaaattcccaagacactggatcacagttctggagataatacctgcattttctttatatcgaggactatatgagcttggccagtatgctgttagatcttcagaaacaggaagccctggcatgcgatggagtgatttaaatgaccacatgaatggcatgagagatgtgttaatcataattattttggaatggttggttttgcttcctgtcgcatattatttcgactatgcttcttcagttggacacagatctagtcccctttctataatcaaacatctcttaaagaaggaccccacctggagaaggataactgctaatgaaatagatggtaaggatgttcacatagagatggagaaggtagacattatcaaagaaagagaggctgttgatcaagtgctacagcagcaacaaactagtggctatgctgtagtctgtgatgacctaagaaaagtatatcatggaaaagatggtaatcctgataagtttgcagttcaaggagtatcacttgctttgccttatggagagtgccttggtattcttggtcctaatggcgctggcaaaagctcttttattagcatgatgattgggtttgtaaagccaacatcagggaacgcttttgtacgggggttcagcatacaaaatgacatggaaaagatatacagcagcatgggagtttgcccacagaatgatatgctttgggagacactaactggtagggaacatctccagttttatggccgactgaagggcctcagtggttcatccttggatcttgttgtcgatgagtccttaaggagtgtaaatttgcttcatgggggtgctcctgataagcaagtgaagaagtacagtggtggcatgaggaggcgccttagtgtcgccatctcgttgatcggagatgctaaagttgtgtacatggatgagccaagcaccggattagacccagcttcgaggaagagtctctggagcgctgtgaagcaagcaaagcaggatagagcaatcattctcaccacgcattccatggaagaagctgaaactctttgtgacagactgtgtatcatggtcgatggaaagctccagtgcataggcactcccaaagagctcatagctagatacggagggtactacgtgctgacgatgacgacactgccggagttcgaacaagaggtcgaagatctggtgcgcaggctctcgccaagctccaggaaggtgtaccatctgtcggggacgcagaagcacgagctgccgaagcaggaagcgaggatctcagacgtgttcatggccgtagagagcttcaagaagagggtggaagtccaggcctggggcctcgcggacaccaccatggaggacgtgttcgtcaaggtcgccaaaggggcccagtccagcgaagaactctcctagagtcgtagtctacatgtaatggtgcaagggcaagggcctgctgttgatgctaggtgtatatatatgtacagcacgtaaaattttcttccgttgcaaagcaaatggtttggtttgctcacctttgattttggaattttgataacaaagattatttgattgaattga

SEQ ID NO: 61868 - DNA, 1994 bp, Zea Mays
caaggaggtccccactagagcggacgagcaccatggtgtgtgacgccggctgcttgacggggtcgctagccctcctactcgccgcggcgggcaccgacatcctagcctctgtcgtcttggcgtccatggtgtcggaggcgcaacggtagttggtgctgacggtggcgtgaagccatcctccgtgcctcgatcctcctcctggtggcattgtcctttgtcgtggctgctgctccctctgcctccaataagcagtgcgacgatgaggatgcgagcaggcgcacgacagaattagctcctctcgccgtcgtcggttcgtctattcagtgcatgttgctggcctgctcctgcaccacgacgtcatgcagctccgcctccgagaagtaatgcgacaatgaggatatgagtacgcgatgggagctggacgctccctctcctggctaacctttctgtttttttatttgttgtgcataggaaaggttgtcttcccgaactcaaaatccaaatggattcgatttcacattcaacagaatgtttaccattgccattaagatgggtttgcagtttcctgttagacaaactgatattgatgggatacttggtctccgagagaacgaattgtaatgatctgttaatgggatatcacacaggagaaatcattgcatcccttttatttttcccatcatgatcatatatgttatctttgactcaaatttctaaatccgtgtactaacataatccagacatgctaggtagagatctacggcaatagaatccagacgtaccaactaaaatgttagggacataggttaaaatgattctaaatcagagctcaaataagagtacgaccaacacttcttgcacctgctcaagatgttttccacctcatagtgtcgttacgaaatgtgtgaacaggagattaataaaaatatcccctcttgcatgtgagcctgcaaccaataaaaaagtgtctatttactggacatatgttcatgttcacgcggcgcttcataaaatctgcataggatacatcgcacttctatctgacctactcaggtctggtgttcagcggttgccacacctaggatatcaaatggattacatctccaaaacggaacctttctatgtctgcatgaactcaagttccttggctgatccatatagaacgatgctacctactaccacaacattaccatctaagcaaattgtgttatttgttcatctacgtcgaaaagcacatttgaccattttgggtgctcacacaagattctaaatgaaattcttggagatagagagcgtatccaatctctgtattctgagattcctgggagaaccacaagcaatgccagtacctccagaagaacttctaatttcagtgtggacgcaactggagatgaaagcctttctgttgaagcacacaattgtatactcgacaatactgcgtctattttatccatgaggagctgcgctgacaagctgtggaagagaagaaaaggttcaaaactttaaaatcagaagataaaccagaggaagcaatgcaggctttcaagtatggtaaagaacttgcaaatcaagctgcaacgctggaattacaactgaagagtagtagtagaatggctacacaagcgtctaatgtctcttctgttgttggtacttcgacgacggctggttctgatgaggctagaataaaaaggacttcaactgcgaaaaagaattaagaaagaaaagaatgatcttgcatgggcttagagatataggttggtcatatgcaggcactgttttgctattttatattggcacaaatgtgtaatttggaaaacacatgtcctatgttgtgcttccttgcgtcctctaaaacaatgttatagacttttatgtcttttctgtaatattttttatctaaatcttttttgtaatatttgtatatcacaacaaactgccacatgaattttgcccctcaaatggtcgtttgatctatataactatccaattcaaat

SEQ ID NO: 61869 - DNA, 2202 bp, Zea Mays
cgcgggtgtttttcatcgcccaaaccctagcggcgacaatgaccgaggtggctggcgacagggacaaggaggtccccactagagcggacgagcaccatggtgtgtgacgccggctgcttgacggggtcgctagccctcctactcgccgcggcgggcaccgacatcctagcctctgtcgtcttggcgtccatggtgtcggaggcgcaacggtagttggtgctgacggtggcgtgaagccatcctccgtgcctcgatcctcctcctggtggcattgtcctttgtcgtggctgctgctccgtgagtccccctttcctcctcttcctgacctatcgccctgcttgtcgcacgaacgaattggcttctctcgccgacgccaccggtgccgtctattcatgaccttttgctggcctgctcctgcgccacgacgacatgcagctctgcctccaataagcagtgcgacgatgaggatgcgagcaggcgcacgacagaattagctcctctcgccgtcgtcggttcgtctattcagtgcatgttgctggcctgctcctgcaccacgacgtcatgcagctccgcctccgagaagtaatgcgacaatgaggatatgaggacataggttaaaatgattctaaatcagagctcaaataagagtacgaccaacacttcttgcacctgctcaagatgttttccacctcatagtgtcgttacgaaatgtgtgaacaggagattaataaaaatatcccctcttgcatgtgagcctgcaaccaataaaaaaggtgccctgttatatctctgttgttttatatctggtcaatatagatgattctgcctatttattctaataggattgcatctgcatgtcctagattgtttgttagaatacttaattgatactgaaatataaaaagtttctagatcagtacttttttactaatatctcctttctccttttctttgtgttcccttctattgattgtctttttttgttcttttgcttcccttttctttttatgctctattcctagctataggtcctcccttttttattgatgaatgcaaaaggacagattgcattttatgctttttgtcgcctcttcagaatgtacctaatatattatttgcttagctctaatgtgctcttttttatttcatattttggtgcatgatttatgtcagtgtctatttactggacatatgttcatgttcacgcggcgcttcataaaatctgcataggatacatcgcacttctatctgacctactcaggtctggtgttcagcggttgccacacctaggatatcaaatggattacatctccaaaacggaacctttctatgtctgcatgaactcaagttccttggctgatccatatagaacgatgctacctactaccacaacattaccatctaagcaaattgtgttatttgttcatctacgtcgaaaagcacatttgaccattttgggtgctcacacaagattctaaatgaaattcttggagatagagagcgtatccaatctctgtattctgagattcctgggagaaccacaagcaatgccagtacctccagaagaacttctaatttcagtgtggacgcaactggagatgaaagcctttctgttgaagcacacaattgtatactcgacaatactgcgtctattttatccatgaggagctgcgctgacaagctgtggaagagaagaaaaggttcaaaactttaaaatcagaagataaaccagaggaagcaatgcaggctttcaagtatggtaaagaacttgcaaatcaagctgcaacgctggaattacaactgaagagtagtagtagaatggctacacaagcgtctaatgtctcttctgttgttggtacttcgacgacggctggttctgatgaggctagaataaaaaggacttcaactgcgaaaaagaattaagaaagaaaagaatgatcttgcatgggcttagagatataggttggtcatatgcaggcactgttttgctattttatattggcacaaatgtgtaatttggaaaacacatgtcctatgttgtgcttccttgcgtcctctaaaacaatgttatagacttttatgtcttttctgtaatattttttatctaaatcttttttgtaatatttgtatatcacaacaaactgccacatgaattttgcccctcaaatggtcgtttgatctatataactatccaattcaaat

SEQ ID NO: 61870 - DNA, 8304 bp, Zea Mays
ttttagtttttttttaaaaaaatagatctcgtggaggtggacccgtttagatagaagaagctgaaatagacataaaattgttgacctaaagcttttctaaacatacccttaggtgccgttcggttttcacggaacgaaagactagaacaatttctagctggatttcttctctaaggtatataaattttgattatctaaaacgattctaagtccattattgaataaacgaacaagtccttgactggctctagataagagagcaacttgttaacatgaggcgtgagcgtgagacgccaccgcactgtcgccgccgtgcaggctccaaaagatttttgtacgtattttccttttcagactccggcaaacagaaactcatgttttccctagttctgtgggcatcctgaagttgacgtcccgacccagggcaacccttgctgcgttgccgcgttcgcgtccttcctcagcagccctgtgtctgtgtgctgggccggcggcggcgagtgtgtgcgatgcggtgaccctcacgcagcccacgcctgacgcctccaggggacaggacgggcctctgcctctctctccttcaccttcactttaaaatacaccagcccgcggctcctcagcgctctctctcgctctcgctctcgtcaggcacgcacgcacgagtgaacacagacgcgatctcctgctctctgcctccctcgttctcctctgcccgtgcgcgctccagggcacacacgtacggagcgtgcgagcaccgtcatggaggaggacggcggcggaggcgcgcggcacgtggagcggtgggagggctacgtggactggaggaaccggccggcgaccaggggccggcacggcggcatggccgccgcctccttcgtgctcgtggtggaggtgctggagaacctggcgttcctggcgaccgcgagcaacctggtgacgtacctgatggggtccatgggctactcgccgtcgcagtcggccacggcggtgaccagcttcatgggcacggcgttcctgctggcgctgctcggcggcttcctctccgacgccttcctcaccacctacaccgtctacatcgccagcgccttcgtcgagctcacggtacgcgcgcgcgtcgtcataacataacgtccgtgcacgcacactactactactaccgtacagaacagtagtgtacatacatactccttcctctacatcaccactctcgatcttacgtgcgtgcgtgctgtcatgcaaatgcatgtgcctcctttctatatacgtcacgttacatgtcctgctatatatatatatatgctgtccatcgtctgttattaattgtcatcacgtcatgggagtatgggactgggcatggcgccagaaataaatgaacagtagtatgcccgcgtacacggacccctgttccaggcaggagtcggggtagtatagtagtattacgatgtttcctgataaaatctatgggtgggccacccggttccctgcacggcagctggatacacaaggggcttgattggatagcttcgcgcgtatggacaggctaggcacgctctggtcggctggataccgtagttttgggcatagggacggatgtaggttaataatcttaaacagcgtgtttggtagactgggtgaatagagaaattgtacccgcagagttataaagcagtgtttgtttggttagcttctctatgcatcccggctctactcgaagcgaccgcagccaggcttccgagcaaagctcgcggcgagcgtacgggcccagccaggctcagtacatgcaacggcacgtataccgaggtatgtttttagttagtttttttgttatatcttctaattaaaagatttaatcaccgaacaaattttatatttgtgtccccaatattttttcgatcaaaactagaccatatatgctatataatatttaaaattttatttgtgcattcttcactagtacatgttttgatacatacaaccaaacactgtctcaataccgccagatttaattgagccaagtaaccaaacactaaacctttgcatacactcaaccaggctatatatagcctggctgactgatgcgagccaggcggaccagtgaaacgaaccaatcacgtggaaaatgatttgttttgcatttactcatgcaacctgcgtctaacacgtacagtcaaccagacataaactcaaacaaaatcaacacatacgatggtccgagataagttgatatgagcaaccaatcagccgtgatattgcagctgtgccactgccatggccatgggcggcatacgcatcaggtccaatgattggtgctaggacgccaaaaacaaaacgtaggaggccccgcccaatgcaaggtgccgtgccaatcctcggaagccatctcattctgagtagcccagtagtacctggaggccggcgtgcgggcccattttgtgtgggcggtaagccggtaaggttcggtggcgccgaccacgctaatctctacgttctacgcgcctggccctggcggtgatgaaagacaagaaagagactgtagtacgtacgctacgcgtctgtctcgtctaatgacgacgggtccaccaaggatcaacggacagggacaagcgacgaacgagtaggtaaccgccgtgtccgtgcgacggcagaacgttctggagggccttgccgtggtccgtaccgaacaaaaacctggtcaccagacacgtgtaaatcactcctacctagtaccagaatatctgtgatgcaggcccatttggtggttggtgtactagatttcttcgtcagtgtaaagaaatccgtacatctggcacgtcgagacagacgctggcaaagccgaaagccccaagcgtgacgccagggcccgacgtgcggacgcgaactgccgcgggcccgcgtgtctacaacttcatcaatcgtcgggaagattcgggccgggggcaccgccttcctgctgccggcacgggcacgcggagcgagggtgggcagggaaccatatgtttaatgtgtagatatactcatatggactccaacaacaacaacaacaacaacaaaaaaagtttcatgctcattagatcgtatataagtataatatgaccaactcatagttttatctaggtttatctatactcagacatacatgatccatccaacgagcataaagtctttttttattataatagatagcgcatgcgctattagagtaaaatacgcatgccttatatatgagcgtctgaccgtctgtgttccggccattcggacttcggagccatgcaaacgtctcaccctggcccgtacggttcgtagatcgtagtcagcagcgctgacaattacacacataaagcccaagcccgcgcttaacctgattctatttggccgatcaaaaggatgcgtgggacgacgggtgccggagtcgagtcggtctcctccgcttgctttgccgctcggctcaccgctcacgggcgcaaagcgacgccgcgcacgggcggagcccgagctgtggcggccccgtcgcaagtacgcagagcttttgtcactgtcgcctgatatttacccaatcattcaacatgatgatggatcgtctcttgacatgatgggtcccttttgctttttatattaggcaacaaaaaaaaacacaaattcagagaaaataaactgcacaggattcacaccaaaattcgtcatgtcagaattgggaatgcgtgtagaatttcggcccggcccaaagccaaagacaatgggctgcggatgcctaccgaactctttctgatggctaacttaatctgcggtgcatgtctaaatcatcccttccatggcgcgcgcgcaggggttggtgatcctgacggtgcaggcgcgcacgccgtcgctgatgccgccgcggtgcgcctcgccgggcgcgggcggggctgcgtgcgagcccgtgtcgggggcgaagaaggcggtgctgttggcggggctgtacctgacggccctgggcgtgggcgggatcaagggctccctgccctcccacggcgcggagcagttcgacgagcgcgcgccgcgggggcgcaaggcccgctccaccttcttcaactacttcgtcttctgcctctcctgcggcgccctcgtcgccgtcaccttcgcggtatgggtcgaggacaacaggggatgggagtgggggttcggcatctcctccgtcgccatcctgctctccgtcccgctcttcgccgcgggctccagcctgtaccggaacaagctgcccacggggagcccgctcacaaccatcgccaaggtcctcgccgccgccgcgctcgcgcggcgccgcggcggcggcggcggcggcgcgcagagctccagcaacggcgccgtcatcgaccgcgcgcccagccccgcggggagcgccgacgacatggatgagtactgcaagtccggggacatggaggagatctcgatctccgacgcggcgtcgccggccgccgagccgtcccgcgagctcgcgttactgaaccgcgcggtgcagtgccagccgccgcggcacggccgccgcctggcgtgcacggtgcaggaggtggaggacgtcaaggtcgtgctcatggtgctgcccatcttcttgtccaccatcatgctcaactgctgcctggcgcagctgtccaccttctcggtcgagcaggcggccaccatggacacgcgcgtggggaggctcaccgtgccgccggcgtcgctccccgtgttcccggtcacgttcatcatcgtcctcgcgcccgtctacgaccacatcatcgtcccgttcgcgcgccgcgtgacggggaccgagacgggcatcacgcacctccagcgcatcggcaccgggctggtgatgtccgtcgtcgcgatggccgtggccgccgccgtcgaggtgaagcgcaaggacgtggcgtccagaagcgggatgctggaggactccgggaagccgctgcccatcaccttcttctggatcgcgttccagtacctgttcctggggtccgcggacctgttcacgctggcggggctgctcgagtttttcttcagcgaggcgccgccgcggatgaggtcgctggcgacgtcgctgtcgtgggcgtcgctggcgctggggtattacctcagctcggtgctggtgtccgtcgtgaacagcgcgacaggccgcggcgggcaccggccgtggctgcagggcgccagcctgaaccactaccgcctcgagaggttctactgggtcatgtgcgtgctcagcagcatcaactacctcttcttcctgttcttggccgtcaggtacaagtatagaaacgcgggggtcatcaaagtgatgaggacatcactatgagtacgactacaccagcagcacctccacatcaagcgccacttccttcattagctgggccaatcactcgggcccgtgccagagatcttaacttcgtcatgctactgaagaatgagggcccagaagaatagacgaccagcccaactgcggcccatagtggacgacctagggttggccgcccctaggggctgcgccccctctatttatccaggagctgcgcctcctttattttcgagttttgttttacgttagccttagctactctcgaacacgcgcaaatctgcgctgtcttcgtgtattcagaactccaccctcgagtaatagattagattgctcgcatcttgttcttgttcgttcttcgattgcgcacaggaaacgatcttcgtgatcaggccgatctcgcatcagcaaggtcagtaaccacagggagttggttcagcgattgcattggcgcctcgggcttgctcgtcgtagtcggatcgcaagggtcatcttccgccaaatcgaaattatctctactcgccgaaagatcgggcacctcaactacatcaattggtatcagatttccaggttgatcggtgagtttatcgagcgttttttttcctacagtccacaaaaccacataaaaattcaggttagatcttatcccagcacccttttgagcctcgcactttctttcaataatctgcattgttgaatttgtgtgctttcgcgtttccttgttgctggttgcattgtgttcttccaccattcaaaccctagcgccaccaccatctcccgtttgatcacgccacaaatcgagtcaacattgtttccttgtttttctccttcggttacgtcaaacaaaaacagaaaaaacaagccgagtcaacggccgtttccttgattttctccttcggttacgaaaaaaaaacagaaaaaaaaataaaccgagtcaacgaccgcttccttgtttttctccttcggttacataaaaaaaacaaacaaaaaaaaggaaaacgaaggagaaaggatacggttgtttcatcccggtagtttttaaaacataacttgaggtaccttctgtaaatcgggcataacttttcgctcgggtgtccaaaaaatctgaaatttttacaggagcttgttgacaccattctgagcccggccaaactcacctacggtctgtttggggttcgacaaaattgtcaaaaaaattcaggaaaataaagaaaaaaattcatcaaagttctcgcacgcttttcagagaacttcctgattttctatagaccacatctgatctctgttttcggtgaaacttcgtctagctcctatcttgttgcttcttgtgctgagaaaaatatcaaaaaaatcatacaaaaaagaaaaacaaaatcacctgtgatttctactagtgcctttttgccatcactagtacaatatttacggtactgccattctgctagttccatccatcctttgcacctgtggccagcaatatagtttcgtgttttgcactataattcaattttgcattattgtttgatcgtgctaatccttgacttgagtgcagcctacccacaactccacatatttctacgacgagcaggtttctgtttctccacgcaatcgctcatccaatctttcaccggttccacctgttggttgcagttcaccactgtggcttggtaagaacggttaagaacttgataacagcactagtgtgagcgccttgtgagcagtacacccctgtttttgtcgttggtttttctccttttggtgttttggtgtttgcgctaactatggcaggagcacacgacatggtggatgcccagttgcaggaagtaaggggacaagttgatggacttgccgctgacattaggacgatgcatgaacgacttgattcaacaatcacttcgacgaccgagcgtttcaaccaacttgaccttgctcaaacggcgactcgcaccacactcgacaccatcctggcacgccttgatgcattgaccacaaagatggagcaggaatacggcgctgacactgagcaggacgatggagatcgccgtggtcgtgcacgtcgtgtggttcgtcatccccctaatgacttattttctaagattaaatttaaaattccatcttttaatggtaaatatgatcctgctgcatatcttgattgggaattagaggtagaacaaaaattttcatgtcatgatattcctgctaatagccaagtgaaggctgccattagtgaatttactgattttgctttaatttggtggcgtgagtataaacaaaaacttcccattaacagtgtccttacttggacccaattaaaaactgccatgcgccacagatttgttccttcctattatgctcgtgatttgcttaacaaaatgcagcgttttcaacaaggttcacaatctgttgaggaatattaccaggagttgcaaaagggtatgcttcgttgtggtttggttgagtcagatgacgctgctatggcgcgttttcgtggtggtttgaacagggaaattcaggatatacttgattataaggattattttgatataaccacattgtttgaatatgcttgcaaagctgaacgtgaagtgcagggacgacgatcaaagacatatactaactcttttgcaggccggggtccaacacacagctcaactccttccagccctgcacctcctacgcctagcactacatcgcgcacagggccgaccaagccagtggcgccccctgccaaaggcgccgcttcttccacaggacgtacacgggatattcagtgtcatcgttgcagagggtttgggcacatgattcgggactgcccaaacaagcgtaccttgcttatacgtgacaatggtgagtactcttcagccagtgattctgaggaaactagtcatgctatgattgccactaaccatgcagaaaatgaggaagtccacgttgatcccatcgacgccgataggtatgagagtcttgttgtgcagcgtgttctcagcacacaggtt

SEQ ID NO: 61871 - DNA, 7721 bp, Zea Mays
ttttagtttttttttaaaaaaatagatctcgtggaggtggacccgtttagatagaagaagctgaaatagacataaaattgttgacctaaagcttttctaaacatacccttaggtgccgttcggttttcacggaacgaaagactagaacaatttctagctggatttcttctctaaggtatataaattttgattatctaaaacgattctaagtccattattgaataaacgaacaagtccttgactggctctagataagagagcaacttgttaacatgaggcgtgagcgtgagacgccaccgcactgtcgccgccgtgcaggctccaaaagatttttgtacgtattttccttttcagactccggcaaacagaaactcatgttttccctagttctgtgggcatcctgaagttgacgtcccgacccagggcaacccttgctgcgttgccgcgttcgcgtccttcctcagcagccctgtgtctgtgtgctgggccggcggcggcgagtgtgtgcgatgcggtgaccctcacgcagcccacgcctgacgcctccaggggacaggacgggcctctgcctctctctccttcaccttcactttaaaatacaccagcccgcggctcctcagcgctctctctcgctctcgctctcgtcaggcacgcacgcacgagtgaacacagacgcgatctcctgctctctgcctccctcgttctcctctgcccgtgcgcgctccagggcacacacgtacggagcgtgcgagcaccgtcatggaggaggacggcggcggaggcgcgcggcacgtggagcggtgggagggctacgtggactggaggaaccggccggcgaccaggggccggcacggcggcatggccgccgcctccttcgtgctcgtggtggaggtgctggagaacctggcgttcctggcgaccgcgagcaacctggtgacgtacctgatggggtccatgggctactcgccgtcgcagtcggccacggcggtgaccagcttcatgggcacggcgttcctgctggcgctgctcggcggcttcctctccgacgccttcctcaccacctacaccgtctacatcgccagcgccttcgtcgagctcacgcttctctatgcatcccggctctactcgaagcgaccgcagccaggcttccgagcaaagctcgcggcgagcgtacgggcccagccaggctcagtacatgcaacggcacgtataccgaggtatgtttttagttagtttttttgttatatcttctaattaaaagatttaatcaccgaacaaattttatatttgtgtccccaatattttttcgatcaaaactagaccatatatgctatataatatttaaaattttatttgtgcattcttcactagtacatgttttgatacatacaaccaaacactgtctcaataccgccagatttaattgagccaagtaaccaaacactaaacctttgcatacactcaaccaggctatatatagcctggctgactgatgcgagccaggcggaccagtgaaacgaaccaatcacgtggaaaatgatttgttttgcatttactcatgcaacctgcgtctaacacgtacagtcaaccagacataaactcaaacaaaatcaacacatacgatggtccgagataagttgatatgagcaaccaatcagccgtgatattgcagctgtgccactgccatggccatgggcggcatacgcatcaggtccaatgattggtgctaggacgccaaaaacaaaacgtaggaggccccgcccaatgcaaggtgccgtgccaatcctcggaagccatctcattctgagtagcccagtagtacctggaggccggcgtgcgggcccattttgtgtgggcggtaagccggtaaggttcggtggcgccgaccacgctaatctctacgttctacgcgcctggccctggcggtgatgaaagacaagaaagagactgtagtacgtacgctacgcgtctgtctcgtctaatgacgacgggtccaccaaggatcaacggacagggacaagcgacgaacgagtaggtaaccgccgtgtccgtgcgacggcagaacgttctggagggccttgccgtggtccgtaccgaacaaaaacctggtcaccagacacgtgtaaatcactcctacctagtaccagaatatctgtgatgcaggcccatttggtggttggtgtactagatttcttcgtcagtgtaaagaaatccgtacatctggcacgtcgagacagacgctggcaaagccgaaagccccaagcgtgacgccagggcccgacgtgcggacgcgaactgccgcgggcccgcgtgtctacaacttcatcaatcgtcgggaagattcgggccgggggcaccgccttcctgctgccggcacgggcacgcggagcgagggtgggcagggaaccatatgtttaatgtgtagatatactcatatggactccaacaacaacaacaacaacaacaaaaaaagtttcatgctcattagatcgtatataagtataatatgaccaactcatagttttatctaggtttatctatactcagacatacatgatccatccaacgagcataaagtctttttttattataatagatagcgcatgcgctattagagtaaaatacgcatgccttatatatgagcgtctgaccgtctgtgttccggccattcggacttcggagccatgcaaacgtctcaccctggcccgtacggttcgtagatcgtagtcagcagcgctgacaattacacacataaagcccaagcccgcgcttaacctgattctatttggccgatcaaaaggatgcgtgggacgacgggtgccggagtcgagtcggtctcctccgcttgctttgccgctcggctcaccgctcacgggcgcaaagcgacgccgcgcacgggcggagcccgagctgtggcggccccgtcgcaagtacgcagagcttttgtcactgtcgcctgatatttacccaatcattcaacatgatgatggatcgtctcttgacatgatgggtcccttttgctttttatattaggcaacaaaaaaaaacacaaattcagagaaaataaactgcacaggattcacaccaaaattcgtcatgtcagaattgggaatgcgtgtagaatttcggcccggcccaaagccaaagacaatgggctgcggatgcctaccgaactctttctgatggctaacttaatctgcggtgcatgtctaaatcatcccttccatggcgcgcgcgcaggggttggtgatcctgacggtgcaggcgcgcacgccgtcgctgatgccgccgcggtgcgcctcgccgggcgcgggcggggctgcgtgcgagcccgtgtcgggggcgaagaaggcggtgctgttggcggggctgtacctgacggccctgggcgtgggcgggatcaagggctccctgccctcccacggcgcggagcagttcgacgagcgcgcgccgcgggggcgcaaggcccgctccaccttcttcaactacttcgtcttctgcctctcctgcggcgccctcgtcgccgtcaccttcgcggtatgggtcgaggacaacaggggatgggagtgggggttcggcatctcctccgtcgccatcctgctctccgtcccgctcttcgccgcgggctccagcctgtaccggaacaagctgcccacggggagcccgctcacaaccatcgccaaggtcctcgccgccgccgcgctcgcgcggcgccgcggcggcggcggcggcggcgcgcagagctccagcaacggcgccgtcatcgaccgcgcgcccagccccgcggggagcgccgacgacatggatgagtactgcaagtccggggacatggaggagatctcgatctccgacgcggcgtcgccggccgccgagccgtcccgcgagctcgcgttactgaaccgcgcggtgcagtgccagccgccgcggcacggccgccgcctggcgtgcacggtgcaggaggtggaggacgtcaaggtcgtgctcatggtgctgcccatcttcttgtccaccatcatgctcaactgctgcctggcgcagctgtccaccttctcggtcgagcaggcggccaccatggacacgcgcgtggggaggctcaccgtgccgccggcgtcgctccccgtgttcccggtcacgttcatcatcgtcctcgcgcccgtctacgaccacatcatcgtcccgttcgcgcgccgcgtgacggggaccgagacgggcatcacgcacctccagcgcatcggcaccgggctggtgatgtccgtcgtcgcgatggccgtggccgccgccgtcgaggtgaagcgcaaggacgtggcgtccagaagcgggatgctggaggactccgggaagccgctgcccatcaccttcttctggatcgcgttccagtacctgttcctggggtccgcggacctgttcacgctggcggggctgctcgagtttttcttcagcgaggcgccgccgcggatgaggtcgctggcgacgtcgctgtcgtgggcgtcgctggcgctggggtattacctcagctcggtgctggtgtccgtcgtgaacagcgcgacaggccgcggcgggcaccggccgtggctgcagggcgccagcctgaaccactaccgcctcgagaggttctactgggtcatgtgcgtgctcagcagcatcaactacctcttcttcctgttcttggccgtcaggtacaagtatagaaacgcgggggtcatcaaagtgatgaggacatcactatgagtacgactacaccagcagcacctccacatcaagcgccacttccttcattagctgggccaatcactcgggcccgtgccagagatcttaacttcgtcatgctactgaagaatgagggcccagaagaatagacgaccagcccaactgcggcccatagtggacgacctagggttggccgcccctaggggctgcgccccctctatttatccaggagctgcgcctcctttattttcgagttttgttttacgttagccttagctactctcgaacacgcgcaaatctgcgctgtcttcgtgtattcagaactccaccctcgagtaatagattagattgctcgcatcttgttcttgttcgttcttcgattgcgcacaggaaacgatcttcgtgatcaggccgatctcgcatcagcaaggtcagtaaccacagggagttggttcagcgattgcattggcgcctcgggcttgctcgtcgtagtcggatcgcaagggtcatcttccgccaaatcgaaattatctctactcgccgaaagatcgggcacctcaactacatcaattggtatcagatttccaggttgatcggtgagtttatcgagcgttttttttcctacagtccacaaaaccacataaaaattcaggttagatcttatcccagcacccttttgagcctcgcactttctttcaataatctgcattgttgaatttgtgtgctttcgcgtttccttgttgctggttgcattgtgttcttccaccattcaaaccctagcgccaccaccatctcccgtttgatcacgccacaaatcgagtcaacattgtttccttgtttttctccttcggttacgtcaaacaaaaacagaaaaaacaagccgagtcaacggccgtttccttgattttctccttcggttacgaaaaaaaaacagaaaaaaaaataaaccgagtcaacgaccgcttccttgtttttctccttcggttacataaaaaaaacaaacaaaaaaaaggaaaacgaaggagaaaggatacggttgtttcatcccggtagtttttaaaacataacttgaggtaccttctgtaaatcgggcataacttttcgctcgggtgtccaaaaaatctgaaatttttacaggagcttgttgacaccattctgagcccggccaaactcacctacggtctgtttggggttcgacaaaattgtcaaaaaaattcaggaaaataaagaaaaaaattcatcaaagttctcgcacgcttttcagagaacttcctgattttctatagaccacatctgatctctgttttcggtgaaacttcgtctagctcctatcttgttgcttcttgtgctgagaaaaatatcaaaaaaatcatacaaaaaagaaaaacaaaatcacctgtgatttctactagtgcctttttgccatcactagtacaatatttacggtactgccattctgctagttccatccatcctttgcacctgtggccagcaatatagtttcgtgttttgcactataattcaattttgcattattgtttgatcgtgctaatccttgacttgagtgcagcctacccacaactccacatatttctacgacgagcaggtttctgtttctccacgcaatcgctcatccaatctttcaccggttccacctgttggttgcagttcaccactgtggcttggtaagaacggttaagaacttgataacagcactagtgtgagcgccttgtgagcagtacacccctgtttttgtcgttggtttttctccttttggtgttttggtgtttgcgctaactatggcaggagcacacgacatggtggatgcccagttgcaggaagtaaggggacaagttgatggacttgccgctgacattaggacgatgcatgaacgacttgattcaacaatcacttcgacgaccgagcgtttcaaccaacttgaccttgctcaaacggcgactcgcaccacactcgacaccatcctggcacgccttgatgcattgaccacaaagatggagcaggaatacggcgctgacactgagcaggacgatggagatcgccgtggtcgtgcacgtcgtgtggttcgtcatccccctaatgacttattttctaagattaaatttaaaattccatcttttaatggtaaatatgatcctgctgcatatcttgattgggaattagaggtagaacaaaaattttcatgtcatgatattcctgctaatagccaagtgaaggctgccattagtgaatttactgattttgctttaatttggtggcgtgagtataaacaaaaacttcccattaacagtgtccttacttggacccaattaaaaactgccatgcgccacagatttgttccttcctattatgctcgtgatttgcttaacaaaatgcagcgttttcaacaaggttcacaatctgttgaggaatattaccaggagttgcaaaagggtatgcttcgttgtggtttggttgagtcagatgacgctgctatggcgcgttttcgtggtggtttgaacagggaaattcaggatatacttgattataaggattattttgatataaccacattgtttgaatatgcttgcaaagctgaacgtgaagtgcagggacgacgatcaaagacatatactaactcttttgcaggccggggtccaacacacagctcaactccttccagccctgcacctcctacgcctagcactacatcgcgcacagggccgaccaagccagtggcgccccctgccaaaggcgccgcttcttccacaggacgtacacgggatattcagtgtcatcgttgcagagggtttgggcacatgattcgggactgcccaaacaagcgtaccttgcttatacgtgacaatggtgagtactcttcagccagtgattctgaggaaactagtcatgctatgattgccactaaccatgcagaaaatgaggaagtccacgttgatcccatcgacgccgataggtatgagagtcttgttgtgcagcgtgttctcagcacacaggtt

SEQ ID NO: 61872 - DNA, 6281 bp, Zea Mays
ttttagtttttttttaaaaaaatagatctcgtggaggtggacccgtttagatagaagaagctgaaatagacataaaattgttgacctaaagcttttctaaacatacccttaggtgccgttcggttttcacggaacgaaagactagaacaatttctagctggatttcttctctaaggtatataaattttgattatctaaaacgattctaagtccattattgaataaacgaacaagtccttgactggctctagataagagagcaacttgttaacatgaggcgtgagcgtgagacgccaccgcactgtcgccgccgtgcaggctccaaaagatttttgtacgtattttccttttcagactccggcaaacagaaactcatgttttccctagttctgtgggcatcctgaagttgacgtcccgacccagggcaacccttgctgcgttgccgcgttcgcgtccttcctcagcagccctgtgtctgtgtgctgggccggcggcggcgagtgtgtgcgatgcggtgaccctcacgcagcccacgcctgacgcctccaggggacaggacgggcctctgcctctctctccttcaccttcactttaaaatacaccagcccgcggctcctcagcgctctctctcgctctcgctctcgtcaggcacgcacgcacgagtgaacacagacgcgatctcctgctctctgcctccctcgttctcctctgcccgtgcgcgctccagggcacacacgtacggagcgtgcgagcaccgtcatggaggaggacggcggcggaggcgcgcggcacgtggagcggtgggagggctacgtggactggaggaaccggccggcgaccaggggccggcacggcggcatggccgccgcctccttcgtgctcgtggtggaggtgctggagaacctggcgttcctggcgaccgcgagcaacctggtgacgtacctgatggggtccatgggctactcgccgtcgcagtcggccacggcggtgaccagcttcatgggcacggcgttcctgctggcgctgctcggcggcttcctctccgacgccttcctcaccacctacaccgtctacatcgccagcgccttcgtcgagctcacggtacgcgcgcgcgtcgtcataacataacgtccgtgcacgcacactactactactaccgtacagaacagtagtgtacatacatactccttcctctacatcaccactctcgatcttacgtgcgtgcgtgctgtcatgcaaatgcatgtgcctcctttctatatacgtcacgttacatgtcctgctatatatatatatatgctgtccatcgtctgttattaattgtcatcacgtcatgggagtatgggactgggcatggcgccagaaataaatgaacagtagtatgcccgcgtacacggacccctgttccaggcaggagtcggggtagtatagtagtattacgatgtttcctgataaaatctatgggtgggccacccggttccctgcacggcagctggatacacaaggggcttgattggatagcttcgcgcgtatggacaggctaggcacgctctggtcggctggataccgtagttttgggcatagggacggatgtaggttaataatcttaaacagcgtgtttggtagactgggtgaatagagaaattgtacccgcagagttataaagcagtgtttgtttggttagcttctctatgcatcccggctctactcgaagcgaccgcagccaggcttccgagcaaagctcgcggcgagcgtacgggcccagccaggctcagtacatgcaacggcacgtataccgaggggttggtgatcctgacggtgcaggcgcgcacgccgtcgctgatgccgccgcggtgcgcctcgccgggcgcgggcggggctgcgtgcgagcccgtgtcgggggcgaagaaggcggtgctgttggcggggctgtacctgacggccctgggcgtgggcgggatcaagggctccctgccctcccacggcgcggagcagttcgacgagcgcgcgccgcgggggcgcaaggcccgctccaccttcttcaactacttcgtcttctgcctctcctgcggcgccctcgtcgccgtcaccttcgcggtatgggtcgaggacaacaggggatgggagtgggggttcggcatctcctccgtcgccatcctgctctccgtcccgctcttcgccgcgggctccagcctgtaccggaacaagctgcccacggggagcccgctcacaaccatcgccaaggtcctcgccgccgccgcgctcgcgcggcgccgcggcggcggcggcggcggcgcgcagagctccagcaacggcgccgtcatcgaccgcgcgcccagccccgcggggagcgccgacgacatggatgagtactgcaagtccggggacatggaggagatctcgatctccgacgcggcgtcgccggccgccgagccgtcccgcgagctcgcgttactgaaccgcgcggtgcagtgccagccgccgcggcacggccgccgcctggcgtgcacggtgcaggaggtggaggacgtcaaggtcgtgctcatggtgctgcccatcttcttgtccaccatcatgctcaactgctgcctggcgcagctgtccaccttctcggtcgagcaggcggccaccatggacacgcgcgtggggaggctcaccgtgccgccggcgtcgctccccgtgttcccggtcacgttcatcatcgtcctcgcgcccgtctacgaccacatcatcgtcccgttcgcgcgccgcgtgacggggaccgagacgggcatcacgcacctccagcgcatcggcaccgggctggtgatgtccgtcgtcgcgatggccgtggccgccgccgtcgaggtgaagcgcaaggacgtggcgtccagaagcgggatgctggaggactccgggaagccgctgcccatcaccttcttctggatcgcgttccagtacctgttcctggggtccgcggacctgttcacgctggcggggctgctcgagtttttcttcagcgaggcgccgccgcggatgaggtcgctggcgacgtcgctgtcgtgggcgtcgctggcgctggggtattacctcagctcggtgctggtgtccgtcgtgaacagcgcgacaggccgcggcgggcaccggccgtggctgcagggcgccagcctgaaccactaccgcctcgagaggttctactgggtcatgtgcgtgctcagcagcatcaactacctcttcttcctgttcttggccgtcaggtacaagtatagaaacgcgggggtcatcaaagtgatgaggacatcactatgagtacgactacaccagcagcacctccacatcaagcgccacttccttcattagctgggccaatcactcgggcccgtgccagagatcttaacttcgtcatgctactgaagaatgagggcccagaagaatagacgaccagcccaactgcggcccatagtggacgacctagggttggccgcccctaggggctgcgccccctctatttatccaggagctgcgcctcctttattttcgagttttgttttacgttagccttagctactctcgaacacgcgcaaatctgcgctgtcttcgtgtattcagaactccaccctcgagtaatagattagattgctcgcatcttgttcttgttcgttcttcgattgcgcacaggaaacgatcttcgtgatcaggccgatctcgcatcagcaaggtcagtaaccacagggagttggttcagcgattgcattggcgcctcgggcttgctcgtcgtagtcggatcgcaagggtcatcttccgccaaatcgaaattatctctactcgccgaaagatcgggcacctcaactacatcaattggtatcagatttccaggttgatcggtgagtttatcgagcgttttttttcctacagtccacaaaaccacataaaaattcaggttagatcttatcccagcacccttttgagcctcgcactttctttcaataatctgcattgttgaatttgtgtgctttcgcgtttccttgttgctggttgcattgtgttcttccaccattcaaaccctagcgccaccaccatctcccgtttgatcacgccacaaatcgagtcaacattgtttccttgtttttctccttcggttacgtcaaacaaaaacagaaaaaacaagccgagtcaacggccgtttccttgattttctccttcggttacgaaaaaaaaacagaaaaaaaaataaaccgagtcaacgaccgcttccttgtttttctccttcggttacataaaaaaaacaaacaaaaaaaaggaaaacgaaggagaaaggatacggttgtttcatcccggtagtttttaaaacataacttgaggtaccttctgtaaatcgggcataacttttcgctcgggtgtccaaaaaatctgaaatttttacaggagcttgttgacaccattctgagcccggccaaactcacctacggtctgtttggggttcgacaaaattgtcaaaaaaattcaggaaaataaagaaaaaaattcatcaaagttctcgcacgcttttcagagaacttcctgattttctatagaccacatctgatctctgttttcggtgaaacttcgtctagctcctatcttgttgcttcttgtgctgagaaaaatatcaaaaaaatcatacaaaaaagaaaaacaaaatcacctgtgatttctactagtgcctttttgccatcactagtacaatatttacggtactgccattctgctagttccatccatcctttgcacctgtggccagcaatatagtttcgtgttttgcactataattcaattttgcattattgtttgatcgtgctaatccttgacttgagtgcagcctacccacaactccacatatttctacgacgagcaggtttctgtttctccacgcaatcgctcatccaatctttcaccggttccacctgttggttgcagttcaccactgtggcttggtaagaacggttaagaacttgataacagcactagtgtgagcgccttgtgagcagtacacccctgtttttgtcgttggtttttctccttttggtgttttggtgtttgcgctaactatggcaggagcacacgacatggtggatgcccagttgcaggaagtaaggggacaagttgatggacttgccgctgacattaggacgatgcatgaacgacttgattcaacaatcacttcgacgaccgagcgtttcaaccaacttgaccttgctcaaacggcgactcgcaccacactcgacaccatcctggcacgccttgatgcattgaccacaaagatggagcaggaatacggcgctgacactgagcaggacgatggagatcgccgtggtcgtgcacgtcgtgtggttcgtcatccccctaatgacttattttctaagattaaatttaaaattccatcttttaatggtaaatatgatcctgctgcatatcttgattgggaattagaggtagaacaaaaattttcatgtcatgatattcctgctaatagccaagtgaaggctgccattagtgaatttactgattttgctttaatttggtggcgtgagtataaacaaaaacttcccattaacagtgtccttacttggacccaattaaaaactgccatgcgccacagatttgttccttcctattatgctcgtgatttgcttaacaaaatgcagcgttttcaacaaggttcacaatctgttgaggaatattaccaggagttgcaaaagggtatgcttcgttgtggtttggttgagtcagatgacgctgctatggcgcgttttcgtggtggtttgaacagggaaattcaggatatacttgattataaggattattttgatataaccacattgtttgaatatgcttgcaaagctgaacgtgaagtgcagggacgacgatcaaagacatatactaactcttttgcaggccggggtccaacacacagctcaactccttccagccctgcacctcctacgcctagcactacatcgcgcacagggccgaccaagccagtggcgccccctgccaaaggcgccgcttcttccacaggacgtacacgggatattcagtgtcatcgttgcagagggtttgggcacatgattcgggactgcccaaacaagcgtaccttgcttatacgtgacaatggtgagtactcttcagccagtgattctgaggaaactagtcatgctatgattgccactaaccatgcagaaaatgaggaagtccacgttgatcccatcgacgccgataggtatgagagtcttgttgtgcagcgtgttctcagcacacaggtt

SEQ ID NO: 61873 - DNA, 746 bp, Zea Mays
gagctctcacttaggaaggaccagacgaagcattaagcatacgacattctgcgcgaagttgaggaacgcgaggtgctcgaaccgccgcgcctccggcccgaaccgcttcgtggatctgaggacgacaaacccagcaaactgacccccagcttgtaatcgtctggcggagttcggacggcattggagagagaaagggcttacagagtctcctggaggacgccctggtagatgtaggcggaccagatcccggcgacacagaaggcgaggacggccacgcgccccgccatgcttccgctgacgccgacgacacggtcgcgggggcggggacggacgacgccgttggcaccgtcggcgcggccccggcgtgcggcggccatggtgtcgattcgcccgccggcgatggcgaggggtcagcagaatcggcactggtggcgattcgatgcgcggtgtaccggcggcggtgcccggtggtcgccgagtggaagcgggatcgcgtgttatagaagcccagcgtaaccgtggggaaggagcgaagagcacgtaagagaggtgacgtggcgcagagccattggagcgagcatgccagcacagacggcccattgattagcctataatttctttctatatcagcgacgaataatgcagcaccaaagattttagtctgatgattaatttaacggacgtgactctcttgactttgatcgaactatcgattgcaacaacgctaagcgtcatattggtcttga

SEQ ID NO: 61874 - DNA, 494 bp, Zea Mays
ttatcataataactaaatgcattatttttagttgatggtttttatagtgttacaaactccctctttatttcttcttatcttctaaacaaacagcccaactaggacttatcctttgtggcgcctggcatactaccggcccacaaaggtgtctacaacacggaggcaatataatatcttacgatctgtagtaagcacattgagccaacatgaatctcaataaaaatatccccatccttgttcttgctaatgcaaaattataatattgttgagcagggtatgtctcaaatttaaaaaaaggcattatctttcgctgcacttatattctgcactttatagatttatttactcagcaaaataaattaaattggactgtccaagaacaaaataacaagtgactctgggactcaatgtacactgtcaatacttttatgtagggatacacatatattatgcagtgtgtttaagtaaatgtaaacttacagggatcatcttag

SEQ ID NO: 61875 - DNA, 1600 bp, Zea Mays
taatcattcacccttcatacgtcacacttatcacactcataaatacgtcttaacgcgtaaatacttattaattcattatgactattaatgcgagcattattgatgaaattatgagtaggtggctataataattctttatgaaaataaaggttaattattactaataattgactgatagattttattccttttatttctaaacagaacttttgtgtatagctaaaaatggttcattcatgactctactaacattaatattctaagaatcaatataaatcaccaattgggctttttataacataaacatggttattttgacataaaaaagtattttactaattctaagaagttaaatgatatacttatgaacacctttattttggcttagtaaaaaccaatttttgttatgactagtgatattcttttagttttatattttcttcctaaacgaaattatcattaataataatcagagataaatcatctaataacctataatatttatattgccatgaatcgtataccatttactaattccatttaagaaaagcttctattatctattaaaatgaacttatgattataaccttctaaataatttccaaaatccattgtgaacaaaattaactataaaattacctatctagtgtttttatcaccatcatgtgtctatcaatttttttgtcatacttctctctaatccaactttctaaaagtcatcataaacaaataacatgactaataacggtgcactaatttatcgcatatatctaccaaaaatccatagtgcacatacgcatgaattccgaattacaacattctcatattacaacacaataattataaaattcacaaactgaatcaaaaagtgatttcgaaaatacataaaattattttgggtcgtcttccaccttgagcttgctcgtgtgaagggggagagttcgatggggatgtcggccgagtggagaagggcaggggctcgacgtcgggcggctccggcgggggttgcacggtctacgaagctccggcgacggcgggggctgcacggtctacgaagctccggcgagcgacgacgtgggcgagctccggcgatgacgtgggcgagcaaggagagtgagagagagggggcgagctcgggtagggaggagagctccatggcacggccgatatttatagagagaggcaggggagaggagagggcgccgaggagagggagaggcggccggcggttcttcaaagacattaatggcgacgacatcaatggggagagagtgggggaaggaagaaacgaacgtttgatgctccattacgccgaggagaagaacagtctcggggcgtcgcgcggggtggctcggacgcggggtcgggtcctggcggcggcggcggctcggacgcggggtcaggtcgcgacggcggcatgggcgcggggaagagacgcccgcgggaccctggccaatggggcccgcgcggcagggaggggagaaatccccctggcggcggtagctggggaggcagaggagggcgcggcgcggcttgcccctagtgggccgttagggttagagtttcttttttctttttctatttcttttctaatttcaaa

SEQ ID NO: 61876 - DNA, 2403 bp, Zea Mays
  misc_feature (2403)..(2403): n is a, c, g, or t
atactgagtaatataaaaatcattgattgcttaaacaatcgttattattattaacctgacttaaattatctctacaaaacatacattagttaaaataatcttatgttgtcattaataaccaaaacaacaaacagtctaccaaaacttagaaagagttctaactttcataattcacctcttagaagttacgatctttttaatctcgtccatctccctttcaaacgtcacggtccttcgcctcccacgtcctcatcggcgtgctgaactctatgccaaagcaggcttactcatccagatccagcatggcattagcaccggttggcatgggcgcggcatggtgactgaccttatacagtgatgtcctagcaaggcatcacaatacagacacaacagaacatcgggtccatttcctgcatcttcccctcgtctcttctcttttttttttagccacacctgttttttcctgaaaaaaaacaaaagcagaatatattttgggacaattctattgcagcttctcttctctgctatctcagaatcatacagaatgggggtacaagaggagaaaaaaatctcaacaccaaagaatgagaggtgctacagagcggctagagggaacacatttttgaagatctacaggcagacggcagacgctgcggtagagaagttaaaagaagccaacatgcttactacaaaaagtagtctggtgtcttgcgcgtcatgtccggctcaatttgcctcggagctgggtcgaattggaggaagttctgatccatgttctcgccaatttcgaggatggcagccatgtttccgcatcggtagcagtagttaggcgcgctgaacactgtcacaacgttcttatcctgcatcacgcaaccagcaaaaaaaaagactcaagattctattccatgtaataagcagtggtttgccaaggcctgcgatggatggagaaacgcacaactcacataatactataataggtaagagaaaacagatgtgctacgagtctgcttggatttagcctgtatctaggctagtgcaatgcagtcaacttgggtttggttgcccaaagaccttatccctctaggtcatgttcggttctacccccaatccatatagattgagggggattgagcgggtttcaatccctaataagtcaaaatctctcccaattcgtatcaatctcctccaatccatatggattgaaaataaccgaacaagcacttacatggataaatcatcatttgttgcaatgtcattgtttctgagcaagatgatgtaacagagtgattcatatatttttcataaataaacgacaacaaagccttttaatcccaaacaagtttggataggttttggataggtagagttaaaccaaacaaaagccataagtcaaggttcacgcttaatgtttgggtatattccatcctctttccttttattgtctctttccatatcaacttcagccttccttgcgtcttattatcccactatgcactagtcctctagaggtctcagttggacatacccaaaacatctcaaccagtattggacaagcttttcttaaatttgtgctaccctaacctatcatgtatatcatcgtttcgaactcaatactccacaaatccaacacagcattcgcatttttgcaacacttattctcataaatgaacacttcagcaatcttctctttcatagaataattttgtcctctgttagtgaataaattatgctagtatgcttagaaacaatgcaatccaactgctaaaactttagcgctacgatggtgtttggtgatgttaagtcagagttggaatggaatcatatgacactgtaatcagagctggaatgggtgattgcgatctttgtttggtttttaatgtaaaccatatcacatgcgaagagttgatgttcctactaccacagtatgcaactggaccagtcaaacccaccttatgcactttggagttggagatggagaagatgaaagtgatttaagggccagtttggtagagcccctcccgctccagattttctgtggaacctgattctcttgtgaaaagtgattatttgattctccatgatttactaataattctgtgtgcggagtgaatcacaagaattgttttcccagtctcctggttcatttcagaaaatcacttcaataaatcagcaaataatcacttcacagtaaaaaaaaaactgtttggcacagcttctcatgaattcagtgattcagtctggaagttgctcttggagctctgctaaaaactggcccacgcagcagccagctacccatgggaatctactagtggcacccacctcagcggctagcccagcctctgctgatgtgcatcagcccagaatctcaagcagccaataatgtgcctgcatctcatgaattcn

SEQ ID NO: 61877 - DNA, 936 bp, Zea Mays
ctgtaggtggtttatgttttaatgttattttattgtgtcgtagccatactggcgatgtatttggtacttatgctttgcgccagaatttgaaaaatccacacgtaccaatctggctccgctcgtcacaaatccgtctgtgcatcgcgtcggcgaccaggaggcgacgaggcaggcagagcgggcggcgactacagcggcagcagatctcacggcatgctatgaagctacttcatccaagcggagccgtagcctggcaaaggagatcacaacagcagctgttgcttctgttttactgggctttgggtctctgttcgtgctccttgcaagtggtgtttatgtttgacgactgcgtatggggccgtgttcttggattcagcagacttagggcatgtacaagtctgagactccatttttctatgagacagctaagagactatatgacataactttaagactcagtattataaatgcagttaatagacaacatgcgtagagtcgtaaagaggcgggctcttagcgaagagcttggctcttgtattttttttcatatagtcccttagagaactctcaagagaccatatattaaatagggttgtacatgcacttagtaattgattgtaggatatgccagatcctcgaagcttgtgttgtcctaacggatatggagcatttgaactttcaaactttctagaacaattacttaagcaaccgagttacagtaatactcaaacgtttctccctaggtctccattatacatctttttgtttatctttaattcatacctgcttttacaatgttttctctataaattacagctgcaacagctagctttaatccgaaacgaacaaactttacatcatcaatctaaatcccggttgcctgaatttgagtttgttgcccctcaataaatcgctgctatttattatcacctgcat

SEQ ID NO: 61878 - DNA, 1782 bp, Zea Mays
attgtaagaatccatcgattgctcgagagagggatatctgtttccgcatcggcagcgttctctgcagcggcgatgccgctcctcgagttgttgcgttgctatgaatcgtaggagatgatggaatcgtcgtacatccgcacgtacctgcagcagatggcagcgtcggtctccacggcgagctgcgacccgtctagcggcgccgatgaggtggagtgccgcgacgaggcggcggcgctgaggcttaagatggtgttcgtcgtggccatactcgtcgcaggcgcgaccggcgtcgcgatcccgctcgtcggccgccgctgccacgggcatggagcctcctcctcctcctccaccggtggggcgttcgtgctcgtaaaggcgttcgcggccggggtgatcctggccacgggcttcgtccacatgctgcacgacgcggacgaggcgctcacggacccttgtctccccgccgcgccgtggcgccgcttcccgttcccagggttcgtcgccatgctcgcggcgctcgggacgctcgtcttcgacttcgtcggcacgcatatgtacgagcgcaagaagcaccacgccgatgcggaggaagccgccgtcgtcgttggcaatgccagtgccagtgccaatgcgagcggccacgacgtgatcgttgcgctgctacaggacggcgcgctcgtggcgagcactggcagcagcattgggagagacgggggaggccacaaggaccccatgcacatcgtggggatgcacgcgcatgccgcagcacataggcatagccacgcccacgggcacggcccatgtgatgactgtcacgatgggcatgatgaggagccgtcccaagctcgtcatgtggtcgtctcccagattcttgagcttgggattgtatcgcactcagtgatcatcgggctatctttgggcgtctcacagaatccttgcaccatcaaacctctaggtgctgctctctccttccaccagttttttgagggctttgcattgggcggctgcatttccgaggctcagttcaagagtttctctgcactccttatggctttcttcttcgctatcacaacacctgctgggattaccgtggggtctggtatcgcgtcgttctacaatcccaacagccctagggcacttgtggtagagggaattctggattccatttcggctggtattctgatctacatggccttggtggacctcatcgcagctgattttctcagcaagaggatgagctgtaacttgaggcttcaagtcggctcatacattgccttgttccttggtgccatggccatggcatctctagccatctgggcttagcaagtagaatggaagtaaggcaaagatttgagagtgctgcctaattgcctttgatagcaggaggttctctccagcagctagttggttgcaattcttgatgagaatgggaggcattttttattttcttatattcttctgtttgtctattggttctcttcatgttggtggtggacagtaagatttagttcttgtgccctgtttggtagagctgttgttgttggaaaagtaacttatctaagaagctagtgaaaaaaacttttgtttatcgcatgcttttagtttattctgagaagaagctgaattgataaattgctgcagaagcctactatttgatatagcttctgcttaaatatgtgaaattgtgccaaacggggccattgtactagattagaagagagatgaacataggttcttgactcccttcagtattcatagatgtatattgaatagaaaatgctt

SEQ ID NO: 61879 - DNA, 1704 bp, Zea Mays
ggcgggtcccgctagcctcgccgacgtcccgaggagatgatggaatcgtcgtacatccgcacgtacctgcagcagatggcagcgtcggtctccacggcgagctgcgacccgtctagcggcgccgatgaggtggagtgccgcgacgaggcggcggcgctgaggcttaagatggtgttcgtcgtggccatactcgtcgcaggcgcgaccggcgtcgcgatcccgctcgtcggccgccgctgccacgggcatggagcctcctcctcctcctccaccggtggggcgttcgtgctcgtaaaggcgttcgcggccggggtgatcctggccacgggcttcgtccacatgctgcacgacgcggacgaggcgctcacggacccttgtctccccgccgcgccgtggcgccgcttcccgttcccagggttcgtcgccatgctcgcggcgctcgggacgctcgtcttcgacttcgtcggcacgcatatgtacgagcgcaagaagcaccacgccgatgcggaggaagccgccgtcgtcgttggcaatgccagtgccagtgccaatgcgagcggccacgacgtgatcgttgcgctgctacaggacggcgcgctcgtggcgagcactggcagcagcattgggagagacgggggaggccacaaggaccccatgcacatcgtggggatgcacgcgcatgccgcagcacataggcatagccacgcccacgggcacggcccatgtgatgactgtcacgatgggcatgatgaggagccgtcccaagctcgtcatgtggtcgtctcccagattcttgagcttgggattgtatcgcactcagtgatcatcgggctatctttgggcgtctcacagaatccttgcaccatcaaacctctaggtgctgctctctccttccaccagttttttgagggctttgcattgggcggctgcatttccgaggctcagttcaagagtttctctgcactccttatggctttcttcttcgctatcacaacacctgctgggattaccgtggggtctggtatcgcgtcgttctacaatcccaacagccctagggcacttgtggtagagggaattctggattccatttcggctggtattctgatctacatggccttggtggacctcatcgcagctgattttctcagcaagaggatgagctgtaacttgaggcttcaagtcggctcatacattgccttgttccttggtgccatggccatggcatctctagccatctgggcttagcaagtagaatggaagtaaggcaaagatttgagagtgctgcctaattgcctttgatagcaggaggttctctccagcagctagttggttgcaattcttgatgagaatgggaggcattttttattttcttatattcttctgtttgtctattggttctcttcatgttggtggtggacagtaagatttagttcttgtgccctgtttggtagagctgttgttgttggaaaagtaacttatctaagaagctagtgaaaaaaacttttgtttatcgcatgcttttagtttattctgagaagaagctgaattgataaattgctgcagaagcctactatttgatatagcttctgcttaaatatgtgaaattgtgccaaacggggccattgtactagattagaagagagatgaacataggttcttgactcccttcagtattcatagatgtatattgaatagaaaatgctt

SEQ ID NO: 61880 - DNA, 1058 bp, Zea Mays
acagactcagcatgcccccgcagcgtgcccactccgcgtgctgacatctgcgccgccgtatgattcgatcggacggcgggccgcgtgggatgacaacattctcgtcgtgtggcgggtcccgctagcctcgccgacgtcccgagattcttgagcttgggattgtatcgcactcagtgatcatcgggctatctttgggcgtctcacagaatccttgcaccatcaaacctctaggtgctgctctctccttccaccagttttttgagggctttgcattgggcggctgcatttccgaggctcagttcaagagtttctctgcactccttatggctttcttcttcgctatcacaacacctgctgggattaccgtggggtctggtatcgcgtcgttctacaatcccaacagccctagggcacttgtggtagagggaattctggattccatttcggctggtattctgatctacatggccttggtggacctcatcgcagctgattttctcagcaagaggatgagctgtaacttgaggcttcaagtcggctcatacattgccttgttccttggtgccatggccatggcatctctagccatctgggcttagcaagtagaatggaagtaaggcaaagatttgagagtgctgcctaattgcctttgatagcaggaggttctctccagcagctagttggttgcaattcttgatgagaatgggaggcattttttattttcttatattcttctgtttgtctattggttctcttcatgttggtggtggacagtaagatttagttcttgtgccctgtttggtagagctgttgttgttggaaaagtaacttatctaagaagctagtgaaaaaaacttttgtttatcgcatgcttttagtttattctgagaagaagctgaattgataaattgctgcagaagcctactatttgatatagcttctgcttaaatatgtgaaattgtgccaaacggggccattgtactagattagaagagagatgaacataggttcttgactcccttcagtattcatagatgtatattgaatagaaaatgctt

SEQ ID NO: 61881 - DNA, 1917 bp, Zea Mays
acgaaagctactagcaacatctggttccactctcgccggcatctcccccacccatccccaagtccagcacacacccgaagcgccgccgctagggtttggtccgacagccgcgaaacctagactttactgctccgacaggctgccattcactaatctagctagctccggttgggagctagggtttagctgagcttcgggtcgcggcggtgcggcatggcggggtacggggaagagaaccagaacaccatgagcgggtacgaggaagaggaggaagaagaggttgaagaagtcgaggaggtgtacgaggaggaggaggaggaggaggtggaggaggaggaggaggacggggagggggaagcggacgagggggctgtagcctccgagccagcggcgatggcggccgagacgagaagcgttgttggaggccggggcttagcgaaggccgttgggaatgttgataccggtggcgaggatgggagggatgcagattccagtggcggtgacgcctcggggaagattttcgtagggggtgtagcttgggagacaactgaagaaacattcacaaagcattttcagaaggttctagaggatgaacatgtcatagatggaagaacagttgaagtcaaaaggactgttccaaaagaggaaatgtcatcgaaagacggtcctaagacaaaaaagatctttgtgggtggtattccaccatctcttaccgaagataaattaaaggagcacttctcatcgtatgggaaggtggttgagcatcagattatgcttgaccatagcactggacgctcacgtggctttggatttgtcacatttgaaagcgaggatgctgttgaaagggttatgtcagaggggagaatgcatgatcttggagggaaacaggttgaaattaagaaagctgaaccaaaaaaacctggtgtgggtgattcaagctcaaatggaagacacagtcgtggtggtggtcatcgtgattcataccgtggtagtggtggcaatggcttttctgggaacagcagtggtggtggctatggatacagtggtggctaccgatcaactgctgcagcacattatggcagcacagcatatggtgcctatggcagagggtatggatacggtggtactgctggctatggcttaggttatggctctgcatatggtggctccatgtatggaggtccatatggtgcctacgcggcatatggtggtgcctatggaggtggtgcatatggtgctccaggagggtatggcgcgggaggatatggcagctacggtggggctggaggcatgggtggtggtggcagcgctggtggtcggggctccagcagataccacccttatggaaaatgataatccattcactgcctttgccttcctctaggatctgataataaagctatacattcccaccgagaaaatggaacattccattcaccttgttgaatcagcggcatctgaacatttttttcctggaacaaagattctagtctgtagtcgctgaaccctgaactgcctcatcccacccccaccccctgagctttctgtagaaggtgcagctcaaattctcgtaggcatgagccttagaagacccttgaaactacaagctttgtggtaacaatatggtgtcatggaacatatgtattttgatgtaaaacattcgctcactgaccagtgacttcgccatctctgcttatgtatgtagagaagcttagcaaaggattggactgatactattgaattgtgtgggtttctatttgtctccattctgatctgaatgcgtgttatctcgtttcaaaattctgtgttgttgctatccattttatgatagctggagctatgtgcctatgtgtggttgtctcattactggtgttccaagttttatgatagctggacctatatgtggttgtatcatta

SEQ ID NO: 61882 - DNA, 2019 bp, Zea Mays
taatggatcggttttttacccacctggggcctgggggccacacgaaagctactagcaacatctggttccactctcgccggcatctcccccacccatccccaagtccagcacacacccgaagcgccgccgctagggtttggtccgacagccgcgaaacctagactttactgctccgacaggctgccattcactaatctagctagctccggttgggagctagggtttagctgagcttcgggtcgcggcggtgcggcatggcggggtacggggaagagaaccagaacaccatgagcgggtacgaggaagaggaggaagaagaggttgaagaagtcgaggaggtgtacgaggaggaggaggaggaggaggtggaggaggaggaggaggacggggagggggaagcggacgagggggctgtagcctccgagccagcggcgatggcggccgagacgagaagcgttgttggaggccggggcttagcgaaggccgttgggaatgttgataccggtggcgaggatgggagggatgcagattccagtggcggtgacgcctcgggaaacattcacaaagcattttcagaagtatggagctataactgattctgtgatcatgaaggacaagcatactaggatgcctcgcggatttggatttgttacattttccgatccatctgtgcttgacagggttctagaggatgaacatgtcatagatggaagaacagttgaagtcaaaaggactgttccaaaagaggaaatgtcatcgaaagacggtcctaagacaaaaaagatctttgtgggtggtattccaccatctcttaccgaagataaattaaaggagcacttctcatcgtatgggaaggtggttgagcatcagattatgcttgaccatagcactggacgctcacgtggctttggatttgtcacatttgaaagcgaggatgctgttgaaagggttatgtcagaggggagaatgcatgatcttggagggaaacaggttgaaattaagaaagctgaaccaaaaaaacctggtgtgggtgattcaagctcaaatggaagacacagtcgtggtggtggtcatcgtgattcataccgtggtagtggtggcaatggcttttctgggaacagcagtggtggtggctatggatacagtggtggctaccgatcaactgctgcagcacattatggcagcacagcatatggtgcctatggcagagggtatggatacggtggtactgctggctatggcttaggttatggctctgcatatggtggctccatgtatggaggtccatatggtgcctacgcggcatatggtggtgcctatggaggtggtgcatatggtgctccaggagggtatggcgcgggaggatatggcagctacggtggggctggaggcatgggtggtggtggcagcgctggtggtcggggctccagcagataccacccttatggaaaatgataatccattcactgcctttgccttcctctaggatctgataataaagctatacattcccaccgagaaaatggaacattccattcaccttgttgaatcagcggcatctgaacatttttttcctggaacaaagattctagtctgtagtcgctgaaccctgaactgcctcatcccacccccaccccctgagctttctgtagaaggtgcagctcaaattctcgtaggcatgagccttagaagacccttgaaactacaagctttgtggtaacaatatggtgtcatggaacatatgtattttgatgtaaaacattcgctcactgaccagtgacttcgccatctctgcttatgtatgtagagaagcttagcaaaggattggactgatactattgaattgtgtgggtttctatttgtctccattctgatctgaatgcgtgttatctcgtttcaaaattctgtgttgttgctatccattttatgatagctggagctatgtgcctatgtgtggttgtctcattactggtgttccaagttttatgatagctggacctatatgtggttgtatcatta

SEQ ID NO: 61883 - DNA, 689 bp, Zea Mays
  misc_feature (688)..(689): n is a, c, g, or t
atcaaatcacatcttaaaaaaacatgctcccaattcccagcattataccagcaagggccaaagaatcttttctttgattggtaccggatccttggatggatggggaatggcctctactcctctctggccatattcttcctcaatctctgcatattctatgatcaggcaatccgtgttggggggcagactgcagacattgctgcggtgggaactaccatgttcacctgcatcatctgggctgtcaacatgcagattgccctaacaatgagccatttcacatggattcaacatctctttgtatggggcagcataacaacttggtatctcttcatcctcgcctatgggatgacattgaggtctggcgacaactaccagatcctattagaagtccttgggccagctcccatatactgggcagcgacgcttctggtgactgctgcctgcaacatcccctacctgatacacatatcctaccagagatcgtgcaatccacttgatcaccatgtgattcaagagatcaagtacctaaagaaagatgttgaagaccagacgatgtggaagagggagcggtcgaaggccaggcagaagacaaagattggtttcactgcgagggttgatgcaaagatcaagcagatcagggggaaattgcataagaaaggcccatctttaacaatccagacggtatcgnn

SEQ ID NO: 61884 - DNA, 1872 bp, Zea Mays
  misc_feature (1871)..(1872): n is a, c, g, or t
aaacacacttcttcgaaagacacaggagttcaagattctcaatctattggaattcagtagcaaaagaaaacgaatgactgtaattctgcaggatgaagatggtcaaattcttcttttttgcaaaggagcagacagcatcatatttgatagactggcaaaaaatggaaggatgtatgaagttgatacgactaggcatctgaatgattatggtgaggcaggcttgcgaacattggcactatcatacagggtgcttgatgaatcagaatattctttgtggaatgcggagtttcttaaagcaaagacatatattggtcctgatagagagttgcaacttgaacgagtctctgagttgattgaaagagagctgatccttgttggtgcaactgctgtagaggacaaattacaaaagggggttcctcagtgcatagatcggttggcgcaagcaggtctcaaaatctgggttctgacaggtgataagatggaaactgcaattaacatcggatatgcatgcagtttactgaggcaaggcatgaaacaaatatgtttgtccatacccactggtgagcaggtagctcaggatgcaaagaaggttgcaaaggagagtctcctgtcgcaaatcgccaatgggtcacaaatggtcaaactcgagaaggatccagatgcagcatttgctctagttattgatggaaaagctctggcatttgctttggaggatgacatgaagcatatgttcttgaacctggcaatcgagtgtgcttctgtcatatgttgtcgtgtgtctccaaagcagaaagcactggtgactcggctcgttaaagaaggtataggacaaaccactttagcagtaggtgatggtgcaaacgatgtgggcatgattcaagaagctgatattggagttggaataagcggggtagagggcatgcaggcggtgatggctagtgatttttctatttctcaatttcggtttcttgagcgacttcttgtcgttcatggacattggtgctacaagagaatcgcccaaatgatttgctacttcttttataagaatatcgcatttgggcttacaatattttactttgaagcattcgctgggttttctggtcaatctgtatacgatgattggtttatgctgcttttcaatgttgttcttacctcacttcctgttatatcactcggagtatttgagcaagacgtttcatccgaaatctgcttacagttcccagcattataccagcaagggccaaagaatcttttctttgattggtaccggatccttggatggatggggaatggcctctactcctctctggccatattcttcctcaatctctgcatattctatgatcaggcaatccgtgttggggggcagactgcagacattgctgcggtgggaactaccatgttcacctgcatcatctgggctgtcaacatgcagattgccctaacaatgagccatttcacatggattcaacatctctttgtatggggcagcataacaacttggtatctcttcatcctcgcctatgggatgacattgaggtctggcgacaactaccagatcctattagaagtccttgggccagctcccatatactgggcagcgacgcttctggtgactgctgcctgcaacatcccctacctgatacacatatcctaccagagatcgtgcaatccacttgatcaccatgtgattcaagagatcaagtacctaaagaaagatgttgaagaccagacgatgtggaagagggagcggtcgaaggccaggcagaagacaaagattggtttcactgcgagggttgatgcaaagatcaagcagatcagggggaaattgcataagaaaggcccatctttaacaatccagacggtatcgnn

SEQ ID NO: 61885 - DNA, 3911 bp, Zea Mays
  misc_feature (3910)..(3911): n is a, c, g, or t
cctcgctccaactcccacccacccaccaaagcgtcgccggccgacgcgtgcgaatccccaggacgggatcgataccccgcttgatcgccggactctctgcctcggtcctcctcttcgcacctctctctgcctgtgaatccagctgcaggtccaattcgcaacgcggcgtaggaatcccatcctagattcggtcgagctgcaatgccggcgtccgcatagctggaaatcgggcgctgacggacaccgggcgccgagatgggccgttccggccgccgccggcgggaccgcgtgcggtggagcaatctctacaccttctcctgcttccgtgcccagcaagagcacgccggcgatgcgggcccctcctccgatggggctggcgccgtcggcgggccgggcttctcgcgcgtcgtgtactgcaacaacgccgccctgcagaagccgctcaagtacatcaccaactacatcaccaccaccaagtacaacatcatcaccttcttccccaaggccatcttcgagcagttccgacgcgttgccaacctctacttcctcctcaccgccatcctctcgctcaccccagtgtgccccttctctcccgtcagcatgattgctccgctggcctttgttgttggcctcagcatgatgaaggaggggttggaggactggcgccgcttcatccaggacatgaaggtgaacaaccgctatgtcagcacgcacaagggtgatggcgaattcgactaccggcactgggaggacctttgtgtcggtgatgtggtcagagttgagaaggaccagttcttccctgctgatttactgctactgtcctcgagctatgaggatggtatttgctatgttgagacaatgaacctcgatggtgagacgaaccttaaggtgaagaggtcacttgaggtaacgctgccgctggaagaagacgagtcatttaaggatttccaggcagtgatacgctgcgaggatcccaacccgtccttgtacacatttactggtaactttgagtatgagaggcaggtgtacgcccttgatccgtctcagatacttctgagggactcaaaactaaggaatacagcctttatctatggagtggttatcttcactggccatgacagtaaagtcatgcagaactcaactgagtcgccatcaaagaggagcaggattgagaagaagatggatttgatcatatacatcctgtttactgtgcttgtgttgatatcgctcattagttcaattggattcgccgtgaggatcaagttagatttgccccgctggtggtacttgcagccagagaaaagcaataaattagatgatccatcacgcccagctctttctgggatattccatctaatcacagctctcattctttatgggtatctgattccaatctcgctgtatgtctcgattgaacttgtgaaggtattgcaagcacatttcattaaccaggacattcatatgtttgatgaggacactggcaatactgctcaggcacgtacatcaaatttgaatgaggaacttggccaggttcatactatcttatcggataaaactggcactctgacctgcaatcaaatggatttcctgaagtgttcaattgctggagtatcatatggcgtgggttcaagtgaagttgaacgtgctgctgcaaagcatatggcatcaggtgctgatgaccatgatatccctttacaagatatatgggaggagaacaatgatgatgaaatcgagttggtaggagtcaactttagtgttgggaccaacataaagccctccataaaaggcttcagttttgtggatgaccgtctcatgcaagggaactggaccaaggagccaaattcttccacaattctactcttcttcaggatacttgctctgtgtcacacagcgataccagagataaatgaagcaactggttctattgcctatgaagcagaatcacctgatgagggggcttttcttgtggcagccagggaatttggatttgaatttttcaagcgaacacaatcaagtgtctttgtcagggagaaacacacttcttcgaaagacacagttgagagggagttcaagattctcaatctattggaattcagtagcaaaagaaaacgaatgactgtaattctgcaggatgaagatggtcaaattcttcttttttgcaaaggagcagacagcatcatatttgatagactggcaaaaaatggaaggatgtatgaagttgatacgactaggcatctgaatgattatggtgaggcaggcttgcgaacattggcactatcatacagggtgcttgatgaatcagaatattctttgtggaatgcggagtttcttaaagcaaagacatatattggtcctgatagagagttgcaacttgaacgagtctctgagttgattgaaagagagctgatccttgttggtgcaactgctgtagaggacaaattacaaaagggggttcctcagtgcatagatcggttggcgcaagcaggtctcaaaatctgggttctgacaggtgataagatggaaactgcaattaacatcggatatgcatgcagtttactgaggcaaggcatgaaacaaatatgtttgtccatacccactggtgagcaggtagctcaggatgcaaagaaggttgcaaaggagagtctcctgtcgcaaatcgccaatgggtcacaaatggtcaaactcgagaaggatccagatgcagcatttgctctagttattgatggaaaagctctggcatttgctttggaggatgacatgaagcatatgttcttgaacctggcaatcgagtgtgcttctgtcatatgttgtcgtgtgtctccaaagcagaaagcactggtgactcggctcgttaaagaaggtataggacaaaccactttagcagtaggtgatggtgcaaacgatgtgggcatgattcaagaagctgatattggagttggaataagcggggtagagggcatgcaggcggtgatggctagtgatttttctatttctcaatttcggtttcttgagcgacttcttgtcgttcatggacattggtgctacaagagaatcgcccaaatgatttgctacttcttttataagaatatcgcatttgggcttacaatattttactttgaagcattcgctgggttttctggtcaatctgtatacgatgattggtttatgctgcttttcaatgttgttcttacctcacttcctgttatatcactcggagtatttgagcaagacgtttcatccgaaatctgcttacagttcccagcattataccagcaagggccaaagaatcttttctttgattggtaccggatccttggatggatggggaatggcctctactcctctctggccatattcttcctcaatctctgcatattctatgatcaggcaatccgtgttggggggcagactgcagacattgctgcggtgggaactaccatgttcacctgcatcatctgggctgtcaacatgcagattgccctaacaatgagccatttcacatggattcaacatctctttgtatggggcagcataacaacttggtatctcttcatcctcgcctatgggatgacattgaggtctggcgacaactaccagatcctattagaagtccttgggccagctcccatatactgggcagcgacgcttctggtgactgctgcctgcaacatcccctacctgatacacatatcctaccagagatcgtgcaatccacttgatcaccatgtgattcaagagatcaagtacctaaagaaagatgttgaagaccagacgatgtggaagagggagcggtcgaaggccaggcagaagacaaagattggtttcactgcgagggttgatgcaaagatcaagcagatcagggggaaattgcataagaaaggcccatctttaacaatccagacggtatcgnn

SEQ ID NO: 61886 - DNA, 3872 bp, Zea Mays
  misc_feature (3871)..(3872): n is a, c, g, or t
ctcgctccgccccccgccccccgctcctcgctccaactcccacccacccaccaaagcgtcgccggccgacgcgtgcgaatccccaggacgggatcgataccccgcttgatcgccggactctctgcctcggtcctcctcttcgcacctctctctgcctgtgaatccaggtccaattcgcaacgcggcgtaggaatcccatcctagattcggtcgagctgcaatgccggcgtccgcatagctggaaatcgggcgctgacggacaccgggcgccgagatgggccgttccggccgccgccggcgggaccgcgtgcggtggagcaatctctacaccttctcctgcttccgtgcccagcaagagcacgccggcgatgcgggcccctcctccgatggggctggcgccgtcggcgggccgggcttctcgcgcgtcgtgtactgcaacaacgccgccctgcagaagccgctcaagtacatcaccaactacatcaccaccaccaagtacaacatcatcaccttcttccccaaggccatcttcgagcagttccgacgcgttgccaacctctacttcctcctcaccgccatcctctcgctcaccccagtgtgccccttctctcccgtcagcatgattgctccgctggcctttgttgttggcctcagcatgatgaaggaggggttggaggactggcgccgcttcatccaggacatgaaggtgaacaaccgctatgtcagcacgcacaagggtgatggcgaattcgactaccggcactgggaggacctttgtgtcggtgatgtggtcagagttgagaaggaccagttcttccctgctgatttactgctactgtcctcgagctatgaggatggtatttgctatgttgagacaatgaacctcgatggtgagacgaaccttaaggtgaagaggtcacttgaggtaacgctgccgctggaagaagacgagtcatttaaggatttccaggcagtgatacgctgcgaggatcccaacccgtccttgtacacatttactggtaactttgagtatgagaggcaggtgtacgcccttgatccgtctcagatacttctgagggactcaaaactaaggaatacagcctttatctatggagtggttatcttcactggccatgacagtaaagtcatgcagaactcaactgagtcgccatcaaagaggagcaggattgagaagaagatggatttgatcatatacatcctgtttactgtgcttgtgttgatatcgctcattagttcaattggattcgccgtgaggatcaagttagatttgccccgctggtggtacttgcagccagagaaaagcaataaattagatgatccatcacgcccagctctttctgggatattccatctaatcacagctctcattctttatgggtatctgattccaatctcgctgtatgtctcgattgaacttgtgaaggtattgcaagcacatttcattaaccaggacattcatatgtttgatgaggacactggcaatactgctcaggcacgtacatcaaatttgaatgaggaacttggccaggttcatactatcttatcggataaaactggcactctgacctgcaatcaaatggatttcctgaagtgttcaattgctggagtatcatatggcgtgggttcaagtgaagttgaacgtgctgctgcaaagcatatggcatcaggtgctgatgaccatgatatccctttacaagatatatgggaggagaacaatgatgatgaaatcgagttggtaggagtcaactttagtgttgggaccaacataaagccctccataaaaggcttcagttttgtggatgaccgtctcatgcaagggaactggaccaaggagccaaattcttccacaattctactcttcttcaggatacttgctctgtgtcacacagcgataccagagataaatgaagcaactggttctattgcctatgaagcagaatcacctgatgagggggcttttcttgtggcagccagggaatttggatttgaatttttcaagcgaacacaatcaagtgtctttgtcagggagaaacacacttcttcgaaagacacagttgagagggagttcaagattctcaatctattggaattcagtagcaaaagaaaacgaatgactgtaattctgcaggatgaagatggtcaaattcttcttttttgcaaaggagcagacagcatcatatttgatagactggcaaaaaatggaaggatgtatgaagttgatacgactaggcatctgaatgattatggtgaggcaggcttgcgaacattggcactatcatacagggtgcttgatgaatcagaatattctttgtggaatgcggagtttcttaaagcaaagacatatattggtcctgatagagagttgcaacttgaacgagtctctgagttgattgaaagagagctgatccttgttggtgcaactgctgtagaggacaaattacaaaagggggttcctcagtgcatagatcggttggcgcaagcaggtctcaaaatctgggttctgacaggtgataagatggaaactgcaattaacatcggatatgcatgcagtttactgaggcaaggcatgaaacaaatatgtttgtccatacccactggtgagcaggtagctcaggatgcaaagaaggttgcaaaggagagtctcctgtcgcaaatcgccaatgggtcacaaatggtcaaactcgagaaggatccagatgcagcatttgctctagttattgatggaaaagctctggcatttgctttggaggatgacatgaagcatatgttcttgaacctggcaatcgagtgtgcttctgtcatatgttgtcgtgtgtctccaaagcagaaagcactggtgactcggctcgttaaagaaggtataggacaaaccactttagcagtaggtgatggtgcaaacgatgtgggcatgattcaagaagctgatattggagttggaataagcggggtagagggcatgcaggcggtgatggctagtgatttttctatttctcaatttcggtttcttgagcgacttcttgtcgttcatggacattggtgctacaagagaatcgcccaaatgcattcgctgggttttctggtcaatctgtatacgatgattggtttatgctgcttttcaatgttgttcttacctcacttcctgttatatcactcggagtatttgagcaagacgtttcatccgaaatctgcttacagttcccagcattataccagcaagggccaaagaatcttttctttgattggtaccggatccttggatggatggggaatggcctctactcctctctggccatattcttcctcaatctctgcatattctatgatcaggcaatccgtgttggggggcagactgcagacattgctgcggtgggaactaccatgttcacctgcatcatctgggctgtcaacatgcagattgccctaacaatgagccatttcacatggattcaacatctctttgtatggggcagcataacaacttggtatctcttcatcctcgcctatgggatgacattgaggtctggcgacaactaccagatcctattagaagtccttgggccagctcccatatactgggcagcgacgcttctggtgactgctgcctgcaacatcccctacctgatacacatatcctaccagagatcgtgcaatccacttgatcaccatgtgattcaagagatcaagtacctaaagaaagatgttgaagaccagacgatgtggaagagggagcggtcgaaggccaggcagaagacaaagattggtttcactgcgagggttgatgcaaagatcaagcagatcagggggaaattgcataagaaaggcccatctttaacaatccagacggtatcgnn

SEQ ID NO: 61887 - DNA, 3989 bp, Zea Mays
  misc_feature (3988)..(3989): n is a, c, g, or t
ctcagctcgcggccacgctagtcgctccccacctcgttccctgcctcgtccccacccttctcgctccgccccccgccccccgctcctcgctccaactcccacccacccaccaaagcgtcgccggccgacgcgtgcgaatccccaggacgggatcgataccccgcttgatcgccggactctctgcctcggtcctcctcttcgcacctctctctgcctgtgaatccaggtccaattcgcaacgcggcgtaggaatcccatcctagattcggtcgagctgcaatgccggcgtccgcatagctggaaatcgggcgctgacggacaccgggcgccgagatgggccgttccggccgccgccggcgggaccgcgtgcggtggagcaatctctacaccttctcctgcttccgtgcccagcaagagcacgccggcgatgcgggcccctcctccgatggggctggcgccgtcggcgggccgggcttctcgcgcgtcgtgtactgcaacaacgccgccctgcagaagccgctcaagtacatcaccaactacatcaccaccaccaagtacaacatcatcaccttcttccccaaggccatcttcgagcagttccgacgcgttgccaacctctacttcctcctcaccgccatcctctcgctcaccccagtgtgccccttctctcccgtcagcatgattgctccgctggcctttgttgttggcctcagcatgatgaaggaggggttggaggactggcgccgcttcatccaggacatgaaggtgaacaaccgctatgtcagcacgcacaagggtgatggcgaattcgactaccggcactgggaggacctttgtgtcggtgatgtggtcagagttgagaaggaccagttcttccctgctgatttactgctactgtcctcgagctatgaggatggtatttgctatgttgagacaatgaacctcgatggtgagacgaaccttaaggtgaagaggtcacttgaggtaacgctgccgctggaagaagacgagtcatttaaggatttccaggcagtgatacgctgcgaggatcccaacccgtccttgtacacatttactggtaactttgagtatgagaggcaggtgtacgcccttgatccgtctcagatacttctgagggactcaaaactaaggaatacagcctttatctatggagtggttatcttcactggccatgacagtaaagtcatgcagaactcaactgagtcgccatcaaagaggagcaggattgagaagaagatggatttgatcatatacatcctgtttactgtgcttgtgttgatatcgctcattagttcaattggattcgccgtgaggatcaagttagatttgccccgctggtggtacttgcagccagagaaaagcaataaattagatgatccatcacgcccagctctttctgggatattccatctaatcacagctctcattctttatgggtatctgattccaatctcgctgtatgtctcgattgaacttgtgaaggtattgcaagcacatttcattaaccaggacattcatatgtttgatgaggacactggcaatactgctcaggcacgtacatcaaatttgaatgaggaacttggccaggttcatactatcttatcggataaaactggcactctgacctgcaatcaaatggatttcctgaagtgttcaattgctggagtatcatatggcgtgggttcaagtgaagttgaacgtgctgctgcaaagcatatggcatcaggtgctgatgaccatgatatccctttacaagatatatgggaggagaacaatgatgatgaaatcgagttggtaggagtcaactttagtgttgggaccaacataaagccctccataaaaggcttcagttttgtggatgaccgtctcatgcaagggaactggaccaaggagccaaattcttccacaattctactcttcttcaggatacttgctctgtgtcacacagcgataccagagataaatgaagcaactggttctattgcctatgaagcagaatcacctgatgagggggcttttcttgtggcagccagggaatttggatttgaatttttcaagcgaacacaatcaagtgtctttgtcagggagaaacacacttcttcgaaagacacagttgagagggagttcaagattctcaatctattggaattcagtagcaaaagaaaacgaatgactgtaattctgcaggatgaagatggtcaaattcttcttttttgcaaaggagcagacagcatcatatttgatagactggcaaaaaatggaaggatgtatgaagttgatacgactaggcatctgaatgattatggtgaggcaggcttgcgaacattggcactatcatacagggtgcttgatgaatcagaatattctttgtggaatgcggagtttcttaaagcaaagacatatattggtcctgatagagagttgcaacttgaacgagtctctgagttgattgaaagagagctgatccttgttggtgcaactgctgtagaggacaaattacaaaagggggttcctcagtgcatagatcggttggcgcaagcaggtctcaaaatctgggttctgacaggtgataagatggaaactgcaattaacatcggatatgcatgcagtttactgaggcaaggcatgaaacaaatatgtttgtccatacccactggtgagcaggtagctcaggatgcaaagaaggttgcaaaggagagtctcctgtcgcaaatcgccaatgggtcacaaatggtcaaactcgagaaggatccagatgcagcatttgctctagttattgatggaaaagctctggcatttgctttggaggatgacatgaagcatatgttcttgaacctggcaatcgagtgtgcttctgtcatatgttgtcgtgtgtctccaaagcagaaagcactggtgactcggctcgttaaagaaggtataggacaaaccactttagcagtaggtgatggtgcaaacgatgtgggcatgattcaagaagctgatattggagttggaataagcggggtagagggcatgcaggcggtgatggctagtgatttttctatttctcaatttcggtttcttgagcgacttcttgtcgttcatggacattggtgctacaagagaatcgcccaaatgatttgctacttcttttataagaatatcgcatttgggcttacaatattttactttgaagcattcgctgggttttctggtcaatctgtatacgatgattggtttatgctgcttttcaatgttgttcttacctcacttcctgttatatcactcggagtatttgagcaagacgtttcatccgaaatctgcttacagttcccagcattataccagcaagggccaaagaatcttttctttgattggtaccggatccttggatggatggggaatggcctctactcctctctggccatattcttcctcaatctctgcatattctatgatcaggcaatccgtgttggggggcagactgcagacattgctgcggtgggaactaccatgttcacctgcatcatctgggctgtcaacatgcagattgccctaacaatgagccatttcacatggattcaacatctctttgtatggggcagcataacaacttggtatctcttcatcctcgcctatgggatgacattgaggtctggcgacaactaccagatcctattagaagtccttgggccagctcccatatactgggcagcgacgcttctggtgactgctgcctgcaacatcccctacctgatacacatatcctaccagagatcgtgcaatccacttgatcaccatgtgattcaagagatcaagtacctaaagaaagatgttgaagaccagacgatgtggaagagggagcggtcgaaggccaggcagaagacaaagattggtttcactgcgagggttgatgcaaagatcaagcagatcagggggaaattgcataagaaaggcccatctttaacaatccagacggtatcgnn

SEQ ID NO: 61888 - DNA, 1171 bp, Zea Mays
gttttgtaattaccttttctttctttgtttgctgagtcattcagtgaaatgcttcaacacagaatgggttgtgttatcctgtcttttcttgagaaattgcacaggcgatatgttgtgaagaggaatcagcgtaagcgccaaagagaggaagatctaaagaaagaagagaaatcttcagagaagcggtctaagactactcatgagactactaaaactgaaagtgttgataatccaggaggcagctttaaaatgacaaaagagggtgaagaaaagatgagcacagatcaatctgcaaatgtccatgctgaactgtcaaaagagggtcagataaaacttggcaccgatcatccaattgctaaccatggagaaccagcaaaagggggtgatgaaaatatggaggaagatcctgaatacgaggaagatcctgaagaagtagaagtatatgaagatgacgaggacatggatgatgctcacgctgaagaacagattgcagaacagaatgagaacacaaacgacagagagattaagccaaaagaagtagcgacaacagatggtggaaataacaaaagtacaagacagcctgaagtagaaaatgttactaatatccatgaaagagctgcttcaatggaagaaaagcagtccgtgccagagataggagatttggtgggaggtggagaaaaggtagttagtaaagagattaagccagcaaaagatgaggtgatcgacaaggacctattgcaggccttcaggtactttgacataaatggagcaggatatctcaaggttgatgatttaaaatgtattcttcacaacatggggaagtttttatcaagcagggacgtgaaggacttggttcaaattgctcttgttgagagcaattctgcaagggacaatcgcataatctatcctaagcttgtgaagattgttgacctgtaatctggcactgcttggcccgcgtcagtccccttgaagttaaccatgctatgatcgttgagaagtcagttatgagaaactattttgtttacttattaatgggttcactgccatttttgtggctacctgtttctacgattatgctacaaggagctgcatttcgtttctgttgaattttttttacggaaattatcaagtcgtgaacgtagcagccgaaaaagataaacgaacattgtat

SEQ ID NO: 61889 - DNA, 3849 bp, Zea Mays
atgaccattagggcaaggggcacggaaaaccgagcaaaatataataaccgagcatctgatattacaggcgcaaacgcaacaggttacaccactagctggcgttctccgaacccctcgcggaaacccttccggctcccgccgctctcccgccgccatcactcgccgctctcccgctgccaaccgttgccttcaggctccagccgccggcacggctctgcgtacggggggattcacttccatccgacaccatctggccttctcttccatctcgtgggtgtttgttcgtgcgcgtggattgttttgtccgtgtctggtgcccgtgcaagagcccctaagctggtgcgtccgccatgtttccccccaaagggcccaaccactacgggcagccgccgccttacggcgggcagcagccgtacagccaaatccctagtagcactggatttgcagccccgacagcagcaggtggcactgatggtggtcggtttggtgggcgtggaggacaaggggctgctgcacagtatggagggccttatgcatcagtgtatggcacccaacaggttggtggacttggtggcaaaggtccagcttcttcaagtcttcctagcttgccaaatcgtccaacttctctcactgagtcatccaagttcacatctgcacctgtggggtctggcctggcaagaccaaatgatgactatatggctgtgcgaggttatgcacagaagcaagaccaatatggcacagattatccactagagagacgtatgtatggtgaacactcggccaatcttggtagaagggatggtctcagtgatttggatagaagatacactgatcagatagctgctggtcatcagagttcatcaatgcgccatcagcagctcttgaaaggtcagctgcagcctggatctgatacgaggcatcgttcacctgttaaagaaataaagagagaatatatttgcaaggtgtttccatttcgcttcgtggatgatgagagggattatctgtccttgacaaaacggtatcccagacttgcaattactccagaattttctaagattgtcttgaactgggctaaagaaaacttaaatcttcctctggatacaccagtgagtttggagcacgatatccatgattcagatgatggtgctgatgaaggagcaattatctctactgagaaaacatcaagcttcaatactccggccaccatttggaatgcaaaggtactattgatgagtggcatgagcaaaggtgcctttgctaacataacttcattgagaagtactgaggaacgagttgtgcacttgaacaatatcttaaaatttgctgtattcaagaaggatcgttctctttttgcaattggaggcccttggaatgcagatatagatggtggtgacccatcagctgactgttcttgcttgattcgaactgccatcagatgcgttaaggaaacggttcacgttgatctatctagttgcacccactggaaccggtttgtcgaggtacattacaatagaataggcaaagatggactgttcagtcataaagaaattactgttctgtttgtgccaaacttgttggaatgcttgccttcagtggatatatggaagaataactggattctgtacaaaaaatcaaaggcagaaagggagcagctcactgttaaaaagagccctggtgatccaaaagagcagatgcaaggggagctgaacgatggtaaaaatttagatgctgatcaattaaaagaggctgatgttggttgcagtgatatgaaaaatgagaaagacgatgttgatatcaaacagcaaggcaatgatggagagggtacgggtaaagttgaggaacctgttcagaagatgggtggggatgttgaaggaaaaagtacgggtgactcctctattgaccatgcaacaactggggataaaaagcccacaaaaaagaaaataataaaaaaggttgtgaaagttgttcgaaaaaaaataactggaccttcagttgataaatcttctgaggacaagattgttgtagcagaatctgcaaacaaaactgcagaaggggggcaaagtcaacaaaagaatgatgatgctggaaaacaacaggagggagctggtataagtcaacaaccagaagcaaagaaaactgtgaagaagaaaataattcgaaggattgttaaaaggaaagtttctggttcaggttctcagttgaatacccctactacacctgctgaaactagtaggcaagaagcagaagttcagccagaaaaaaatgttgagagttcggccgacgttggaaactctcagactaagctacaagaagggtccaaaattccatctgaagatatctcaaatcagaagaaagaggagaaaccagcggaaaaggaacacccattgactgatctcagtttaaatgcagataagggcaatcacaaggaagcttttgaacaaaaagacatgaaaaacgatggaaagaaggataaaacaaaggatgataaagagaagaatagagacctcaagatggatttaaagcaaaagctacctcttgacacacaagaaaaaaagaggtctgatgaaccaccaaagtatccaggattcattctccaggcgaaaagaaatacagaatccaaactccgcttaacatccctttcattgcatggcctcctagactatactgccaaggatatagaggagtcagtatttgagctttctttgtttgctgagtcattcagtgaaatgcttcaacacagaatgggttgtgttatcctgtcttttcttgagaaattgcacaggcgatatgttgtgaagaggaatcagcgtaagcgccaaagagaggaagatctaaagaaagaagagaaatcttcagagaagcggtctaagactactcatgagactactaaaactgaaagtgttgataatccaggaggcagctttaaaatgacaaaagagggtgaagaaaagatgagcacagatcaatctgcaaatgtccatgctgaactgtcaaaagagggtcagataaaacttggcaccgatcatccaattgctaaccatggagaaccagcaaaagggggtgatgaaaatatggaggaagatcctgaatacgaggaagatcctgaagaagtagaagtatatgaagatgacgaggacatggatgatgctcacgctgaagaacagattgcagaacagaatgagaacacaaacgacagagagattaagccaaaagaagtagcgacaacagatggtggaaataacaaaagtacaagacagcctgaagtagaaaatgttactaatatccatgaaagagctgcttcaatggaagaaaagcagtccgtgccagagataggagatttggtgggaggtggagaaaaggtagttagtaaagagattaagccagcaaaagatgaggtgatcgacaaggacctattgcaggccttcaggtactttgacataaatggagcaggatatctcaaggttgatgatttaaaatgtattcttcacaacatggggaagtttttatcaagcagggacgtgaaggacttggttcaaattgctcttgttgagagcaattctgcaagggacaatcgcataatctatcctaagcttgtgaagattgttgacctgtaatctggcactgcttggcccgcgtcagtccccttgaagttaaccatgctatgatcgttgagaagtcagttatgagaaactattttgtttacttattaatgggttcactgccatttttgtggctacctgtttctacgattatgctacaaggagctgcatttcgtttctgttgaattttttttacggaaattatcaagtcgtgaacgtagcagccgaaaaagataaacgaacattgtat

SEQ ID NO: 61890 - DNA, 3709 bp, Zea Mays
atgaccattagggcaaggggcacggaaaaccgagcaaaatataataaccgagcatctgatattacaggcgcaaacgcaacaggttacaccactagctggcgttctccgaacccctcgcggaaacccttccggctcccgccgctctcccgccgccatcactcgccgctctcccgctgccaaccgttgccttcaggctccagccgccggcacggctctgcgtacggggggattcacttccatccgacaccatctggccttctcttccatctcgtgggtgtttgttcgtgcgcgtggattgttttgtccgtgtctggtgcccgtgcaagagcccctaagctggtgcgtccgccatgtttccccccaaagggcccaaccactacgggcagccgccgccttacggcgggcagcagccgtacagccaaatccctagtagcactggatttgcagccccgacagcagcaggtggcactgatggtggtcggtttggtgggcgtggaggacaaggggctgctgcacagtatggagggccttatgcatcagtgtatggcacccaacaggttggtggacttggtggcaaaggtccagcttcttcaagtcttcctagcttgccaaatcgtccaacttctctcactgagtcatccaagttcacatctgcacctgtggggtctggcctggcaagaccaaatgatgactatatggctgtgcgaggttatgcacagaagcaagaccaatatggcacagattatccactagagagacgtatgtatggtgaacactcggccaatcttggtagaagggatggtctcagtgatttggatagaagatacactgatcagatagctgctggtcatcagagttcatcaatgcgccatcagcagctcttgaaaggtcagctgcagcctggatctgatacgaggtgtttccatttcgcttcgtggatgatgagagggattatctgtccttgacaaaacggtatcccagacttgcaattactccagaattttctaagattgtcttgaactgggctaaagaaaacttaaatcttcctctggatacaccagtgagtttggagcacgatatccatgattcagatgatggtgctgatgaaggagcaattatctctactgagaaaacatcaagcttcaatactccggccaccatttggaatgcaaaggtactattgatgagtggcatgagcaaaggtgcctttgctaacataacttcattgagaagtactgaggaacgagttgtgcacttgaacaatatcttaaaatttgctgtattcaagaaggatcgttctctttttgcaattggaggcccttggaatgcagatatagatggtggtgacccatcagctgactgttcttgcttgattcgaactgccatcagatgcgttaaggaaacggttcacgttgatctatctagttgcacccactggaaccggtttgtcgagtggatatatggaagaataactggattctgtacaaaaaatcaaaggcagaaagggagcagctcactgttaaaaagagccctggtgatccaaaagagcagatgcaaggggagctgaacgatggtaaaaatttagatgctgatcaattaaaagaggctgatgttggttgcagtgatatgaaaaatgagaaagacgatgttgatatcaaacagcaaggcaatgatggagagggtacgggtaaagttgaggaacctgttcagaagatgggtggggatgttgaaggaaaaagtacgggtgactcctctattgaccatgcaacaactggggataaaaagcccacaaaaaagaaaataataaaaaaggttgtgaaagttgttcgaaaaaaaataactggaccttcagttgataaatcttctgaggacaagattgttgtagcagaatctgcaaacaaaactgcagaaggggggcaaagtcaacaaaagaatgatgatgctggaaaacaacaggagggagctggtataagtcaacaaccagaagcaaagaaaactgtgaagaagaaaataattcgaaggattgttaaaaggaaagtttctggttcaggttctcagttgaatacccctactacacctgctgaaactagtaggcaagaagcagaagttcagccagaaaaaaatgttgagagttcggccgacgttggaaactctcagactaagctacaagaagggtccaaaattccatctgaagatatctcaaatcagaagaaagaggagaaaccagcggaaaaggaacacccattgactgatctcagtttaaatgcagataagggcaatcacaaggaagcttttgaacaaaaagacatgaaaaacgatggaaagaaggataaaacaaaggatgataaagagaagaatagagacctcaagatggatttaaagcaaaagctacctcttgacacacaagaaaaaaagaggtctgatgaaccaccaaagtatccaggattcattctccaggcgaaaagaaatacagaatccaaactccgcttaacatccctttcattgcatggcctcctagactatactgccaaggatatagaggagtcagtatttgagctttctttgtttgctgagtcattcagtgaaatgcttcaacacagaatgggttgtgttatcctgtcttttcttgagaaattgcacaggcgatatgttgtgaagaggaatcagcgtaagcgccaaagagaggaagatctaaagaaagaagagaaatcttcagagaagcggtctaagactactcatgagactactaaaactgaaagtgttgataatccaggaggcagctttaaaatgacaaaagagggtgaagaaaagatgagcacagatcaatctgcaaatgtccatgctgaactgtcaaaagagggtcagataaaacttggcaccgatcatccaattgctaaccatggagaaccagcaaaagggggtgatgaaaatatggaggaagatcctgaatacgaggaagatcctgaagaagtagaagtatatgaagatgacgaggacatggatgatgctcacgctgaagaacagattgcagaacagaatgagaacacaaacgacagagagattaagccaaaagaagtagcgacaacagatggtggaaataacaaaagtacaagacagcctgaagtagaaaatgttactaatatccatgaaagagctgcttcaatggaagaaaagcagtccgtgccagagataggagatttggtgggaggtggagaaaaggtagttagtaaagagattaagccagcaaaagatgaggtgatcgacaaggacctattgcaggccttcaggtactttgacataaatggagcaggatatctcaaggttgatgatttaaaatgtattcttcacaacatggggaagtttttatcaagcagggacgtgaaggacttggttcaaattgctcttgttgagagcaattctgcaagggacaatcgcataatctatcctaagcttgtgaagattgttgacctgtaatctggcactgcttggcccgcgtcagtccccttgaagttaaccatgctatgatcgttgagaagtcagttatgagaaactattttgtttacttattaatgggttcactgccatttttgtggctacctgtttctacgattatgctacaaggagctgcatttcgtttctgttgaattttttttacggaaattatcaagtcgtgaacgtagcagccgaaaaagataaacgaacattgtat

SEQ ID NO: 61891 - DNA, 4004 bp, Zea Mays
ccgcggcatcactccgcccgagtcccgtgatcccgtcccgtctcatctcctcctcacatcacagccgaggaagcttccaaggacaaaaacaaaaaatgcggcccaccacgtcctgccatcgcttccccctgctgctcgtcttgctcctcttcctcctcgccggcgagggccgctcccagcccgccgccggcggcggccccagtgaccgcgacacgctgctcgccgtcaagaaggcctggggcagccccccgcagctcaagtcctgggaccccgccgccgcccccgaccactgcaactggaccggcgtcacgtgcgccaccggcggcgttggggtcgtcaccgagcttatcctgtccaggcagaaactcacgggctccgtcccggcaccggtgtgcgcgctcgcgagcctcacccacctcgacctctcctacaacaacctcacgggcgccttccccggcgccgcgctgtacgcgtgcgcgaggctcaccttcctcgacctctccaccaaccagttctcggggccactcccgcgcgacatcgaccgcctcctctcgcggtcgatggagcacctcaacctctccaccaacggcttctccggagaggtgccgcccgcggtggcggggctcccggcgctcagttccctgcggctcgacaccaacaacttcactggcgcgtaccctgcggccgagataagcaaccgcaccggcctccagacgctcacgctggccaacaacgcgttcgcgccggcgccggtgcccaccgagttctccaagctcaccaacctgacatttctctggatggatggcatgaacctcaccggagagatcccagaggccttctctagcctcgaacagctcactctatttagcatggcttccaacaacctcaccggctcgatcccggcatgggtgtggcagcatcagaagctccagtacatctacctgttccacaatgtcctctctggcgagctgacgcgcagcgtgacggccttgaacttggttcatatcgatttgtcgtcgaatcagctaaccggagagataccgcaagacttcggcaatctcaagaacctcacaacgctgtttctatacaataaccagctcacgggcaccatcccggtgagcatcgggcttctaccacagctgagagacatccggttgttccagaacgagctgtccggagagctcccgccggagctgggcaagcactcgccgctgggcaacctcgaggtgtgccttaacaacctctccggcccgctgcgagggtcgctctgcgctaacggcaagctcttcgacatcgtcgccttcaacaacagcttctcgggcgagctccccgcggcgctcggggactgcgtcactttaaacaacttgatgctctacaacaacaacttctccggcgacttcccggagaaggtatggtcgttcccaaatctgaccttggtgatgatccagaacaacagcttcactggcacgctgccggcccagatatcccccaaactgtcacggattgagataggcaacaacatgttctccggctccttcccggcctcggcagcagggctcaaggtgctccatgcggagaacaaccggctgggcggcgagttgccgtctgacatgagcaagctcgccaaccttactgatctgtcagtgcccggcaaccggatccctggctccatcccaacatcgatcaagctgctgcagaaactgaattcgctcgacatgagaggcaaccggctgaccggcgcgataccgcaggggagcatcgggcttcttccagcactgacgatgcttgacctgtccgacaatgagctctccggcaccatcccatcagacctaaccaacgcgttcaacttgcttaacttgtcatcaaaccagctcaccggcgaggtgccggcgcagctgcagagtgcggcctacgaccggagcttccttggcaaccggctctgcgccagggcgggctcaggcacgaacctcccaacgtgcccaggcggaggccggggcagccacgacgagctttccaagggcctgatgatcctctttgtgttgctcgctgtcattgtcttcggcggcagcatcggcattgcctggctgctcttccggcaccggaaggagagccaggaggcgacggactggaagatgacggcctttacccagctcagcttctccgagtcggacgtgctcggcaacatccgcgaggagaacgtgatcggcagcggcggctccggaaaggtgtaccggatccatctcggcagcggtaacggcgccagccgcgacgaggagggcggcggcgggaggatggtcgccgtgaagaggatatggaactcgaggaagggcgacgagaagctggacagggagttcgagtcggaggtgaaggtgctgggcaacatccggcacaacaacatcgtgaagctgctgtgctgcatctccagccaggaagccaagctgctggtgtacgagtacatggagaacggcagcctggaccggtggctgcaccgccgagaccgggagggggcgccggcgccgctggactggccgaccaggctcgccatcgccgtcgacgcggccaaggggctcagctacatgcaccacgactgcgcgccccccatcgtgcaccgcgacgtcaagtccagcaacatcctgctggacccggacttccaggccaagatcgccgacttcgggctcgcccggatcctcgccaggcccggcgagccccagtccgtgtcagccatcggcgggacattcgggtacatggctccagagtatgggtacaggccaaaggtgaacgagaaggtggacgtctacagcttcggcgtcgtcctgctggagctcacaaccggcatggtcgcgaacgacagcggcgcggacctctgcctggcggagtgggcgtggcggcggtaccagaaaggcgcgccgttcgacgacgtcgtcgacgaggccatccgggagccggccgacgtgcaagacatcctgtcggtgttcaccctcggcgtcatctgcacgggagagagcccgctggcgaggccgtcgatgaaagaggtcctgcaccagctcgtccggtgcgaacagatcgccgctgaggccgaggcgtgccagctggtgagctacggcggcggaggcgcaccggtcgtcgagtcatggaagagaggcagccggcgacgcagcacgtctggctccagccggtggagctacgacgacgaggacagcggcgacttcgttgcgcacgtggtgtagttgtcggttcggacagtatatagctagctactgggcgtctggctgctgcaagcagctcatccatggaggaattttgcagaggtgccgcgccggcctctaccgagcggcggcgagaaggcccatgaagcccgaccccgcatgggcgccgcgcaacgcaagaacaaaccacgaagtgctttggttcgcgtcctgccactactgcgtgtaattacgccgtgtatgatgtatccagtgtttgaccggcgccggcggtaaaccagtttaattgacgaactagctgcctcgctgtagatggtgtaccggtgcagcttgcagatacaggatgttgagtcgcttttcggttttctgaaactgaaagactgaaacttttggccactctttggggattcagaaaacttgagaccacacaaatcccactatcccagggaggaaggccaatgggtggggcggcggcggcggcttcttacacctttttcaaagtggggggagtccgtgatgcagaaataacagatccgtgggccggcacggacatggaaaaaaaccgaacatgggacaagaaccaacgggcactttcctaggagaaaaacgtacgtaaaagcaacagataagaaccacattcacttcagaccatgctggtcgccttggatcccaagcaaagcattccatctcacgtactacttgtcaagttccttcgtgttgcgtttttcaccattgcaccacctttttttattgactcagcggtgacattcagaagaaataggtgaaacaggatcgtct

SEQ ID NO: 61892 - DNA, 2940 bp, Zea Mays
cagaacgcacgcgctaccttttctctctctacgaccttccccttacctattcgccgtccctctctcctgctgccctccccccgccgccgccctacggcccaccccgccgacgcgccacctccgtatctctcttccccgcctacgcgggcggcggatctccggatccgcgcgggggagggagatctggattggatggtcctctccggccgcggctagtccggcctgatctgatccgacccgtcccggcggcgcagtccgggcaggttgtctgggaaatttcggactcgggcggtgttgatcccggggagaggtcgtgcctcgctcgatctccgcataaaagctgtgattttgtggcggcgcggctgcgagttaccgggattttcccagggtttccggcggccgatccgcgctagttacgctattctgttccgtcagggcggcctcgtgttgggggctcgtttatttgccgcgtcccggaggagggttttgtgttcttctgtcgttggctccatggccagcggctctgatgccccgaagcagtatggaataaccaagccgttgtcgttgctcggaccggtggaggccgacctccagaggacggaggagctagagaagttcttgctcgagtcgggtctctatgagagccctgacgaatctgctaggcgggaggaggtgctggggaagcttgaccagattgtaaaagactgggtaaaacaattgactagtcagagaggatacactgatcaaatggttgaagaggcaaatgctgtactcttcacctttggctcataccgtcttggggttcatggacctggagctgatattgataccctctgtgttggaccttcatatgtgaaccgtgaggaagatttttttattgtactgcatgggatattagcacaaacagaggatgtgaccgagctgcagcctgtacctgatgcacatgtccctgttatgaaattcaagttccatggaatatctattgaccttctttatgccagtgtctccctcttagtagtaccagctgacttggatatctcccaaggatcagtgctttatgatgttgatgaagctactgtccgtagtcttaatgggtgcagagtagcagaccaaatcattagacttgttccaaattttgagaattttcgcacggcattaagatgtttgaagtactgggcaaaaaggagaggtgtttactctaatgttactggctttcttggtggtgtcaactgggctttactggttgcgcgtgtctgccagctctatcccaatgctgtgccaagtatgctggtctcacggttttttagagtttttacacaatggcagtggccaaacccggttatgctttgttctatagaagaggaagaacttggtttccctgtttgggatccacgcaaaaatcctcgagatagatgtcatcatatgcctattataacccctgcgtacccatgcatgaattcaagctataatgtttccacaagcacactgagggttatgttggaacaattccagtttggtaatagaatttgccaggaaattgaaatgaataagaccagctggcctgctctgtttgagccttttcaattttttgaagcatacaagaattatctacaggttgacatcattgctgaggatgatgaagaccttaggctttggaaaggatgggttgaatctcgattgcggcaactaactttgaagattgaacgtgatacatatggaatgctacagtgtcatccttacccacatgaatatgcagacccttctaggcagtgtgctcattgtgctttcttcatgggcttgtcaaggaaagaaggtgtgaaaatacaggaaggacaacagttcgatattcgaggaacggtggatgagttcaggcatgaaatcaacatgtatatgttctggaagcctgggatggagttagctgtttctcatgttcgtaggaagcaggtcccagcttatgtgtttccagagggttataaaagacctcgcccttcaagacatgtgaaccatcagtctgataaaaatgacactgaagatggcacagcgaccaggtctccagacagtcaactgaagagaaagcatgattctgttggaactgatgatatcaggtatgcaaagaggtcatcgaccagcccagttcatccgaaaaattcacctcaatctggaagcactggcgatgagactagatgtaacaaccaaataaaaagggctcctagcgatgcaagtggtggcagtccggcttcacctcaggcatcagagagaagcccagatactattctgtctgcccctaggtgcacgacaacaggagcagtgtgttctggtgatgcaattagtaagcatagtagtgttcctcttgttgagaactgcaccactccgactgtagcagtgtgcacaactttgaagcgcgtagctgagaaagttgtttcagagctagttggaagtgaaaggctggggagcaacaacagtgcggaattgttggagagtatggaaaaggaggatgtccttgctgaaaatgttcgttttggcgggaatggagttgcgcaaggtggccttccagaagagttagaggtatgaacaagtgtacattgtggaagtcgtcactgagggttagtggcatcaaccacacaagattggggaaaaaatggtgtagagatggataagttctacccccttgctggagggaatggtaagtagctcaactcacaagtttccttctggacacagattcgcaattacgggggtttctatgatgatggatgatgggagattatcggatatcatgtcttgcacaacggcatggcaaaaaaaaaacgacgaagaagattttgtggaaggccatggtcgaatgtcatgtcttgctgattctgaaacttgctgagagggaaaacaaatttatggggcaaaaaatgtgacactgaaagccatttgcttccagcagcttaa

SEQ ID NO: 61893 - DNA, 2723 bp, Zea Mays
gtactcttcacctttggctcataccgtcttggggttcatggacctggagctgatattgataccctctgtgttggaccttcatatgtgaaccgtgagaagatttttttattgtactgcatgggatattagcacaaacagaggatgtgaccgagctgcagcctgtacctgatgcacatgtccctgttatgaaattcaagttccatggaatatctattgaccttctttatgccagtgtctccctcttagtagtaccagctgacttggatatctcccaaggatcagtgctttatgatgttgatgaagctactgtccgtagtcttaatgggtgcagagtagcagaccaaatcattagacttgttccaaattttgagaattttcgcacggcattaagatgtttgaagtactgggcaaaaaggagaggtgtttactctaatgttactggctttcttggtggtgtcaactgggctttactggttgcgcgtgtctgccagctctatcccaatgctgtgccaagtatgctggtctcacggttttttagagtttttacacaatggcagtggccaaacccggttatgctttgttctatagaagaggaagaacttggtttccctgtttgggatccacgcaaaaatcctcgagatagatgtcatcatatgcctattataacccctgcgtacccatgcatgaattcaagctataatgtttccacaagcacactgagggttatgttggaacaattccagtttggtaatagaatttgccaggaaattgaaatgaataagaccagctggcctgctctgtttgagccttttcaattttttgaagcatacaagaattatctacaggttgacatcattgctgaggatgatgaagaccttaggctttggaaaggatgggttgaatctcgattgcggcaactaactttgaagattgaacgtgatacatatggaatgctacagtgtcatccttacccacatgaatatgcagacccttctaggcagtgtgctcattgtgctttcttcatgggcttgtcaaggaaagaaggtgtgaaaatacaggaaggacaacagttcgatattcgaggaacggtggatgagttcaggcatgaaatcaacatgtatatgttctggaagcctgggatggagttagctgtttctcatgttcgtaggaagcaggtcccagcttatgtgtttccagagggttataaaagacctcgcccttcaagacatgtgaaccatcagtctgataaaaatgacactgaagatggcacagcgaccaggtctccagacagtcaactgaagagaaagcatgattctgttggaactgatgatatcaggtatgcaaagaggtcatcgaccagcccagttcatccgaaaaattcacctcaatctggaagcactggcgatgagactagatgtaacaaccaaataaaaagggctcctagcgatgcaagtggtggcagtccggcttcacctcaggcatcagagagaagcccagatactattctgtctgcccctaggtgcacgacaacaggagcagtgtgttctggtgatgcaattagtaagcatagtagtgttcctcttgttgagaactgcaccactccgactgtagcagtgtgcacaactttgaagcgcgtagctgagaaagttgtttcagagctagttggaagtgaaaggctggggagcaacaacagtgcggaattgttggagagtatggaaaaggaggatgtccttgctgaaaatgttcgttttggcgggaatggagttgcgcaaggtggccttccagaagagttagagccaaacaataggattgaagcggtttcttgagctgatgcaggtatgaacaagtgtacattgtggaagtcgtcactgagggttagtggcatcaaccacacaagattggggaaaaaatggtgtagagatggataagttctacccccttgctggagggaatggtaagtagctcaactcacaagtttccttctggacacagattcgcaattacgggggtttctatgatgatggatgatgggagattatcggatatcatgtcttgcacaacggcatggcaaaaaaaaaacgacgaagaagattttgtggaaggccatggtcgaatgtcatgtcttgctggtacactctagatgagcatgaaccttaagttttcgtttttttttaacttgttgagcagctgactcttgtgtatgaactgagctgcagcgggcttccctgagttgacttgtttgggtctgagatgcttctgccatgttctaggtctagaatagaactagatgcggtggtgtgttctctaccctaagtccccttttgtgccctttccttctgtaatataagatctttgactgtttcttgtgtgtcttctggtccatagattttgcattgtctcctgttgcggtgcggatcgttctttactacccccgtccggtggtgctctacttcgagcatgatcggcagatgaactcctagagttgatatcactttgtgaatagaagggtctcaataaccagaaacacagctcaagctgtaggtagagatgtcaacgggacctgatacccgccaacccgtggggaattcccctattagggtacgagtatgggacgaaaattgtcttaatgggtatgaatatgagataaaatctccactcattgggtaaacgggtatgggtttgggaagcaataatccgaacctgattacccatgggtatttcat

SEQ ID NO: 61894 - DNA, 3420 bp, Zea Mays
cgaccttccccttacctattcgccgtccctctctcctgctgccctccccccgccgccgccctacggcccaccccgccgacgcgccacctccgtatctctcttccccgcctacgcgggcggcggatctccggatccgcgcgggggagggagatctggattggatggtcctctccggccgcggctagtccggcctgatctgatccgacccgtcccggcggcgcagtccgggcaggttgtctgggaaatttcggactcgggcggtgttgatcccggggagaggtcgtgcctcgctcgatctccgcataaaagctgtgattttgtggcggcgcggctgcgagttaccgggattttcccagggtttccggcggccgatccgcgctagttacgctattctgttccgtcagggcggcctcgtgttgggggctcgtttatttgccgcgtcccggaggagggttttgtgttcttctgtcgttggctccatggccagcggctctgatgccccgaagcagtatggaataaccaagccgttgtcgttgctcggaccggtggaggccgacctccagaggacggaggagctagagaagttcttgctcgagtcgggtctctatgagagccctgacgaatctgctaggcgggaggaggtgctggggaagcttgaccagattgtaaaagactgggtaaaacaattgactagtcagagaggatacactgatcaaatggttgaagaggcaaatgctgtactcttcacctttggctcataccgtcttggggttcatggacctggagctgatattgataccctctgtgttggaccttcatatgtgaaccgtgagatttttttattgtactgcatgggatattagcacaaacagaggatgtgaccgagctgcagcctgtacctgatgcacatgtccctgttatgaaattcaagttccatggaatatctattgaccttctttatgccagtgtctccctcttagtagtaccagctgacttggatatctcccaaggatcagtgctttatgatgttgatgaagctactgtccgtagtcttaatgggtgcagagtagcagaccaaatcattagacttgttccaaattttgagaattttcgcacggcattaagatgtttgaagtactgggcaaaaaggagaggtgtttactctaatgttactggctttcttggtggtgtcaactgggctttactggttgcgcgtgtctgccagctctatcccaatgctgtgccaagtatgctggtctcacggttttttagagtttttacacaatggcagtggccaaacccggttatgctttgttctatagaagaggaagaacttggtttccctgtttgggatccacgcaaaaatcctcgagatagatgtcatcatatgcctattataacccctgcgtacccatgcatgaattcaagctataatgtttccacaagcacactgagggttatgttggaacaattccagtttggtaatagaatttgccaggaaattgaaatgaataagaccagctggcctgctctgtttgagccttttcaattttttgaagcatacaagaattatctacaggttgacatcattgctgaggatgatgaagaccttaggctttggaaaggatgggttgaatctcgattgcggcaactaactttgaagattgaacgtgatacatatggaatgctacagtgtcatccttacccacatgaatatgcagacccttctaggcagtgtgctcattgtgctttcttcatgggcttgtcaaggaaagaaggtgtgaaaatacaggaaggacaacagttcgatattcgaggaacggtggatgagttcaggcatgaaatcaacatgtatatgttctggaagcctgggatggagttagctgtttctcatgttcgtaggaagcaggtcccagcttatgtgtttccagagggttataaaagacctcgcccttcaagacatgtgaaccatcagtctgataaaaatgacactgaagatggcacagcgaccaggtctccagacagtcaactgaagagaaagcatgattctgttggaactgatgatatcaggtatgcaaagaggtcatcgaccagcccagttcatccgaaaaattcacctcaatctggaagcactggcgatgagactagatgtaacaaccaaataaaaagggctcctagcgatgcaagtggtggcagtccggcttcacctcaggcatcagagagaagcccagatactattctgtctgcccctaggtgcacgacaacaggagcagtgtgttctggtgatgcaattagtaagcatagtagtgttcctcttgttgagaactgcaccactccgactgtagcagtgtgcacaactttgaagcgcgtagctgagaaagttgtttcagagctagttggaagtgaaaggctggggagcaacaacagtgcggaattgttggagagtatggaaaaggaggatgtccttgctgaaaatgttcgttttggcgggaatggagttgcgcaaggtggccttccagaagagttagagccaaacaataggattgaagcggtttcttgagctgatgcagggttagtggcatcaaccacacaagattggggaaaaaatggtgtagagatggataagttctacccccttgctggagggaatggtaagtagctcaactcacaagtttccttctggacacagattcgcaattacgggggtttctatgatgatggatgatgggagattatcggatatcatgtcttgcacaacggcatggcaaaaaaaaaacgacgaagaagattttgtggaaggccatggtcgaatgtcatgtcttgctggtacactctagatgagcatgaaccttaagttttcgtttttttttaacttgttgagcagctgactcttgtgtatgaactgagctgcagcgggcttccctgagttgacttgtttgggtctgagatgcttctgccatgttctaggtctagaatagaactagatgcggtggtgtgttctctaccctaagtccccttttgtgccctttccttctgtaatataagatctttgactgtttcttgtgtgtcttctggtccatagattttgcattgtctcctgttgcggtgcggatcgttctttactacccccgtccggtggtgctctacttcgagcatgatcggcagatgaactcctagagttgatatcactttgtgaatagaagggtctcaataaccagaaacacagctcaagctgtaggtagagatgtcaacgggacctgatacccgccaacccgtggggaattcccctattagggtacgagtatgggacgaaaattgtcttaatgggtatgaatatgagataaaatctccactcattgggtaaacgggtatgggtttgggaagcaataatccgaacctgattacccatgggtatttcat

SEQ ID NO: 61895 - DNA, 3249 bp, Zea Mays
ccacagaacgcacgcgctaccttttctctctctacgaccttccccttacctattcgccgtccctctctcctgctgccctccccccgccgccgccctacggcccaccccgccgacgcgccacctccgtatctctcttccccgcctacgcgggcggcggatctccggatccgcgcgggggagggagatctggattggatggtcctctccggccgcggctagtccggcctgatctgatccgacccgtcccggcggcgcagtccgggcaggttgtctgggaaatttcggactcgggcggtgttgatcccggggagaggtcgtgcctcgctcgatctccgcataaaagctgtgattttgtggcggcgcggctgcgagttaccgggattttcccagggtttccggcggccgatccgcgctagttacgctattctgttccgtcagggcggcctcgtgttgggggctcgtttatttgccgcgtcccggaggagggttttgtgttcttctgtcgttggctccatggccagcggctctgatgccccgaagcagtatggaataaccaagccgttgtcgttgctcggaccggtggaggccgacctccagaggacggaggagctagagaagttcttgctcgagtcgggtctctatgagagccctgacgaatctgctaggcgggaggaggtgctggggaagcttgaccagattgtaaaagactgggtaaaacaattgactagtcagagaggatacactgatcaaatggttgaagaggcaaatgctgtactcttcacctttggctcataccgtcttggggttcatggacctggagctgatattgataccctctgtgttggaccttcatatgtgaaccgtgaggaagatttttttattgtactgcatgggatattagcacaaacagaggatgtgaccgagctgcagcctgtacctgatgcacatgtccctgttatgaaattcaagttccatggaatatctattgaccttctttatgccagtgtctccctcttagtagtaccagctgacttggatatctcccaaggatcagtgctttatgatgttgatgaagctactgtccgtagtcttaatgggtgcagagtagcagaccaaatcattagacttgttccaaattttgagaattttcgcacggcattaagatgtttgaagtactgggcaaaaaggagaggtgtttactctaatgttactggctttcttggtggtgtcaactgggctttactggttgcgcgtgtctgccagctctatcccaatgctgtgccaagtatgctggtctcacggttttttagagtttttacacaatggcagtggccaaacccggttatgctttgttctatagaagaggaagaacttggtttccctgtttgggatccacgcaaaaatcctcgagatagatgtcatcatatgcctattataacccctgcgtacccatgcatgaattcaagctataatgtttccacaagcacactgagggttatgttggaacaattccagtttggtaatagaatttgccaggaaattgaaatgaataagaccagctggcctgctctgtttgagccttttcaattttttgaagcatacaagaattatctacaggttgacatcattgctgaggatgatgaagaccttaggctttggaaaggatgggttgaatctcgattgcggcaactaactttgaagattgaacgtgatacatatggaatgctacagtgtcatccttacccacatgaatatgcagacccttctaggcagtgtgctcattgtgctttcttcatgggcttgtcaaggaaagaaggtgtgaaaatacaggaaggacaacagttcgatattcgaggaacggtggatgagttcaggcatgaaatcaacatgtatatgttctggaagcctgggatggagttagctgtttctcatgttcgtaggaagcaggtcccagcttatgtgtttccagagggttataaaagacctcgcccttcaagacatgtgaaccatcagtctgataaaaatgacactgaagatggcacagcgaccaggtctccagacagtcaactgaagagaaagcatgattctgttggaactgatgatatcaggtatgcaaagaggtcatcgaccagcccagttcatccgaaaaattcacctcaatctggaagcactggcgatgagactagatgtaacaaccaaataaaaagggctcctagcgatgcaagtggtggcagtccggcttcacctcaggcatcagagagaagcccagatactattctgtctgcccctaggtgcacgacaacaggagcagtgtgttctggtgatgcaattagtaagcatagtagtgttcctcttgttgagaactgcaccactccgactgtagcagtgtgcacaactttgaagcgcgtagctgagaaagttgtttcagagctagttggaagtgaaaggctggggagcaacaacagtgcggaattgttggagagtatggaaaaggaggatgtccttgctgaaaatgttcgttttggcgggaatggagttgcgcaaggtggccttccagaagagttagaggtatgaacaagtgtacattgtggaagtcgtcactgagattcgcaattacgggggtttctatgatgatggatgatgggagattatcggatatcatgtcttgcacaacggcatggcaaaaaaaaaacgacgaagaagattttgtggaaggccatggtcgaatgtcatgtcttgctgcgggcttccctgagttgacttgtttgggtctgagatgcttctgccatgttctaggtctagaatagaactagatgcggtggtgtgttctctaccctaagtccccttttgtgccctttccttctgtaatataagatctttgactgtttcttgtgtgtcttctggtccatagattttgcattgtctcctgttgcggtgcggatcgttctttactacccccgtccggtggtgctctacttcgagcatgatcggcagatgaactcctagagttgatatcactttgtgaatagaagggtctcaataaccagaaacacagctcaagctgtaggtagagatgtcaacgggacctgatacccgccaacccgtggggaattcccctattagggtacgagtatgggacgaaaattgtcttaatgggtatgaatatgagataaaatctccactcattgggtaaacgggtatgggtttgggaagcaataatccgaacctgattacccatgggtatttcat

SEQ ID NO: 61896 - DNA, 3300 bp, Zea Mays
cctctcatattttccctaccttcactgtcctcctgggaagaaatagacggacggatagcccacagaacgcacgcgctaccttttctctctctacgaccttccccttacctattcgccgtccctctctcctgctgccctccccccgccgccgccctacggcccaccccgccgacgcgccacctccgtatctctcttccccgcctacgcgggcggcggatctccggatccgcgcgggggagggagatctggattggatggtcctctccggccgcggctagtccggcctgatctgatccgacccgtcccggcggcgcagtccgggcaggttgtctgggaaatttcggactcgggcggtgttgatcccggggagaggtcgtgcctcgctcgatctccgcataaaagctgtgattttgtggcggcgcggctgcgagttaccgggattttcccagggtttccggcggccgatccgcgctagttacgctattctgttccgtcagggcggcctcgtgttgggggctcgtttatttgccgcgtcccggaggagggttttgtgttcttctgtcgttggctccatggccagcggctctgatgccccgaagcagtatggaataaccaagccgttgtcgttgctcggaccggtggaggccgacctccagaggacggaggagctagagaagttcttgctcgagtcgggtctctatgagagccctgacgaatctgctaggcgggaggaggtgctggggaagcttgaccagattgtaaaagactgggtaaaacaattgactagtcagagaggatacactgatcaaatggttgaagaggcaaatgctgtactcttcacctttggctcataccgtcttggggttcatggacctggagctgatattgataccctctgtgttggaccttcatatgtgaaccgtgaggaagatttttttattgtactgcatgggatattagcacaaacagaggatgtgaccgagctgcagcctgtacctgatgcacatgtccctgttatgaaattcaagttccatggaatatctattgaccttctttatgccagtgtctccctcttagtagtaccagctgacttggatatctcccaaggatcagtgctttatgatgttgatgaagctactgtccgtagtcttaatgggtgcagagtagcagaccaaatcattagacttgttccaaattttgagaattttcgcacggcattaagatgtttgaagtactgggcaaaaaggagaggtgtttactctaatgttactggctttcttggtggtgtcaactgggctttactggttgcgcgtgtctgccagctctatcccaatgctgtgccaagtatgctggtctcacggttttttagagtttttacacaatggcagtggccaaacccggttatgctttgttctatagaagaggaagaacttggtttccctgtttgggatccacgcaaaaatcctcgagatagatgtcatcatatgcctattataacccctgcgtacccatgcatgaattcaagctataatgtttccacaagcacactgagggttatgttggaacaattccagtttggtaatagaatttgccaggaaattgaaatgaataagaccagctggcctgctctgtttgagccttttcaattttttgaagcatacaagaattatctacaggttgacatcattgctgaggatgatgaagaccttaggctttggaaaggatgggttgaatctcgattgcggcaactaactttgaagattgaacgtgatacatatggaatgctacagtgtcatccttacccacatgaatatgcagacccttctaggcagtgtgctcattgtgctttcttcatgggcttgtcaaggaaagaaggtgtgaaaatacaggaaggacaacagttcgatattcgaggaacggtggatgagttcaggcatgaaatcaacatgtatatgttctggaagcctgggatggagttagctgtttctcatgttcgtaggaagcaggtcccagcttatgtgtttccagagggttataaaagacctcgcccttcaagacatgtgaaccatcagtctgataaaaatgacactgaagatggcacagcgaccaggtctccagacagtcaactgaagagaaagcatgattctgttggaactgatgatatcaggtatgcaaagaggtcatcgaccagcccagttcatccgaaaaattcacctcaatctggaagcactggcgatgagactagatgtaacaaccaaataaaaagggctcctagcgatgcaagtggtggcagtccggcttcacctcaggcatcagagagaagcccagatactattctgtctgcccctaggtgcacgacaacaggagcagtgtgttctggtgatgcaattagtaagcatagtagtgttcctcttgttgagaactgcaccactccgactgtagcagtgtgcacaactttgaagcgcgtagctgagaaagttgtttcagagctagttggaagtgaaaggctggggagcaacaacagtgcggaattgttggagagtatggaaaaggaggatgtccttgctgaaaatgttcgttttggcgggaatggagttgcgcaaggtggccttccagaagagttagagggttagtggcatcaaccacacaagattggggaaaaaatggtgtagagatggataagttctacccccttgctggagggaatggtaagtagctcaactcacaagtttccttctggacacagattcgcaattacgggggtttctatgatgatggatgatgggagattatcggatatcatgtcttgcacaacggcatggcaaaaaaaaaacgacgaagaagattttgtggaaggccatggtcgaatgtcatgtcttgctgcgggcttccctgagttgacttgtttgggtctgagatgcttctgccatgttctaggtctagaatagaactagatgcggtgattttgcattgtctcctgttgcggtgcggatcgttctttactacccccgtccggtggtgctctacttcgagcatgatcggcagatgaactcctagagttgatatcactttgtgaatagaagggtctcaataaccagaaacacagctcaagctgtaggtagagatgtcaacgggacctgatacccgccaacccgtggggaattcccctattagggtacgagtatgggacgaaaattgtcttaatgggtatgaatatgagataaaatctccactcattgggtaaacgggtatgggtttgggaagcaataatccgaacctgattacccatgggtatttcat

SEQ ID NO: 61897 - DNA, 3541 bp, Zea Mays
atcacatctcaaggaaaatgatcatatacacaacgaacactccgtttctctctctacgaccaaatatccgattaacccctctcatattttccctaccttcactgtcctcctgggaagaaatagacggacggatagcccacagaacgcacgcgctaccttttctctctctacgaccttccccttacctattcgccgtccctctctcctgctgccctccccccgccgccgccctacggcccaccccgccgacgcgccacctccgtatctctcttccccgcctacgcgggcggcggatctccggatccgcgcgggggagggagatctggattggatggtcctctccggccgcggctagtccggcctgatctgatccgacccgtcccggcggcgcagtccgggcaggttgtctgggaaatttcggactcgggcggtgttgatcccggggagaggtcgtgcctcgctcgatctccgcataaaagctgtgattttgtggcggcgcggctgcgagttaccgggattttcccagggtttccggcggccgatccgcgctagttacgctattctgttccgtcagggcggcctcgtgttgggggctcgtttatttgccgcgtcccggaggagggttttgtgttcttctgtcgttggctccatggccagcggctctgatgccccgaagcagtatggaataaccaagccgttgtcgttgctcggaccggtggaggccgacctccagaggacggaggagctagagaagttcttgctcgagtcgggtctctatgagagccctgacgaatctgctaggcgggaggaggtgctggggaagcttgaccagattgtaaaagactgggtaaaacaattgactagtcagagaggatacactgatcaaatggttgaagaggcaaatgctgtactcttcacctttggctcataccgtcttggggttcatggacctggagctgatattgataccctctgtgttggaccttcatatgtgaaccgtgaggaagatttttttattgtactgcatgggatattagcacaaacagaggatgtgaccgagctgcagcctgtacctgatgcacatgtccctgttatgaaattcaagttccatggaatatctattgaccttctttatgccagtgtctccctcttagtagtaccagctgacttggatatctcccaaggatcagtgctttatgatgttgatgaagctactgtccgtagtcttaatgggtgcagagtagcagaccaaatcattagacttgttccaaattttgagaattttcgcacggcattaagatgtttgaagtactgggcaaaaaggagaggtgtttactctaatgttactggctttcttggtggtgtcaactgggctttactggttgcgcgtgtctgccagctctatcccaatgctgtgccaagtatgctggtctcacggttttttagagtttttacacaatggcagtggccaaacccggttatgctttgttctatagaagaggaagaacttggtttccctgtttgggatccacgcaaaaatcctcgagatagatgtcatcatatgcctattataacccctgcgtacccatgcatgaattcaagctataatgtttccacaagcacactgagggttatgttggaacaattccagtttggtaatagaatttgccaggaaattgaaatgaataagaccagctggcctgctctgtttgagccttttcaattttttgaagcatacaagaattatctacaggttgacatcattgctgaggatgatgaagaccttaggctttggaaaggatgggttgaatctcgattgcggcaactaactttgaagattgaacgtgatacatatggaatgctacagtgtcatccttacccacatgaatatgcagacccttctaggcagtgtgctcattgtgctttcttcatgggcttgtcaaggaaagaaggtgtgaaaatacaggaaggacaacagttcgatattcgaggaacggtggatgagttcaggcatgaaatcaacatgtatatgttctggaagcctgggatggagttagctgtttctcatgttcgtaggaagcaggtcccagcttatgtgtttccagagggttataaaagacctcgcccttcaagacatgtgaaccatcagtctgataaaaatgacactgaagatggcacagcgaccaggtctccagacagtcaactgaagagaaagcatgattctgttggaactgatgatatcaggtatgcaaagaggtcatcgaccagcccagttcatccgaaaaattcacctcaatctggaagcactggcgatgagactagatgtaacaaccaaataaaaagggctcctagcgatgcaagtggtggcagtccggcttcacctcaggcatcagagagaagcccagatactattctgtctgcccctaggtgcacgacaacaggagcagtgtgttctggtgatgcaattagtaagcatagtagtgttcctcttgttgagaactgcaccactccgactgtagcagtgtgcacaactttgaagcgcgtagctgagaaagttgtttcagagctagttggaagtgaaaggctggggagcaacaacagtgcggaattgttggagagtatggaaaaggaggatgtccttgctgaaaatgttcgttttggcgggaatggagttgcgcaaggtggccttccagaagagttagagccaaacaataggattgaagcggtttcttgagctgatgcaggtatgaacaagtgtacattgtggaagtcgtcactgagggttagtggcatcaaccacacaagattggggaaaaaatggtgtagagatggataagttctacccccttgctggagggaatggtaagtagctcaactcacaagtttccttctggacacagattcgcaattacgggggtttctatgatgatggatgatgggagattatcggatatcatgtcttgcacaacggcatggcaaaaaaaaaacgacgaagaagattttgtggaaggccatggtcgaatgtcatgtcttgctggtacactctagatgagcatgaaccttaagttttcgtttttttttaacttgttgagcagctgactcttgtgtatgaactgagctgcagcgggcttccctgagttgacttgtttgggtctgagatgcttctgccatgttctaggtctagaatagaactagatgcggtgattttgcattgtctcctgttgcggtgcggatcgttctttactacccccgtccggtggtgctctacttcgagcatgatcggcagatgaactcctagagttgatatcactttgtgaatagaagggtctcaataaccagaaacacagctcaagctgtaggtagagatgtcaacgggacctgatacccgccaacccgtggggaattcccctattagggtacgagtatgggacgaaaattgtcttaatgggtatgaatatgagataaaatctccactcattgggtaaacgggtatgggtttgggaagcaataatccgaacctgattacccatgggtatttcat

SEQ ID NO: 61898 - DNA, 646 bp, Zea Mays
atgcccatgttgctgacagtggtctggctgaggactaggccgagaggcgagagatgaggattgtgtcctggaatacaggcggcacatattcaaagcaagcaagcaagatttcagggagcaaatatttcttggccagatctgtccagaatcttgagcggcaaccttatgatattggcaagaacgctgtgcagtacaaatcagagagacgagcagcaatggaagcggaaggtttcaagatacttgggaactcaggggatcagtggagtgatttgataggatcgcccatggcaacgagatccttcaagctaccaaacccaatgtacttcatcagctgattttattgttagagcagtggacgaaggagcaggttttcatagggtgttcatatggtcccggtgtgaaactgcttttgttagacatccctcgggacataaatttagatttttatcttcaagcatgttgaaattcaactgaggcttgggtccgtcgaatctgccctatgatgatctgtaattacacacttcttttcccacactactggaagcatttgtggtaaggcaaattgtgaggtcatttggtgttcgttccttcagtcaccatctaagctttagtcgttaaattttagtttttcgaatttttatttcgg

SEQ ID NO: 61899 - DNA, 553 bp, Zea Mays
ggcaattggtcaggggcggagctaaggagtgttttggataggcctccgactatcctagaatttggcaaccttatgatattggcaagaacgctgtgcagtacaaatcagagagacgagcagcaatggaagcggaaggtttcaagatacttgggaactcaggggatcagtggagtgatttgataggatcgcccatggcaacgagatccttcaagctaccaaacccaatgtacttcatcagctgattttattgttagagcagtggacgaaggagcaggttttcatagggtgttcatatggtcccggtgtgaaactgcttttgttagacatccctcgggacataaatttagatttttatcttcaagcatgttgaaattcaactgaggcttgggtccgtcgaatctgccctatgatgatctgtaattacacacttcttttcccacactactggaagcatttgtggtaaggcaaattgtgaggtcatttggtgttcgttccttcagtcaccatctaagctttagtcgttaaattttagtttttcgaatttttatttcgg

SEQ ID NO: 61900 - DNA, 1162 bp, Zea Mays
cctcgggctccacaacccacaaaatgcacgggaggacccagggcgccgccgtcggcgacatgacccagcgccttctcctcgccctctcgctcatcgcatcagcgaccgccgtgcccgctgtcatccgcacggtcccggacgaccccaccgcgggctcctctggcgcggcagacgccgcggacgcgctcttctgtgacagctggaggctgtcggtggagacggccaacgcgggcccctggagcgccgtgccctcgcgctgtggggctttcgtgcgggactacatggagggacctcgctacgcgtctgactccgccgtcgccgacgccgacgccctagccttcgcctccgaagccctggccgccgccgagtggggcggctcggcgagcgcgaggcctgcgtgggtgttcgacgtcgacgagacgctgctctctaacgcgccgtactacgcggtcaacggatggggatcacaggaattcaatgagacctcatttgatgaatgggtagatgctgcaaaggcaccaacattaccatcgagcttgaatttgtacaatcaacttcagggacttggtttccatgttatcctattgactggccggagtgaattccaacgtaatgccacagaattgaatcttttgtttgctggctacaactcatgggaaaaactcatactgaggcaaccttatgatattggcaagaacgctgtgcagtacaaatcagagagacgagcagcaatggaagcggaaggtttcaagatacttgggaactcaggggatcagtggagtgatttgataggatcgcccatggcaacgagatccttcaagctaccaaacccaatgtacttcatcagctgattttattgttagagcagtggacgaaggagcaggttttcatagggtgttcatatggtcccggtgtgaaactgcttttgttagacatccctcgggacataaatttagatttttatcttcaagcatgttgaaattcaactgaggcttgggtccgtcgaatctgccctatgatgatctgtaattacacacttcttttcccacactactggaagcatttgtggtaaggcaaattgtgaggtcatttggtgttcgttccttcagtcaccatctaagctttagtcgttaaattttagtttttcgaatttttatttcgg

SEQ ID NO: 61901 - DNA, 883 bp, Zea Mays
cttttatttagttgagactttgttacttaactaaggacagttgtgatggtagtggtactcttctatttacctgttcataagtggatcatcagacacatatattttccatgtataaggaaaggcttttccaggggtgtagctattctaatctcgtttctggtttcagctgtattccatgagatatgtattgcggtgccgtgccacattttcaaattctgggcattttctgggatcatgtttcagataccgttggtattcttgacaagatatctccatgctacgttcaagcatgtaatggtgggcaacatgatattttggttcttcagtatagtcggacagccgatgtgtgtccttctatactaccatgacgtcatgaacaggcaggcccaggcaagtagatagttcggcagagacatgtacttcaacatcgaccatcagaagcagactggagcgacgcggcaggaagcagcagtagcccctcacttgccattgtttaccatcagctagcagctggtcagcctgaaaatgcttctattccaggcggccgtgctgggatgcagcgtgtacattaccagcgatgcaacgtcaacggttaccaagcgcggataagcagtgctcgtggcatgtgaactctgtacacattgaagtctatatgtccgcggtgctgtgtgcataatgtcgtggtagatgtaatatgtacaatgtatgccacgacttaagaggtcaaaatgaggctcacgtcttgggatggagggagaacgactttcaaagaacagacatcgagactcgatgaacttgttctgagccggtaacttcttgtgaccctgtcggctgtcgcgtcgtgtaccaagagcctggttggtagggattgttgtcggcttca

SEQ ID NO: 61902 - DNA, 1331 bp, Zea Mays
gacattcgttgagctctagtatttcatggtgtgactcagcagtactatctggatttgtgctaatgtttcttgcgagcatcatgtggatgaagcttgtctcttatgcacatacaaattatgatataagggtattgtccaaaagtactgagaagggtgctgcatatggaaattatgtcgatcctgagaatatgaaagatccaacctttaaaagtctagtgtacttcatgttggccccaacactttgttaccaggcttgatgggcttcataattgagcaatatataaacccaattgtgaagaattccaaacatccactgaaagggaattttttgaatgctatagaaagagtcttaaaactctcagtgccaacattatatgtatggctttgcatgttctattgcttttttcatttatggctgaacattgtagctgaactcctctgtttcggtgaccgtgaattctataaggactggtggaatgccaaaactgttgaagagtactggaggatgtggaacatgcctgttcataagtggatcatcagacacatatattttccatgtataaggaaaggcttttccaggggtgtagctattctaatctcgtttctggtttcagctgtattccatgagatatgtattgcggtgccgtgccacattttcaaattctgggcattttctgggatcatgtttcagataccgttggtattcttgacaagatatctccatgctacgttcaagcatgtaatggtgggcaacatgatattttggttcttcagtatagtcggacagccgatgtgtgtccttctatactaccatgacgtcatgaacaggcaggcccaggcaagtagatagttcggcagagacatgtacttcaacatcgaccatcagaagcagactggagcgacgcggcaggaagcagcagtagcccctcacttgccattgtttaccatcagctagcagctggtcagcctgaaaatgcttctattccaggcggccgtgctgggatgcagcgtgtacattaccagcgatgcaacgtcaacggttaccaagcgcggataagcagtgctcgtggcatgtgaactctgtacacattgaagtctatatgtccgcggtgctgtgtgcataatgtcgtggtagatgtaatatgtacaatgtatgccacgacttaagaggtcaaaatgaggctcacgtcttgggatggagggagaacgactttcaaagaacagacatcgagactcgatgaacttgttctgagccggtaacttcttgtgaccctgtcggctgtcgcgtcgtgtaccaagagcctggttggtagggattgttgtcggcttca

SEQ ID NO: 61903 - DNA, 1431 bp, Zea Mays
gtttgtttggatgcatcttattttgacattcgttgagctctagtatttcatggtgtgactcagcagtactatctggatttgtgctaatgtttcttgcgagcatcatgtggatgaagcttgtctcttatgcacatacaaattatgatataagggtattgtccaaaagtactgagaagggtgctgcatatggaaattatgtcgatcctgagaatatgaaagatccaacctttaaaagtctagtgtacttcatgttggccccaacactttgttaccagccaacttatcctcaaactacatgtattagaaagggttgggtgacccagcaactcataaagtgcgtggtttttacaggcttgatgggcttcataattgagcaatatataaacccaattgtgaagaattccaaacatccactgaaagggaattttttgaatgctatagaaagagtcttaaaactctcagtgccaacattatatgtatggctttgcatgttctattgcttttttcatttatggctgaacattgtagctgaactcctctgtttcggtgaccgtgaattctataaggactggtggaatgccaaaactgttgaagagtactggaggatgtggaacatgcctgttcataagtggatcatcagacacatatattttccatgtataaggaaaggcttttccaggggtgtagctattctaatctcgtttctggtttcagctgtattccatgagatatgtattgcggtgccgtgccacattttcaaattctgggcattttctgggatcatgtttcagataccgttggtattcttgacaagatatctccatgctacgttcaagcatgtaatggtgggcaacatgatattttggttcttcagtatagtcggacagccgatgtgtgtccttctatactaccatgacgtcatgaacaggcaggcccaggcaagtagatagttcggcagagacatgtacttcaacatcgaccatcagaagcagactggagcgacgcggcaggaagcagcagtagcccctcacttgccattgtttaccatcagctagcagctggtcagcctgaaaatgcttctattccaggcggccgtgctgggatgcagcgtgtacattaccagcgatgcaacgtcaacggttaccaagcgcggataagcagtgctcgtggcatgtgaactctgtacacattgaagtctatatgtccgcggtgctgtgtgcataatgtcgtggtagatgtaatatgtacaatgtatgccacgacttaagaggtcaaaatgaggctcacgtcttgggatggagggagaacgactttcaaagaacagacatcgagactcgatgaacttgttctgagccggtaacttcttgtgaccctgtcggctgtcgcgtcgtgtaccaagagcctggttggtagggattgttgtcggcttca

SEQ ID NO: 61904 - DNA, 1630 bp, Zea Mays
ctcaaatcacagcagaaacacgtgagacagccatgctggtcttctgaatctatgcattgttgttctgatcgcagtgaacagcagactcattattgagaatttaatgaagtatggcctgttgataagagctggattttggtttagtgcaagatcgctgggtgactggccccttctaatgtgctgcctcactctaccagttttcccactagttgcactcatggctgagaagctgatcacaagaaagctcattggtgaacatgtggttattctactccatatcattattacaacatctgccattgtctatccagttgttgtgactcttaagtgtgactcagcagtactatctggatttgtgctaatgtttcttgcgagcatcatgtggatgaagcttgtctcttatgcacatacaaattatgatataagggtattgtccaaaagtactgagaagggtgctgcatatggaaattatgtcgatcctgagaatatgaaagatccaacctttaaaagtctagtgtacttcatgttggccccaacactttgttaccaggcttgatgggcttcataattgagcaatatataaacccaattgtgaagaattccaaacatccactgaaagggaattttttgaatgctatagaaagagtcttaaaactctcagtgccaacattatatgtatggctttgcatgttctattgcttttttcatttatggctgaacattgtagctgaactcctctgtttcggtgaccgtgaattctataaggactggtggaatgccaaaactgttgaagagtactggaggatgtggaacatgcctgttcataagtggatcatcagacacatatattttccatgtataaggaaaggcttttccaggggtgtagctattctaatctcgtttctggtttcagctgtattccatgagatatgtattgcggtgccgtgccacattttcaaattctgggcattttctgggatcatgtttcagataccgttggtattcttgacaagatatctccatgctacgttcaagcatgtaatggtgggcaacatgatattttggttcttcagtatagtcggacagccgatgtgtgtccttctatactaccatgacgtcatgaacaggcaggcccaggcaagtagatagttcggcagagacatgtacttcaacatcgaccatcagaagcagactggagcgacgcggcaggaagcagcagtagcccctcacttgccattgtttaccatcagctagcagctggtcagcctgaaaatgcttctattccaggcggccgtgctgggatgcagcgtgtacattaccagcgatgcaacgtcaacggttaccaagcgcggataagcagtgctcgtggcatgtgaactctgtacacattgaagtctatatgtccgcggtgctgtgtgcataatgtcgtggtagatgtaatatgtacaatgtatgccacgacttaagaggtcaaaatgaggctcacgtcttgggatggagggagaacgactttcaaagaacagacatcgagactcgatgaacttgttctgagccggtaacttcttgtgaccctgtcggctgtcgcgtcgtgtaccaagagcctggttggtagggattgttgtcggcttca

SEQ ID NO: 61905 - DNA, 1701 bp, Zea Mays
gttagccctccattttttaatagagccatgctggtcttctgaatctatgcattgttgttctgatcgcagtgaacagcagactcattattgagaatttaatgaagtatggcctgttgataagagctggattttggtttagtgcaagatcgctgggtgactggccccttctaatgtgctgcctcactctaccagttttcccactagttgcactcatggctgagaagctgatcacaagaaagctcattggtgaacatgtggttattctactccatatcattattacaacatctgccattgtctatccagttgttgtgactcttaagtgtgactcagcagtactatctggatttgtgctaatgtttcttgcgagcatcatgtggatgaagcttgtctcttatgcacatacaaattatgatataagggtattgtccaaaagtactgagaagggtgctgcatatggaaattatgtcgatcctgagaatatgaaagatccaacctttaaaagtctagtgtacttcatgttggccccaacactttgttaccagccaacttatcctcaaactacatgtattagaaagggttgggtgacccagcaactcataaagtgcgtggtttttacaggcttgatgggcttcataattgagcaatatataaacccaattgtgaagaattccaaacatccactgaaagggaattttttgaatgctatagaaagagtcttaaaactctcagtgccaacattatatgtatggctttgcatgttctattgcttttttcatttatggctgaacattgtagctgaactcctctgtttcggtgaccgtgaattctataaggactggtggaatgccaaaactgttgaagagtactggaggatgtggaacatgcctgttcataagtggatcatcagacacatatattttccatgtataaggaaaggcttttccaggggtgtagctattctaatctcgtttctggtttcagctgtattccatgagatatgtattgcggtgccgtgccacattttcaaattctgggcattttctgggatcatgtttcagataccgttggtattcttgacaagatatctccatgctacgttcaagcatgtaatggtgggcaacatgatattttggttcttcagtatagtcggacagccgatgtgtgtccttctatactaccatgacgtcatgaacaggcaggcccaggcaagtagatagttcggcagagacatgtacttcaacatcgaccatcagaagcagactggagcgacgcggcaggaagcagcagtagcccctcacttgccattgtttaccatcagctagcagctggtcagcctgaaaatgcttctattccaggcggccgtgctgggatgcagcgtgtacattaccagcgatgcaacgtcaacggttaccaagcgcggataagcagtgctcgtggcatgtgaactctgtacacattgaagtctatatgtccgcggtgctgtgtgcataatgtcgtggtagatgtaatatgtacaatgtatgccacgacttaagaggtcaaaatgaggctcacgtcttgggatggagggagaacgactttcaaagaacagacatcgagactcgatgaacttgttctgagccggtaacttcttgtgaccctgtcggctgtcgcgtcgtgtaccaagagcctggttggtagggattgttgtcggcttca

SEQ ID NO: 61906 - DNA, 1738 bp, Zea Mays
attgcttcttgttgaggaccatataactgtgcacctacatagaactgtattggaccacttagccatgctggtcttctgaatctatgcattgttgttctgatcgcagtgaacagcagactcattattgagaatttaatgaagtatggcctgttgataagagctggattttggtttagtgcaagatcgctgggtgactggccccttctaatgtgctgcctcactctaccagttttcccactagttgcactcatggctgagaagctgatcacaagaaagctcattggtgaacatgtggttattctactccatatcattattacaacatctgccattgtctatccagttgttgtgactcttaagtgtgactcagcagtactatctggatttgtgctaatgtttcttgcgagcatcatgtggatgaagcttgtctcttatgcacatacaaattatgatataagggtattgtccaaaagtactgagaagggtgctgcatatggaaattatgtcgatcctgagaatatgaaagatccaacctttaaaagtctagtgtacttcatgttggccccaacactttgttaccagccaacttatcctcaaactacatgtattagaaagggttgggtgacccagcaactcataaagtgcgtggtttttacaggcttgatgggcttcataattgagcaatatataaacccaattgtgaagaattccaaacatccactgaaagggaattttttgaatgctatagaaagagtcttaaaactctcagtgccaacattatatgtatggctttgcatgttctattgcttttttcatttatggctgaacattgtagctgaactcctctgtttcggtgaccgtgaattctataaggactggtggaatgccaaaactgttgaagagtactggaggatgtggaacatgcctgttcataagtggatcatcagacacatatattttccatgtataaggaaaggcttttccaggggtgtagctattctaatctcgtttctggtttcagctgtattccatgagatatgtattgcggtgccgtgccacattttcaaattctgggcattttctgggatcatgtttcagataccgttggtattcttgacaagatatctccatgctacgttcaagcatgtaatggtgggcaacatgatattttggttcttcagtatagtcggacagccgatgtgtgtccttctatactaccatgacgtcatgaacaggcaggcccaggcaagtagatagttcggcagagacatgtacttcaacatcgaccatcagaagcagactggagcgacgcggcaggaagcagcagtagcccctcacttgccattgtttaccatcagctagcagctggtcagcctgaaaatgcttctattccaggcggccgtgctgggatgcagcgtgtacattaccagcgatgcaacgtcaacggttaccaagcgcggataagcagtgctcgtggcatgtgaactctgtacacattgaagtctatatgtccgcggtgctgtgtgcataatgtcgtggtagatgtaatatgtacaatgtatgccacgacttaagaggtcaaaatgaggctcacgtcttgggatggagggagaacgactttcaaagaacagacatcgagactcgatgaacttgttctgagccggtaacttcttgtgaccctgtcggctgtcgcgtcgtgtaccaagagcctggttggtagggattgttgtcggcttca

SEQ ID NO: 61907 - DNA, 1737 bp, Zea Mays
attgcttcttgttgaggaccatataactgtgcacctacatagaactgtattggaccacttagccatgctggtcttctgaatctatgcattgttgttctgatcgcagtgaacagcagactcattattgagaatttaatgaagtatggcctgttgataagagctggattttggtttagtgcaagatcgctgggtgactggccccttctaatgtgctggtagaaattgttgtcatttttaattcagatgggtttcaaataagaactgtggagtaatcaatctgtcaatttcagcctcactctaccagttttcccactagttgcactcatggctgagaagctgatcacaagaaagctcattggtgaacatgtggttattctactccatatcattattacaacatctgccattgtctatccagttgttgtgactcttaagtgtgactcagcagtactatctggatttgtgctaatgtttcttgcgagcatcatgtggatgaagcttgtctcttatgcacatacaaattatgatataagggtattgtccaaaagtactgagaagggtgctgcatatggaaattatgtcgatcctgagaatatgaaagatccaacctttaaaagtctagtgtacttcatgttggccccaacactttgttaccaggcttgatgggcttcataattgagcaatatataaacccaattgtgaagaattccaaacatccactgaaagggaattttttgaatgctatagaaagagtcttaaaactctcagtgccaacattatatgtatggctttgcatgttctattgcttttttcatttatggctgaacattgtagctgaactcctctgtttcggtgaccgtgaattctataaggactggtggaatgccaaaactgttgaagagtactggaggatgtggaacatgcctgttcataagtggatcatcagacacatatattttccatgtataaggaaaggcttttccaggggtgtagctattctaatctcgtttctggtttcagctgtattccatgagatatgtattgcggtgccgtgccacattttcaaattctgggcattttctgggatcatgtttcagataccgttggtattcttgacaagatatctccatgctacgttcaagcatgtaatggtgggcaacatgatattttggttcttcagtatagtcggacagccgatgtgtgtccttctatactaccatgacgtcatgaacaggcaggcccaggcaagtagatagttcggcagagacatgtacttcaacatcgaccatcagaagcagactggagcgacgcggcaggaagcagcagtagcccctcacttgccattgtttaccatcagctagcagctggtcagcctgaaaatgcttctattccaggcggccgtgctgggatgcagcgtgtacattaccagcgatgcaacgtcaacggttaccaagcgcggataagcagtgctcgtggcatgtgaactctgtacacattgaagtctatatgtccgcggtgctgtgtgcataatgtcgtggtagatgtaatatgtacaatgtatgccacgacttaagaggtcaaaatgaggctcacgtcttgggatggagggagaacgactttcaaagaacagacatcgagactcgatgaacttgttctgagccggtaacttcttgtgaccctgtcggctgtcgcgtcgtgtaccaagagcctggttggtagggattgttgtcggcttca

SEQ ID NO: 61908 - DNA, 2067 bp, Zea Mays
cgcagcccaacacccgcatcaaaacacgcacctcggctcctcccctccccaccaggcaccaaggtcgccaccgccaccgctgccccaaagtatcgcacccccaaagccccgctccctcaccttctggaaccttcctcgcatggccccgcccccctccatgcctgccgcctccgatcgcgccggccctggccgcgacgcgggcgactcgtcctcccttcgcctccgccgcgccccctcagccgacgccggcgaccttgccggcgattcctcggtaggcttgcgggagaacggcgagccgcaaccgccgacgaatccgccgccgcaggagcagcagcagcagcacgagatgctatactaccgcgcgtcggcgcccgcccaccgccgcgtcaaggagagccccctcagctctgacgccatcttccggcagagccatgctggtcttctgaatctatgcattgttgttctgatcgcagtgaacagcagactcattattgagaatttaatgaagtatggcctgttgataagagctggattttggtttagtgcaagatcgctgggtgactggccccttctaatgtgctgcctcactctaccagttttcccactagttgcactcatggctgagaagctgatcacaagaaagctcattggtgaacatgtggttattctactccatatcattattacaacatctgccattgtctatccagttgttgtgactcttaagtgtgactcagcagtactatctggatttgtgctaatgtttcttgcgagcatcatgtggatgaagcttgtctcttatgcacatacaaattatgatataagggtattgtccaaaagtactgagaagggtgctgcatatggaaattatgtcgatcctgagaatatgaaagatccaacctttaaaagtctagtgtacttcatgttggccccaacactttgttaccagccaacttatcctcaaactacatgtattagaaagggttgggtgacccagcaactcataaagtgcgtggtttttacaggcttgatgggcttcataattgagcaatatataaacccaattgtgaagaattccaaacatccactgaaagggaattttttgaatgctatagaaagagtcttaaaactctcagtgccaacattatatgctgaacattgtagctgaactcctctgtttcggtgaccgtgaattctataaggactggtggaatgccaaaactgttgaagagtactggaggatgtggaacatgcctgttcataagtggatcatcagacacatatattttccatgtataaggaaaggcttttccaggggtgtagctattctaatctcgtttctggtttcagctgtattccatgagatatgtattgcggtgccgtgccacattttcaaattctgggcattttctgggatcatgtttcagataccgttggtattcttgacaagatatctccatgctacgttcaagcatgtaatggtgggcaacatgatattttggttcttcagtatagtcggacagccgatgtgtgtccttctatactaccatgacgtcatgaacaggcaggcccaggcaagtagatagttcggcagagacatgtacttcaacatcgaccatcagaagcagactggagcgacgcggcaggaagcagcagtagcccctcacttgccattgtttaccatcagctagcagctggtcagcctgaaaatgcttctattccaggcggccgtgctgggatgcagcgtgtacattaccagcgatgcaacgtcaacggttaccaagcgcggataagcagtgctcgtggcatgtgaactctgtacacattgaagtctatatgtccgcggtgctgtgtgcataatgtcgtggtagatgtaatatgtacaatgtatgccacgacttaagaggtcaaaatgaggctcacgtcttgggatggagggagaacgactttcaaagaacagacatcgagactcgatgaacttgttctgagccggtaacttcttgtgaccctgtcggctgtcgcgtcgtgtaccaagagcctggttggtagggattgttgtcggcttca

SEQ ID NO: 61909 - DNA, 2036 bp, Zea Mays
cgcagcccaacacccgcatcaaaacacgcacctcggctcctcccctccccaccaggcaccaaggtcgccaccgccaccgctgccccaaagtatcgcacccccaaagccccgctccctcaccttctggaaccttcctcgcatggccccgcccccctccatgcctgccgcctccgatcgcgccggccctggccgcgacgcgggcgactcgtcctcccttcgcctccgccgcgccccctcagccgacgccggcgaccttgccggcgattcctcggtaggcttgcgggagaacggcgagccgcaaccgccgacgaatccgccgccgcaggagcagcagcagcagcacgagatgctatactaccgcgcgtcggcgcccgcccaccgccgcgtcaaggagagccccctcagctctgacgccatcttccggcagagccatgctggtcttctgaatctatgcattgttgttctgatcgcagtgaacagcagactcattattgagaatttaatgaagtatggcctgttgataagagctggattttggtttagtgcaagatcgctgggtgactggccccttctaatgtgctgcctcactctaccagttttcccactagttgcactcatggctgagaagctgatcacaagaaagctcattggtgaacatgtggttattctactccatatcattattacaacatctgccattgtctatccagttgttgtgactcttaagtgtgactcagcagtactatctggatttgtgctaatgtttcttgcgagcatcatgtggatgaagcttgtctcttatgcacatacaaattatgatataagggtattgtccaaaagtactgagaagggtgctgcatatggaaattatgtcgatcctgagaatatgaaagatccaacctttaaaagtctagtgtacttcatgttggccccaacactttgttaccagccaacttatcctcaaactacatgtattagaaagggttgggtgacccagcaactcataaagtgcgtggtttttacaggcttgatgggcttcataattgagcaatatataaacccaattgtgaagaattccaaacatccactgaaagggaattttttgaatgctatagaaagagtcttaaaactctcagtgccaacattatatgtatggctttgcatgttctattgcttttttcatttatggctgaacattgtagctgaactcctctgtttcggtgaccgtgaattctataaggactggtggaatgccaaaactgttgaagagtactggaggatgtggaacatgcctgttcataagtggatcatcagacacatatattttccatgtataaggaaaggcttttccaggggtgtagctattctaatctcgtttctggtttcagctgtattccatgagatatgtattgcggtgccgtgccacattttcaaattctgggcattttctgggatcatgtttcagataccgttggtattcttgacaagatatctccatgctacgttcaagcatgtaatggtgggcaacatgatattttggttcttcagtatagtcggacagccgatgtgtgtccttctatactaccatgacgtcatgaacaggcaggcccaggcaagtagatagttcggcagagacatgtacttcaacatcgaccatcagaagcagactggagcgacgcggcaggaagcagcagcggccgtgctgggatgcagcgtgtacattaccagcgatgcaacgtcaacggttaccaagcgcggataagcagtgctcgtggcatgtgaactctgtacacattgaagtctatatgtccgcggtgctgtgtgcataatgtcgtggtagatgtaatatgtacaatgtatgccacgacttaagaggtcaaaatgaggctcacgtcttgggatggagggagaacgactttcaaagaacagacatcgagactcgatgaacttgttctgagccggtaacttcttgtgaccctgtcggctgtcgcgtcgtgtaccaagagcctggttggtagggattgttgtcggcttca

SEQ ID NO: 61910 - DNA, 2161 bp, Zea Mays
cgcagcccaacacccgcatcaaaacacgcacctcggctcctcccctccccaccaggcaccaaggtcgccaccgccaccgctgccccaaagtatcgcacccccaaagccccgctccctcaccttctggaaccttcctcgcatggccccgcccccctccatgcctgccgcctccgatcgcgccggccctggccgcgacgcgggcgactcgtcctcccttcgcctccgccgcgccccctcagccgacgccggcgaccttgccggcgattcctcggtaggcttgcgggagaacggcgagccgcaaccgccgacgaatccgccgccgcaggagcagcagcagcagcacgagatgctatactaccgcgcgtcggcgcccgcccaccgccgcgtcaaggagagccccctcagctctgacgccatcttccggcagagccatgctggtcttctgaatctatgcattgttgttctgatcgcagtgaacagcagactcattattgagaatttaatgaagtatggcctgttgataagagctggattttggtttagtgcaagatcgctgggtgactggccccttctaatgtgctgcctcactctaccagttttcccactagttgcactcatggctgagaagctgatcacaagaaagctcattggtgaacatgtggttattctactccatatcattattacaacatctgccattgtctatccagttgttgtgactcttaagtgtgactcagcagtactatctggatttgtgctaatgtttcttgcgagcatcatgtggatgaagcttgtctcttatgcacatacaaattatgatataagggtattgtccaaaagtactgagaagggtgctgcatatggaaattatgtcgatcctgagaatatgaaagatccaacctttaaaagtctagtgtacttcatgttggccccaacactttgttaccagccaacttatcctcaaactacatgtattagaaagggttgggtgacccagcaactcataaagtgcgtggtttttacaggcttgatgggcttcataattgagcaatatataaacccaattgtgaagaattccaaacatccactgaaagggaattttttgaatgctatagaaagagtcttaaaactctcagtgccaacattatatgtatggctttgcatgttctattgcttttttcatttatggctgaacattgtagctgaactcctctgtttcggtgaccgtgaattctataaggactggtggaatgccaaaactgttgaagagtactggaggatgtggaacatgcctgttcataagtggatcatcagacacatatattttccatgtataaggaaaggcttttccaggaactgacatgattttcactgcctacttctcaaattcgtattgtatctacactgcagggtgtagctattctaatctcgtttctggtttcagctgtattccatgagatatgtattgcggtgccgtgccacattttcaaattctgggcattttctgggatcatgtttcagataccgttggtattcttgacaagatatctccatgctacgttcaagcatgtaatggtgggcaacatgatattttggttcttcagtatagtcggacagccgatgtgtgtccttctatactaccatgacgtcatgaacaggcaggcccaggcaagtagatagttcggcagagacatgtacttcaacatcgaccatcagaagcagactggagcgacgcggcaggaagcagcagtagcccctcacttgccattgtttaccatcagctagcagctggtcagcctgaaaatgcttctattccaggcggccgtgctgggatgcagcgtgtacattaccagcgatgcaacgtcaacggttaccaagcgcggataagcagtgctcgtggcatgtgaactctgtacacattgaagtctatatgtccgcggtgctgtgtgcataatgtcgtggtagatgtaatatgtacaatgtatgccacgacttaagaggtcaaaatgaggctcacgtcttgggatggagggagaacgactttcaaagaacagacatcgagactcgatgaacttgttctgagccggtaacttcttgtgaccctgtcggctgtcgcgtcgtgtaccaagagcctggttggtagggattgttgtcggcttca

SEQ ID NO: 61911 - DNA, 2099 bp, Zea Mays
cgcagcccaacacccgcatcaaaacacgcacctcggctcctcccctccccaccaggcaccaaggtcgccaccgccaccgctgccccaaagtatcgcacccccaaagccccgctccctcaccttctggaaccttcctcgcatggccccgcccccctccatgcctgccgcctccgatcgcgccggccctggccgcgacgcgggcgactcgtcctcccttcgcctccgccgcgccccctcagccgacgccggcgaccttgccggcgattcctcggtaggcttgcgggagaacggcgagccgcaaccgccgacgaatccgccgccgcaggagcagcagcagcagcacgagatgctatactaccgcgcgtcggcgcccgcccaccgccgcgtcaaggagagccccctcagctctgacgccatcttccggcagagccatgctggtcttctgaatctatgcattgttgttctgatcgcagtgaacagcagactcattattgagaatttaatgaagtatggcctgttgataagagctggattttggtttagtgcaagatcgctgggtgactggccccttctaatgtgctgcctcactctaccagttttcccactagttgcactcatggctgagaagctgatcacaagaaagctcattggtgaacatgtggttattctactccatatcattattacaacatctgccattgtctatccagttgttgtgactcttaagtgtgactcagcagtactatctggatttgtgctaatgtttcttgcgagcatcatgtggatgaagcttgtctcttatgcacatacaaattatgatataagggtattgtccaaaagtactgagaagggtgctgcatatggaaattatgtcgatcctgagaatatgaaagatccaacctttaaaagtctagtgtacttcatgttggccccaacactttgttaccagccaacttatcctcaaactacatgtattagaaagggttgggtgacccagcaactcataaagtgcgtggtttttacaggcttgatgggcttcataattgagcaatatataaacccaattgtgaagaattccaaacatccactgaaagggaattttttgaatgctatagaaagagtcttaaaactctcagtgccaacattatatgtatggctttgcatgttctattgcttttttcatttatggctgaacattgtagctgaactcctctgtttcggtgaccgtgaattctataaggactggtggaatgccaaaactgttgaagagtactggaggatgtggaacatgcctgttcataagtggatcatcagacacatatattttccatgtataaggaaaggcttttccaggggtgtagctattctaatctcgtttctggtttcagctgtattccatgagatatgtattgcggtgccgtgccacattttcaaattctgggcattttctgggatcatgtttcagataccgttggtattcttgacaagatatctccatgctacgttcaagcatgtgggcaacatgatattttggttcttcagtatagtcggacagccgatgtgtgtccttctatactaccatgacgtcatgaacaggcaggcccaggcaagtagatagttcggcagagacatgtacttcaacatcgaccatcagaagcagactggagcgacgcggcaggaagcagcagtagcccctcacttgccattgtttaccatcagctagcagctggtcagcctgaaaatgcttctattccaggcggccgtgctgggatgcagcgtgtacattaccagcgatgcaacgtcaacggttaccaagcgcggataagcagtgctcgtggcatgtgaactctgtacacattgaagtctatatgtccgcggtgctgtgtgcataatgtcgtggtagatgtaatatgtacaatgtatgccacgacttaagaggtcaaaatgaggctcacgtcttgggatggagggagaacgactttcaaagaacagacatcgagactcgatgaacttgttctgagccggtaacttcttgtgaccctgtcggctgtcgcgtcgtgtaccaagagcctggttggtagggattgttgtcggcttca

SEQ ID NO: 61912 - DNA, 898 bp, Zea Mays
agattcagcccacaaggccataacaaaatagccccgccccccctcccctagggtttcactacatatgtaaccctctcgcgcaaacactcctctttccgcgccgcctcccctcccgccctcttgctccgccggcgcggccaccgccaccgccaccgcaacagctagtcagcagatcgtaaccatggcggattcgaaggccgctgcggcggtgacgctccgcacacgcaagttcatgaccaaccgtcttctctcccgcaagcagttcgtgctcgaggtcatccaccccggccgccccaacgtctccaaggcggagctcaaggagaggctggcgaagatctacgaggtgaaggacccaaactgcatcttcgtgttcaagttccgaaccaacttcggaggcggcaagtccaccggcttcggtctcatctacgacaaccttgaggccgccaagaagttcgagcccaagtaccgcctcatcaggaacggccttgctaccaaggtagagaagtcacgaaagcagatgaaggaacgtaagaacagggcgaagaaaatccgtggtgtgaagaaggctggagatgccaagaagaagtaagggaggaagttacttgccttgctctttctctcatcataggctttggtttgtttagggtggggctccttccggcaatgctgaatgtttagttagaagtagagaagattttgccaattacccatcatgttgagtttctcgtcgcaccttctgttcagttttgaggcactttgtcagacacaagaatatatatatacctggtcatcacggcttttgtcctgctattatcattttgatttcagttttgtgcactcggtacactgaagttggatgcaaagcttctgatttgattaggtttatattaaaagattt

SEQ ID NO: 61913 - DNA, 1582 bp, Zea Mays
tcctttaactcctacacgttagagattatgaatgccagccaacccaatgggcttgtcgttcctgatgcaacggtgcatcctgttaattcaacatccgatgttattgagttaatgagaataggacatgcaaacagagcagtgggttcgacaatgttgaatgaaagaagcagcagatctcacagtattgttaccatacacattcgaggtgtagatttgaaaacaggagctactctgtgtggtgcactacatcttgttgatcttgctgggagtgagagagtggaccgatcttctgttacaggcaatagacttaaagaagcacaacacataaacaaatctttgtccgctcttggagacgtcatattttctctaccgcagaagaatgctcatgtaccctaccggaacagcaaacttacacaagtcctacagagttctttggatcaacccagatgtctcatcttattcggagactttaagtactttgaagtttgctgaaagggtttctggagtggagctaggtgcctcaaaggcgaataaagaaggcaaagatattagagaatttatggaacagctctcactgctcaaacataaaatggcaaagaaagatgacgaaattaacagattacaacaactcaagacgcaaactccaagggtcaggactgcaaaacgtgcagattccccattgaaacattcgtcgtcgtccccaggcatatctaatttaggaagcaaaatccaacatagaaggacagtatcaagtggaaaggcaatgagcattgccagtagagctgggtctgataccttctctgacaccagtgacaggcactctgaatctggttctatgcagtctgttgatgatatcctaccacgtagggggattatgggtcttccgaagctctctattggtgaaatgggtcagaattctgctgaccctgagcttgtttgctttgactatgctgattcagaagagagattaagtgatatatcagatagtggtctttccatgggtacagagacggatgtttcagtaagcagtatagttgagttgacacgttttcaggagcaggaaaacatacctagcactctgaaagaacaagagagtgcacgaaaaattccaaatgatcagttgtccaaggtggccacccgagttcagaagacaacagtacccaaactagctcaaacttccttgtggcctaaactaagagatcctccagcccttagatccccagggagaatcacaacacaaacaatatctgtaccaaggacgtccatgacttcgaagagatggacataagtcaagtttgatcaacatgttctaacactagtttatggttttgtacagcacaatcgaaaagtaattcattccaattgatgaactttgtacagcacttgattctttcaggaaaaaatggcagttagttttctatatcttttttgaagatagattatatgatgttaactttctttgtgcatacacgatatccgagaagtttgctgattgttggataaaagtggtacttctcttgatattgttaatagaatcaacaattcttgcttaatcgttacaaaccaaaacaataaagaaaaa

SEQ ID NO: 61914 - DNA, 1765 bp, Zea Mays
atgacttttccatgtattgatgggtaagttaaagaagtataagctctaaaacaacctacatttggaatccaatggagtagttaagttgattcagtttaagtgaacatatatgtagaaactcaaaaattagttggacttccttttatcatccacgatgcactcttagttatctgtacattttataatagtatatccactcaaatcaatgacatatttcaaatggattggagtttattaagaacatcctctttttcctttaactcctacacgttagagattatgaatgccagccaacccaatgggcttgtcgttcctgatgcaacggtgcatcctgttaattcaacatccgatgttattgagttaatgagaataggacatgcaaacagagcagtgggttcgacaatgttgaatgaaagaagcagcagatctcacagtattgttaccatacacattcgaggtgtagatttgaaaacaggagctactctgtgtggtgcactacatcttgttgatcttgctgggagtgagagagtggaccgatcttctgttacaggcaatagacttaaagaagcacaacacataaacaaatctttgtccgctcttggagacgtcatattttctctaccgcagaagaatgctcatgtaccctaccggaacagcaaacttacacaagtcctacagagttctttgggcggccatgcaaaaaccttgatgtttgtgcagatcaacccagatgtctcatcttattcggagactttaagtactttgaagtttgctgaaagggtttctggagtggagctaggtgcctcaaaggcgaataaagaaggcaaagatattagagaatttatggaacagctctcactgctcaaacataaaatggcaaagaaagatgacgaaattaacagattacaacaactcaagacgcaaactccaagggtcaggactgcaaaacgtgcagattccccattgaaacattcgtcgtcgtccccaggcatatctaatttaggaagcaaaatccaacatagaaggacagtatcaagtggaaaggcaatgagcattgccagtagagctgggtctgataccttctctgacaccagtgacaggcactctgaatctggttctatgcagtctgttgatgatatcctaccacgtagggggattatgggtcttccgaagctctctattggtgaaatgggtcagaattctgctgaccctgagcttgtttgctttgactatgctgattcagaagagagattaagtgatatatcagatagtggtctttccatgggtacagagacggatgtttcagtaagcagtatagttgagttgacacgttttcaggagcaggaaaacatacctagcactctgaaagaacaagagagtgcacgaaaaattccaaatgatcagttggagaatcacaacacaaacaatatctgtaccaaggacgtccatgacttcgaagagatggacataagtcaagtttgatcaacatgttctaacactagtttatggttttgtacagcacaatcgaaaagtaattcattccaattgatgaactttgtacagcacttgattctttcaggaaaaaatggcagttagttttctatatcttttttgaagatagattatatgatgttaactttctttgtgcatacacgatatccgagaagtttgctgattgttggataaaagtggtacttctcttgatattgttaatagaatcaacaattcttgcttaatcgttacaaaccaaaacaataaagaaaaa

SEQ ID NO: 61915 - DNA, 2137 bp, Zea Mays
aaacaatgtcgacactttctacaagtggtttatgataaattctgatgaacctagtttgttacatgtattaattacttttctgatgagcctagttggatatgaagcattccctctaattctcaatttaggttgtttaggacattgacaaggtcttcaatatgactttgacttgcaatttagtaaaatatatactattttgatggaaaagcttatattatgaaagtatttttgatgatggaccaataatgtcaaccatttattatcaatatttatgacttttccatgtattgatgggtaagttaaagaagtataagctctaaaacaacctacatttggaatccaatggagtagttaagttgattcagtttaagtgaacatatatgtagaaactcaaaaattagttggacttccttttatcatccacgatgcactcttagttatctgtacattttataatagtatatccactcaaatcaatgacatatttcaaatggattggagtttattaagaacatcctctttttcctttaactcctacacgttagagattatgaatgccagccaacccaatgggcttgtcgttcctgatgcaacggtgcatcctgttaattcaacatccgatgttattgagttaatgagaataggacatgcaaacagagcagtgggttcgacaatgttgaatgaaagaagcagcagatctcacagtattgttaccatacacattcgaggtgtagatttgaaaacaggagctactctgtgtggtgcactacatcttgttgatcttgctgggagtgagagagtggaccgatcttctgttacaggcaatagacttaaagaagcacaacacataaacaaatctttgtccgctcttggagacgtcatattttctctaccgcagaagaatgctcatgtaccctaccggaacagcaaacttacacaagtcctacagagttctttgggcggccatgcaaaaaccttgatgtttgtgcagatcaacccagatgtctcatcttattcggagactttaagtactttgaagtttgctgaaagggtttctggagtggagctaggtgcctcaaaggcgaataaagaaggcaaagatattagagaatttatggaacagctctcactgctcaaacataaaatggcaaagaaagatgacgaaattaacagattacaacaactcaagacgcaaactccaagggtcaggactgcaaaacgtgcagattccccattgaaacattcgtcgtcgtccccaggcatatctaatttaggaagcaaaatccaacatagaaggacagtatcaagtggaaaggcaatgagcattgccagtagagctgggtctgataccttctctgacaccagtgacaggcactctgaatctggttctatgcagtctgttgatgatatcctaccacgtagggggattatgggtcttccgaagctctctattggtgaaatgggtcagaattctgctgaccctgagcttgtttgctttgactatgctgattcagaagagagattaagtgatatatcagatagtggtctttccatgggtacagagacggatgtttcagtaagcagtatagttgagttgacacgttttcaggagcaggaaaacatacctagcactctgaaagaacaagagagtgcacgaaaaattccaaatgatcagttgtccaaggtggccacccgagttcagaagacaacagtacccaaactagctcaaacttccttgtggcctaaactaagagatcctccagcccttagatccccagggagaatcacaacacaaacaatatctgtaccaaggacgtccatgacttcgaagagatggacataagtcaagtttgatcaacatgttctaacactagtttatggttttgtacagcacaatcgaaaagtaattcattccaattgatgaactttgtacagcacttgattctttcaggaaaaaatggcagttagttttctatatcttttttgaagatagattatatgatgttaactttctttgtgcatacacgatatccgagaagtttgctgattgttggataaaagtggtacttctcttgatattgttaatagaatcaacaattcttgcttaatcgttacaaaccaaaacaataaagaaaaa

SEQ ID NO: 61916 - DNA, 1813 bp, Zea Mays
ctcaatttaggttgtttaggacattgacaaggtcttcaatatgactttgacttgcaatttagtaaaatatatactattttgatggaaaagcttatattatgaaagtatttttgatgatggaccaataatgtcaaccatttattatcaatatttatgacttttccatgtattgatgggtaagttaaagaagtataagctctaaaacaacctacatttggaatccaatggagtagttaagttgattcagtttaagtgaacatatatgtagaaactcaaaaattagttggacttccttttatcatccacgatgcactcttagttatctgtacattttataatagtatatccactcaaatcaatgacatatttcaaatggattggagtttattaagaacatcctctttttcctttaactcctacacgttagagattatgaatgccagccaacccaatgggcttgtcgttcctgatgcaacggtgcatcctgttaattcaacatccgatgttattgagttaatgagaataggacatgcaaacagagcagtgggttcgacaatgttgaatgaaagaagcagcagatctcacaggtttattttcatgtcccataatctagttacattatttattatgattattttaaaatagagatactttgattacttctgcagtattgttaccatacacattcgaggtgtagatttgaaaacaggagctactctgtgtggtgcactacatcttgttgatcttgctgggagtgagagagtggaccgatcttctgttacaggcaatagacttaaagaagcacaacacataaacaaatctttgtccgctcttggagacgtcatattttctctaccgcagaagaatgctcatgtaccctaccggaacagcaaacttacacaagtcctacagagttctttgggcggccatgcaaaaaccttgatgtttgtgcagatcaacccagatgtctcatcttattcggagactttaagtactttgaagtttgctgaaagggtttctggagtggagctaggtgcctcaaaggcgaataaagaaggcaaagatattagagaatttatggaacagctctcactgctcaaacataaaatggcaaagaaagatgacgaaattaacagattacaacaactcaagacgcaaactccaagggtcaggactgcaaaacgtgcagattccccattgaaacattcgtcgtcgtccccaggcatatctaatttaggaagcaaaatccaacatagaaggacagtatcaagtggaaaggcaatgagcattgccagtagagctgggtctgataccttctctgacaccagtgacaggcactctgaatctggttctatgcagtctgttgatgatatcctaccacgtagggggattatgggtcttccgaagctctctattggtgaaatgggtcagaattctgctgaccctgagcttgtttgctttgactatgctgattcagaagagagattaagtgatatatcagatagtggtctttccatgggtacagagacggatgtttcagtaagcagtatagttgagttgacacgttttcaggagcaggaaaacatacctagcactctgaaagaacaagagagtgcacgaaaaattccaaatgatcagttgtccaaggtggccacccgagttcagaagacaacagtacccaaactagctcaaacttccttgtggcctaaactaagagatcctccagcccttagatccccagctacaaagctggtcgatgcttcgagggtgacgattggtgctgcaacgaaagactcaactatctcatagtcgt

SEQ ID NO: 61917 - DNA, 649 bp, Zea Mays
gtgagagtgagaacgatgtcgccaatcttgacctctccctggttgtcatgcacgcgggataatgccaggtcgtggtagagcaggcctagccggagtgcgaggcaccgggcgccacgaagctcaaggccatcgtcgccatggaggtgaggtggaaagggcctagggcctctgcgctcgtctcgatgctgcgtgccgtgacactgggcagggccgccgtcatcgtggagaagcgaggaggatgtggaccacgagatgggagtgagattggatttgaggcagggtcagggtgaggagaggactggagtaggagaaagcccgcagcggatgcactggaggacagagaggcagcgccggcgcaactcagggccacaattgttgtggaggtgaggtgaaaggggcctagggcctccgcgctcagcatagtgacgcccttgtgctcctcctctcatgtggcagtggcgcgtgggcagcaccgccgcctcacctgagcatcacgacgatggcattcacggggatttaaggtcgagcacatccgagcgaggatggaaggggatgaggggcaacatccacggcggccggaaggcagagtgcaggcaagcaagaatggaaggggagcgcggtccaggggcgacgatggaaggggggcacg

SEQ ID NO: 61918 - DNA, 2056 bp, Zea Mays
gttttgtcatgttatttagattctagaataccaatatacatacatgtatgaaaattacccaatgccaccattagtgcaaacccatcgtccaagcttgtcagatcaatcaagctagtaacttgctccaaccaaccatgagagtttatagcacataagtgcatgtctgaccgactcaatctatatcctttggctcatgcaagagttagtggcagtggcaacttcagtttccatcaaaacactcttccaaccatcaaatttccttgcatacatgtcttcccggatgaacctccatgtccactccctgtagcttcttccactcggcagggtcggactattcctggtgacctgcttgggtaaagtggctccatgtcttattaatcatagccaatctgaaaaatcacaacccccgcaacatattagcagaaatgaaaatattacaagatgtcatcagtctttaacaactacttctagaggagagtcaccacaatatacagtttaaacaatattagtaggaacaaaaactcatgatccatctagtgaatcaaatgtcatcaagcaatctgtacaaatgctcggactaatccaaagctccctccgaccctaacgtggggaggcaaggaacatgtccagccttctggtgtttattttaacctacatcaggccttcaaaattgaatgtgcaaagatctactggaaactgctagcaagagagtgccgatgaatgtctttgtgcaggcatggattcctacatatctaagcccgtgaacttccagaatacaaaagaatgctgcaatggtatttgatgtctcaatgacatttcaataatttagttcacaagtattacaaaatttaggagtaaaaattaccagtgcttggtagcctatcaaaagggccaaaagcattgcgccctacaaagaggaatggatgcataagctgcaagactactctttatgcttacacaggataaaaacaatatgttgataccagtaagttcaaacaaaaatactatgttattcatggacaaagtaaataaactaatcagttatcagtggttggataaatgaaatacatgcatgatatcaattgactttagataaggagcattcgataaaccaagcgaattgctaaaatagcacgtattactctgtaatcaaactatctcaagggctgcagattgtagtgcattgactgaagattaatgaaagacaaacttcgttctttgctctctcagggcatatccaacaatataagctagcactaccatctaagctgccaaacagggaggagacaaacatcaaaaagtctagtttgcagtttgtttgtccacctaaatttagtaaacaacacaaggaacatgaaagtgccaagcaaagaactatatactcataaatggccctatatcaatagtgttattcaaagatacatatatatacagctaggatacttcacatgttaaaacttaaatgcagctaacaaaatttagtaagaatcgatgcagcatatatccatcaagaaagtgcaaaaaatgttgtaacagcctgtatcagttcggctataaaccgaaggcaccctgacaaggttgtttttcacttagtgacagatgagttgaattgacgcttcaactacaaaactttgtaaaaaatagtacatctatggaagagaagggtgcactaaaaacctgtaatatataataaaacattgttatgtataagttgttaatcaaatgcgattaaattaagtcggctgtatgatcgtctgtaaatgcaagatcaattttcaggcccgctgcaacggtgtaatccatgggtactatatttttcagaaatcaggaaaatcatttcaaacttcaacctgaatcacaattgttgtgaaatggctcatcgggtccaaggatcttcttacagagatcactttcttgtagatatgtatctggtgtgtacactcattgtgcgggtactcaaacgtcaccatctcgagcacgcacattccaaagaagtagatgtccaccagctagttgtactcctcgtacagctctggtgccataaactccggtatac
